United States Patent Application Publication US 2007/0083945 A1 - sequence listing, part 5

SEQ ID NO: 27327 - DNA, 246 bp, Glycine max
  unsure (1)..(246): unsure at all n locations
gcttctgggctgagctnggaatngacattgttattgaggtttattccccatttcttgacttatttcaaacacgatccaatattgtttacttattgaagagctcctaaaaagaacaatgagtgagattttgttcacggaaccggagtgtttgtggatggccctgtggctggcgaacacatccaagcacgtgctaaaaaggttatcatcactgctccagcaaagggtgctgatattccaacttatgtt

SEQ ID NO: 27328 - DNA, 424 bp, Glycine max
agcttgaactacccgagcactcgtgcatttatccaatgtttcattgttcccttctaaagccctttattggaccactagacacggtgcagattgagaaactgccaccaagggcggttgataatcagccagttcccatacccttggctattctgggccacaagactctcccgactaaccacgggccaaagcagctggtcttagtgcagtggcagggacttcaccctgacgaaacgtcgtgggaagactggtcacgctttaggagctttatcaccttgaggacaaggtgttgtttgaagcacgcgggaatgttacaagtagcagctatgaaccgcaagcaaccaggcccaacagtgataacagcaaggagttagtagcaggaaggcccaaaagaggaagcaacactcctagttatctgaaagatacg

SEQ ID NO: 27329 - DNA, 492 bp, Glycine max
  unsure (1)..(492): unsure at all n locations
ngctccagacccatgaggtaatatgcgtctagctaatgactttacacgagcatttactgggaggtaacccaactctttntattttcattaatcattgcatatagttaggattaacttgtttatgattgcttgagtaagtcatcaacatgtttagtgttgaaaatggggttgtttaagcttctttgaagttgtggatgagaagtaacttagaaaattttttagtcatccacttgcttagcgtgccctgtgtgctaagcaaatcattatctatgcgctaagcgagtcattattcgcgctaagcgcatcatcccctaccaattggctgagggggtctcgctaagcaaaaccactgtgctaagcccaaaaacttctctagaatttcatttaatggaattgggctaagcgagttatctcgctaagtgcacaacatcgtctcgctaagcacaaccttgcgctaggcacaattccttctttgtttggaccttcatgtaa

SEQ ID NO: 27330 - DNA, 405 bp, Glycine max
agcttgaaggactacaaggacgatgagtttctggagtcaggctgtaagtttctgccatgtaattcaaaatgattattctcatgtaatcagaaggttgtttggcttttgtagtatatgtttagcattttcttgcttggtttgtttctactttatgtttttatagaacattggaacttggaactgtgaaaccatatttctcttgtagaaagtttgatccttgttaagttcctttatcttaaacttgttcataagttcaaatcatttccttgttgctatctgaagtttggaaccaacggcagactagcataagaataatttaaaacttaagtggtgatttgcacaattaggtttctgatacttatgttgtgtagttgaactttgttctttgtgaaggtactggtgctc

SEQ ID NO: 27331 - DNA, 441 bp, Glycine max
gatcatatgatatatatatacatacatacactccaactatagaggtagtgttatacatataaggatgattcagttagtcatattattttctgcatctttagcttaatgtgtttttttttacagcagtaaaacaagctctttactattgaaattgagagtgttttaacaagacacattatattattcttcatttttgggtttatctcttttgtttaagagctataaaattacttattagaaaatgaaacatattgtgtgtttatgctcaagttatagaacaaaccattccaacactaggcccaaatgacccaagtgagcccattggctgtggagaaacagatggcgataggggcatcaaagatctctgtctttctgatggttttgagcagtctgaccagattccaccagatcttgatccttcaaatccttgttgggattcat

SEQ ID NO: 27332 - DNA, 430 bp, Glycine max
agcttccttggggccatttcctgcgagttttgacatttgggaagttagttttacaagataatgcttatcttaacataaaaatgacatgctaatccctctgattttaggacgaactcatgtaatctatttatgcatacgcgtatgtgtagaatatcctactatttatgccaacatacaaggacatccgacacattctaattgtcacacatacatatgcattttgaaaagaacatacacttttacgctcaaggcattgcgtcaaaatttacacttaattacatcctaaacatttgctattacaaactacctacacatatttgaaatatatatcatacaaacttttattgtttcactcacacttatgcatattggcaagctatttgcattatgtacacacttgcatttaaaagggaattccgtgctatcatac

SEQ ID NO: 27333 - DNA, 489 bp, Glycine max
  unsure (1)..(489): unsure at all n locations
ngaagtatctgatatcctcagtgaatctgttatgattatttcataaatctcaacttcatcatcttcacctttctcacttctattcctctcttctgtgtcatggtttactttgaaatttacctccaagaaatcctggttaaaacctccaatattgttaacctgccacatgaatcacatgatgatgatttcacaatctttgctgactatgacttcattgattatcgcaacagctacaggccagatcttattatcgacaaattcaacaaggattatgtcctgaagttgattctaattggattcatttacatggtgccactctttgtcttatagtttgtgtctgcaattattactataactntggcttcaaagttgcattccaaagagaagaaaatgactctcaaggagatggttcagaaaccctttgacctgtcaaaactgagaggctcatntgtcacttctgtctatgttctcttcttgacaactactcac

SEQ ID NO: 27334 - DNA, 418 bp, Glycine max
agcttcagcgggatctacagacccttgttatcactctacgatcttaaatcaggaaagtttcacttggtcacataccaaagtgtgacaatccattgccatccttcaatagggcgcacgatcgatcccaaagccttatatcttcttgttgtgtagaataatcgaaaaaaaaaaagaaaggggaaaaccctaggatcaatattttgattgattgattaaatgtcaaatggctccattgccgtcactccaaaattgtcaagtgactaaatcaaacaaaacatacactctgagggaatccttgaagagatttgtaagaagataggatgaggtctcatgagttatcatgtcttttagaaaaagacagtcaatctgtgttttccacaaaaaaaaatgaaaaaaagcataaaaagaaggaaaaaaa

SEQ ID NO: 27335 - DNA, 485 bp, Glycine max
  unsure (1)..(485): unsure at all n locations
tatgcgcatatttnnctacgaacgttcacttgcacaagatattttattaactaagaaaaatgcacccatatacaatcaaggtagcttcattacctagattatttacacgtacttccaaggtgtatttgttatttacatcacacacgcctccttggctaaatttacatacatgcatactcaaagcattntggggtaccaaaaattgcacatgcgctcatcttggtatttctaatacctatacatatacaaacttcatgatgaatcttgactacctacgcaataaggtgctacatttcatgctttntttttcaagtttttgctacctaaagccacatgcaaattcaagcatattttcctttgctgactaaaattgtattcaaattagaagggatatattntttttgtaatatgttttcttcacataacatgcaacatatttatatatattttntgtgagacattntgactaccannaaatatatata

SEQ ID NO: 27336 - DNA, 415 bp, Glycine max
  unsure (1)..(415): unsure at all n locations
agcttccttgcttcgngaactttgatcttatattgtttgactgccaggagctcgccagtttaggtacgtcacaggttctcactgactaactacgcccgggttgggtcgggattagccaagcttggttttgggcaatagcaccccacctgacgtccccaaggtctcctgacccccgcgacatatctccaggtaccactctgtggtcaacaaacaaaagtaggaagactgactcttccacgctttctcacatcaagcttagtggattatggggcacccgtcatatgtggtactatgtggcgatcgggcgatggcgcaaatcaactcttccatttccacaagtcaggcacaagcataccatccccagttgcccacctttaacttgagctcacgcattcctacgtagcccttatcctcg

SEQ ID NO: 27337 - DNA, 547 bp, Glycine max
  unsure (1)..(547): unsure at all n locations
cgcccccatgacccccatggattgacccgcttttattaccnctgaagctcccatcncgtggtatcacgagcatctgaatctacgagatgattcttctgcttgtctgtagcttttgtatgagagagagctatgtaactacgtcgctctctatcttatgacccatgcttatccaacattatcttgaagtttgctgctacagctactaaatgaagctaccttatctctaaatagactcatatgtaccactgatcgtgactttcatgaatgcgaatcttgtaaaaccactctcgaatctcagcttcgcgcccattttacgtactaccaatntgtattcatacatctctctttctcaacctctatatctaaatcattgtaccatacattgacaacttcttatcacacgctcatctaagtgggagaaacttattccttcatggcttataccctagtggatggcgacccctcgtaccatttgcnctatgtctgcgctgcatctacatggtggtaaagaaccatagaaagatcttatcgtatctcaaagaccacg

SEQ ID NO: 27338 - DNA, 168 bp, Glycine max
agccctttattggaccactagacacggtgcaaaatgggaaactgccaccaagggcggatgataaacagacagttcccatacccttggctattctgggccacaagactcttccgactaaccaccggccaaagcagctggtcttaatgcaggggcagggacttcaccctg

SEQ ID NO: 27339 - DNA, 343 bp, Glycine max
attcttactatatattgaacgcggccttgatgtgtttattgcttccatctgcatttaattattgcatgcttgtggactgatcacccatttgtgtgtaaagttagaatttttagcattacgaaatgttctgaatacttacaactggatagagcatggctagataactgtatgtttggacacggagtgtatggatttagctcttaatatgttgtaatcgtaatgcgattcctttaggctaagttcgacgagacatccgagaatgaggcttaaatagaattagcccattcacgcgaagaatccgtcgttggcgtatttgacctcatcatagaacacagatattacc

SEQ ID NO: 27340 - DNA, 419 bp, Glycine max
  unsure (1)..(419): unsure at all n locations
gcttatatatataaaaagatatatcctttacttatttaaaccaaanacaattttgatatgtgttggtttatgtaattttgaaataaaaatatatagaaagataaaacttgaaaggttatatatagaaagttcataaagtcgtaaaagatgaatatataaaaatgcgtcaaaagtacatgatgaagatagggtgaacagaagttgggttaagtgaatntttgacaacggaaaccaaaataataaaataaaaaaaaaaagaaaaaagctatggaaaacttgcgtgtccccaaagctatggtttgtagtctgatgcagagctgctgagataaggatcatcagatcgaatatcttcctccatactgccttcttctctgactatatggattccaattgctntaatgactgagctctctaactct

SEQ ID NO: 27341 - DNA, 422 bp, Glycine max
  unsure (1)..(422): unsure at all n locations
ntatgcaagtcaattntcaggaggcatctcggagagaatctttntcggacttatntgcgcaaaatctcttgaactaggaagatgttgtccatcatctttctgttcttaatgaaagcagtttgagtttccccaataatagtctcaagcactggggctatgcggttggccagaattttagacacaatcttgtataacaaattacagcaagatatgggtctaaaatggttaacctgngaggcctgatcatgcttaggaataagcgcaataatagcatggttgagctactttagaatttttccagttgtaaagaattcattaaccgctgcaaagatatcatcaccaatgatattccaagccttcttgaagaataaaacattgaaaccatctggcccaggagctntattgttattcatcacagaaat

SEQ ID NO: 27342 - DNA, 401 bp, Glycine max
  unsure (1)..(401): unsure at all n locations
agcttgtgctaagaangctttatccatttcatcatattnnaagaaaattgaatgtcatgatccatcacttctctgcatatatatttagtattaagatgtgtaccaacaatcctaaaatgttctgtgcagatattttccattgaaagacactacacaagattagagactccgaaattaattttgttttatgccaattgctattatgctttgttgtgtcttgctaaatgcatatttaatttgaagcaacttcattatttttgtgttatctgttaatggtttaattggataatagtttacaagccacgtaatatataatttacatatatgtgcagagatgtaatattgtcatgtaaattttaatatttaattattgttatgttagagtatgtgcatgcaattgt

SEQ ID NO: 27343 - DNA, 478 bp, Glycine max
  unsure (1)..(478): unsure at all n locations
tcactctcacttccgatcnttgattcgtgtgaagacacattatctntaaactgagcttgaaagtgttgctttgacaaatgggtcactgtcaaaatatcttcttcacattcaaacacttgataattctctggatccgattagtgtttccattactctttaagagcatctcgatgttatcctcgaaggacttcctaaggagtatgagtctacaatgtctctgatctgcaacaagtttgaacctctcactattgatgaggttgaaactttgctactaagacatgaagctagtcttgacaagttccacaagaagaaatctttggtttctgttaatctaactgaaggtgtttcattatccaattctcctattgtccaaatagttcaaatccttaattctcttccaaattttcctaattcttcgaatagcaatttgaacaataggtctattgatgcacatcttacttgtgaaaatacaacaata

SEQ ID NO: 27344 - DNA, 256 bp, Glycine max
acatttgtgcttgtcaaaatcgttcctaatagtctttcatacgacctatcttaattcttttcttgagacctttgcctatgcttgaaatattgctgtcttcattcttgaatgatctttataattccttggcatcagcacaataattcttgaagctatggttctacaatctcctccttttttatgatgacaatacctggaatcaacgaagcatatactatctgtattcggctgttactcattctaaaactcccttatc

SEQ ID NO: 27345 - DNA, 241 bp, Glycine max
  unsure (1)..(241): unsure at all n locations
atgtttttttgcttactctagctctttgttcggtgagaggtgtataataacttgctcttcatcgtagtccccagaatatcctccattatcttgctgttagagagctgtacagaggagattgaaataaatatacctactaaatcttaaatctacacctgnacttgcattcctatagatcagaagttggagatgcactcttgcaacgtgggcacgcgatgacttattgttctatcaaacttca

SEQ ID NO: 27346 - DNA, 405 bp, Glycine max
agacttggtgcattcagattgctgaaataaatgaacaaaatatgattcattaatattataaacatgacagaaaaaataaatataaaaaaatttaaacaaataagaatgtacctgaaagtaataccttaagaaattccaacactattagtcccaacacttgaagttccaatatcaacagtacttaaagtcaaaccaaacaactttaaaaaattgatcgattcagtttggttttgaccgaatttataaatctaaacccatgactcaacctgtacatgaacagttttgatcggttcggttcggttttgacccaaatacataaataactcaacctaaactgttcggattggttttggtcaattcgggtttgtggtgacttgtaccctgaacacccttaaggaaagagaa

SEQ ID NO: 27347 - DNA, 457 bp, Glycine max
  unsure (1)..(457): unsure at all n locations
actcagctagcctagaattaacaaggaatgttatcatatattcaattttcattaagtaggaataatacttgcaaatgaaccacacctgcataactgatgaagagctgaggttcttaaaaggtaagcttttgaaagggttgggtttacttctatcgcagcatttagatcatcaagtgcctatatataatctttcacttttatgttctgtgatgcctgctcaaacaactcagcaacattatcaggttttcgatctaatcacatccaaaaaaacaaaacaaatacagttcaggcctcgaagaggcgtangaggtgcatgttgcangtgttgccctcgtaccacaccgaggagacgccaacctgcgacttggccatgttgtcctcggagagacccacaccatggagcatggcctgngaagtgccctangacttgnngctcgtgatgcggaagttgtacctg

SEQ ID NO: 27348 - DNA, 422 bp, Glycine max
  unsure (1)..(422): unsure at all n locations
tctaagtcacctgcggcatgcaagcttcaggcaatcctacnncagagaatttcacttttacatctattccaaangctgagntttctacttcaaatgctactgtcaataatacttctaatattgtttcaaattctgatgttacctcttccagtagtgctaatctttggcatgctaagttaggtcatcctaatgagcatgtaatgaaaattattctcgaatagtgtaatatttctcaactgaataaaaacatcacagagttttgttcctcttattgtatgggtaaagctcataggttaccctctcacggctcaacttctgtttattcacctttagaattcattntcactgacctatggngaccctgccatgttacctcttatgttggctatacatatgatgtttccttcattgatgctctctct

SEQ ID NO: 27349 - DNA, 482 bp, Glycine max
  unsure (1)..(482): unsure at all n locations
aggtgattcanaggtgttncgatgatatctttgatgataataaaagaatttgactaaggtgatgacaaaaagctcaaagatcaatcaaagaacaactcaagtgaatcaaagatcaatcaaagaacaactcaagtgaatcaagaacaattcaagagttcaagataagaatcaagaagaattcaagactcaagaagaaagtctagagtcaagattcaaggttcaagatctcaagaatcaagatcaagattcaagactcaagattcaagaatgaagagaagactcaatcaaggtaagtattaaaaagtttttcaaaactttgaatagcacatgagtttttgacaaaaccttctaccacagagtttttactctctggtaatcgattaccagatcgttgtaatcgattaccagtagcacaattgttttgaanaagttgtcanattgaatttacaacgttccaattaatttcacaaagctataatcga

SEQ ID NO: 27350 - DNA, 476 bp, Glycine max
  unsure (1)..(476): unsure at all n locations
gcttgttagaactatcatcacatgatgctntaatggcacanaatatttagctttctatgaaactttatattntaacagaaacacttggtaagttgccaactaaactgtctattggtcaacctacacattcttccattttgcagattacaggttgtaccatctgtggtgaggctcatgaagtangccaatgtattcccattgaagaaaacactcaagaagttcactatatgggaaatcaacaaagacaaggatatacttaaggaggattttcaggcttccagcagggtccttataaccaacaaggacagtggagatcacaccctggcaatcaattcatcaaggaccagggtggaccttccaacaggccaattcaacaagggcctaacatctttcagaggactactaagctggaggagactntgactcagcttatgcaagtaacaatgtctaatcataaaagcaccgagtcagcactg

SEQ ID NO: 27351 - DNA, 298 bp, Glycine max
tactaccttgtctggattctacgagagcatatgcgtcacgaacattactctagatccgccggagagaacatgaatacaatgacaagaccaatgataatcatcaccacacacgacaaatacgtagtatgtctctcaaaccagcacaacgaacaaaatatgttgcgtcgttacaatatggtcaaaacgcaaatcaaaaaaacaaaggaatagcgataaggctattctttaccacacatgaaaagatcattgggattagcctaggacctgcgctcacatactcttcgatccaatgcgttca

SEQ ID NO: 27352 - DNA, 392 bp, Glycine max
  unsure (1)..(392): unsure at all n locations
agtccttctgattctatttatgcatttctgacttattgtnttgagatgaagttcaaagattggacctcttgctagttcttattgatgaatagcttaaacacttgtgcttgaatgaaacaaaagttttgagactgtggtttaagctgctttccttgatatatgtcttatgcctaacttcatctaattgtacaggttacattttattcttctctttgaacaactgcatgctttgtgaaagacaagtgatgagggcattttggttcatccttttatcatgcaatcaatcaaaactgtaaatttgggggagttcttagtcgatgaatacgactaacttttgtgtataaaacctgtgtaaatngtatcaaaatcctccacattatggctattttgta

SEQ ID NO: 27353 - DNA, 418 bp, Glycine max
  unsure (1)..(418): unsure at all n locations
agcttgaccaataaagacagtatcatattatactgttgganatnaataggctctttctgttttcccaccaagtagcttttatacagatttttcgaaatggcctctctcatcaatccagtgagaccttcacccacaatattaaagagcaaaggggctagagggtccccttgtctcagacctcgagtaggggcaaattcattagtagggctaccattcactaaaatggaaatagttgctgattgaaggcatgcagcaatccattgcctctatttagtgcagaagcctaatcttgacagcatatagtccaagaaagaccaagatacagaatcatagcagatttacctgggttagtttactaaagggtaaatttcaagtgctatccttagtacagaatttcatagctnttgttgaaagacag

SEQ ID NO: 27354 - DNA, 450 bp, Glycine max
  unsure (1)..(450): unsure at all n locations
ctaagctactaaaaaataaaagatgacncatgttctaacttccttattatctttnggaagaagggacctacaaaaattaaaagtgacttgcgctttttatgagatcaacttccccttgaaccttaatagaacttctgttgatctcataaatgccaacccgcaggttcaaaaaaaaaaaactaagtgtgcaataaaaatgtcatatttcaactagtcaattttgtttgatgaatttaaaaagtaagcaatagtaaataggtgagggaaaaggtcaaaaagaaaacaattcaaaacttgtaaagcagagcagtttccccgttggatactaaacctcactcctggtgatggatgaccctaaatccaatttttccactaagtatggactcattttggcacctaanacaacactcaactgacagatacaaacctgaagaagccagatcctatctt

SEQ ID NO: 27355 - DNA, 402 bp, Glycine max
  unsure (1)..(402): unsure at all n locations
agcttgcaccgaaaannnagttattntatgttaatantaagagngcctcgccggttgaaaagtctactttttaggcgaattagttattaaaaattattataaatataacgattttgtcaagcatacaagctagtacttatttaaaagccacctgaattcactggaattggtctcatttgaccatgcatgtcatcattaaagtcatttcaaatggcatttatagtttccaacacttatatgcaagatgtatttataaatttatactaatgctcttttaacgtcgtagtaccagtactagaggtttaaattctttataaaaaaaataaagaaagaggtatgtagttntaaactcgcgtttaattaatatacaatgtcgatatacacaacaagtntacacagata

SEQ ID NO: 27356 - DNA, 473 bp, Glycine max
  unsure (1)..(473): unsure at all n locations
cttgtgcaatcgattaccacttattggtaatcgattaccagtgactacttctgaanaatcaaaagatgtaactctntaaaaaggttttgactttttcaaatgggttttaagtttttctaaaagttataactcttctgaatggtcttcttgaccagacatggagagtctataaaagcaaggctttgttttacatttcaacaatcttgaacacttatttcatacaatcctttacaagccttgaatctctttgaacttcttcttcttctttgtaccaaaaaagctttctgaagttttatggttttccaaaccttgaaaacttgtgttattcatccttttcattatcttctccctttgccaaaaagaattcgccaaggactaaccgcctgaattctttntgtgtctctcttctcccttttccaaaagaacaaagggactagccgctgaattcttttgtgtctccccttctccttgtc

SEQ ID NO: 27357 - DNA, 348 bp, Glycine max
  unsure (1)..(348): unsure at all n locations
agctgggctgcgggaaattcttacgatgatcatatntgcacataaatacacaatctgttattaaatgtaaaaacattaatgtgccttcatagtaaagcttaagcttttgagatagttagtctataacatactattagagcctctatgattcagtggtctagagttcaatcattactgtctccattgtgcatggcccacacttcatatctaaaggacttgtgttgggggagtgttaaatataaaaatactcgtgacttttctcaaaatcttaagctttggggatggttggcttatcctaacattttttaaaaaaaaattaaaggagcacggaaaaaagagggggggggg

SEQ ID NO: 27358 - DNA, 484 bp, Glycine max
  unsure (1)..(484): unsure at all n locations
actaagcttacaacggatgatatagaattatttcttatacacttcagattatatttaaacttgaatagagtaattccaattaactttgaaaataaatcatgatacaaataagagacacaaagtaggaatagagaaagtgggggatatgtaacacaggtataacaaaagtagtgaaacatctttaaatcaatttcctcagcaagacatctttggcaaatagtacaaaaaaantaaatttggtaaaaaaaattccaattaggaacaattaattactcaagtatttaacaatattcaaagagtggttaaaatgtaaccatttagtgattgaaccaaccacttgagtgttttatttttcaaaataaataaaaaccatcttttagtaaagaaatacactcacagctgtaaactgaaccatagtcatcaatggttgcattagtaattctgccttcctctttgattgtctntgagaattaagttctctact

SEQ ID NO: 27359 - DNA, 409 bp, Glycine max
  unsure (1)..(409): unsure at all n locations
cttgagggcacagttatctcttttatagtggagtaccgataatgtgtctaccatcacgattatcgtctccctttccattattgggggtaccacctgngccgccagatccctccaccttttgggcgtgttctttgaaagatccgtccccctttttgcacatgttctgtagttgcatcctattcagaaccatatcaaaattgtactgatactgcctaacacaggcaaccattaggtccttccaagaatggactcgggaaggttccaagttagtgtaccaggtaacagctaccccagtaagactttcttggaaggaatgtatcagcaattcctcatcttttgcgtattcccccatcttctgacaatacatctttagatggttcttgagacangtagtccccttgtacttgtc

SEQ ID NO: 27360 - DNA, 455 bp, Glycine max
  unsure (1)..(455): unsure at all n locations
ngagccaatgtaatttgtcacaaataacattcaagaaacctttctatttcctccactctacttgaatcccattgtttacatccccttctatttcttcatcgtgttttgtatgattgacccaacatacttaaaccatgtgacttgtggtaaggtatggtttctacttttcacctgtacgttatgattgatgcacttgctaaagttacattccatataatccatcctactattacttaagccatttgcttccatagcttgtctccacatctaacttgccatttatttcctttcttgactttctgctggacttcccctgtggttactttntgttccactttttcttcctacaaatatattcaagggaaatctggtttttcggaaagcacaccggatcgtcaagtatttaanaattaaaacagatgaattcgagtatcanactcanggaaactagtcta

SEQ ID NO: 27361 - DNA, 304 bp, Glycine max
tattcatccttttcattctcttctccctttgccgcaaagaattcgccaaggactaaccgcttgaattctttttgagtctctcttctcccttttccaaaagaacgaaggaccaaccgcctgaattcttttgtgtcttccttctcccttgtcaaagaattcaaaacgacacagtctgagaattcttttgattcttcccattccctaatacaaaagtgtttaaaggactaaccgcctgagaattcttttgtatccccattcacaaagtatcaaaggtttaacagcctgagagctttgtgttaacaca

SEQ ID NO: 27362 - DNA, 260 bp, Glycine max
  unsure (1)..(260): unsure at all n locations
gctcgaggatnttaaacgacaataactntagactcggacgttttggttgagactttattatatcgacacgcgcgaaatagaaaggtgtagctctgaccatcttcgaacaacagaaaacaattactcggatgaaaggtgagtcctgctatatctcgagactctcgaaagcaaatgtcgaggatctatgtaaatggagacgacaaggaccacctactccgatgactgagcgagatccgcagtctttcgagacgcactaaaat

SEQ ID NO: 27363 - DNA, 412 bp, Glycine max
  unsure (1)..(412): unsure at all n locations
agctttntgctttacgctatatgaacattttttgcttccaacaatgagaaggtgaattcgtggttcttgcactttctcatgatttcgtggttctcgtgaaaggtaaggcacaagcaataaagggacaattagagtcttatacagggacggggtaatattaactgagaagtgttagaaatatattatttttaatagattaaaatttattgaaaaatataaattttttgtattattaaatatgactagttaagatacccatgtaatgtaaattttttgtattattaaattgaattatatgttttcaaaaaatagttaaatactattgaataaaagaaaattattaccgatgtaagagaaccattgtcaatgttaaactattaaacaaatgtaatataagaaatgttattctagt

SEQ ID NO: 27364 - DNA, 333 bp, Glycine max
  unsure (1)..(333): unsure at all n locations
tctacttatgtggcagggcggtgcttcttcaccttcttgtctcaaccgcgagctntgactaccgttcttcctttccgcgatgcttctctttatatctgcctgagtgggcttatagtctaacccatacttcccacgatttcctttggcatttatcaagccagttatgccgccgctatctttgcctaaacccattccggggtcgtaaccgttccccaacataactcgggtcatcattactgctgcatcggataggcaagcttgcccagagaaggagtccacggaggaaatgcttaccacctcanaagactggaaagcagtttctaatgactcctt

SEQ ID NO: 27365 - DNA, 338 bp, Glycine max
  unsure (1)..(338): unsure at all n locations
ctcctaactcatattcttacttgagcatcagagtcctttgttatgcaggtcccccctcctgtcaaaggtacctttccaagccgatgtgtggagttcgggaccccactcaaccacgtcaaccctgacatgtcacggttctagattttggtaagaacatttggcgcccaccatggggcaatgctaaaacctaccccacgacctctcgtcaaccatctttcattcatctatggttagcactcggtctgacctctaacgcgagaccccccttgcagactgttatngttattccgtagctatgacaaacacagattctatgtcatgtctttcctacttcctca

SEQ ID NO: 27366 - DNA, 413 bp, Glycine max
tctaagcaccgcggctgcagctgcccccactcgccaggcgagtgtgttgttttctccagaagcaacagccttctggaggaatcttctggagggcccaagtgggcctggttgctatttgcacccccatttttactaaatacacccccctgctttttttttttgcttcttttttcgtaaagttacggaaacttacgaatttcgtaacgatacttgttttctttccgtaatgttacggaaccttgcggatcacataatcatcccctttttgactaacggaatgttacggaacctcactaattgtgcaacgatgcttccatttgatctccagtgtgtcacggaaccttacggattgtgcatcaatattttcttttgatttccggcatgtcccgaaacttcacaaattgcctaatgat

SEQ ID NO: 27367 - DNA, 494 bp, Glycine max
  unsure (1)..(494): unsure at all n locations
ggtgtactgctgcattctactaatatatggagttggccattgttatatccatctacttgtccacactaacttgaatcaagcaaacatacacatctaagttatttaaagtttgttcttaaaaaaaataacctaaaaacataccttggaaaacccatcaacaagtagggacaaccttaattgttcaaatctctctgtgccatcaaagaggttggtgtagtcatgcgaccatttgccaagttctttaatcaattcgttgcgcaccaatgaccaagaatcttcccccatacctaataaaccggcaatggaccgatatccacagttaccgtctgctttcacatccacaacgttgtgaatgaaatcctgtataaatggcgcanattgatccaacattgngatgatccttgttgtctntggcggttcagaagatgatgcactacgtttcactaaagagttgctgctntgaacagaatgannagcatcaacatacttccagt

SEQ ID NO: 27368 - DNA, 421 bp, Glycine max
  unsure (1)..(421): unsure at all n locations
agcttccgttgttcaatttcgagcatcttatatgtgtatacattagaancggaaatccgagtgaaaagttatgaccatttgaatttcttcatagcttccgttgttcaatttcgtacgtctcgatatgtgaagtgcctgaatcggacatccgagtgaaaagttatgaccatttgaatatctcgagagcttccattgataaatttcgagcatctcgatatgtgatacaccagaatcggacatccgagtgaaaagttatgaccatttgaatttcttcatagcttccgttgttcaatttcgtgcatctccatatgtgaagcgcctgaatcggacatctgagggaaaagttatgaccatttgaatatctcgagagcttccattgatcaatttcaagcgtctcgatatatgattcgcctgaatcgga

SEQ ID NO: 27369 - DNA, 436 bp, Glycine max
  unsure (1)..(436): unsure at all n locations
gcttcntatttagacctcgatcggtcatctttcctggccgacgtttactgtcatttttttcgagttatatcggtgaataatatttttttgccgaggtgggctaatgttttcctggccaaataaatgggaacatgccagtttcggccgaaaagaaacatcggttgagctcgcacggaaaaacctagccgacctacgttgtaaatattttaggcaacaccaaaacaaaaaacttcctctaccgttaaaaaaaacattatcggccagcgtttgtaaaagaaattgcgcaatttcggctgaaagatatcaatcatggacatataacgaccgacaccggccattgtttattctatttaatccctgaataacaattggatgatgtcgattangaaatgttcgatcggcatcatccggtgaagcttctttttagacctcgatc

SEQ ID NO: 27370 - DNA, 336 bp, Glycine max
ggacatttattgcttgcttagcttttacacctgcctgtcttgctattaggatgcaagatatgtttcttttatgcgcaaatgaaacctgaggagatttgggttatgggggtgctcctcgtgtaactcagcttacatcttaaactaaagtgtggagcatgttgtacctattgtatcattaacttgacattaccatgcttatatgcgtgcttatgtgtggaattaacatattttgttatgacacacatatttggtatataatgcatgatttgaaactattctcacattccaagatagtgatatgcagatgctcatacttgtactcgtagacaatcatat

SEQ ID NO: 27371 - DNA, 275 bp, Glycine max
  unsure (1)..(275): unsure at all n locations
acatatataacaccgccatgcgtatacttcatctccgaaacatcaataaactgcatgcaatgaaaaatgaaatgaactttctatgagatggacttcattgtcatggaaccttctcatacttataatttatgcatgcaagaactattatgggatgaaaaatattatgacagtcttaggactctanataaaatgacatattgatatgataataagaataacgaagtgtattaggaggtggatcatattgacttatagcatacaaaatgaacatgcta

SEQ ID NO: 27372 - DNA, 417 bp, Glycine max
  unsure (1)..(417): unsure at all n locations
agcttggataaacagggggttgtaatttttttatatatttgnnnngnnngctcctttgtttatttgacctcctaccacaggttttttttaatagtgtattaaaaagtgaatttgcattatttgcttttctatatttatttgatctcacctgtcttatttattaatttaaggtattaaaaactactgtataaatgtaagtatatataaattaaggtcaaaactctcacaaaagtaagtataggcttgtatcatgcttttaagacttagtgatccgtgggatgcgcggatttgatagataaactaattgagtaatttatttgacggctgaatgaaaagtaaattttaatatattaacaactgacctatgaagcatcgacaccgacacggacaccggacacgacacagacacgtggacac

SEQ ID NO: 27373 - DNA, 265 bp, Glycine max
taaatgctacatcagaagggtagataatatggactgggattgtaactcttatctacaaaaaaaaaaaaaaatatcaattaccttggttttccttgaaaagcatcattaatttcattttcactagatctctctggaaaggtagacaaaattacatacttctcctttctaggcgattcatctaccctcttgtacaactcatattggtttggataagtcatcctaaatcacaagaaattaatttacaatactagttcataactactat

SEQ ID NO: 27374 - DNA, 396 bp, Glycine max
  unsure (1)..(396): unsure at all n locations
ttcttgtttagctnctaannnctcttcttatcaacctataataagacctagtcattattgatatatagacagtgttactagatcgcttcaatcatcgacttggtaaaaatattaggttaataactggactataaatcactaattgaactacgtgaatgaatattatatatatatatatatatatatatatatatatatatatatatatatatatatatatatatatatatatatatatatatatatatatatatatatatatatactgtgatatatgtaattacacacgcgtgtagatgacacacgggtaagacatacttctgttatatatggcgagcgccatggagttgtattttatatttttctagggagagtgtgtctcatcaatatagtaag

SEQ ID NO: 27375 - DNA, 481 bp, Glycine max
  unsure (1)..(481): unsure at all n locations
tcaattggagtcttgtcttttacagacttatttagacatctgtngagtatgtaaacagcagtgtagactgcttcagcccagaatgtgttaggtagtcccttatccttgagcatcgatctagccatttctataactgtgcgattctttctcttggacactccattttgttgaggagaatatgcgactgtaagttgtcgctcaataccttcatcctcacaaaatctttcaaactagcgagaggtgtactctntgccgcgatcacatcttagtacttttatccattttccactttgattttcagcaagggccttgaactttntgaatactccaaagacttctgatttttcttttagaaaatatacccatgtcattctagagaagtcatcaatgaagagtatgaagtacctgttgttctcatgtgatggcgtcctcaatggtccacacatgttcgtatgtatcagctctaatagaattttcgctc

SEQ ID NO: 27376 - DNA, 135 bp, Glycine max
taacattcagagcctcacgcacttgtgctcaagaggagaatcttaacgtgtcagtggtgccatccaatgagaacagcgattggggagtgtttcccattcatactatggatggaagcaacggtcgtgactcttatg

SEQ ID NO: 27377 - DNA, 461 bp, Glycine max
  unsure (1)..(461): unsure at all n locations
actcaagcttgacacagagcagcttttgcatacaaaggttatctgcaaggttataagattgtcatagaacaacattagttacaatacaatacaactgtgaaaaataaaaggggaagggggcacataatcttaattcttgatagcccccattcgggatgtttgaataaattccttctaccttgtaatctaatttaagctatttggctacatgaggattgaagttgcttgcatagtcattagtcacatgagacataatattacaactcaattgaataattcgtcagtattaagcagaccaaactctttggacaagctcatagccattgtagaaactaaatatctttgctgaaaattntgataatggatgaagacataggctaacaggaataaattcacttgtaaagtaatactaanatgttaagaatntacccattgaaaccatcggcttaatgaagtgagat

SEQ ID NO: 27378 - DNA, 421 bp, Glycine max
  unsure (1)..(421): unsure at all n locations
agctttaggatcaaactcttttttctctttttttctcaactattcttcatttttcttcctcttttcacttttgttcctttttcttgcacaaatttcattgctcttccactggtgatgatcatggaaggctaaagagtcaatcaatccaaggatacactccaagcaagactgaatttgagttttggattagtatttcaattttgtgtgcttcttcttcttcttcttcaatcctatttttaattttcatgattttgaatgtgattaagattcaaaataaattaggttatagattcatttcctaatttcaaatttaatcatagatcgtttggatgatattccaaccaaatttgcgatttcaatgaatttacggaataatntgatngaactaactctaatgacattgatngaactttcacaacat

SEQ ID NO: 27379 - DNA, 445 bp, Glycine max
  unsure (1)..(445): unsure at all n locations
cttatccctctgtattctagatgcattattttagctaagcttacccacagcccggcttagtgagagttgaaggattatgacctgtagaattcgctaagcaccccatctgtgcgctaagcccagctgtataaaaaaaaaaaatcagattttgaatttcaaacttgggctaagcgtgtagttccgctaagcgaaccgctttgagaaaccaaacgtctctctgactcgcttagcgtcgcggttcgctaagtgagagggtcaaaaattgcttaagtgagtgtaacatcagttacactcacatttgcctaaaattctcagagcatatcctgcattttctctctcgcctaaatctatgcaacctgcattcttgctttctttntgcatcttctacgcatcttcagcacacaacaatccaagtaagttcctcattcctttttctctctctttt

SEQ ID NO: 27380 - DNA, 289 bp, Glycine max
accacattcaatgttcccatcaaaacactcactatcctacggaaagattgcctaacagtattacacacaaatggaagcttggtaacctattgtatgctctcaacacaatttcaatgaaaggcctttctggtacaaaacttgaaacctatgactgtacgtacatggctgattacaaaattacaaaacggtccttaatactggtggctcttctttctttggggactcactcaaacactagtgcttgtgactccaatatttcttgatgtggacggaccctttcttcttgact

SEQ ID NO: 27381 - DNA, 322 bp, Glycine max
  unsure (1)..(322): unsure at all n locations
gctctacaatggattccctngaaactnggtcaaagtttctctctttgtagaaatgtgacgagtgttgctaggtgtgcccaacatttttgttggtgcacccagcaaagcttttaaatgccaaaattgcccctagctcatttcttccttaaaaatgtaacttttttccagaaaagctgtttacctccattttcagaaacgctgtgcttctcgttttctctttttcgtgcggcattgcctctggttcgtgggggtagcagcgttgagcgcagcggtgaaggtgaaggtaccaccgtcgagcgttgcggtggtcggtggcggcaaa

SEQ ID NO: 27382 - DNA, 410 bp, Glycine max
  unsure (1)..(410): unsure at all n locations
agcttcccgcatgtattaagagacggagtaattggaattgncaagagaaagctctcggtaaccacactgccaaaagaaattagtagtatcatttatcagaaatgatcgtttgaaaacaattagatcatattagccttatttttatttaatgaaaaatataactattaatatagatattgtgaatttatacattaagattatgacatattatattaacaaacaatttagttaatataaaatattgatacattattaatatcaaatatttgtataatatgtcatattattaatgtaaatcttcatagtctatattacttattaattaatttaatttttcataggcataaaaatacaaataattaaagtaattctaacgtctgacaaatattaattatctattagtaaatcac

SEQ ID NO: 27383 - DNA, 392 bp, Glycine max
cgcataaaatatcgagacgctcgaaattgaacaacgaatgctcttgagaaattcaaatggtcataacttgtcacacggatgtccgattcagctacataatatatccagacggtcgaaattgaacatcggaagctctcgacaaattccaatggtcataacttttcacaaggaagcccgattctagcgcatcacgtatcgagatgctctgaattgaaaaccggaagctctcaagaaattcaaatggtcataacttgtcacacggaagtccgattcagacgcataatatatcaagatgctcgaaattgaacaacgaatgctctcgagatatcaaatggtcataacttgtcacacggaagtccgattcatgtgcataacatatcgacacgctcgaa

SEQ ID NO: 27384 - DNA, 457 bp, Glycine max
  unsure (1)..(457): unsure at all n locations
aaggaaccaaatccgaaanntaaacaaacaaaaaaaaacaccacaccatgaactgactgaacacgaaacccnaaagcaaaacaggaggagaggaccattgcactccctacacagaagacaaagaggggaggaaaaagagaacagccaaggagggggcaagaaccgagcaaaggggagcgcgagaagaaaaagaagaggcaagagaaagggggcagggggggacgaccaagagcaaaagaaggcaaaacaagccggaggccagaggacacgaagcacnagcacgaacaaaaacaaaggggggcaaaagagaaaggcccagcaagaaggagaaaaagggcaacgaaaacccaaggagacagcgagggaagcgaaacgaaagaggaagggggagggggcagcggggggaaaaaagcgagaaagggaagaaagagcagaaaggggcggggggcgcgagcgn

SEQ ID NO: 27385 - DNA, 329 bp, Glycine max
  unsure (1)..(329): unsure at all n locations
agcttgaaatttaacaacggaagccgngtgatatttttaggttataacnaancacacggaggtccgatactggcgtatagtatatcgagaagctcataattgaacaaggagagctctcaagaaattcaaatggtcataactcttcacacggaagttcgattcacgcgcataatatatggagaagcttgaaattgaacaacggaggctctcgagaaattaaatggtcataatttatcacacggaagatcgattcaggcgcataatataccgagacgctcgatattgaacaacggaagctctcgacaaaatcagatggacataacttatca

SEQ ID NO: 27386 - DNA, 266 bp, Glycine max
agcttgcacccctgcacacccacgccagttagactgttttatacacaagcaacagccgacacgaggaatgttctgtacggcccaactgcgaccggatgccattcactcccccataaccacagaacaccttactgataatatgttagcccacaatctccaaaggaactgacatcaaaccaatgacttaacgatgacttgatgaatgtccctcagagacggaaacttggcgatgaaataattgaccacattctgactaacggaatgat

SEQ ID NO: 27387 - DNA, 534 bp, Glycine max
  unsure (1)..(534): unsure at all n locations
ctttgaaccccatgcattgnctgcctctatagaacactcaagctngtgtactggagaatacgacagatatacagcgtcggccttctttatatccattatcttgacccactaactcgaatcatccaacatccacctcatatataagtgtgtaatcaggacttacctaaatcttactggggctctcccgtacagcaagtcgggacggccttcatggcgcaacgatctcagtgctcatcactgaggtgggtatatataatctaccattggacggattatttaatcattctattacgacccaaagaacaacacactctctccatacataatgtactccgcaatgaaccaggattcacaagtaccgggtgctgacacatgcgcaatgtggagtatgatatgctgtatagatggttcagactgatgcaacattgcctatacactcgntgtgtgtctgtgctcacaacatcacgccctcttgttactacatagtagttgctctgagcagaatgacactcatactcactcatctccatagat

SEQ ID NO: 27388 - DNA, 401 bp, Glycine max
  unsure (1)..(401): unsure at all n locations
agcttgngtgatgttgcgcgtactgatgtgttccatgaggtgtttgctggggtttgacccacgcgggtgttgaagagacggcatgggcatctccttccttcctttttgcccctgttgccccaattcttttggcattcgcgtttgtggaggaaacgtaatcaaactttcctcttttcaatccaacctcgattctttccccggcaaacaccagatccgcaaagctggacggcatgtaacccactagcttctcatagtagaacactggcagagtgtctaccatcatggtgatcatctctctctcaaccatgggaggagctacttgtgccgccaaatccctccatcgctgtgcatattctttaaaggtttcaccctctntcttgaacatattctgcagttgagta

SEQ ID NO: 27389 - DNA, 477 bp, Glycine max
  unsure (1)..(477): unsure at all n locations
ctacaaagacacatccataaaaagttatttngcacaaaatgcacatctattatttcatttatcttgagaaagaaaaggccaaccaattntgagtggtgtgtgtttcttttgctaattgcaagtgttactctgcaaataattaaaacaaatcacacaccagtgcatattattatttttctttgaaaaacatcctacaactacttagatgcaaagggcatatgatagtgtagcaagctcaaccaataactaggctaattccacccaatcactttcacatatctatgtaattcatgtattttgcaacttaagttgttagatcaaaattccaagagcatgagcttgactgtacatgcataaactcatttcacacttaaattccaaaacaaaacatgaaatggtcattgangcattntattgaacagttggtgggcgcatgtttaagcatgananaatganngaataaagaacaacatgaca

SEQ ID NO: 27390 - DNA, 571 bp, Glycine max
  unsure (1)..(571): unsure at all n locations
caacacacccatttagaaaanccttttgatangccancttgnganagnatacccctcgtanngagtnctactactaagagcgacctcgtccnaggccattggcnantgtcgtcatgtcgaggcaacgcacatttttgtagagcttttatactgtcggnnnccctatacagacaacaactacangagctccgacagactacgcatatattttcgaaaaaatccatctatcttcgtagcgcacatgcgtgggcaattctcatcagagcatcacgctagggcgcaagataagacctattgtgcaagagaacagaggcgagtgaggcatgcctaattgattcttaacgcaacaacctgctcatgtcatatcgcacatcccattctctgatcatttcagacattgatctcgatgtgtatttctatacaaatcttactcatgtgctagagtacatgactattcgcatccatgttacacattacactaatgttcattgcttatgcttgagaggagtgattattctccatacacaggaaagtgtggctctcgacggacgctaagtgtgtactgctgtac

SEQ ID NO: 27391 - DNA, 344 bp, Glycine max
  unsure (1)..(344): unsure at all n locations
tgcattgaattgtattcatggaaatggattaacatgctcaaatactatgtttcttctttcaaacggaacgaaatatttatcatgctttgtcctaattgtacaggaattttgtttagtgttattatgtttcactcgtcattgtctaaatacaactaatgtcacacgccttactgtttttgtacgaataatgagaattgtctctctttcaaaggagaagtccctttctttggttatgttccgaatattgtaaaatataaaaactacaatccatganggatggagaaagtagagttggtgtgtttgtttcacttctcagtttatcttacttctttgttaaaaataat

SEQ ID NO: 27392 - DNA, 336 bp, Glycine max
atttaaagttgaaattaaggaatggaaatgggaccacacaaattcttttggccatgtgcgtttaagacaccacccatttcacactcaaatatatgcatgaacttagatagtatacgtttatggacttgatgaaccgagaaggccatgcttccagatacagcaaccacagccatgaatcctaatctcatggagtcctccatactttttgtgtctttgttatttgacaatcaaactttggattggaatatatatggatataaacatagacatttacaagtattcattcaagacaagaacatacacactggtatgtaggaagagagaaaggaataatca

SEQ ID NO: 27393 - DNA, 399 bp, Glycine max
  unsure (1)..(399): unsure at all n locations
agcttaacagtagaattgtttatctggataatcaaaccatcagtcacaaggccgcatgccaaagtacagacattaggttggaaaccaactgaatcagtcacatcagtaaaacttaagccaactgacaatattctggtttcctcaacaaatgatagaaccagaaaagaatggtgtgaatccgtaactctcattcggaccgtccaagtaccagttaccccttgatatatagaagcagtcctatgtagattttccacattaataccatttcgaataatccttaatgacccctctggtgccacaccacagcaagcaaacatttgatcttgcttctcatcatgataatctacaacttccatatccaagaatggtgcaatgttttgaatanggtttatatagcac

SEQ ID NO: 27394 - DNA, 474 bp, Glycine max
  unsure (1)..(474): unsure at all n locations
tcttgttcctcaatcttgtactatcttcatcttctgcaatattntntgccagagttcctttaaaaacatattatcaggctaactttcaataagaagattgtaattgtcccctattcccttgtgaagttatcggtgcttaaaattagaccctgctactgtttgtatgtaccaaatcccatacttacacaagttttaatcattntaatttgctattttacttaggcattgtggcatacagcctctttgggtgtgttgtgtgtgttcagtcggtccctgatttgtgtggttaaaaccaaaccatataaatggaagcaaactatttatatttggtatagaatattctattttttttacatttgatttgtattgcattagtgtgttaaaaataaaagcaatggtcatatgaaagacagtcactatacactntccagtntaattctccacactattttatttgtgaagtcatacatatat

SEQ ID NO: 27395 - DNA, 419 bp, Glycine max
  unsure (1)..(419): unsure at all n locations
agcttcgccgagcattcccattgaaaaatcattgtttaaacctttcaaagttagtgataaagctaaacgaaaaattagggaactaagaaaaactaaatccttaattgaaggagaaggagacaatcatagtgaattactaaacaaaattggtagtttacttaaggtcattctagaaactccccaaacttcgaaaaatacatccaaaatggtaacaagaagtacctccaaattaattaatgttattaatgaagatagtgaccaaaactcagaaaatacaactgagatagaatcagtatcagaaaagaatataaatccaattaattccaaacactggaaaacaccctctaaattatattatcaacgtccaactgcccctgaccttctattagaagaaagaggtgacnnattttttaagagtt

SEQ ID NO: 27396 - DNA, 431 bp, Glycine max
  unsure (1)..(431): unsure at all n locations
ntntggagtagaaacatgggaccaactctttntatttcataatggaagtcttatctagtcaaggtcggagagaccatacaagtttcctaacaatttctaattatgtgggccattaagtctatcatatgctgacaatagccgagaagcccatgaatctcttcgggggcggagtaggtgtctgccattgccttggccttggctaacaatcggggaagttcttgactcccgttcaaggtaagagcaaaccgatccatccacatggttgcctcttggtgtaaagagtcgatcacccttcctctagcctctttttccgcgtatacttgggcatactcatccgcgattctatgctcgtgggccgtggctaaacctaactcttcttggtacttggcgatgatagctaacatgttggtctctgtctcgcataaacgctg

SEQ ID NO: 27397 - DNA, 404 bp, Glycine max
  unsure (1)..(404): unsure at all n locations
tttactaattgtcgccatgtngaacgtgctaagtcatgcttccgatgggtattattgcttttgaaatttaaaccaaaaatggttaaagtagacataggaaaaaatagtaaaaattgttttcttaccaaagctcgtaaatcttatcttaaatgtctagattaatgtgctaacttcctagattattgtgttaatttccctagggatacatgtactcaaaataaacctcacacagaaacatattacaccgtgactcagtgcacagtgcaattcttgcacagatggaaatctagctcagaacaattttatttctctgtcaagcttcactaanataatcacatacctatatatatatatatatatatatatatatatatatatatatatatatatatatatatatatag

SEQ ID NO: 27398 - DNA, 438 bp, Glycine max
  unsure (1)..(438): unsure at all n locations
tgtaatattgcatggcctttattgatatatcgcagtcatatttatactgcttagtggtacatgcaggtggttacaactgccctaacggacttaacaacttgtaacgatattacacatgtgcctattagtaaccattcgcacgtgctgcatgtgcctttagctgacgtaatcgcgtaagtgtttgggcctggtgattgtcctcgtgggtctgtccatggaagttcctgatatggaggtccctggttctgctgctggtccttcgtgaagactgcgactgctaacaatactctcatcccctatcaccaccttgtcctcaaggtggtaggcttcgcggatatcggcccatggttcccaagtggtgtcctccggnggttgaccgtcccattgaacgaagaaccatggagtangtggtgatgtcacgctatccattttagagtc

SEQ ID NO: 27399 - DNA, 407 bp, Glycine max
agcttctagccaaatggacttaccttgttttaattcttttgatagcccttttgagccttgttttgaagctcactacaagccttaagtgaaaaaccatgatattaccatatccttaaggaattttggagctttggaattgttttgggaataagtgtggggggtttttgtttcattggacaacttgttttgttggctatgcttcatgatgtattttgggccatacttgatgtacattgtatattggttaaatgttggacatgctgaatgaaatgttgtttctcaaaggctaaagagtaaaaaaaaaaaaattcaaaaaaaaaaattcaaaaaaaaaaaatcgaaaaaaaaaagaaaaagaaaagaaataaggttgagtgaataagatcttaaatggcacaagaatgatg

SEQ ID NO: 27400 - DNA, 493 bp, Glycine max
  unsure (1)..(493): unsure at all n locations
atggggtacccgtcatatgtggtactaggtgtttatcgggcgatggtgcaaattaactctcccacatccacaaatcaaacatgaacccaccatccccagttgcccaccttcaactgagctcacgtacccccacatagcccttatccttgttcctctcagcaccgggtccccatcaacccctccaagcttccacaacatccaagcaattcaatatccaaacatcatgaactatcttaaactaagaaaacagggcagaggcagacaactctgccaaaaacacattctaacaccacagttttccctactcaaataccccagtaacattccctccgtttcgattcgttaaccgttggatcgactcgaaaantttactggaggttcctagtacataagtctacattntgaccgttgggatctgctacaaaacgtccagaacctcatatgtactaccctntccacaaccagcaatacacaaacattntctgcacaagag

SEQ ID NO: 27401 - DNA, 354 bp, Glycine max
gagcgagagctataccgagccaccctccttcaccacgaacttcgtcacgctggggtgaatatccatcgagtgcgccctaacgtcgccaaattagtcagtcttcgccacgaaccggaagaaggtaggggcctactccaatggcacatcggcgtcagagcggaaaggaaactccatcacacaactgaacacgtgcgggagtcactgaagcattttgccagcgatacccaacagtggctgaacatacgacaatggattgcccacgtcgccaccgaattggatatagattttgaatggtttaggaacaacgaggaacttatgatattgtgccaccatgggacgctacagagaaatgca

SEQ ID NO: 27402 - DNA, 471 bp, Glycine max
  unsure (1)..(471): unsure at all n locations
gagtgacattcgtggttgatgatgtgagagaatgttgttaataaggatatctcttattttacgaggaataggttaaaatcaaaataagttatttcttctagaaagttatgcttatgcatttgtgagttatttgccaacaccttttatttataagtagaaggtaattgctactcaatctaattaagaccaactttgtcgtgactatacatatcaggtgtttccaaaagttattagcttgattctctacttcctacatgacgacattctcaatcatattcaatcttcatgagtgacattcgtggttgatgatgtgagagaatgtcaagaataactatatctcttattaaatgtggagtaggttaagattcagaataagttatttcttctagaaagttgtgctcacacatttgtaaattatgcatcnaacaccttnttntataggtaggagaaagtaattactactcaatctag

SEQ ID NO: 27403 - DNA, 379 bp, Glycine max
  unsure (1)..(379): unsure at all n locations
aaaatattctcacaccttcttataatctatctaaaaattatgttgtgaggccaaaccttagaaatcactaagagactctcttaactaagatagactaagacttagctttcttttttatctttgttttcttggacttgattgaatcttgaagcaatctctgtttgcttaaccttgaatgtttcttgaagcaatcttgtttgattatactttggcatcatcaaaaacctggattcatacattcacaaagatcactctgcaagctccaaacgacttgtgtaatcaattatgaatagctcgcgaatcgactaaaatagagagttctatgcactgaagaagttactaactctatanacaatcttcctacccctacatgattatg

SEQ ID NO: 27404 - DNA, 410 bp, Glycine max
  unsure (1)..(410): unsure at all n locations
agcttcggccgcgttgattccggcaactttaacctgtatatattgagcnccagctagacgagcgagagctctaccgagccaccctccttcaccacgatcttcgtcacgctggggtgaatatccatcgtgtgcgccctcacgtcgccaatttcgtcagtctccgccacgaaccggaagaagttaggggcctcctccactgccacatcggcgtcggagcggaagggaagctccagcacacagctgaacacgtgcgggagtcactgaagcttcttcccagcgatccccagcagtgcctgagcatccgacattggattcctcccgtcgccaccgaattggatagagaatttgaattttcgaggaacaaggtggaccttcatgattntgttcccaccatggaacgctacagagaa

SEQ ID NO: 27405 - DNA, 423 bp, Glycine max
agcttcagcagtttctgaaagggggcctttttgtttacgtttccttggcgtttgactaggaatttggcacatggggtctgatatgattaatcagatagagaacaaatgagcattggactaaagtctaaagaccggcgaagaaacgttatccctatgcttaaagagataatatagattcaattatttagtgccttttatactttaagcattaacaaatgttactacttggttagctttaattagtgatacccttttggccttttgcttggtcagcattttgtcttgacaatcacgtttcctttggcggtaaatgaatgtgtgaagcgtgaattcaattgtgatcttcttggagatggcaacagtgatggctaataattcaattgtgatcttcttggagatggcaacagtgatggctaatcgcat

SEQ ID NO: 27406 - DNA, 479 bp, Glycine max
  unsure (1)..(479): unsure at all n locations
gtccctattggaaaaagatatttagattntaaaatttgttaacgaagacgaacagggcggtgctgtctgagagaaactattggtttacttaactttgggggtcgggggacctagaaatggtgttccttgcaatttgtacagagggacaagaatattgtactgtatttcgttcacggaatagaccacatgagtcctatagacaatgctgttcaagttgaaaataatttttccaacaagattttttttttcaattcacaaaattcgaatctacagtattatttaagaaaaaataaacacgcatcactttgctaagaacatgcaaaaatatttacagcctgaaaatggatagtttaacttttgggatttttaattatgtttctgatctttaaaatatatcttagataaaaataaagatattagtcttataatctgaagttgatgtaataaattcaattctaagataagatgtagaaattatt

SEQ ID NO: 27407 - DNA, 418 bp, Glycine max
  unsure (1)..(418): unsure at all n locations
agcttgcacccactcgcccaggcgagtttgttgtttcctccagaagcaacagccttctggaggaatcttctggagggcccaagtgggcctggttgctatttgcacccccatttttctaaatacaccccctgcctttttttggtgattcttttttcgtaaagttacggaaacttatgaatttcgtaacgatacttgttttcttcctgtaatgtcacggaaccttgcggattacataatcatcccttttttgacttacggaatgttacgaaacctcactaattgtgcaacgatgcttcctcttgatttccggtgtgtcacggaaccttacgaatngtgcatcaatattttcttttgatttccggcacgtcacgaaatttcacaaatngcctaatgatgggtgtcaagcacctcanaatga

SEQ ID NO: 27408 - DNA, 441 bp, Glycine max
  unsure (1)..(441): unsure at all n locations
ctgtccgatgcagcaataatgatggcccgagttatgttgtggagcggtttctaacccggaatgggtttaggcaaagacaacggcggcataactagcctgataaatgccaaaggaaaccgtgggaagtatgggttaggctataagcccactcaggcaaatataaagaggagcgttgccggaaggaagagcggaagtcaaggctcgcggttgagacaagaaggtgaaggaaacccaccctgccaaataagtaagagctttataagcgcgggtctgggggacgaaggtcaagtcgtcactatatatgaagatgatgttccgagtacgctggatttggtacgaccatgccctcctgatttccaactgggaaattggcgagtggaggaacgccccgacatttacgcgacgagcataatgtaaacctttacgggtntaaaagctcta

SEQ ID NO: 27409 - DNA, 424 bp, Glycine max
  unsure (1)..(424): unsure at all n locations
agctttatcctccttattggngagagattgttagaataatcaaggnaaagagtgtgttagtgggatttctaattgacttgtgacttttggtttcttggtttgaaattcatttcctaagtgtgtttcatcttgctaatcttccgtcttgcaacagagccgtgacaacccatttggggtaaaagctttgagaagaacgcctgccacaagtacttggacccaaaggaaagttgccatgaaaggcaactaagcttgagagaagccagtggaatcagtaaaatggtttatgcacaacaaaattaaattcattggtacctgtaattgtgtgtttgtgctacagaatgcttctgtaatggttgtcttccataaatatctagataccaacattctcttttccaactggttgctgtanatttctctacaacta

SEQ ID NO: 27410 - DNA, 475 bp, Glycine max
  unsure (1)..(475): unsure at all n locations
tagtttaagttagtctaaacctacgagggctgtataaattatgcctagtccatcttgagggatctgaggataaagcttggattgattcagcctaactagggatcgaggtttagtaatttaggctacagcatagaacacaaaagcatgattgattagagaaacatctttatatacatcagcttgtttgttagaaagacccaacacttttacctactgctgtcaatcttatttacttgcatttttactatttttagcctagacttagtttaattttgtctaaaccatcaattatcaatgtttcttattaacaatgcaagagaacttacttggattatgtctaaaccatctttatatacattnttgctgctgtcaatcttgtccccctttctttccactgtgggaaccaactaatggacgctcctgttatgcctgccaagagctcttcccaatntgctntatcttttttcgaacacat

SEQ ID NO: 27411 - DNA, 368 bp, Glycine max
gttagtgacatgtcttgcaggggctaaaatacgtaggacaacttattatgcatatgaagtatagattctcatattctaagcgccaaattttggtaaccaattattcttgacatacgcgtactccaaatacttctatttttgaataaattattttttattattaaaacatcgttaaatcatgagtatgataaatagtacttaatctaaagttacttgggattcatgaaagaaatgtaccttattttgattgaactcatttgctcctgttatagctagtatcttggaacaggcattaggttgtcataattatcaacacatggattttttttgaagtataatacatagcatctacaacatcagttaatttg

SEQ ID NO: 27412 - DNA, 424 bp, Glycine max
  unsure (1)..(424): unsure at all n locations
tgtcttttttagaanatgttaaaaatattctaaaacctttntataatctatntaaaaattatgttgtgaggccaaaccttagaaatcactaagagactcttttaactaagatagactaagacttagctttcttttttatctttgttttcttggtcttgattgaatcttgaagcaatctctgtttgcttaaccttgaatgtttcttgaagcaatcttgtttgattatactttggcatcatcaaaaacctggattcatacattcacaaagatcactctgcaagctccaaacgacttgtgtaatcaattatgaatagctnggtaatcgattaaaatagagagttctatgcactgaagaagttactaactctataaacaatctntctacctctacatgaatatgcatgatgtacatatggaaagatag

SEQ ID NO: 27413 - DNA, 417 bp, Glycine max
  unsure (1)..(417): unsure at all n locations
agctttataaggaaacatttgcagttatctacctaagagncctttcacgaggtggaggttgagccatgttctcagtatgaaaattagtagttgaatgctcaaaatcagaatattcagaatcaccaacaacagaatactcagaatgctcacaatgcacgaaatgcacagaatgatcaggatgcacactatgcctaactaatttatgaaaggttttatctatttcaggatcaaaggtttgaaaatcacctggattggccctagtcatgcactatatgcagcaaataatgtgttctcaaacaagcaccagggcaaggttaaaactacaactatagtcaaatgatatccaaatgagcttgaaatttgtgagcaacaccctaaaatcatgagaagatagcacaaaaaatttcaaacaaaaat

SEQ ID NO: 27414 - DNA, 448 bp, Glycine max
  unsure (1)..(448): unsure at all n locations
ntgtgctattcgatctcttcgttaatggctatttctggtgttggggatgatctacttgcatacagatcatatattcgtgtaacacatatggatcagttgatctgtatgagtcataaggatcagatgattcgtatgactccctgatccgtatgttattttttttaattaattaaaaaaaatgaaaaattagtttgtaatagattattttttatgtaaaaagtattattttgtttttgttttaaaatgttttttttatgaaatataaatatattattttttttggttgtaaatagttatcgctattttttgaaataataaatagcttattgtgaattatgtgtttaaatacttagtttatttgtaattgaaaatataaaaatttaatttagttctaataatatgtattgtttgaaagattatgttctcaattatgtatttagatagttag

SEQ ID NO: 27415 - DNA, 411 bp, Glycine max
  unsure (1)..(411): unsure at all n locations
agcttgagctncaaaacaacttgngccgttantaatatgctaaagctctttggaccccagattctctcgctcaaaataaaataaagcacaccctagaagttctggacaatgcttatgaatggcaaaatggtacaaaaatcaagctattaattacctactgagtcacaaaaagtaaacaacaaaaacaacagcttatctcttatgtatttgttgtaatgaaatcccatattcttataattgaatcggaaatccatttgattacttttgagaaggcatgctagtggcagttgtagtgatgttgtttgcatggttgctacaaaataattagtcattttctattcttgttgtctgaattgaggaccaccgctgtccactgtgtagtactntaaaaccaacatgaaattaacctag

SEQ ID NO: 27416 - DNA, 433 bp, Glycine max
  unsure (1)..(433): unsure at all n locations
nggcagggtcgacaacaccttntactattactngatcatttgccaagtctttttccactgattctactcctgcacatacaattattactacacataattnttttgggtgaatctacacaatattattagtatgactcgtattacgtagcaatgattgatttatcatttacggattatgaatgtcagtttttcgagtgttaaaagagtagggcatggaatgtattaatcattaagtatttctaacaaagttcagaaacttttccatgaagaagttatctttcaaaaagaatcctctattcatggaatcaatcaagggtggaagggaagggaagttatctttgaaatacctctaaccagaagagtgctattcacatgacaacccaacaaaccatagaggccatcaacccggagaaaggtgccaaaattaaaatac

SEQ ID NO: 27417 - DNA, 387 bp, Glycine max
  unsure (1)..(387): unsure at all n locations
agcttctcgaagtngatactttaagatatatttataactccacaaattgatacccccctcccccccttctagtgaccttctggtccacttcagtttgtaaatcacgttagtaaaaaatgaaaaaaataaaattcttcttacgtgacaatattatcatatgtttagggactaaaatgatagtaagtggttaagtgtaaggatataaatgaaacaactaaagatctcaatgactgatttcaactattcttaatttcaagaacaatagtgacaacattataaactcttcatggacaataatgatactttactctttaagaatcctaaataaaaggcttattgaaatcatgttgtgctggtggtacctagaccttaagaacaacaactgac

SEQ ID NO: 27418 - DNA, 399 bp, Glycine max
  unsure (1)..(399): unsure at all n locations
cttgagccanaatcctgactcaccataaatcttgacccagtgttagaatgtttatccttaccctcggaagcaaaaaagaatagaagggaaatttccaatcaaaaaaaaaaaaaaaaagagaaggaaaattcccaatgaaagagaaaaaagaaaagaaaggaaattcccaatcaaagagtgggagaaagcaaaaagaaaagaaagaaaattcccaaccaaagaatgggaaaagtaaaaaagaaaagaagaaagctcccggtcaaagaaactagaagaaatgtgcagaaaggtcttttgaccagacaatatctgaacaatacagaattgtcaccaaatgaacaaaaaaggaaggaaaggaaaccacgacctanaatggtcttctccctttaattaccaacc

SEQ ID NO: 27419 - DNA, 259 bp, Glycine max
actaccggaggaggattttttatgggtgaccgtgtgggctacatggacttctgcgaagcaaggaatagtgacacctcctacttgagaagccgggtgagtatctgcaactacctgcacaagacataccatatggctaagaagagcgtgggaggaactccagatgttgcaaaacgaaaccgcatatatctatgtcgcacatatagctgccagaaccttgtcaagaatcctgggttgcgcgctcgcactaagcatatatata

SEQ ID NO: 27420 - DNA, 277 bp, Glycine max
gctcattctgcttgtgctcaaagacttatttcatacaacacactctagttgttgtgattgccaatctgttgactgacacaacacactattgtgacatgcaaacatctcatagtgctgaaagttaaataactgatatgtaatagacttttcttaactagactgacctttagtgataaaataacggtttatagactcaaatggtcaagatgcacaaatttaaatgccttgatcctgtggttgatcatatgcaagctcattaaggaccaacacctgagca

SEQ ID NO: 27421 - DNA, 341 bp, Glycine max
  unsure (1)..(341): unsure at all n locations
cctagaantaaaataacttaatgtcattaacctagggaattaaaaaaaacttaatggctgagtgtaactgaaattgtggcaaccaaaagtcacccccaacagccaacaagtcagccaccatttggtcttccaaaaggctgatgcctaagttgccaattgggcccttattacaacttgaactaaacctaactaaagcccttttagttgattaacccaaaacatatttttggtcagccaactttacaaggattgggccattatttagacaaactaaacactctaaaattgagacaaagtggtgtcatttagtcctcctccatttgggccatgatacaactcac

SEQ ID NO: 27422 - DNA, 471 bp, Glycine max
  unsure (1)..(471): unsure at all n locations
ttaaggtggtcattgacttcagattgctgcatagaaggacttagatctgtatggggatctgcaaatgaacattgacccagactcttgcaacaggtgcagatgcatatttctgattcatggcaagttgagttactaggttggccaaggcatcaagttttccctcaagctttttattttcagcagatgaagatgaatctgtggccacctcatggactcctttaaggacaatagcatcatttcttgcactgaattgttgggagttggaagccatcttctcaatcaaattcctagcctcaacatgagtcatatctccaagagctccaccactggctgcatcaatcatactcctctccatgttgttaagtccctcatagaaatattgcagaaggagttgctcagaaatctggtggtgaggacagctngcacgcaatttcttgaatctttcctagtactcacacanngctctctcac

SEQ ID NO: 27423 - DNA, 368 bp, Glycine max
cccataaggggtctccaacatcgcaccaggccctaagaaggatgggaaggtgcgaatgtgcatagattatctggacctgaatcaagctagtcccaaggacaatattcctctgacacccatcgatatactcatggataatacggccaatttcgctgtgatatccttcatggatgggttctccggatacaatcagataaaaatggtgccagatgatatgcaaaagactacctttttcaccctgcgggggacgctctattataaagcgatgtcctttagactcaagactgccggtgcaacttatcaacgggctatgagagcttcgttcacgatatgatgcacccagaaatcgacgtctatgtggaccacat

SEQ ID NO: 27424 - DNA, 404 bp, Glycine max
  unsure (1)..(404): unsure at all n locations
agcttctcccccaattntctataaatagttgtagatgttaagtgaaaaagggttcagccccttaggcacttctctctctttcgaatntgcttggaaaaattgtttccgtgaagaaaatctaagccgatgcgcttccgaaacgtttccgtaaggaatttcgcgaaggtttcgaccgttcttcgacgttcttcattcgttcttcatcgttcttcgatcttcaacgggtaagtacctcgaaccaagcttttcgattcattctatgtacccgtggtggtccacattgtgtttcgtgtatttttattctcgtttcatttactttttataccccctttttgacgtgcttaagccattttatttaagtcatttctcgcttaaactaaaaataaaataaatttccaccgatc

SEQ ID NO: 27425 - DNA, 460 bp, Glycine max
agctataacggatcattgacttggagtgtatagctcacttgaactgccatagtgcacaagaagtgagatcaaaactaaatgcatgagcatgtcttcgcccagctctagcttaagcgaatgaggggtgaggccaagctagacattaccattatgaactcccttatattattctcttcgttatacttcggagattcatgatcataaatgttatgatctctgccttcttgtttctggcaaagtattgatcaatgggctcaagagattcctttacattttcaccctcacaaatagagcccagaaacgcttatggaatagaacacttcgtgggcataatgcacatgctattggaacgatacaatttatcaatggtggcctcattagaggttgtcgaagtggatcgttcactactaaaaaatagactctcaacatcggttattaatcgatgttgaaagtactgacg

SEQ ID NO: 27426 - DNA, 394 bp, Glycine max
  unsure (1)..(394): unsure at all n locations
agcttgtggttattagaacannaaggtttgttttattctcatatcccgcnacatgtaggaaaaccactatgattggctttcgtgttgatcactataacaaaaaatccgttccttttagtcaaagtagatctatcacagtaaaacacatcttttgatgttgtttggaaacttttagaacttaaacttcatttattcttcataggattcgacaaatcctgaaagaatgtcttgtgagacaatttctgcgaaatgaacctcagacacaaagtactaaatgaagtcttaaatgtcatctttaatattgtatcagatcatgacttattcatatttctgtctgaaatatcaaacagaagatgatgaagcataatctgatatcacataagacaaaactttt

SEQ ID NO: 27427 - DNA, 476 bp, Glycine max
  unsure (1)..(476): unsure at all n locations
gctgaacattgacctaagtgcatttnttagttaaatttatatgntaatttttgtgattaaaaacaatcataaattacaaaataaaaattaaaaaatcaaatcacaatttgtggctgtacaacaaccaccacacacgtccaaggcaagagattcagattgagggcccaattggtggctagaacaacggtgttgctggcaaagttcaatgtaatcactgacaacaccatcatagtcacccaacgcatcatcaagaagcttccaatagggacaaatttcaggctcacaaattgcaagtccacccccgcaaagcctccaccctacaccctcacagatctggttgtcgatgtagaggcatccatcggaggaagaggcagtggtgcacagtgtcatggttgagccaatataggaggtggaagggccgacttgatgaggatgaagtcatcgtcgaagtcctagatctggagggagagagaaag

SEQ ID NO: 27428 - DNA, 499 bp, Glycine max
ccactctctttggggccactgatagcacttcgaagatcctcgggatccacctagtcgaccgcgaggcatgcttgctcgagggaaggtgctgttatgacgtttagataagagtagactcgaaacctagcatgttgcttttcgaaatactgatacttagtgacacacgctatacgaagcaaccgtgatatacaatcctactgtcatattcataactcacctctctctcctctgaaactgaatcctaaccatctcatcccctatgcttctcagaagagatatagcttaccttacggcccttcgataaacgtgataggatctatgaacattaggaaaggacccaatacttggcgattgataaggaagtgcgataagactctacctggtgggacagaaatgacctatatcggtcctatgaacattatgataactattaattgatctcgacaatgctacatctactctatagacctatcgccactatgtaaagttactcacacta

SEQ ID NO: 27429 - DNA, 392 bp, Glycine max
atcctgactcaccataaaccgtgacccagctttgtaatgtccatgcttaccctcggaagcgaaacagattagacggaaaatctccaatcacttagaaggcattacgattcgatggtatctttccaatctcagagacagcggagggacgagactgaaaattcccgatccaagaatggtagagagtagaactatgtacaagaacgaagaaggactgctcctgatcaaggatcgttagaaaacataggatatgtgcacaacggtctttggaccggacaatatctgaacaatacacatttgtcaccaaatgaacgaatacaatgaaaggaaaccatgacctaaagtggttttgtccctttaattgtcaaccaagatattgtgtgctatcgactttt

SEQ ID NO: 27430 - DNA, 410 bp, Glycine max
agcttcttttggaccttgatttagcaatttactcttttttcagaaccatgctatgtgctcgcgactggtccctttcttcccttcgcaacttgagttcactattgctaccccatagagctccgcgaaatttgttccggccatactcttccttgcgagccctcttggtctctcgttcaagggcccttgcggtaattgcattctcttcccgtaacccggcacactccttccgaacgtgtgtagcagccaacttgaacttctccttggcgagttttgcctttcctaactcgcttttgagagcttggacttcctcgtcctcttccggtgcttcaaaattgtgtttgctgacgacttttaacttggcgagccaatctaaacctcgtatgcgaactttcagccattcgtggtaccca

SEQ ID NO: 27431 - DNA, 432 bp, Glycine max
ccaaccgagtacaatcttttgttatgttgcaattttatatattcttgattatgctaattcttaaaaaatatggtatttgacaaaacaagacaaacaacacaggataaaaaaacaacacaaaacatataagttacaagatagattttttatcttgtatatcgcttgataaataattgacaagtaaaataatataaaatctattaaaatacttcatattagttatcttaatataacttaagttatatttaaagtgtttactaaaatatttcttgtattttttcattcttaaaattagagatattaaaataaaaagaatctgatgttctttttaaataattacgttagttattaattttttggttataaagaaaataaaaatgatatcgcccccaattttttaaataaacataaaatattgcctatataatttta

SEQ ID NO: 27432 - DNA, 413 bp, Glycine max
  unsure (1)..(413): unsure at all n locations
agccttgtaagccatnagatttataannttaatttaacaatagnngngattngattcaataaatgccctattaaaagatatatttttcttctacattgggtaaaaaataatatttcaacttgattttaaaatgtttctccaattcaagatacttgcacgatatccataacatgcatgatcatttggagtatccttttattatatttcttttttttacacaatttggagcacaaattgaattttctatgcgtgatctttaggaaaaatgtactttgattttgtatttgcttttacttttttggcaatggccgaattgaaaatatttaattgaataagctttttcaaattgttgaatttgacaataatacatgtgtacactactagatagtaaggtttcaacatcggttatttaa

SEQ ID NO: 27433 - DNA, 454 bp, Glycine max
  unsure (1)..(454): unsure at all n locations
ngagaacatccttgaaataaaagaagaggtaaagaaacaatttgacgctggttntttggctgtcactcggtacccagaatgggtcgccaacattgtaccagtccctaagaaggatgggaaggtgcgaatgtgcatagattatcgggacctgaatcaagctagtcccaaggacaattttcctctgccacccatcgatatcctcatggataatacggccaatttcgctttgttttccttcatggatgggttctccggttacaatcagataaaaatggtgccagaggatatggaaaagactacctttttcaccctgtgggggacgttctattataaggtgatgtcctttagactcaagactgccggngcaacttatcaacgggctatggtagctntgttccacgatatgatgcaccgagaaatcgaggtctatgtggacgacataatttccaagtct

SEQ ID NO: 27434 - DNA, 380 bp, Glycine max
  unsure (1)..(380): unsure at all n locations
agctagaaaaagcccctttgatcgatttanattgtcggagcaaaccgcgattccagagcttgaagaaatccttaccatgacgttatgaagccgttgctgaacatccactgataccagctgagggcggcgccatctaggtagagtgaggctacggtgattctctcttcctccggcgtgttctgatactggaagagttggttaatcttgaagatccatccaagaggatcatgaccatcaaagcacggaatatcgagcttaacggagttacggtggttgttcgagctgctaggggagggctggttctggtgcgcatcacgcattctgaggtggtccaggatcgaattcactctaccagagacgtctgtgtaatgttcggtgag

SEQ ID NO: 27435 - DNA, 344 bp, Glycine max
gctttccgtctacatccttcctactttattattgaggtctctctgagtctttctgaagcgagaaaacttgcaatgttaaaacttgcaatctttcctcctctttcgttgttcaagaagatgaagaagattacatcgtcgttcatgacgtgattgaagtaaaggaatcgccaaagccgcaaccagaacctcaagtgacctatattcagcatagagttcaagaaatcgtagaagaggaaccagagagagaactaaaagttgacgtggaagcggaggagacactacaggcaatgaaggaccccatggagatggattcgcaagtgaagaagagttctagccatgatttg

SEQ ID NO: 27436 - DNA, 423 bp, Glycine max
agcttaaagtatgcccgagttattcatctctatgatatgttgtcgaagtattggcaatcagaattgccattccttggattatagggttgaaccaagctcatgcttttacaaaaaggttcatcaagtcaagttgaaatatggaagtaaccgtcctgcaaaattggggcaaaagatgaattgagtcacatcactgcttcgtctactgccaaacatatttaggattgttgatgtccttgttacttccagtttcaccttgacaaagatgtcatggaccatgttgaaaatctaaattgattcaaccccatatcctgcgtaaaaattcccaatacttcgactgtacatcattcgcatgcatccatgcttttcattggttgcattgctcattgcattctttccttgaaaaataaaataaaataaaataaa

SEQ ID NO: 27437 - DNA, 435 bp, Glycine max
  unsure (1)..(435): unsure at all n locations
taagtcttcatacaattaatatagaaacctataccccaatgtcacatcctattagagcattgtgtcccgacgtacttcatcacaaggatccttagagcaattcacctagtcatctactcccccacacacagagttcaagatcatcacaggatccaaacacaaacaacacatagggagtgagttatcatattcctaactaatacgagaaacaatgacaaccttgatatgcatatgatataaatgagatacaacttacacataactcacgtaagtccaccactatgtcattgaaaattcactcttcaatcatcaatcacattacacatgaatcacacactccgatcgagacatcataacacattatatttataataaataattaacaagcgtatgctacagttatgctaagactnctatatgcaatatggtaccatg

SEQ ID NO: 27438 - DNA, 329 bp, Glycine max
agcttcagatatttgacgttctagctatttctcttgaattattatcttgtttcttaagctcatttacctacgcctgggcttggctgggattgagtaggcttatgtgacatggcaacagagattgcgaagttaatttatggctttgggttgcagatgactgatttcagtgataggctaatgatcaagcttttgtggggatgtaactgtgtttatatgtcttgaaggtatttctagattaacggttaacattcattagacctgtaccttgctgacaagaagatactggctatggcgaggcaaacttgctgaatgaatcttaagtgccatga

SEQ ID NO: 27439 - DNA, 317 bp, Glycine max
caatcttaaaaactttttaaatagtttacagcatgttttattttattaaatagttttttttataaaaaaaaagccttaacctagtttcttttcttaattatcatagccttaacctagtagtttacttctttaaaaagtttgatctaacttaatctgatatagctggttaggcttgttgaacaatatggcctattgttatttctaaaggagctagataaaatatggaataaaaattaaatgacatggaatggaaggatctatctatgaaatttataaaaatctgtcatgcggtttatgtgaggtcataagtctcccat

SEQ ID NO: 27440 - DNA, 326 bp, Glycine max
  unsure (1)..(326): unsure at all n locations
actcagcttctaagaagctaacattatgtttggccaaccgccattattgaccaaatagacccttaagctctntgcttctccaatcctgccactgtcaaaaccatctgaaatggtctcaagtgaaatgccacgtggtagtttcttcatgttcttgcaatggaaaacggtgctgacaaatgttactctcacaccttcatgttgaagaagcttggagaattgaagcatggngttggtgtgaccttgagctggatatgctangaccaaacaatggactcttttggctttgcttttttctccattttggtgatgtgccactctctgcaagt

SEQ ID NO: 27441 - DNA, 412 bp, Glycine max
  unsure (1)..(412): unsure at all n locations
agcttagagggaacataaagagcctcattttttgggtaatgggangcagngcangcctcatttcaattgatcttgctaaggaccttctccaagtccaccccaattcttatgcattggttgttagcaccgagaacatcactttgaattggtactctgggaatgacctatcgaagcttgtttccaattgtttgttccgtatgggaggggctgccattctgctttctaacaaaggctctgataggaggagatcaaaataccagctggttgacaccgttcgcactaataagggttctgatgacaagtgctatggctgcgttgtccaagaagaagaatccagtggcaagaatggtgttactttgtcaagagatttgatggcagttgctggtcatgctttgaaaaccaacatcaccac

SEQ ID NO: 27442 - DNA, 468 bp, Glycine max
  unsure (1)..(468): unsure at all n locations
cctgtgattgtgtcaatctcctgtgattgtgtgtaggatctttgaagtangaaccattagcctaggtgacatctggtaaataaccagattgagatagtttggtgtggccatgactatagttctaatagcagccatgatattaaaagtccctttttgtcaacctaaattcagtttagttaaaaaaaattcagttcccttctccctaattttgatctcatgtttcccacttttttctccaatctctcttcattatctgattttatttcaatgattcaactctctccataacctgtcctgacatgttggaattttctttaacctagttagattgaagacgaggaatatcaataatgaggcataatattttgcctaaatatagttcattttatacttcaaattanaatttgcaaacctttgatgttgctacttagagcacgggagataatgatcganagcactggaaaaact

SEQ ID NO: 27443 - DNA, 404 bp, Glycine max
agcttgatcaaacaaaatctatacattttttccactttattcatacatttgctcattcaagtcattcacaaacactcatttcatatcaaacaaaccactgaaacatgagtcaatcatttcactgttcaaacaagctttttgtacaagcaatcaacactaaaacaacataaaattaaaaagactgaaatttaaagactaataaagcataaactaaataactgacatgaactaaatatctgataaaataatctgttcataatttggaaaattttaaaaactatgcagaatttaaaactcctgatcatcctgctgctgatcttctgcatactcgttcagattcagcactggagcagctggtggatcttgaacaataggctgctctggctccaatgctggtgcaaatg

SEQ ID NO: 27444 - DNA, 497 bp, Glycine max
  unsure (1)..(497): unsure at all n locations
gcttgtgactcacagtcgtgctaagccatattctgccnctccttgtataatatggattccattctggaggacagaggatcagtggaggacttcaaccagttggtgggagttctcagccaattaacagggtgtctcagtctgtggatagaggtagtggtggtagtggtgctcctgctattgttactacaccactcangtgtgggaagtgtggttggcttgggcatattgctagtgagtgcacagatagagaggtgacttgctttaactgccaaggtaagggccacctcagtaccagttgcccatatccgaggagggagaagaggagtggaagtctgaataatctgagtggacgaccaaggaccacagggagagtgttngctcttagtggtgctaatgccgcacagtctgatgaactcatccaaggtatgtgtttcataagtcaagttcccttggttgtattgtatgattcacgtgcgacccattcatttatttctcgt

SEQ ID NO: 27445 - DNA, 151 bp, Glycine max
gatccacgcctatatatgtgcgacatgggacacaaataatggtgaaatcttgagaacctaaagagatgggtctgttccatcgcacctacgtacaatcctcttgcgaatgccttgtgcgggacactggtcattctaagaaggattattggag

SEQ ID NO: 27446 - DNA, 400 bp, Glycine max
catcaacaacgacaacaacagctgcaacatctgcgcgaggacgaacagaaagactcaaactttatattttgcagagaacattccatgagaccaaaactcactcactcaccaataaagcgcattgccaaacaaagaggtctggccaccttcagaacggtacagcatctcatactgcgagccaagcctcatcctctgccgtggcacgtgacttctaagaagcaacctgaaatactcatagctgctcctctcacgccacgcttgaagaagcacagaaccgacgctgccccttgaagccaaatgagccttagcctcctcagagaaacggtgaatgagcctacaagagaatgtgagcgccacggcaccctccatggcaagacccttggccagtaacagccacaga

SEQ ID NO: 27447 - DNA, 399 bp, Glycine max
  unsure (1)..(399): unsure at all n locations
agcttcaatattcaattaattatccnncattattgtgtgttaccgcaactccttcatccctcacccttccatacaaagccaagcactcccaataagttctttcgttcttcttcattgtcttccccctctgccaccactcattcttacactctaagaagagttcatccaccaaccttattgtcctcgtcttcatcatctcctccaccacccctgcttctgccttcatcacaacgtactcttcctccttcacattcttagacaaccaagcagaaacggcgaaatggtcttccggcacaaccgcgacgctgtgagtctcanacttagtattcttcttgcgatagttctccttaaaccattgcataacacncttgttctcctcatgcaatcctacaccaatga

SEQ ID NO: 27448 - DNA, 478 bp, Glycine max
  unsure (1)..(478): unsure at all n locations
tagactataagaaatggngagaaacaggttccaattccttgtcatgacagtatatataactgcaaatctaatgtgattgaaaaactcatatgattctaagtctaataacaagtgtaacaatggtcacaatacaaaacatagtttgaaaaaattgcttcaactcttgatcaagacaaagtcttcgatagccaacttcactgtttgaagaggaatcactcagctagccatctttatcatttaattttcttgacctatttttgcttcccaattttcattcacattgcccatctgtatttccataaaagtaaagcaatatcaaaacaataataattaaatgcacaacctttaatatttagtaataaccagcttataactgcaacaatcagtatgcaaaaatgatgatgacagtttcatatgaacaaaanaacacacaangcaataaattaagacataacaaatgtaataaatttaattatat

SEQ ID NO: 27449 - DNA, 402 bp, Glycine max
agctggtacaattaaacagtttttattataatctgatccaaactaatcctaaaacttgaattgtgtagaacaaatcaacagtcatagaaacacaaatgatgagttggcattcggcaaccacatcataacatgagatgagtaatgagttgtttctattggaatgttcacaagaagaaaagcatagaatttgagggaattgaagcaaaagaaagaaagaagaaagattaaattaaaaataaccttatcataggcaaggcgtgcatttgggtcagagagaatggaataagcttcgttgagtatgatggccatgtcatggccagcagggccagcaatgtcagggtggcagcgcttctgaagagagcgatacgccactttgacctgtgactgatcacaagagctgtc

SEQ ID NO: 27450 - DNA, 294 bp, Glycine max
tgctgtgattgtgcgtgcgatcttagaagtatgaaccattaccctacgcgacgtctggtagagaaccatattgagatccatcggagtggccatgactatagatatgatagctaccatgatattaaacgctcctgcttgtctacctaaattcattctagataaagaaaggcactggcctcctccctacatctgatctcatgtgaaccacttttttctccaatctctacttcattatctgaatttatttcaatgattcaactctctccatagcctcgcctgacatgatggaacccc

SEQ ID NO: 27451 - DNA, 420 bp, Glycine max
  unsure (1)..(420): unsure at all n locations
agcttgtactnngncnggtttgtcatattttttaatnannccnnnngcgncaaatagatgcatgttgtttgtgctaatagaggatgtgagtttaaacttcttaataatgaaaatgtaagattgatttaataatgaaaagaaaaagataggaaatagaaattgtgaattagaattttctcactaataagtctaacaaaataattattaatatttactgataaaaagaaaacttcttaatttgttgtccatgaagaacttataataagaaggattaattccattgactagagcaccttgaaatacaagaaaagttntattttagaaaaaaaaaacagttaagatgcttgcatgggactgtttggaaggtaacgaatagaatataagaatatgctctgttttgtctgcatccataaagtttga

SEQ ID NO: 27452 - DNA, 432 bp, Glycine max
  unsure (1)..(432): unsure at all n locations
tcatgtgcttaatgattctcagacaatggtattatttgtattacaaaatgtcatatcaatggggaatttaaaccggngaaataacttanaagaaaaggggaaataacttttctctaaaacttttttaaatcacctttatattacactttgtttttgttaaaaaaattcaacaacacctagaccatactatcctgtcatgtgcatgaaccatatcaataaagctattttttactacctttcttcattcttcacttagtcaataatccattaatcttattcttcacactaaattaataatatgttttgtttagcctcaagtataaataaatgagtttcactgttcattntatccttgcactgccatcatgaaaagggacaacgcagtttgtaagaatgctacatgcattaacaattatatatgatgtaatatgc

SEQ ID NO: 27453 - DNA, 370 bp, Glycine max
  unsure (1)..(370): unsure at all n locations
agctntaccctttatttacattaaccactttttataacaacagcacacactcctctgctagtgtccacaacagtctccttagtccaaaagaaatacataatactgttgtatctagttcttttaaactttggcatcaaagactaggccatcctaacaaggatgcactagcaattgtactanataaatgtaatataccctctatcaataaaactagcagtgatttttgtaattcttgctctatagccaaatctcacaaactaccctcttctccctctnttactgtttatactgcacctcttgaattagtattctttgatgtttggcggccctcttcagtagagacatcttgtggattcttgtattatctaac

SEQ ID NO: 27454 - DNA, 309 bp, Glycine max
  unsure (1)..(309): unsure at all n locations
tgacattattcagacattaatcctagcgttcgacccttttcagaangtttntaattccagcatccaattgngctctcatccggngggaaagtgtatgtcctgaactctccatggttgatgccatcatctccaacctttgcttcataaactcaagggaaagaggtgtctcactangcgcttccatagacacaactggttgggtagggatcacactacgaattgatatagaccctattggttgggtaggggtcacactaggaagtgatatagaccctattggttgggaggggtcacactangcattgttgt

SEQ ID NO: 27455 - DNA, 508 bp, Glycine max
  unsure (1)..(508): unsure at all n locations
aganctgtcggctcgattgaaacttgatacttcggacattctcganacccgcgagcctgtaagcacgacctgcagcttgcacacgagacggatataacnggattatctattaaangacnagaaccccaccacggaaggtgaagtacataggctatgtattacctaatacttaacagcaagatggcatatctcgcctacctcttaaccgctgaatagtactgactgttgatacaagttgacatcattttatatacaccaaaagtaggctcgtggatacatactaacaactggatcagatagacaattttgctaggcctcaaccacaaagagaacggctcacttgtcctcaactgacaatgacatgcagtgactatgtacaatagtgtatgacacaaaagttactgattgcatgagaatacaatggaataaaaatggcgtaataactcgaatgtcacaagcctctcatattcaagagagatatgtgctgtgctgacacatataggatctn

SEQ ID NO: 27456 - DNA, 441 bp, Glycine max
  unsure (1)..(441): unsure at all n locations
agaggttctgacaaactagaggaggatgagatttattgngacatactgatgataattcttgaagtttttgtgctggtcacgaggaatctctcctccacttgttcagggattgtgatgaagtgagactgatttggcagtattttatttggatggatggtgctagagaattttatacgtgtcatcatttgcagagttggcttctttcaaatatgtctcgtgatcaatggtatatgatattaagtggaaccttctatttggggttattctacacctggtttggcggaaacgaaataaatgtcttccaaaatgagacgtggtctgctcaagatgttattcaaaaagcttgtaagctggctcacgattacaatcacggtgagcctttggaacctttgaatgatgcgagaattctaagcgattctaatcaacatataagctgagagt

SEQ ID NO: 27457 - DNA, 255 bp, Glycine max
tctgcactaattctcgctcatggcgccaattgtcactcagcgcaattccttcttgggttggaagtgcacttaacgcgctaattctcgctcatagaaattccctatcgaggtggaatcacacttagggaaacataaaaaagtggtattttcaaaattccaatagtcagactgtgtgacattgtcttataagctccagccaaaatttgaagacaatccaacggttaacgaattcgggattgcgatcttactgaaata

SEQ ID NO: 27458 - DNA, 486 bp, Glycine max
tgtctcgctaagcgggagtccacttttcacgcttagcgcgtattttcacgctaagcacaactccctctgcactaattctcgctcagggcgccaattctcactcagcgcaattccttcttgggttggaattgcacttagcgcgctaattctcgctcagcgaaattccctctcgggttggaattacacttacggaaacataaaaagttgttattttcaaaattccaatagtcagactgtggagcattgtcttagaagctccagccaaaatttgaagacgatccaacggttaacgaattcgggattgcgattttactgaaataggtttaggtaaaatttgaaatctcataatttcaacttagctcaacaaaactccacataactcaacatccacatcaagaaattcacacatgactaattcaacccatacctcaactcattcaagtcaaccatatagtcaaataacacgatacatacaattaaacatcg

SEQ ID NO: 27459 - DNA, 476 bp, Glycine max
  unsure (1)..(476): unsure at all n locations
aggccaaacgaacattgaaccttgtnctgtggacatctcaagagccacccggatgcacgcaagcctaaaaaatcttccacgagagggctatattcngttattctgtgtaaaaccgcacccacctgggtgttcaaaaattgacccgctggaagacaatatagtgcacatggaatccttgacaactcgaattgccgacaatactgatgtgaaacaagtgcccttttacataaatagctcgaaaagcattggacnaatatccctctgggatctgaaggagtacatggaatggctttccctctatacttgggcttggatgcgccaacgatgaatcctctatcttatattgggcctatctatcgcacatcatcatctctagtttcatgggaatcataatgaacatgttggtgatgtgcaccaacgttacaagccgctaaatcttctcagtgtttggtgcatcggacacacaattgactatt

SEQ ID NO: 27460 - DNA, 410 bp, Glycine max
agctttgaatctgttatcatttctggtttgtctaactttataatttcaaggattatctctaaaaattgcatgtcttctagcatgagcgactgagcatcttgaagttattttcagttgatggaatactcccaagcatcctatcatcaaagaagttggttggcatcctcctcttcctctatggacaaaatgtaacactgatggtgcttctaaaggctcctttggtctctcagcttgtgcgggcatctttcgcaataacaatgttgattttttggtggcttgcttctcaatatggtatccaaaatgctctttttgaggaattggtaggagctattcttgcaattgaaaacgttgttttgaaagggtggaatcacctttggttggagtgtgattcagttcttgttgtttatgct

SEQ ID NO: 27461 - DNA, 105 bp, Glycine max
tcagctgtatattcttccgtgacccacccatgcatccgaaacgtagatttggtctgtcgtcttgatgtccagatagagtgacgagtgagactgatgagactcctt

SEQ ID NO: 27462 - DNA, 413 bp, Glycine max
  unsure (1)..(413): unsure at all n locations
agccnagagcagtgttgtaacttgtctttaaccngnnnnanccgaangtttccgtaatatctgtaatctaatataatccttatgctgtggacctacctttttctttctttatgcaacatcttctatggagattagattttgaataactgaattgcagtatgatctggttagcactctgtaacctgctggtcagtctgtgtactgactagtgagagtgttattgtgtttttgatagctatatttttccaactttaccttctttgagacatcaaatgattttgaaatgatatgcaaaaacatttgaaattgtagctttccttatatcttgttaataattgtggcaatatgacagatatccaattccgctgtcaatgggaatgattctctgaatggtcacatcatatccactacag

SEQ ID NO: 27463 - DNA, 448 bp, Glycine max
  unsure (1)..(448): unsure at all n locations
atggcgtcccaacatgtatatgcttgaatacaaagaaatattcttccctacaagacttatacctgtcggcccgacccacaatacaacaagagagcataccaacagaccttaacgaaagagataagaaaaaaaaggtaagataacagtgtataggaaatggaaatggtcggagaagataataagtttaaattttcttctatttcactcttatgccaatttgtttgttttttttatctctcttagcataaacattatccttgcagttaactntcccacagttcagagagttcactatgcagttacgatgcaaggattacaatattctctttttgagtaactgtcggtattgagtttccttnttaattccgactgcagctaatccacacccgtctataactgagaaatggctgagagctacaggccatgaattcgtgtagggatgctcatg

SEQ ID NO: 27464 - DNA, 397 bp, Glycine max
  unsure (1)..(397): unsure at all n locations
agctntatcaataatcaatctatgatggttattccaagatccttcctatgttgatctcttgagagaaaatgcattagagcctcattttatgactcttagaaaatatttgaaatgataagttttgcaaagagagtcacaaaaagagatagaacaaatgatgtatttatagatataacagaaagaaacaaatttaattgattacaaataattgtaatcaaataatttgattaaaatacctttgttctacatttctagaaatatggtaattgataacactggggtaattgaatatctcaattaaccgagagctnttattgcttatgtgaaccacagtaatcaattacaatgactagtaatcgattattttgatgtctagtaagcaatctaagtgttttag

SEQ ID NO: 27465 - DNA, 396 bp, Glycine max
  unsure (1)..(396): unsure at all n locations
cacaactccctctgcactaattctcgctcagggcgccaattctcactcagcgcaattccttcttgggttggaattgcacttagcgcgctaattctcgctcagcgaaattccctctcgggttggaattacacttatggaaacataaaaagttgttattttcaaaattccaatagtcagactgtggagcattgtcttagaagctccagccaaaatttgaagacgatccaacggttaacgaattctggattgcgattntactgaaatacggttaggtaaaatttgaaatctcataatttcaacttagctcaacaaaactccacataactcaacatccacatcaagagaatcacacatgactaattcaacccatacctcaactcattcaagtcaaccata

SEQ ID NO: 27466 - DNA, 419 bp, Glycine max
agcttcctatataaattgaaatgaatattaattgtatggaacaatctagtggtaataaaagtaaaataaaggaatgctactctaacaaaaacgcgtggtttgaaagacattaagaaagaaaaagatatacctctcccaggtctgcgtccatgtcgcaattcaaaccgtgctgcctcttctagcttcttacaaggttcacaaatacgcacaggtgaatcaccttgtccgcgtaaaaccattctttgtcgagtacaactgccgcaaaagattcccccacacctcctacagtgatgctgaaaaataaaataaaattgcaaaaaaagtaaataaaaaaattttggacaaagaattcagtttgagttcaatcagattcattcttatactgtaaccaaaaaaaattcattcttataagcaaacgt

SEQ ID NO: 27467 - DNA, 501 bp, Glycine max
  unsure (1)..(501): unsure at all n locations
tacggacctatagaatactaagcctggcagttgctttttttgttagattggattagactattgttgtttctttcctagtccaatgtgtcaatccttttattttcccttaccactaaacaatattgccaaatgtggcatgaagttagacttaattgcaactgtactaggggttgccacacgtaatttggatcagcaataattactttagcattaaatgggtattttcctgtggctgttgtatggttctgtacaaacaacaggtaatgtttttggttctgttttgatggttatttttaagcatattaaggttattggtagtgggtttgggcttgagcttgtactagtaagactagtacttacctaattagtagtgtgtatgagcattaaattattgtattagggaatttanggtaacacattgcatcctatcaataaaacttagtgctattagttagtcctctctctcttcctttctctcaatatggtatnggagcagtatca

SEQ ID NO: 27468 - DNA, 418 bp, Glycine max
  unsure (1)..(418): unsure at all n locations
agctntattcaagacaaagtttttaagtatattcaagaggatgatcaagacagtctctagagtcttatgaagggtatattaaataagaagggaattcctaattgaagtagcaaaaagtttggccaagaaatttaagttaaaaagtctttttcaagagatttactctctggtaatcgattaccagacgatgtaatcgattaccagtggccaaaaatgatttacaacaactattaaaatttgaattcaaaatttgcactgtgtaatcgattacacatatatggtaatcgattaccagcagttattgaacgttttaattcaaattttaaagcttgtaatcgattacacacatactataatcgataccaaaggagaatntcagaaaatattctcagcaatcacatcttttcatttgttcttg

SEQ ID NO: 27469 - DNA, 304 bp, Glycine max
  unsure (1)..(304): unsure at all n locations
cagatagagcctctagagacactgataagacatcttccatggtaataattccaacggcttcttcttcttcagggagctttggaaggggacttccatctatctccaaaatatccgagtacatattttttgaccattttctgctccgagaacccctatttgatgacttgtttgtatttggaaagctnttccacttgtggagtggcatcttgggtttcaaagctttctctttgggaggcttttcaccatcaatatccaccttaacatctctcaccgagtctatttcagaggcgtgagacacggagca

SEQ ID NO: 27470 - DNA, 415 bp, Glycine max
agcttgttgacaaagaccattttgatatattgattaaaataattacaatctaattatctaatggtcatatccttcatgggggttgatttgtactctaaagaattaattgcaattgatcaaccaaaaatagtttttgccaattctaaattcctctaatattaaaattcggatttgaataaagagagcaatcattgataatagacttagtgtaagattaaacgtcttatgtgagtgacatgtgggttattaaggattaataattaaataattatttgttatggattaagttgtaaatcggtcatgggcttaagtggagcagtttctatatacaactcctatgtgatgggagtagtggttataaagggatcaatagccactaacgtgaaataagatcccttttccaacattagaatat

SEQ ID NO: 27471 - DNA, 468 bp, Glycine max
  unsure (1)..(468): unsure at all n locations
agcacctctnttctcacctcttccttctattttgggttttgtcgtctctggngttgttagactggcctgttattgtcttccatcattatcctatgtatgcagtaagcagggctaattcctttgagattcaatatatgccatccaatcgcttccttatgtttcttcagaatgtctaccaacctattttcttcttcttttgttagtgcattactgatcactatagttntagcgtcatcttcctccaggaacacatacttcagatgattaggcaatatttttagctctaccttctttttttcggacggaggctccttctttagtgtctcaaaaccggcttctccctcaggaatactttcttgtcgatccaagtccctccaggcagtctagcgcatttaccatggctntntccagcgaagtctgtggtgtctcgagaatactgacgtcttctctatcaatctcctgcactct

SEQ ID NO: 27472 - DNA, 412 bp, Glycine max
  unsure (1)..(412): unsure at all n locations
agctngagcgatgtggaagatattgaaatgggttnaggtaactgatcgcgtggggggaaaatggattttggggtcttaagttatgaataagacaacatcggtttcttaaacaaaaccgatgttaactttacaatgttaacatcggttttttcaaaaaccgatgttaactttctacagttaacatcggtttttcaataaccgatgttaagatattaatgttaacatcgagttttggaaaaatcgatgttaacatcaacttgttaacattggttttttcaaaaccgatgttaattaagtcaacttatttaccaaaatgccaccgtgcttttatttacatcgcttttgcgaaaaactgatgttaagcttgcgatgttaaatcaataatttgtagtagtgatttaccacagtattt

SEQ ID NO: 27473 - DNA, 423 bp, Glycine max
  unsure (1)..(423): unsure at all n locations
ntacaacagatgccactctatgctaaatttctgaaagacattctaactaagaagaacaagtatatccacagtgacaccatagtcatggagggaaactacaacactgttattcaacgtatccttccactgaagcataaggatccgagcagtgtcactatactttgttctataggtgaagttttagtaggcaaggctcttattgatttaagagccagtattaatttgatgtcgctctccatgtgcaggagacttggagagctggagataatgcctactcggatgaccttacagttggctgatcactccgtcactagaccctatggagtgattgaatatgttctggttaaagtcaagcatcttatctttcttgcagatnntgtggttacggatatagaggaggatcctaaaattccccataatttt

SEQ ID NO: 27474 - DNA, 358 bp, Glycine max
catgaggctggaaacactctatcatttgccaggagtaatatatagtggttcaatcaccaaagcaaagggaccttcaagttctttttggtttggtactaactcccctgacaaagttctttttcttcttattgcacctatggataatggatctggattttttttttcatcccatgttcattaatggcaataaatgttcccttgattgtgtcatgttcttgatgggatgggatcatacgtatcttctaatctacatgtgtatgacgtgctttatgaaaatgaatggaactatgtggaagttacatgtgcaaatttaaattgtgaatatacagaaaactttctaattgttctaattaattca

SEQ ID NO: 27475 - DNA, 283 bp, Glycine max
caaccctgacaagatatggatacaccggttatagcttaactacactaccactataagttcgtgtttgaaacacagctgcatatgaattcgcgtttattaggaatattgttgatgatgtcttcgacaagattaatacagctgaagcaagtctatatgttgcggatcacccggttggactacactgtacaagtggaaaaaataatgaaactcttggaggctggatctattgatgctatctccatgatagggatccacggcatgggcggtgtaggaaaatcaacac

SEQ ID NO: 27476 - DNA, 385 bp, Glycine max
gatttgtgaatatagagaaacgagagaatttgggtaagatattattatatttgattgctatgtttcttattggaaaactttaaaaaaatacatgcgtcctttgactcttacacaccaagagtaatttattttttatttccatatttcttatacctttattataaaatcatagaaacacaatatttgactaaattttaatataaaataataacttacttaaagatataatgtatattttttttggatgttaccaacattcgaactcaatctcttatgaaattgtcttacaccaattatcatatgagccacggataccggtaaaatataatgtatatttagtacttgtaacaaatataaccacttaaataaatttaaatctaacagc

SEQ ID NO: 27477 - DNA, 262 bp, Glycine max
agcttgtttttcccgagcactcgtgcattcatccaatgtttcattgttcccttctaaagccctttattggaccactagacacggtgcagattgagaaactgccaccaagggcggttgataatcagccagttcccatacccttggctattctgggccacaagactctcccgactaaccacgggccaaagcagctggtcttagtgcagtggcagggacttcaccctgacgaaacgtcgtgggaagactggtcacgctttaggag

SEQ ID NO: 27478 - DNA, 265 bp, Glycine max
agcttgttattttggaattcaactggactataaagattctttctaccatcatatgctggagtagcaccacagaggaccgcagaattgttatttaccaacttctgcttgattgctctggcaacatccttggagggatgaggagtgatttcaacattgtaatgatatatcttctgtgatggatcaaattgcaccaaaaagtggttggcaagaagagagatcacagaaccttctttgccaccagagtctggcctccttgcaacaatta

SEQ ID NO: 27479 - DNA, 261 bp, Glycine max
agcttgtacgcacatcgttcgcgtgtatgatatccactccacaaggtttgaagtagaggagaccttcaaccctataacgcaacgtggcggacaaaagtgggcagttaacttgaatggtcatcattgtcaatgcggaaggtattctgcgcttcactatccatgttcacacattattgcagctcgtggttacatgagcatgaactactaccaatatatagatgttgtttacacaaatgagcacatcttaaaagcttactccgc

SEQ ID NO: 27480 - DNA, 263 bp, Glycine max
agcttgtcaaacacggacataatcgaaagggttagtgaaaattcattatgaagataagtaagtatataacaacatacagagacttgtcatcgaaagggcccaaagcggcgtcgtatagtccatcaggcacggggtgcagcaaaaaatcgacgagaatgggactcgttatcttcacgcggctgctccgccgtatctcgtcgtcggttaggaagctgaacgccaccgcctcgacggagttcgtcgcgccctgcgaaggttgcgtc

SEQ ID NO: 27481 - DNA, 262 bp, Glycine max
  unsure (1)..(262): unsure at all n locations
agctntcatctagttaagattatacaaaggtgttacaagtgaacctaacggtttctaattatatgggccatcaaatctatcatgtgttgacagtaattgattagcccatgaatctcctcgggggccgtatagacttcggccatggcttttgctttggctaatagacgcgggaggtcttgacttccattcaaggtcaaggtgaacctatccatccatatagtcgcttcctgatgcaatgcatcaatcaccctccctcttgctt

SEQ ID NO: 27482 - DNA, 263 bp, Glycine max
agctttattcaaacagaataatccgaaaatgtcaaagaattgggtgttgaaaaagcataacaagactttctgtgattggtttaaagatacaatctttgcagatgagaatgcttcagaaacattaagaaagctagcagataggcctaaaagaaatgttataacctggcaaggatacgacataaataggtattcattttaaacaaaaacacaagatgacaaaagtacaatgcagaacagcggggtcaccctaagggctgaatctc

SEQ ID NO: 27483 - DNA, 261 bp, Glycine max
agcttttctattcattctatgtgcccgtagtggtccacattgtgtttcgtgcatttttattctcgttttgtttactttttataccccctgtcgacgtgcttaagccattttacttaagtcatttctcgcttaacttaaaaataaaataaatttccaccgaacgtttgaattgtattatccattaacttcggttaaaataaattccgaccgttcagtcgtgccgtaaccacgttggaaatcaaaaagaggtaaaaaataata

SEQ ID NO: 27484 - DNA, 261 bp, Glycine max
agcttgtttatggtaaaagttgatgcttccacctactgttgaaaaataaaagaaaataggtcaatagctcccaacatatcaacatttgaatttcaaatttcatccaataccaaataagtatcgaagaaaaaaactaaagacattcttatcattagcttattggatagcatttacgttggatgaagatttttcgggaaaaaaattgacaaaagatttttcgaaaaattggacctaacatttatgtgattgaaataaatatgt

SEQ ID NO: 27485 - DNA, 259 bp, Glycine max
agcttaggggcaggtacgaacaagtgctaggcccatgatcgatcgatcatcatcccgcatccggctaaagacgttaaagaagcgctcctaggaggtagcctagtatctctaatttttctttttaatttcttgtttcatacttgttcgttttcttgaattatatcctgaattcacctaagtttatatgcaattataggatttttagagaaaatataacaatgaacaaacacaattctgcaaaagcttttgccaaaaaaaa

SEQ ID NO: 27486 - DNA, 278 bp, Glycine max
ccacctggaggcacgccagcttgttttctccatggtatttaatagcatagaataagtgtaactcaaaaacaaaataaactgcacacgaaaggcacaatttaaacacccaacttgcaccctctatgggattatagttcactttgaagcactagaatgacaaataacataaaaaagcaaattcttgaccaagataaaagcacactttgcagtggatttctattcattaggctttactatcatttgaaggtgcacatgaatatattttcaaagggttatct

SEQ ID NO: 27487 - DNA, 256 bp, Glycine max
cttttttgtacgacaccttgtacgcaaattcactgttaatcctctcttgaatcaaagaaatttttattgatggatcttctctgatcatgcctgtcaataacataacaaaatttaaatgataattaaaaaaaatgaacataatatgaacataaaatacgtacctactacacaagtggcaattaaatctgaatcaagtttctcgtgatcttgtgtcatggtcatattgagacatgtgtgtggtccaccccattgtgtg

SEQ ID NO: 27488 - DNA, 258 bp, Glycine max
atcttcttcttctggtcctcctcatagttgtggcatgagaaaacatgctctattttcatctcccactccaagtaggcctccggatcattctttcctttaaatggaggaatgttgagtttaataccatcaattcggttttgtctaggaacaccatcattccctcttctcctcctttcttcttcattatgatctctattctccatttgatccaacctctcatggagcgcatcatctcgttgtttcattaacctctccata

SEQ ID NO: 27489 - DNA, 264 bp, Glycine max
agcttggttttgacaagtatatgataagtataaaataaatagttaaagagaaaataatataaaaaaaatattattcagatacgcttatagatacattaacttaatcatattttgtataactatatatactttaattcgaccacataagtttatatatatgatcattatttttgaaatctaactagacgcttcttataagccaggagaatccacgatacttatagaccctttcccactcccacacaagtctctgtctcttcaaag

SEQ ID NO: 27490 - DNA, 262 bp, Glycine max
agctttcaacaaatgtcttcacaaataatcatcacacagcagaaaactaacaaaactacccctcatatctcccaaaaccccatacccacgaaatttaagagagaaagaagtccacccaaacctggattttcgaagtcccactcgtagccacgcacttcacgaccccgaaaatgccctcctttcgcgatttggagcagaaatgagcaccaaaggttggagctttgttggggtttcaatggagaatggaggagaaggaaaaagc

SEQ ID NO: 27491 - DNA, 257 bp, Glycine max
  unsure (1)..(257): unsure at all n locations
agcttgtttttcattgattngatactgcttctcttatcatgtggctgatgatgtctacaatttaatgatcctttgctaccctgcaattagacacacacagatacacaaacactcacacatatagacaaacacacaatgacacacacactgagtcacagacacacacatacacaaacacactcacacacatatacagacagacacacacacacacataaaaagacaaacatacacacacatagataaagagacaaaca

SEQ ID NO: 27492 - DNA, 260 bp, Glycine max
agcttgaattccaaaaaaagcacaatcaactgctgcaacaaaatgaaaccccacattaccattcttattgatacttttatatggttagccaagtggacaaaatgacccaataatttgataagaaacttcggacaatgccaccacactgattaagaacttactaagaagagcaacaaactaaagtagagctcataccttgttaactggcaacgtagaaagcttttatctttgagcatccacgactgttccaagagcagtgt

SEQ ID NO: 27493 - DNA, 264 bp, Glycine max
agcttgtactacctttcgtgaaggtatctagtttcaaataaaattgctcattcataaaaaaaatctacatgaataacccattggacttattcaaagacgaccaaataaccaatcatcaaagaaaaaatcattaaaatcacaaataaccaaaaaaaccaaaatgaatgcatgatataattaactcactagtcattataattctcactttaagacaatcattgattaacaaaaatctcccgatagttttgtattgcagcaaagaag

SEQ ID NO: 27494 - DNA, 262 bp, Glycine max
agcttccacacatcatttttctggaattgcttctgaatagccatttagcacctactgctttctttccttgaggttctagagttgtaaactctataggccttagatattttaaagtatccaagtattattccattatcacacttagagtcaaactttcccaagttgtctttaatatttagaatgaaacattgacatctgaaaggatggaaatatgaaatgttgggctttcatcctttccacagttcatgtggagtccttttca

SEQ ID NO: 27495 - DNA, 261 bp, Glycine max
agcttgttcaataaagacagtatcatcagcatactgaaggatattaataggctctttctgttttcccaccaagtagcttttatacagatttttcgaaatggcctctctcatcaatccagtgagaccttcacccacaatattaaagagcaaaggggctagagggtccccttgtctcagacctcgagtaggggcaaattcattagtagggctaccattcactaaaatggaaatagttgctgattgaaggcatgcagcaatcca

SEQ ID NO: 27496 - DNA, 235 bp, Glycine max
catgcaacttttttcattgaaaggcttaataaactaatcattagaattcaagatgaggcaatgatatcattgacttgacatcgactatatataaataaatatgtaagacgaggttttgtttcccactataaaatatttaaataaagaaaaacatctgattattggggaaaagccacacaacttgcggggaacacaagctgacttaatcactcttcggaatgcattacatcatggg

SEQ ID NO: 27497 - DNA, 231 bp, Glycine max
caaatcactcctacatattatttctagcatgcatcgtatggtggtcccgacctttggcacgggaagccggaaggcccataacaccttctaaattgtacacatggggcactgcgcccccaaatgcgcgagtaagaagagataattgccgggctctcgtgtccgtaaaatgcattcatatcatgcatcgcataagcatctcttcataacatcataatggacacatcctgcaat

SEQ ID NO: 27498 - DNA, 244 bp, Glycine max
tatagcgagtgaatcacgcttagtgccactacctgcactaaacgcacttccaatgaccttaaaaaagaatgatgttggcgcttaacgcatcctttcccattaagcccagcttgaaagctcaacttacagaatgaatctggggcttagcgtaggatagcgcacttagcacagctataataaattttcacagaaaggaagtggcgcttagcgcatcatccgtgctaagcccacttgtcatacccta

SEQ ID NO: 27499 - DNA, 264 bp, Glycine max
agctttgtatgcactattcaatggagttgacaagaacatcttcagactgatcaacacttgcacagtggccaaagatgcatgggagatcctgaaaatcactcatgaaggaacctccaaagtgaagatttccagattgcaactcttggctacaaaattcgaaaatctgaagatgaaggaggaagagtgtattcatgacttccacatgaacattcttgaaattgccaatgcctgcactgccttgggagagaggataacagatgaaaa

SEQ ID NO: 27500 - DNA, 231 bp, Glycine max
ttgttgtaaatttggtgctagaagtgggagccatctaaactgatgcagaaatgactaatgcaaaagttcgttgttttgaaagaccttgaaatgaatgatttactgtcaaattagtcaccttttcctattgggttcatcggtgtgtttccaacataattcacttgttgtgattaacagttaatgattcttggaagagatgtgctagctggagaatgataatgactatcttag

SEQ ID NO: 27501 - DNA, 261 bp, Glycine max
  unsure (1)..(261): unsure at all n locations
agcttgatttttgattaggctanactatcacaagggattggggtttaacatttcaggagacaccatagaacacatgagcattgttaagtagagaatatccttataacatcaggcacctaataggaagaccaacacattgtctactggtctttacacatcattacttacatgattttcctttttaatagttagtttacatacctgttcatagtccacagatatcttttcatactagacacctattcactaaatatagcttta

SEQ ID NO: 27502 - DNA, 262 bp, Glycine max
agcttgttcttatcaaatcactcctacattttatctctagcatgcattgtatgttggtctcgtcctttgtcacgggaagccggaaggtccatatcaccttcttaattgtacacatggggcactgcgcccccaaatgcgcaagtaagaagagataattttccgggctctcgtgtccgtaaaatgcattcatatcatgcatcgcataagcatctcttcataacatcataatggacatatcctgcatttgtccgttatcatattc

SEQ ID NO: 27503 - DNA, 261 bp, Glycine max
agcttctttatttttgatggcctcagcaaattccttatttccgaaagggaattctatcaatagacctccaatctttaatggagagggttaccactactggaaaacccgaatgaaaatttttatcgaggcaatagatctaaatatctgggaagccatagaaatagggccttatatacccaccacagtagaaagagtttcaatagatggtagttcatcaagtgaaagcatgaccatataaaaacctatagatagatggtctga

SEQ ID NO: 27504 - DNA, 262 bp, Glycine max
agctttttactgaatttgcatcgttccaattgatttcaaaatggtgtaatcgattacaagatattggtaatcgattaccagtgtatctgaacattgaaattcaaaatcaattgtgaagagtcacatcctttcataaaatgctttgtgtaatcgattacatggttttggtaatcgattaccagtgacaagttttgaataaaaaagtcaagagatgtaacttttctaatggttttcaggtttttcttaagattataactcttcc

SEQ ID NO: 27505 - DNA, 262 bp, Glycine max
agctttttgagaaaccataaaaactaaggtagttcctaaacaaaaatcaattgaggaaacttcgccaagaatccccattgaaaaacctttattcaaacctttcaaagttagtgagaaggctaaaagaaaaattagggaacttagaaaaactaaatccttaattgaaggcgtaggtgacaaccatagtgaattactaaacaagattggtagtttacttaaagtcattccagataccccccaagcctcggaaaatacttccaaa

SEQ ID NO: 27506 - DNA, 260 bp, Glycine max
agcttcttttggaccttgaacaagcaatcaactcctcttttagaaccatgctatgtgctcgcgactggtccctttcttcccttcgcaacttgagttcactattgctaccccatagagctccgcgaaatttgttccggccatactcttccttgcgagccctcttggtctctcgttcaagggcccttacggtaattgcattctcttcccgtaacccggcacactccttccgaacgtgtgtagcagccaacttgaacttctcc

SEQ ID NO: 27507 - DNA, 260 bp, Glycine max
agctttgttttgaatttctctaagctctttaacaatgctttgaacaatatacttgtccttcatttaactgactttgggcttggcggccacgctcaacaaagtattttcgacaacctactgtacgttgatttgaccaacgctgttatgggaatgttgcgacaatccttcaaaaccttattgatacattctaagaggttggttgtcatgcggccataccgaagtccttctctatcataagtcatcgtccatttttctttaga

SEQ ID NO: 27508 - DNA, 263 bp, Glycine max
catgcaagctttttgtttcttgaataattcaaaccccttaaacagttacgacggctaatttgcttagctggtagctgcctggccgcacagataatgagaataagaactactggaacacccggatcaaaaggtgtcaaagggctgggttgccactttatcctccaaaagagagtttgcaagctttgcaagagagccaacatagccaaagctctggtggacttaatggtggcgaaaaaatgcatcctgatttcttgcagaaaaac

SEQ ID NO: 27509 - DNA, 264 bp, Glycine max
agcttgttttttaatgtgaatttgatcattaatggtacttcaaaatagaatttaaagatctgaattgtttgatctaatttgtttgttggtcatgattaaggtaaaaataaatcttggaatttgtataaagctaggagaatgattattcattttcagattagtgttttaatctgctgatctatattctgataaaagatcagttgatccatgtaaaataatttttctaattatgtatagagtcttttcttctgttttttttttttt

SEQ ID NO: 27510 - DNA, 262 bp, Glycine max
agcttcctctattgaaatagaatttctcaaatctttcccaacagtataacatgtgaaatcatcttaattttgcggtgtggataggcatatatagttcttcattcatatcatttgcatctattgttaataaatttttattataaaaatgaaaatatttgtatctattagtatttagggttcaaagagcttgagcgtactttgaactgtttcgttgtaaattatgttatttgcaaaaaaataacttagcaatttttgaatctct

SEQ ID NO: 27511 - DNA, 260 bp, Glycine max
  unsure (1)..(260): unsure at all n locations
agctttatttttgctatgaatntgcaacgttgcacttaacgccacccttacgcttagcgcgaataaatggattcaggcttaacgccagtcgtgcgctgagcctggctaaagacacttgctgcgcttagtgcactgatctcgcacttagcgcgcggccttgatgctgatgccctgccagattcttctgttgcactaagcgtgttgaagctgcgcttagcggtggatgcgcgcttagcccactaatgagctaagctcaacta

SEQ ID NO: 27512 - DNA, 242 bp, Glycine max
agcttccatctcattcctcacaaatccctccttagtggatgtagtggtggaggagacctccttacttcaccctacttctcttccgccatgacttagggagttttctttcttttgtcttcttctttacttttattgtacttgtccaaatatattgattgctttgattgttcatgatcttatgattgtgctacattgaggacaatgtgttgtttaagtgtgaaggggggggggggagaatattg

SEQ ID NO: 27513 - DNA, 262 bp, Glycine max
agcttgttttaaggatttaaggtcatcgaagtctacctttttgtcttgttctaattttgattcttctattccagtatcaaccattagacataggttgacttcctcttcatcctcttcatcaaaggtggtgtcgtccaagtcctcccaagtgcatatgagacttttcttatccttcgacttatgcttctttttgtatttggacttctcctattctgggcattctgacttgaagtgtctaggctttttttcacttgtagcatat

SEQ ID NO: 27514 - DNA, 259 bp, Glycine max
agcttttttatcaagttaccaaatgcatttcgaagcccgcgaggaagagcattcattatcttatccagctcagtttttgaatcataaacaatttttggaccccactctctcataaattgcaaccattgaggctctctgacaacatctcctagatactcggctgcaacaagctcgtattgaatgctagaatccacatacaaatgactacgagtagcatcattcctaatgccaatcccaagttttgaagacccttggagat

SEQ ID NO: 27515 - DNA, 259 bp, Glycine max
agcttgttctgtatgtaagagacatcttcttcgaccttggtaatctttgattccatctcattgaatcgcatgtcaacttgtaactccaaagtatcaaacatttcaccaacaaaggtttgaagaccatcgaacctttccaaaatcttttgaagaatagaggaatcttctccaccttgtaaatgtccttcttcatcaatgggttgagcaccctttttcacccaagagccatcatgctcttttcggtaaccaaaggatgcaa

SEQ ID NO: 27516 - DNA, 261 bp, Glycine max
agctttattcaaactcgtccaaccaaaaccaaaaatacccacgaaaagaaaagacctaaactactcacaagccacaagaatttgtatcagagattctttcaacccttgagcctaaactagtcttattcccaaaagctcaagaatctaatgttgagattatttaaacccctaccccttagccttcaccctctttagcctttccttctcaaagctctcaactctcacccaaaccggcttcaccacccttgagcataaaataag

SEQ ID NO: 27517 - DNA, 260 bp, Glycine max
agctttgaactgatattcttattattcaatgcattcctcatcttgtaaacatagtcatccaaagcattcattgtattagccttcttcatgaacttcctatcatcaacctgataattctcagcttcatgaatcattcttataatctcctcagctgaaagccttttttggtcattggttatggtaatctcattcctataaccagtggttgtttcttccacagaaacagatagaaggtcgtttacatctatagtaaagctaca

SEQ ID NO: 27518 - DNA, 226 bp, Glycine max
agaaaggggagggatttttaagaaaaaaatgaaagaaggtttggagaatagtaaaatagaaaaaaacctaggaaatgattgagtgtgtaaataaaaatgaaaggttttgggagaagaggaataggatgggtgtggaccatttgaaggttctttatttggggggaacataaaatgtgtatcctttggagaagaagagaagagaaaggaacggatctatctaatcaag

SEQ ID NO: 27519 - DNA, 149 bp, Glycine max
aaatccaaagtgtcaaacatttaacgaacaagagggtgaacaccatttaaccttttcaaaattttatgaagaatccaggagtcttctcaaactggtgatggctctgcttcataaaggggctgaataacctcttgtactaaagagccttt

SEQ ID NO: 27520 - DNA, 264 bp, Glycine max
agctttataatcttttacttatcacattaaattgattagttgatattatagaagtataagtgacttcatgtaattaaaatattaaatttcatttttgtcattaaaaacatcaagacaaagctctaattaatttttaattgtagttcatctgttagtctttttgccattggaagacaaaccattattgactatttaatctataattcatctttatcgatcctattagctcactcttctgaacactataaaaagcaaaagatgttc

SEQ ID NO: 27521 - DNA, 263 bp, Glycine max
agcttatttttttaggctccgtaaaaaaaggaaaatagcataaagagacaatggggtagagaatttttgaaatgcttagttacccttttggataatatgataagtatcttcagcagctgatcgcgtggctgcgacctgaaattggaagtgaaaaaaataaataaatagggcaattaattaaggaaagagaaagagaagagaaaataacttacagctccgatcttaaggaaaccatcaacagtgagattgagaaatggattacc

SEQ ID NO: 27522 - DNA, 262 bp, Glycine max
agcttgtattgaaactaaaaataagaacaaacctacttaatgggtccctatgtacacacaccatgaagatgttaggtgtatgagtgattttacaaaagagggttgcaccactcaaaacattcatcataccacctattttagggacttggtgcctaataatacctattctgggcactaacaaagcacaaggatttaagctcttgcgaaccaaaccctcatccaacaacttctttacttgaggaataaactcaagcccaagagg

SEQ ID NO: 27523 - DNA, 263 bp, Glycine max
agctttggataatgatttgtatacaaaagttagtcgtataaagtgactaacaaactcccccaaatttacagttttgcttgtcctcaagcaaagaaagaatagttcacttgtcctcaagtgacaaagacagtggccaatcaaaagaaaatggtgtttgattcatcaaggacatcaaccatatgaactgaatatcatggaatgcttaaatcaattacttttcacaagcatacagtttttcagagataagagcacaagcattagag

SEQ ID NO: 27524 - DNA, 248 bp, Glycine max
agcttgccttttaactactcccagcaagacttgttgcttcatcaacaggcaacgaccaaatgctatagtgttttgcatggccatgcaccgcctgtttaataaacacatccgctatttcacaaacaccctccactttatggtaatgaaagaaacgagtcttctttgaacacatgctaaccaccacaaaaatagaacttgtgcctttctcataccgtgaaagaccacttgcaaaatacatggatatgtct

SEQ ID NO: 27525 - DNA, 261 bp, Glycine max
agcttttgttgtaaactactcaatactatgatgtttgaacgtgtagttatgtgatgtgaaaccatccattttttaggataaatatttacttttataattgaatttgttaggcgttgacacttatatacttgaaagatgaaaaattaaaattttgttttcaaatttgtaaaaaatgcaacaaattaatcctactattaaatttctccattaagtcaaatggttatgcatatgtggcatttctggtgatgacatgatagatga

SEQ ID NO: 27526 - DNA, 260 bp, Glycine max
agctttgatcatcttggattgactatagaactaatctctaatttgagactctgacatactgaacttgtttttacctccttcaagaatgcgtttcttaaaaatgaaatttgtgttatcctctaaaaacttaattagtatgtgttgttgattgagtcactttttttaaaaaaaaatacttccggctaaaactacttaaccagttatttttactttcaaattactctccttgttaatttttaaccgttgcattttagggaaaa

SEQ ID NO: 27527 - DNA, 261 bp, Glycine max
agcttttatcacaaattttccgcctgttacggtgggaaatgggcacaaccaacatttggaaagaattttcatttcatggttgtaatcaacacacgtaccatggcaataagaatgcgcttatgaaaactatccactcaccagtcctgcaattcctgttagttggtgaaacgtcaccaacgcgtacctcatactccattattcaggacgaatattaccaagtgagaaataacttgactaaccaatcaatataattttattttt

SEQ ID NO: 27528 - DNA, 257 bp, Glycine max
agcttgtgtgttctgattgtggggagcaaaggctttcttcatgtccttgctctgatgagatggcctcttcgcaccgcaactcatgcactgttgaggtggggagtgttgggagggtctcattcctcattgagaatgagaataacaatgagagtaccccagtggttcttcagcgtttgaatcacaataacaaggccaaggaggataataataatgacgaggatgaggttgtggtgctgaggaggagcagcagcagctgt

SEQ ID NO: 27529 - DNA, 257 bp, Glycine max
agcttgtgcttgttaaactaaaattccttaaacctgagcaactaggggggttctactatgacttgagaaacaaaggtgatcaaataacaagcagagatttaaaaggtgctagggtgcctcctaataacgcttctttaacatcttgagctggacgcccgatgactttttaatcacgggcccctaactttgcgttaatcttgggtttgggactggggggcccatgtgtcaaacgcaacactctaacctttatggggaag

SEQ ID NO: 27530 - DNA, 261 bp, Glycine max
atgcaatcttttttatcctaaaaaaaccatgatttgttagaagcctaaccccattacaagcctagaaagtccttcagattcattttgtgtggccattgttgtatgacatgagatgaaatgcaaaggttgggacttgtgttagttgtttatgatgcaatgagcctaaacacttaagcttgagtgaaacaatgactgtgaggttgtggttgatgatccttccttgatttctgccatccttactagcttattttagttgggact

SEQ ID NO: 27531 - DNA, 263 bp, Glycine max
agcttgtgcatcggcatcatcataaggtggaatgcattggctatcaacaaatgcttcctcatcgatatagcttaccctatttactgttgatacatccaaagggcagtggttacccttagcattatcagcatcaacttattcctacacttgattttgtaccctttccttttactcgtaaccttttttatggaaacaaaaaaacaacggagaataaaggggaaggtgaactatcccttttctccataaaaggtaggtgtaaaagg

SEQ ID NO: 27532 - DNA, 263 bp, Glycine max
agcttctacttatgtggcagggcgggcttccttcaccttcttgtctccaacgcgaactttgaccattgttcttccttcccgcaatgcttcttttcatgtctgcctgagtgggcttatagcctaaaccatacttcccacgatttccttgagtatttatcaggctagttatgccgccgttgttttttcctaaacccatcccgggttcaaaaccgttccccaacataactcgggccatcattaccgctgcatcggacagacaaggg

SEQ ID NO: 27533 - DNA, 256 bp, Glycine max
agcttgatgcctctttgtataaccctttatacttttgggatctttccaatatcttctagcaacaagtcaagacaatgtgcagcacatggagtccaaaatatttttggtctcgtgacttgtaaaattttacctaaaaagaccaaaatcaataaacttgtatgagtagtgtaacaattaaaagttataactacaaaaaaaaaaacttcattaagtatgattgaatttttcaccccccaacacataattaatttccttg

SEQ ID NO: 27534 - DNA, 261 bp, Glycine max
agcttaataataaagaatgataaccaacaaatgctaaagacactaaagcaaccaaatattagggctaacatagaaggcttaggtaaaatcaaacaaataagggggaaacctacaatggaaacagcctaatataatacacaggaaaggtataagcaaaaaaaaaaaagggaatcatagacatgcacgaaaaaaagtcattcacagctaaggtagaacacaaataagcaatttacccagcagcaatggatacaaaatgtgcaa

SEQ ID NO: 27535 - DNA, 259 bp, Glycine max
agcttcttttggacctcgaacaagcaattaactcctctttcagaaccatgctatgtgctcgcgactggtctctttcttcccttcgcaacttgagttcactattgctaccccatagagctccacgaaatttgttccggccatactcttccttgcgagccctcttggtctcttgttcaagggctcttgcggtaattgcattctcctcccgtaacccggcacactccttccgaatgtgtgttgcggccaacttgaacttctc

SEQ ID NO: 27536 - DNA, 261 bp, Glycine max
agcttgttccccatcaaagataagacaaagtataaaaacaagtacaatcccttctgctcggctgctagctatcatgtccacagaaatccatatactagtatgtcaatagagattgtaaagtaatcatcacaatatcacatgctatttgctacggcctacgggaaagctcgggcgagcaaacttgcttggtgagtaatgctgactcgcataagtagtccattacttcacttgacaaggagtttcggatcaatgtcttttgtt

SEQ ID NO: 27537 - DNA, 260 bp, Glycine max
agcttgccaggtgtttttcttgactctttactgattttttcgagcttgattcctttataatgcatgaatttcaacgaaagtttttcatttcattttaatttattcatttggtctttgcccggtactatccaaacgcatccattcgtttactgtgtatgaatacgttttgtttcttgaacaataatagtccttttcatttttggagtttcttttcttctgaaaacgacttgatttgttttctaagaatttaacattttagg

SEQ ID NO: 27538 - DNA, 261 bp, Glycine max
agcttattagatcaacattgccttaatcatttccaaatatgcatgtgaattaggacgcatcaacaagaatcaagccaaggctattgtgcaaccaatcaatggggcaaaacacaccaaatgattataatgatggatggctcaaattctcacaaaggtaaaatcatcactttcaaattgagctttcaaaactatcatgacatgtagagaagaatcaaggatttcaagtcacaaaatgtcaagaacttttattttcaaaacaat

SEQ ID NO: 27539 - DNA, 261 bp, Glycine max
agctttttaatagcaagggggtaaaatgcgccaaattaattttttaggggtaaaagacgccaaaaataaaaaaattgagaataaaaagtgcaattaagcttaaatcaaatactatttctataaatagatgccagcaagtttgacaaagacaagcctgggaaataactacatatgtccaccctaactcattatccatactcagaacaaaaaataaattatattacacccttagctaaacataattaataatcctggcaattc

SEQ ID NO: 27540 - DNA, 230 bp, Glycine max
ataaaacactgaaggcggcgggaaaaacgggctcagcccgagaaaccgaaggatctccctaaaatcagggtggaaactaaacaagacacttggccatgaaccgaccggtgggatcatggagaagatgtctggagggcgctaaaagaaaccgctcctgagggcatctcaaattaaaacacttgagccttagactccggggagccgaggaaaaacgtgataccttcttctta

SEQ ID NO: 27541 - DNA, 261 bp, Glycine max
agcttgtatactataccttcgaccgaacacggccgtgtttctgtctaggcccgggttcaaggcgggctgcagcaccggctccgcttccctaactgtactggaggcggttgcggtggctttatcctctatggttttctgaagttttaacatgaccttcgagatggaagtcatttgatcttttaaggccgatagatcggccttcatctgttcctgcacgccctcttcattatccatttttctggatcgagtgttataggggtg

SEQ ID NO: 27542 - DNA, 263 bp, Glycine max
agcttctagttcgtgcttgtctgatttttcccttacatttgctagagagcaaccaccttgaaattcatgagacagtttggcaaacaaagcattatcaagggcagtcttgcctatgccacctatgcccaatattccaagggttctaacttcatttgacccaatttttagagatgattcaatctgttcataattgtcctcaattccaaccagtccttccagtttgtttgggtatcttggagtcagtttttgcaaaacatccccaa

SEQ ID NO: 27543 - DNA, 261 bp, Glycine max
agcttgttattattctatacgaggtatcttccttgggtatagcaatatctctaagggctaccgtgtctacaacttgcaaactaagaaactcgtcatcagtcgagatgttgaagttgatgaatatgcttcatggaattgggatgaagaaaaagtggagaagaacgttcttatacccgttcaactacctcaagaagaagatgaggaagaaaacccaggtgaaccaccttcacctccatcacaacaacaagatcaagaactatc

SEQ ID NO: 27544 - DNA, 259 bp, Glycine max
agcttgattatgttttaagcttgacacgcccaactctctggagtggcatttgtattgattgttgttttgatagattcattttagactctaaatgttcatatgtacatcatgcatcatcatggaggagtaagaagattgttgctaaaattataaacttttacagtgcataagaaccattgttttaaaagattacaagactaatcataattgattacacaagtgtttatagcttccagagagatttttgtatcggtttaat

SEQ ID NO: 27545 - DNA, 263 bp, Glycine max
agcttgttcttttatgttgcaacgctatattgcccaaaatattccctggattcattaccatgaagtgccaggttctggacacttgtttccatacatggaggaagtgagtgccactatcatcaaaacacaattagtggattaaaaataattcgctggatattaattaattgttgattttggcatgtcaaattcaaagacatgaaccagaaatcgtgcaattaatcatttctttttttgataaagttcaatcttattaaggacta

SEQ ID NO: 27546 - DNA, 261 bp, Glycine max
agctttttttagctaggcactaacaatctccccctttggcaaattttgtctaaaacatacttagacacttcctgagcaggtacgagcagttatgcaagtgggatcaacaactttcattatcagagtaatcaagcacagcggaaattctgcaagttgcaagtcgtttccaggatgtcaagacatctcacatgacatcagctttctgcttctgctccccctgtctccatgctcttactccagcatcttctatcagctactaat

SEQ ID NO: 27547 - DNA, 261 bp, Glycine max
agctttttcttttgatttcttgggtgtgaaacttaccaacacgtaagggaagtaattcccttataaatgcacctagacatgagaatatgcccttaagatagctggcagaggaggggttagtcttgactcaagctgtcactagaaaatcttgcagaacaaaaaaggagaaagacatcctttagaatggaaatgtgatttaatagaattttcttggcaggaactttttctgatcagttattgatctatctatcacctatttat

SEQ ID NO: 27548 - DNA, 260 bp, Glycine max
agcttatttttttaggcatgagccaaagaaattcatgttcatatgtgacttttgactaataatattataagagttagagttaaccataaatgataagatgttaacaattatttttgatagacttaaccaccttattatagcatgattacaaattttcatcatatagtgtgcctaaattttaagaatagtaagagctaacatttgtataaacacttatcaaatcgtttaggatcatcaatttttttgtagtttctaatgaa

SEQ ID NO: 27549 - DNA, 257 bp, Glycine max
tagcttgttttcttacacgtgtataaaagtctactcaaaggaaataaagtcaggcagaaagttaaccctagttcttaaggaggaagccttgccctcgaaattaaggcccatactcttttttctctctccctccctcactcgtcttcttctttctctccttccccaccatcagcgtctgtctctaacatccaatgtaaattgctagctaattgctcttcgctaataaatacatataaacaaaccagggtttcattcct

SEQ ID NO: 27550 - DNA, 259 bp, Glycine max
agcttgttttagcgtttatgcgagacagagaccaacatgttagctatcatcgccaagtaccaagaagagttaggtctagccacggcccacgagcatagaatcgcggatgagtatgcccaagtatacgcggaaaaagaggctagaggaagggtgatcgactctttacaccaagaggcaaccatgtggatggatcggtttgctcttaccttgaacgggagtcaagaacttccccgattgttagccaaggccaaggcgatgg

SEQ ID NO: 27551 - DNA, 283 bp, Glycine max
catgcaaacatttttgtttaaaaatggggcacccatcacatgtggaactaggaggcggcccggcgatggagcaaaacgattctccacgaccacaaaccacgtataacccaccatcccgaggggcccacctccaactgagctcaacgtaaaaacacgcagcccataacccacgggccacaaaaacggccgggtaccaatcaacaataccgcaccaaagagaaccacgaacactccaacagaaattcaaaccattgcaaaacatgcacagaaactaaccacaagc

SEQ ID NO: 27552 - DNA, 262 bp, Glycine max
agcttaatttatataaccaaatagatcaatatgaaatttggcatagagaagaatccgatattcaacctcaaactgatgatgatgatggggaagaaggtgaggagggttatttgttggctcgagatagaactagaaggcaagttaaacccctaagaagtatggttatgcagatttgatgacattctctcttgttgcagccagtgaggttatgaatgatgaaccaaactattacaaagctgtcattgattgcaaagagaagggt

SEQ ID NO: 27553 - DNA, 261 bp, Glycine max
agcttttatttttcaatttcgagcgtctcaatatgttatgtccccgaatcaaacatcagtgtgaaaagttatgaccatttcaatttttctagagctatcggtgttcaaattccagcgtctagatatgttatgcacttaaatcggacatccgagtgaaaagttatgaccatttgaatttctcaagagcttctgttgttgaatttctagcatctcgatatattatgtccccgaatcggacattcgagagaaaagttgtgacaa

SEQ ID NO: 27554 - DNA, 263 bp, Glycine max
agcttatttttagcacaaaatttcatgctcttctctccctctcccttcattcatctcctccttcctccaagctcttatccatggcctcctatggtggtgagcttcttctagactcatcttctccttgaagtggcgtctcctctctctcttccttctccattccgctgccattcatctttcaagaagcaaaggaatccattgatgaagaagatcctaggcctacaagctccaatagagcttgcatcaactactaatatattttt

SEQ ID NO: 27555 - DNA, 259 bp, Glycine max
ttcttttttgtgtgtagataaacatgatcctgatcgatctcattcaatttcctcaaatctcctatcatcaaaccagttacctccctctttctttaatttggcttaccaaataaaagcctccctctttctaagtctgcagggaattaccctactcccaagtcccaacaaattccattcaacccaacctttattccactaataatttgaagaaaaaaaagaagaaatttagtatgaatttcaaaaatgaaaagggatgagg

SEQ ID NO: 27556 - DNA, 261 bp, Glycine max
agcttgtttttggaattgcgaaagcccccctccatcattaggatttgttcctgctatctcaaacaaacaaatcaaacgtaacaagacaattatagttgctgtttgaatacctcacccactcaagtgtatcacacaattatggtttttctctaatgaaacactcttgccttttaccactctaattccccttgagttcttaggcaattcaagagattatggccacaacaaagaacaattcaccaatatgtgtaaggtaaggct

SEQ ID NO: 27557 - DNA, 261 bp, Glycine max
agcttgtttcatcgtttatgcgagacggagaccaacatgctagctatcatcgccaagtaccaagaagagttaggtctagccgcggcccacgagcataggattgcggacgaatatgcccaagtatacgcggaaaaagaggctagaggaagggtgatcgactctttacaccaagaggcaaccatgtggatggatcggtttgctcttaccttgaacgggagtcaagaacttccccgattgttagccaaggccaaggcgatggcc

SEQ ID NO: 27558 - DNA, 261 bp, Glycine max
agctttttaaatagccttacagtgaacaaacactttatctggcaactccttgacaaatttctccgcagcatatttccaatccgtctcactgcaagaacaaacaattaacacaccaacctcaaaatcagttaatttcatcacacacacaaatggaacccacaaagtaacagtactcaattcaaaaaatcattccacaaagcctcaacaccaaatcaaattgaactacagcaccagcatttcatcaaaattcaaaatccaagt

SEQ ID NO: 27559 - DNA, 260 bp, Glycine max
agcttccatcttgtggtaatcagagcacaagagcttcaactaggtgctccgtaaacctccattaattttttttgctttaccttctcttccattgttgtttcttcatttttttctccatgtatctcctcacatgtcttgtgctaaatgtttttaacatgattctttagagtttccaccgattaaacttgctatataagctagatttgattttctatggttcaaatttcttgtttttgttcttgaaccatgaattgtgttga

SEQ ID NO: 27560 - DNA, 261 bp, Glycine max
atcttgtttttgagcctgcatattagaagactgtttcaattttttattttatgatgtacaaaaccgcttacttagattggatttggggcatggaacaatttaagttgtaccaagttcttttagaggatctaaatttgaattggtagggttctttttaattggtttggcatgggttcaattttctgggtattggtggcaaatacccctaagaaatcattcctagtggtttattttccacttttaacttctatgcctctttat

SEQ ID NO: 27561 - DNA, 258 bp, Glycine max
agcttgtttacttcaatttttatgtgtcaccatacttacatttacaatcttaaaaactttttaaatagtttacagcatgttttattttattaaatagttttttttataaaaaaaaagccttaacctagtttcttttcttaattatcatagccttaacctagtagtttacttctttaaaaagtttgatctaacttaatctgatatagctggttaggcttgttgaacaatatggcctattgttatttctaaaggagctag

SEQ ID NO: 27562 - DNA, 257 bp, Glycine max
  unsure (1)..(257): unsure at all n locations
gcaagcttgttatttgagtaacnattgaggaaaaataatactactatataaaaatcttgatatccgcgcacattgtgattgaaatctatccaaaggtccacattcttgggtatctgattctataataaagaatgttggctgatttcaaagctatcccatctgattttagcgaccacactactctttttttccaagctcccagttctcttaaacggtgattcaattcttgtcctctttaaagagttaacgagatttca

SEQ ID NO: 27563 - DNA, 429 bp, Glycine max
  unsure (1)..(429): unsure at all n locations
agcttattgttaatgttcacgtaatgcactnttccattctctacttctaattgcaattncgtttttatttcttctgctacctgtagtttcaattacggaactgctctaatttcaatagcatttctattaccaatttcatttacgtttctccctttagcttcaattacgttttctgtttttggttgaaattatggaaggctaaatntctggtgttgtttccttctgaggacgacacttaactctcttcgaggttctggttataatgtcgcttcctggcagttttcccttcaccaattaacccacatgcattctgttaatctgtgcactcttcatgttcgattaatagcctctgtgcttaaattgcgttcatgcttaatgaacaaggggttaattggggtatgtgttgcttaatcacatattgacaaccct

SEQ ID NO: 27564 - DNA, 131 bp, Glycine max
acacaattatatgtctactatcattgatattatttctttcttcgtcattgagggaaacacttgggctgccatgtccctccacctttgggcgtattcttagaaagatccgtgccccctttttcacatgtact

SEQ ID NO: 27565 - DNA, 348 bp, Glycine max
tggtctgaactgttcactcggatctctgatttaggcacatcacatatatagacgctcgaaattgaacaacggaagctctcgagatattcaaatggtcataactctaacttggaggactgagacaggcacataatatatcgcgacgccccgaattcaacaacagaagcacttgagataatcaaatggtcattacttttaactcagatgtacgtgtcccgcgcatcacgtgtcgatactctctaaattgaaccaccgacgctctcgagataatctaatgggcaaacttcccactctgggaccgaatcacgagcatcaacatcgagacgctcgtaattgaacaatggaagc

SEQ ID NO: 27566 - DNA, 177 bp, Glycine max
gttcaatttctatcgtctctttatattatgcgcttgaatcggacctccgagtgataatttaagaccatttgaattgctcaagatcttccatctatcaatatacgaccacctctatattttattttcctacttctcatctccgtactaaactcttcttcatttaaatatctcactatc

SEQ ID NO: 27567 - DNA, 280 bp, Glycine max
agcttcattagagaataacaaattcacctcataatggtttagtaacatttagcaccattatcaatttcaaacagggtgaccaaccattatgaacaatgcaatatgtgaatatactcaattcgaaggctcttatatataaagggccaaggtcaactagagttgaatattgtaatattgaaaaaatgttcatggttgaagcaataccatcaaggtcaactagcacatttcagtcacattttcaagaacaaagagcacattttcaggagatactaacttgggg

SEQ ID NO: 27568 - DNA, 367 bp, Glycine max
  unsure (1)..(367): unsure at all n locations
atgtctctnggtgatggtattgagatgcccgatctntttagtgttggccagtttggagagcaagtctactctagtgttgntctcccttggtatgtggaacaactcatagcaatcaaagtcatcaatgatggtttttgcaacatgatagtacttgaaccttggcttgatatntgtttgcaacttgcccttaaacaaggtatgagtcagtgtaacaccttatctttttggctttaacttcttttgctagctttaggcatgttataagtgcctcatatttagcttgattgtttgatgctttgaaattgagcttgagagcttgctctaaagtaacattgtcgagcccttcaaggatgatgctngtccctac

SEQ ID NO: 27569 - DNA, 435 bp, Glycine max
  unsure (1)..(435): unsure at all n locations
agcttctacattcaatntcgagctnttcgatatattacggtactcaatcggacatccgagtaaaaagttattgtagtttgaatttgctcagggcttcggtattccatttcgagcgtctcgatatattacgggactcaatcggacatcagagtaaaaagttattgttgtttgaatttgctcagagcttcagtattccatttcgagcatctcgatatattacgggactcaatcagacatcggagtaaaaagttattgtagtttgaatttgctcagggcttcggtattccatttcgagcgtctcgatgtattacgggactcaatcagacatccgagtaataaagtattgtcgtttgaatctgctcagagcttctacattcaatttcgagcttctcgatatattacgggactcaatcacacatccgagtaaaaagttat

SEQ ID NO: 27570 - DNA, 306 bp, Glycine max
  unsure (1)..(306): unsure at all n locations
actcggatgtcttattgagtcccttaatatatcgaaaagctcgaaattgaatgttgaagctctaatcaaattcaaactacaaaaactttttactcagatgtctgattgagtcccgtaatatatcgaaaagctccaatgtgaatgtacaagctctaatcatattcaaacgacaataacattttactncaatatctgattgattcccataatatatcgagactctcgaaattgaatacctaagctctgaacaaattcaaacaacaatatacttntactcatatgtccgattgagtcccgtaatatatc

SEQ ID NO: 27571 - DNA, 481 bp, Glycine max
  unsure (1)..(481): unsure at all n locations
agcttagtggattatggggcacccgtcatatgtggtactaggtggcgatcgggcgatggcacaaattaactctcccccttccacaagtcaaacataaacacaccatccccagttgcccacctttaaattgagctcacgcactcctacgtagcccttatcctcgttcctctcaacaccgggtccccatcaacccctccaagcttccacaatatccaaacaattcgatttaatttatcatgaaactaccctaaaccaagaaaacagagtagaggcagaaaactntgcccaaagctcattcaaattccacaattttccctactcacataccccagtaatattctcttcgttctgattcgttaaccattggatcaccttgaaaattntactggaggttcctagtacataaatctacattttgaccgttgggatctgctaganaatgcatggaacacgaaatgtactacccttcccgtgactacca

SEQ ID NO: 27572 - DNA, 376 bp, Glycine max
  unsure (1)..(376): unsure at all n locations
agtttctttgaagttgtctaactntagaatgcatgaagttgtaaagaagtgttaagaagagatgaagtcttacttcttcaagaaaattcaataaggcttaaacctagttccaacaggcatcaaaatgactatcctgatggttcttcaaaaagctccatagaatggaacctcagaatatggttttgacaactatcacacttctatgttgttatatcgttcatcccaattcactaatgtattttatccctaatcccttaggtgatagaccttaaatcacttgtcttgattctcaatcctttggcaaaccaacacaagcaatcaacattatcatttgggaattagcgaggcttaaccaagtttattctatccctagaga

SEQ ID NO: 27573 - DNA, 411 bp, Glycine max
  unsure (1)..(411): unsure at all n locations
nagctgaatattagcaagaatgataatgtgccaagtcaataaccaaaatgcacaatgatacaactaaattaatgatatanttgtattatggaacttattntatttatcttattctaaattntacataaatgtaaaatatctataaaaaaaatgtgctatacgtgtagagattaaattaaaaaggcagtacacgtataaaaattaagttaatcttatttttagttgaaccaataaaaagtggtcaaatttattntaaattcacgtaaatacatctaatttttagttcctgtaatatttgtaagtataatttttatgtatttcaatagtcactcgatcaattaatgaaaattaacattattgataaaaaaaaaaaatgcagacagagtagagtagaggagggttaaaaacgtt

SEQ ID NO: 27574 - DNA, 224 bp, Glycine max
  unsure (1)..(224): unsure at all n locations
cactatgatactaagctatcctttccaccttntcagctaactcatttttactcccctgctagcccttgcagagcttaaatagttcattattttccaatcgagtgcatagcaacttgacaagcacactgctaaccttagacgacaactgatggttcgacttcacagcttnngcgaatgcaacggtggcactggctatcttaaagctctccactctctatatcatg

SEQ ID NO: 27575 - DNA, 451 bp, Glycine max
agcttgaaccaggataacagtttatatctatatcaattagagtttatcgaagtagaagataccacaccatggcaagctaatgtaacttgctccaagggcaaagtttccaatccatccattttgttttaactagaaagaaatgtagaacttggtcaaatgatcaaaataagcaagagaaatagaaaatataaagaaaaaatcaggacaattaaaaaaaaactacctttaaaggaggcgcagaatatatataagacagtatggctccacccactgcaaggtaaaatactatagggaaatcatgccctgcctgtaaaagagaatacttttaccaatcaagcttctgataaaaaacgaccatgagactattgtgtattgtacccacccatatgtccaatataccagccagagaaagaccaccaagcagcaacacccatatttgagtgattacctg

SEQ ID NO: 27576 - DNA, 196 bp, Glycine max
  unsure (1)..(196): unsure at all n locations
ttgctcacctttagtagaggataatcctntaatctgtttagagtatactcttcctctatatgaccattaatgaatgtcattttcacatcatntgatgtaactcaaagtcaaaatgagctactaatgtcataattattctaaatgaatctttcttatatacaagagaacaattctctgtgtaatcaatttcttctct

SEQ ID NO: 27577 - DNA, 467 bp, Glycine max
  unsure (1)..(467): unsure at all n locations
agctngcatgatttacatctccctctntctcaagcaaattcttcttgatatcatcaaaatcttcatgatttacattctccccctttttgacgatgacaaccacctggtggttaggagcaacaacaaagaaaatatctatttgcatatagtttactcccccttggttttacaatgattgcttatgtgagacaattgaagatttcatatttttcatatataaaaagatgtctcataaaacaatagataattgttcttactattttatcttttatctttctctccccctttgtcaacataaaaaacaaatcatgaatagaaaggagaaagatgttaccacttgttgcaatgtatgagaataagtgataccaaaaggcattaaaacaatcattcaatattaatcaagcaaagacaagtacgataacacatcaatcgaacacaatcgaacacaatcgatcatcaaatatttc

SEQ ID NO: 27578 - DNA, 352 bp, Glycine max
  unsure (1)..(352): unsure at all n locations
gctngctttagggtttctatggaagctgaatcttaagcttattggggtcctttaatggtgaatttccaccatggagatgcagcggaagacaaaggaaataaggtgagaggaggcgccatccattaaggaataatccatggaataatgagcttcaccaccaagatgagccttggataataagcttggagaggatgcttcaatggaggaaaagaatgagagagagaaagagagaggggggagcacgaaattgaaggaagataaagagagagaagttgaactttgagttgtgtctcacaagactctcattcatcanagttacaacaagtgttacacatgcttctatttatagact

SEQ ID NO: 27579 - DNA, 443 bp, Glycine max
  unsure (1)..(443): unsure at all n locations
agcnnttggaaatgatttctatacaaaagttagtcgtataaagcgactaacaaaatcccccaaatttatagttttacttgtcctcaagcaaagaaagaacaattcacttgtccttaagtgataaagacagtggccaatcaaaagaaaatggtgtttgattcatcaaggacatcaagcatatgaacttaataccatggaatgcttaaatcaattacttctcacaagcatgtagtttttcaaagataagagcacaagtattagagtcacagctgaaataagctagtaagcatgacgaanatcaaggaaggatcatcaaccaaaacctcacagtcattgtttcactcaaactcaagtgtttaggcttattccttcataaacaaccaacacaagttccaacctttgcatttcatctnctatcatacagtaatgaacacacaaaaatg

SEQ ID NO: 27580 - DNA, 375 bp, Glycine max
tatgcgcatatttccttaaaacgttctcttgcacaagacattctattaaccgaaaaatatgcacccatatacaatcaatgcagcttcgttacctagattatttacacgtacttccaaggtgtatttgttacttacatcacacacctccttggctaaattcacatacatgcatactcaaagcattttggggtaccaaaaattgcacatgtgcacatcttggtatttctaacacctatacatacacaaacttcatgatgaatcttgactatctacacaataaggtgctacatttcatgctcttttcaagtttttgctacctatagccgcatgcaaattcaagtatattttcctttgctgactaaaattgtattcaaa

SEQ ID NO: 27581 - DNA, 428 bp, Glycine max
  unsure (1)..(428): unsure at all n locations
agctntatctaanattntgcattntgtatgatagatgttctctctttggcattgagatagatcacaagattgacctccaaggagccttctaaccattaggaggtcaccttcttcatgggggtagacttcctcactagactctttcaccccttacttcatcttcacttccactagaggaagaggaagaagtagtctcctcttgactactataaatgtcttgacccctcataatcatggttttctttatggggcattgagaggcaatgtgacctctcccaagacatttgaagcatttaatgtttcttgttctttcttgggaactagtcttaggggtggatttctctattgtgttacccttatcttccttgggttntgaaagtgcagcccccaaaattccttggagtttgtccttccttggataagagtga

SEQ ID NO: 27582 - DNA, 377 bp, Glycine max
  unsure (1)..(377): unsure at all n locations
ctggactgtgctagagagaataacanatgatcaaagtgaatattgagccatttctagggcaaaattgggtgttgaagagtcaaatnttgattcggtggaattttatgtgtaaatntagtttgagcaagtttagattgaggttatggacttgtgtgaggtgagagtttgctccaaaattacctcattctcaatttcacttttcaaacctagaaaacccattgaattgaggggtgttggacacctagattctgtgttgctgtgttgtaaagcttgattttgggttagacatggttgatacatgatttgggacttgtaggaattgatttgggcaagattggatgagaggaagtgtgattntcgaaatctgcacttatgca

SEQ ID NO: 27583 - DNA, 440 bp, Glycine max
  unsure (1)..(440): unsure at all n locations
agcttcanaccacagcaacacaaaatctatgtgtccaaaacccctcaattcaatgggttttctaggtttgaaaagtgaaatatataatgaggctaaattgaggcaaactctcacctcacaccagtccataacatccatttagacttgttcaaactggatttacacctaaaatctcaccgaatcaaaatttgactcttcaacacccaaatttgccctaccaatggctctttgctcactttggtcattagatattctctctagctcagcctaacctttctcacatgttctaaatgacatttcaagctagtattaactcactctaacctccatctaccacagaattcagacttagccttccaactctcagagtctcactctttgtccactcataacgtcacatactcacttttctaacctgggttagttctacccttcatctc

SEQ ID NO: 27584 - DNA, 159 bp, Glycine max
  unsure (1)..(159): unsure at all n locations
agattcaggttctcaagtntcatccttttcccattttagaaggaaagagaagagatatcaagagtgaccaaccttgtcaactgagagatctctattggaatctgtcccatatatgaagcctctgacagattcaagtgagttaatttctctaacttgttg

SEQ ID NO: 27585 - DNA, 397 bp, Glycine max
  unsure (1)..(397): unsure at all n locations
agcttataacgcttcttagttctcatgtcactctaacttcgtaaatacaaataaacggcatataagttccttcacacgtcattaaaagacaactttnttttatttaaaaaaagataacttttgaaatagttattattttgaaaaacttttatgtaacgtgctaatgcatgataatataaaacaaacttttacaatgacactgaatacatttaaattgaatgaataattagtgttattgaatacatgaaatctttaacatgaaatgcaataaactaataaacacttataattgtgattgatgcagttatcttctctggggcctactcatgacgaaatagactttgagtgtttgggtaacttgagtggtgatccttacactcttcacacgaacgtattc

SEQ ID NO: 27586 - DNA, 234 bp, Glycine max
tttctttgttatcccaacctctttacaatcctaatatagtccttattgatccacattgtgcatgtatgataacatttactgtgatgatgtgcaatatttggaattttactattcagttgttataattcaaatacttttattgatacacttgtaagtattagatatacactatttcttacgaagactgaagtttattgattattcattattatctatcatccttgctaaccattt

SEQ ID NO: 27587 - DNA, 479 bp, Glycine max
  unsure (1)..(479): unsure at all n locations
agctgtctcagcgtttatgcgagacggagaccaacatgctagctatcatcgccaagtaccaagaagagttaggtctagccgcggcccacgagcataggattgcggacgaatatgcccaagtatacgcggaaaaagaggctagaggaagggtgatcgactctttacaccaagaggcaaccatgtggatggatcggtttgctcttaccttgaacgggagtcaagaacttccccgattgttagccaaggccaaagcgatggcagacacctactccgcccccgaagagattcacgggcttctcggctattgtcaacatatgatagacttaatggcccacataattagaaatcgttaggaaacttgtatggtctctcagaccttgactagatatgacttccttnttgaaataaaatgagttggtcccatgtttctactccaaaaaacttgtgcaaatcaaatcactcctacgtttcatctctag

SEQ ID NO: 27588 - DNA, 224 bp, Glycine max
  unsure (1)..(224): unsure at all n locations
aatctcttcttctatccatgcactctctctatataattaacatgctttcatgcttatnntgtttgtcatatagttttgcacttctcattacattcattccttgaaatcagaaaaaagtaatcattgtgctaataaagcaatactacactntataacacccttactatactcatgccaagacaatgattatgcnttacatataacaattatagatcatattaatg

SEQ ID NO: 27589 - DNA, 473 bp, Glycine max
  unsure (1)..(473): unsure at all n locations
agcttcanatacttgtgtaatcaattacaatatacctgtaattgattgaaacaaagagttttaaccactcgagaaaatttctaacttcagaacctttcttcgtactcttacatgataatgcaagatacgcatatgaaatgataacgataaagatgcaacgcaaaatacaacaatcaatacaaatgccactcaagagagttgagcatgtaaaagacaaaacttcttcaagctttcaagcctaagtcttcatgttgttcctctatctctaacacttataacactaagcaggctttcttttggtctcctttcaatgttatgacttgcatctcattgatgaggaacttcatggccaagtgaactatcgaaatcacaactctcagggcattcaaggttggtctggccagtatggtgtngtaggatgattgtagcattaccacaatgaacttgatgatgatggttctggtctcgtgcct

SEQ ID NO: 27590 - DNA, 217 bp, Glycine max
  unsure (1)..(217): unsure at all n locations
aactctatgcacaaccccatacttctggagcaaggatgacaatgacctgttacaaaagtggctctcctagtcactgatgatggctctaggcacaccaaacttgcaaaaaatgttcgatctcacaaaatccacaacaactctagaatcattanttatggtggccttagctgctaccctcctttaaacataatcaacatcgctcatgtatatttgaata

SEQ ID NO: 27591 - DNA, 455 bp, Glycine max
  unsure (1)..(455): unsure at all n locations
agctntaatcaagacaaagaaattaaagatattcaagatggatgatcaagacagtctctagagtcttaggaagggtatattaaataggaagagaattcctaactgaagtagcaaaaggtttggccaagtaatttaagttaaaaagtgtttttcaagagatttactctctggtaatcgattaccagaggatgtaatcgattaccagtgaccaaaaatgatttacaacagctattaaaatttgaattcaaaatttgcattgtgtaatcgattacacatatatgataatcgattaccagcagttattgaacgttntaattcaaattntaaagcttgtaatcgattacacacatactgtaatcgattaccagagaagattttcanaaaatattctcaacagtcacatcttttcattttgttcttgatggccatcacaggcttacatatatgtgatatga

SEQ ID NO: 27592 - DNA, 248 bp, Glycine max
  unsure (1)..(248): unsure at all n locations
cttctctttttaatttaatttagtagtttatcattacttcttctttatacaatnnttttgtggttgtttctttccttaccacaaccaaaaacacccaacattctcccccaaatttggaacaaatttgctttgaaccacaatgctctcctacaacctaaggaaagctaaatggagattataatttcaatcangcatagggttcaactcattcaatctaattcaagctcaacatgggtgcaagggtatca

SEQ ID NO: 27593 - DNA, 481 bp, Glycine max
  unsure (1)..(481): unsure at all n locations
agcttgtgcaaatcaaatcactcctacatttcatttctagcatgcattntctttctttacccactcctcacgtttggttttttagggaaaaacaccataactaaacgcgccgcaagggatccctatcgcaccagatccaaatctagaacgatgggtgatcaagaggagacgcaggaatagatgaaagccgacatgtcggctctgaaggaacaaatggcctccatgatggaggccatgttaagtatgaagcagctcatagagaagaacgcggccaccgccgccgctgtcagttcggctgccgaagcagacccgactctcttggcaactacgcaccatcctccctcaaacatagtaggacggggaagggacacactgtggcacgatggcagccctcacctgtgatacaaccgagcggcttacccttatggattgccgcccaactattcaccacccgtcttgcaagaagatgcgggccacattg

SEQ ID NO: 27594 - DNA, 221 bp, Glycine max
  unsure (1)..(221): unsure at all n locations
tatttgatctccttttggtgctctaaattgtgggaatgtgctcaaatatgtggggcatatttggtttgttttcttgcttgattaggttgaattgggggtttgtatgagatggccctaggcctataatgcatnttgaagtaatggtgcatgccacattgtccccgttctcttactattgatgcctaaacacgcgcccaccaagtgttcggtgaaatgcctta

SEQ ID NO: 27595 - DNA, 477 bp, Glycine max
agcttctcgatatgtgatgtgcctgaatcgaacatccgagttaaaagttatggcgatttgaatttcccgagagcttccggtatttaattttgagcatctcgacacatgatgcgcatgaataggacatccgtgtgaaaagttatgaccactataatttctcgagagcttcgttgttcaatttccagcgactcgatatgtaatgcgcctgaatcggacatccgagtgaaaagttatgaccatttgcatttctcgagagctctcgtcgttcaatttcaagcgtctcgatatattatgcgcctgaatctgaccagcgtgtgaaaagttatgacaatttgaatttctcgagaacttcgctttcaatttcgagcgtctcgatatgtgatgcgcctgaatcggacatctgagtgacaagtgatgaccatatcaatttctcgagagcttgctgtagtcaatatcgagcatctcgatatctaattc

SEQ ID NO: 27596 - DNA, 386 bp, Glycine max
  unsure (1)..(386): unsure at all n locations
tcctctaccgtannaaaaatattatcggccagtggttttaataagaattgcgcaatgtcggcagaataatatcagtcgtggctatataacgaccgatgtcaggtatttttgtttcaattcaatccctgaataatttttggatattgtccaataggaaatgttcgatcggcgtcatcaggtgatgcttgctttttattttagacctgctggatcggtcatctttcctggccgacatcgactatcattttttttatcagtgtcggtgaataatgttttttggccgaggtgggctgatgtttttctagccgagtaaatgagaacacgccagtgtcggccgaaacacatcttcggttgagctcgcacgataaaacatagccgacctacat

SEQ ID NO: 27597 - DNA, 405 bp, Glycine max
agcttataatatatcgatacgctctaaattaatctttggaaactctcgagaaattcagatgatcatgacttttcacacggatgtccgattcgggtgcataatatgtcgagaggctcgaaattgaacaacggaagctcttgagatattcaaatggtcataactattcacacgaatgtccgattcgatcccataatatgccgataggctcgagattgaacaacagaatctcttgagaaattcaaatggtcataacatttaactcggatgtccaatttaggcgcatcacatatagagatgctcgaaattgaacaacggaagctctcgtcagattcaaatgagcataactgttcacactgatgtccgattcacggttatcatatattgatacgctcgagatataacatc

SEQ ID NO: 27598 - DNA, 136 bp, Glycine max
tgaatcggacatccgtgtgaaaagttatgtccacttgaatttctcaagagcttccgtagttcaatttcgagcttctcgacatattatgcgcccgaataagacatccgtgtgaagagttatgaccattttaatatct

SEQ ID NO: 27599 - DNA, 470 bp, Glycine max
  unsure (1)..(470): unsure at all n locations
agctttctccactanatggcctgatgcctgatatgtcttttctgatggcagtggtcctagatgcagggaagaatttctcgaagaacaccctcttaaggtcatcccagctgaaaaatggacctgtgagcaaggtagtacagcgaatcttttgccactccctctagagaatgaggaaaagcctttagaaagatatgatcttcttggacattagggggcttcatggtggaacaaacaatatggaactccttaagatgcttatgaggatcttcacctgcaagaccatgaaacttgtgcaacaaatgtattagtccaggtttgagaacatatggaacaccctcatcaggatattgaatgcacaagctctcataagtgaaatcaggtgcagccatctccctaagagtcctctcaaaaggtggaggttgagccatgttctcagtataaaaattagtagtggaatgctcaaaatcaga

SEQ ID NO: 27600 - DNA, 229 bp, Glycine max
  unsure (1)..(229): unsure at all n locations
tggagtntccaagtgccaattcgtcttcttctttagtccattcttcttctggcttcaattcatcaatgggctttccttctgtgtccagcatctcgagatgttcccagcctttgatgacagctttccaggttctgctatccaatgatttgaggaatgccaccatccttgctttccagtattctaatttggttccatccataatttgnggtctattcactggtcctccttc

SEQ ID NO: 27601 - DNA, 472 bp, Glycine max
  unsure (1)..(472): unsure at all n locations
agcttgagaaggttgattntcgtctcanagtctgtgatgaaattgtgatataattgtattaaagcatcaccagcctgaaaatttataggaagaaccgtttgtcaaacaaataaatntaaactataataagaatatgcacatcagagtatgaatattgtttcaatagaagtcaacanaagttctatcagaagcaaaagaaagtaacaatactcacaaattgtgcaacataatgaatggaatcaaacataataggtaattgttaagtagaagcattagaaaaataatgactaaaatacaataaagttacttatagtttctcaaactacgcatcttgatactgaagtcaattgatgacgtggattgatgcttcaccacattgaataataacaaagataacaaagactttccaagtgcaatttgatgcctcanatggcaaaagaatccttgtattaaatggatgatagaatattac

SEQ ID NO: 27602 - DNA, 255 bp, Glycine max
  unsure (1)..(255): unsure at all n locations
tggacagttgtacatgtacaactgttggagagaagtgagattctgaagcccttttccttccaacaactntataccatcataactgtgcaggaacagaattttgagagaaataggcagcaattgctccttcagaagagtgttaataagatcttcatcactgagacccttaaataaaagatgtgtcagagaagtgaggcattggaataccaaacctatctcttgtttagacatagatgatagtataccaacatctac

SEQ ID NO: 27603 - DNA, 460 bp, Glycine max
  unsure (1)..(460): unsure at all n locations
agctngactctcataacttgcatatctctcataaggtccaatgcttcatgaagcaacccatttgtatcatagctgctaagcatactgctccaagaaacactatatttagtagattagaggatagtaacacttattgtttagtcgatttgtatagcctactcattgtcacatattgatatctgtttttcgaaatgatgattgatgtaggtggtgattgacttatttattggattcttgctttcattttggaccgtgctgctcatcatcacaggtacaaatgtttgttaccaattaatatttatattacttgttcactgccattaatgacaactgatatatgctatacaaattgtgttcatgatgagtgaaccttatatttccgtttgagactgaatacaatgattcttgcagatagtttacattaatcattgtattcaaccttgaattgtccgtttggaca

SEQ ID NO: 27604 - DNA, 251 bp, Glycine max
tatgtctggtcaagtataaatctgagcatacataatacttcctaacattccagttgcaagcaagatatcatcaacataaagaattagaaaaataaccttactcacactgacattcaaatatatacaccgatcaatattatttttcttaaatccaaagtaaacaatggtatcattaaacttcaaataccattggcgggaagcttgcttaatatcgtatattgatttctttaattgcacataatatattccta

SEQ ID NO: 27605 - DNA, 474 bp, Glycine max
  unsure (1)..(474): unsure at all n locations
agctngcttagccgatgtagcagattctatcttggcaaagttttgaggatccacacactggtgaataaggaaacgagccttacaattcattttcttggattctctgaacgtactcttttgtgcttcccctgcatctttctccaattcttgaagtccaatcgtgacaaactcaagaacatcctacattccaaagatgattttcatttgaatgcaccatgcatcgtagttctttccatcaaggattggaaaatgcgctggaaactcgttcccattcatctctacaacaatgaagcttcaaagatcccacactaaaaccaatcaagactctcccaacatcgatggaacctgaagctcgtgataccactgtcgaacccgattgctcgctgtacaagcaaaccagaaacttgacaaatttggatgaagttgagtcttgaatgatgaagacaagagagaaagatagttatgaagagaatg

SEQ ID NO: 27606 - DNA, 347 bp, Glycine max
  unsure (1)..(347): unsure at all n locations
ccacactctattaaaatggcacacctatttatggtccaatcagaatataacacgtggtaaccaatgttcatgtgtaacagttaacatccaaatttgggttccatgaccaaatttacaggattgggcataaatggggggctaaattcattaataaatttaaatgaggactaaaatcgaaactggagacaattagggggaccaaatatgcaattttacttattaaaaattaaaaaaataatttgacaatcaaggaaggtgtggtaatgcattatttcctttagtgcttttaataaacaataacaatntaataagttaggggataaatccacctcgtcaatgcaagaagc

SEQ ID NO: 27607 - DNA, 446 bp, Glycine max
  unsure (1)..(446): unsure at all n locations
agctntccaaaagtttctggttntctataacctttaaacttgctattcatcttttcattctattctccctctgccaaaaagaattcgccaaggactaaccgcctgaattctttntgtgtctctcttctcccttttccaaaagaacaaaggactaaccgcctgaattcttttatgtctcccttctcccttgtcaaagaattcaaaacgacacagnctgagaattcttttgattcttccctttccctaatacaaaagtgttcaaaggacaaaccgcctgagaattcttttgtatccccattcacaaagtatcaaaggtttaacagcctgagattnttgtcttaacacattggagggtacatcctttgtggtacacgtagagggtacatctacttgggtntgactgagaacaagagagggtacatctcttgtggatcagatctagtgga

SEQ ID NO: 27608 - DNA, 177 bp, Glycine max
  unsure (1)..(177): unsure at all n locations
atctctggtgaagtgtatcaccaaaggcttgggtttgcttatgctcttatcanccaaatgcatgcatacatctttctcccccttccttgtgccacaaacctcaaacatacctttattcatcaatccttgtaacaattcttcttccatatatcatgcctccacgtcatgtgattcacc

SEQ ID NO: 27609 - DNA, 467 bp, Glycine max
  unsure (1)..(467): unsure at all n locations
agcttccacaacatccaagcaaaacataattctaacagcacaagctatcacagccaagcaaaacaggaaaaggcagaaaactctgctcaacacaccaaccaaaatcacagcttttcccacttaaagaccccagtaacaattccttcgatccaattcgttaaccgttggatcgactccaaaattntactggaagtctgtagtacataagcctacattgtgaccgttgggatctactagaaaacgtccagaactcattctgtactactctttccacagcctaccacacacaagcatttttctgcacaaagccaaaattctgttgcacctattttgacagcaaaattctgcataagtgcagatttcgaaaatcacccttcctctcatccaatcttgcccaaatcaattcctacaagtcccaaatcatgtatcaatcatgtcaaacccaaaatcaagctttacagcacagc

SEQ ID NO: 27610 - DNA, 356 bp, Glycine max
  unsure (1)..(356): unsure at all n locations
cttgaaattgtcatctacatttacctttcttatagtttatgagagcacactgngttaagacaattttgccccaaatttgagggagtttgttggatggataaatttaaaggtgagaaactacaacacacatagcaaattaataaaatgttatctattaaaacaaagataaggataagagatattcatataagtgtgtgctattaaaacaaagtcaagtgaaatgctattgaatggactaagtttattgaaaagacaaacttaattagtctaggattttgctctcttgaattcaacatttgtttcttttaataaattatttattctttctacctctttattttatttttatttttttt

SEQ ID NO: 27611 - DNA, 475 bp, Glycine max
  unsure (1)..(475): unsure at all n locations
agcttgatcatccactgcacaaggttcaagctgttgcgcatgaagatgacagtggaaacatcttgagtgtatattttcaggtggatttgtacacaaagattcccagcattcctcgcactggaagtgctgctaattgggctgatgcagntgctgaagtcaagggagaataattgatcactactaaaaaagtatgatcaaattcaaacttggtgtaaaaataactaaaaatgtcctagtaattctgtttgtagatgcatgtctaatgaagggaagaagtgagcactccccatttcatccccaagtaataaggttcagagttcaggcactgcaaaaaccttgtacttgaagttgtttggtagaaatgtatgttacttctatgttaaaaaggactttttcagcagaatcattcttgttgtaactntataagcaatactcgtttctttaattcttctccctctnnttcgttccataaatc

SEQ ID NO: 27612 - DNA, 260 bp, Glycine max
  unsure (1)..(260): unsure at all n locations
tcatctttacttcctattacatatttattcacatcttcattttatttatgaatttttacatacatctcatctctantctgaaaataatatcttattttatattaatcacatttctaccataatctaaatttttaactcacatttacaatatattttttatcacatcttatctaatactttcttttttgtatatttattatttttcttatattaattcttattttatattatatttatcatatgttatttttaatataata

SEQ ID NO: 27613 - DNA, 477 bp, Glycine max
agcttaaagtacgcccgagtcagttcatccctatgagatgttgttgaagtattggcgatcagaattgccattccttggattatagagttgaaccaagctcatgcttttacaaaaaggttcatcaagtcaagttgaaatatggaagtaaccgtcttgcaaaattggggcaaaagatgaatcgagtcacatcactgcttcgtctactgccaaacatatttaggattattgatgtccttgttacttccagtttcaccttgacaaagatgtcatggaccatgttgaaaatctaaattgattcaaccccatatcttgcgtaaaaattcgcaatacttcaactgtacatcattcgcatgcatccatgcttttcattggttgcattgctcgttgcattctttccttgaaaaataaaataaaatgaacttaatcattgttataaaaaagaaagggacacgctttacgacgcccttaccgaactcg

SEQ ID NO: 27614 - DNA, 209 bp, Glycine max
  unsure (1)..(209): unsure at all n locations
tacccatcacatgtggtactaggtggcggtcgggcgatggtgcacaacaagttntccacatccacaaagcgcgcataaacccaccatcccctgttgcccacctccaactgagctcacgtactcccacgtagcccatatcctcgtttctctcaacaccgggtccccatcaatcctcccaagctttcccaacatctaatgtatacaacatt

SEQ ID NO: 27615 - DNA, 474 bp, Glycine max
  unsure (1)..(474): unsure at all n locations
agctnggcattctcaatggtggaaggacctcctaaagctatatcagtagcttgagttcagtcttattcatcaacagatggtatggaaggtagggggaggggaaaaaattaaattctggaaagataaatggttgggggatgattgtaaacttgaacagcaatataatcagttgttcctgattagtggtcagcagaatagtaccatctcgaacatgggaagcttctctcaaggcaattggtgttggggcataaagtggagaaggaatctatttgattatgagcaacatatagttgtggcatttatggaagcaattactgatatacaaatccagcttcatatgcaggatattataaagtacatattgagaagttttgaacttgcatccggattaaagatcaactttgcaaagagtagtttctgagcaataggaaaatctgatcaatggtggaaagaagcggctgagtatctcaattg

SEQ ID NO: 27616 - DNA, 208 bp, Glycine max
cacttcttgctctatcattcatctcttatttctccttatatcttaaagattcaaacatcctttcttctcatttaaaacttcttccaaccatgtttaatcaatattgctttcatctttattctccatatcccaaagtcatttttccctaaaaacttctcaatatcgtactttgttgatcccatctttcttgatctttatcttttcccca

SEQ ID NO: 27617 - DNA, 447 bp, Glycine max
  unsure (1)..(447): unsure at all n locations
gctagccgaattatattgaattgaagttagcttagctcaaccttggccagcttagtggaccaaatcaaccttatgcaagggttgggcgctaagcacttgagactcacaacttagcgcatgaaccgagatgcgcttagcgtaaggcttgcgcttagcgaaaggactatttttcagagaaaagttgtctgttatttttcagtcctttttccaagaaattgaaacctttatgttaaacattcaaagataggttgatatactcctatgtacagatccgacagcaagttccaaatgattaaatgcatgaaaaacaaagataacaaaatttaaaactgggttgcctcccaggaagcgcttctttaacgttattagcttgacgcttttaccttactggatgatcttatgttntggttcttactttcagaacctcttgacctccttccattacct

SEQ ID NO: 27618 - DNA, 383 bp, Glycine max
tgatgccaacattggagaggttaatgaaacaacgagatgatgcgctccatgagaggttggatcaaatggagaatagagatcataatgaagaataaaggaggagaagagggaatgatggtattcctagacaaaaccgaattgatggtattaaactcaacattcctccatttaaaggaaagaatgatccggaggcctacttggagtgggagatgaaaatagagcatgttttctcatgcaacaactatgaggaggaccaaaaggtgaagcttgccgccacggagttttccgactatgctcttgtgtggtggaacaagctacaaaaggagagagcaagatatgaagaggcaatggttgatacatggacggagatgaaaaagatcatg

SEQ ID NO: 27619 - DNA, 236 bp, Glycine max
  unsure (1)..(236): unsure at all n locations
ttgaactacttcataacccctagaactacttcacatatactcatttgagccctctagatctctgagatagggtggcaactactatgactttattataatagatgatgactcacggttcacatggactttgtttttgaacaccaaaaatgaagcatttgatgcttttcgcatactagccaatattattgagaatgaacatgtgcttcccattgtgntcacttgtaattgatcatgga

SEQ ID NO: 27620 - DNA, 291 bp, Glycine max
tctatccaacatctctcagactaacggacatgtataggcaacttacatagtcatcctcaatgccctgtgtactacactcgacaagtctaatgtcctatggaaagaactctactacatactctctgtgaaccactattcaccctatatagcaaccaatgaagtcagggaaccgccgacaataacactattgttccaccaacaactaaatcgaaacaatacattggtggaactctaaaccaccgaagaagtccacaaaacgactatgattagacaagaagctgccgtactccg

SEQ ID NO: 27621 - DNA, 438 bp, Glycine max
  unsure (1)..(438): unsure at all n locations
gctctagccaaatggacttaccttgaattaattcctttgactagccctttgagccttgtttccctttccttgttttgaagctcactacaagccttaagtgaanaaccatgatattaccatatccttaaggaattttggagctctggaattgttttgggaataagtgtggggggtttttgtttcattggacaaccttgttttgttggctatgcttcatgatgaatcttgggccatacttgatgtacattgtatattggttaaatgttggacatgctgaatgaaatgttgtttctcaaaggctatagagtaaaaaaaaaaaatcgaaaaataaaatatcgaataatagaagaagaaaagcaataaagttgagtgaataagatcttaaatggcacaagaatgatgaaactctaggttctactcttcatgtttaaatttatc

SEQ ID NO: 27622 - DNA, 259 bp, Glycine max
  unsure (1)..(259): unsure at all n locations
ttctcccccaattntctataaatagggggagaagtgaagtagaaaatggttcagccccttatgcacttctctctctctcgaaatagctgaggaaaattagttccgtgaagaaaatccaagccgaggcgcttccgtaacgtttccgtgagtaattacgcgaatattctcgaccatttttcaagattcatcgttcgttcttcattttcttcagtcttcaacgggtatgtacctcataccaagctttttatttctttcatat

SEQ ID NO: 27623 - DNA, 436 bp, Glycine max
  unsure (1)..(436): unsure at all n locations
agcttgtaggtggtgaccaactggtgcttttcacactgcgtggtgtggaaagatggtgtcctcgattgtctattcaacattgttcaataccaagtacaatgaaactccatagcgatgaagaacatgaaatcactgtgagatatatatgttgagataaaaaaaataacgcattatgatgcatacgagatccgatagataggcacatcatcatggatgttagtttgcgtgtatgacttgtttaagtcttctatgtttagttgacgaagtaggaagactcaccccttacttttttttaggactagatggcaggtgaggagccgacactccatctcgaggatgagtgcacttggaggtgatagatacccgacgtgactaaaggtgtggatcacttccttggatatctctattatgtgtggacacctatngacttatgctt

SEQ ID NO: 27624 - DNA, 327 bp, Glycine max
  unsure (1)..(327): unsure at all n locations
ggaaccttgtataatgtgtatgaatgactntcaaatgattttcaattgacatattcttagtgtatgagaacctcgagaagcataaacaggttttaatattatgttaagagaatctacttttactaagtatctattaattgagagttgaattgatttaagtgtgaatttcttgcaccttaattgtttttattgaatagtttttgtctgacttgaaaccgatatgacttgttgatttcataaaaattgtttattgattattaactatattattttcttatgacttatatattttattcttcgtgtctccttctntttcttatttatttt

SEQ ID NO: 27625 - DNA, 185 bp, Glycine max
  unsure (1)..(185): unsure at all n locations
ctgcagctttagccaatgacctaccttgatttattcttngatagcccntttgagcctatgtttcccattccttgttttgaagctcactacaagccttaagtgaaaaaccatgatatcaccgtacccttaaagaatnttggagctttggaattgttttgggaataagtgtgggggggggggggggt

SEQ ID NO: 27626 - DNA, 373 bp, Glycine max
  unsure (1)..(373): unsure at all n locations
ngaagtgagatagtgtggaagagtcagtctccctacttttattcgttgaccatagagtggtacctggagatatgtcgcggtggtcatgagaccttgnggacgtcaggtggggtgctattgcccaaaaccaagcttgaccaatcccgacccaacccgggcatagtcagtcagtgagaacctatgacgtacctaaacaggcgagctcctggcagtcaaccgataaaagaacaaagaccacaaagcaaggaggcttgtgtggtggttggccagctatggatcttgagtgaatattggaatatggcctctggtaatcgattaccaagggtgtgtaatcgatttcaaggcttataaatgaaggcaagaagttaagatg

SEQ ID NO: 27627 - DNA, 231 bp, Glycine max
  unsure (1)..(231): unsure at all n locations
agctngaaagtgtgtaaccaaccattttctcattgtagaacaccggtnacgtgtatactatcatgtgatcattcttttctctgtcaatgaagtgcacttgacctgccaagtccttcacctctgggcgtattccttgaatgactcatgctcttntttacacatgttttggaggtgcgttctatccggagccgtatcataaatggactgatattgcctaacgaaagcaaccat

SEQ ID NO: 27628 - DNA, 266 bp, Glycine max
  unsure (1)..(266): unsure at all n locations
gaccttaaatctcagcttaaagttgcccgagtcattcatccctatgatgtatgttgncttagtattggcgatcataatagccattccttggattataaggttgaaccaatctcatgcttttacaaaaaagttcatcatgtcaagttgatatatggaagttaccgtctcgcacaatcgttgcaaaatatgaattgagtcacatcactgcttcgtttactgacaaacatatttaagattatcgatagccttgtcacttccaatttcac

SEQ ID NO: 27629 - DNA, 474 bp, Glycine max
  unsure (1)..(474): unsure at all n locations
agctngcatgtcgatctttntgttttcttgtttgttgttgaagaagttagtattaagggtttacttaacctggaatgttataattntttgtgaaattgttgagttgccctcacaaagtcatgtttgaatgtatgcataaagtaattcaagaaaaataacttcaaatcataagggttacgagtttgattgttatcattttaattgcatgtgcatgtacatttgtgcccaagttggattgaacatgaaactgtatatataataccattaggttgctagcagctaccgtcaataatgaagtttcaagaccctattcaagtagcacagtcggtgttcctcttgcaaatcgtttctcgtttaatggcgatcatttaagatgaaacatgtatatataataccattaggttgctagcagctactctttgtgtaacattaatggtttntaattttcatgtactntaagggtattctctctag

SEQ ID NO: 27630 - DNA, 363 bp, Glycine max
  unsure (1)..(363): unsure at all n locations
ggggatgtgctagagaggataacaaatgaccatagtgaacatagagccatttctagggtaaatttgggtgttgaagagtcaaattntgattcggtgaaattttaggcgtaaatccagtttgaacatgtttaaattgatgttatagacttgtgtgaggtgagagtttgcttcaaaattatcccattctcaatttcacttctcatacctagaaaatccattaaattgaggggttttggacacctagattttgtgttgctgtgtttngaagcttgactttggtttatacacgattgatacatgatttgggactgtaggatttgtattgggcaagattggatgagggaaagtgtgatttcgaaatct

SEQ ID NO: 27631 - DNA, 466 bp, Glycine max
  unsure (1)..(466): unsure at all n locations
agcgttggacgttggatatggttntggaagatagaaggagaagaaatggcgtttttccaaagctacttggactacaaggctcacaacgcacaagtgagtaatgctctcggaaacagaaacatcgcgcacactccagacatattctaaaagatcccaacggtcagatcttggacatccgtcctatgaacctccagaccaaatttcaagaagatccaacggttaactaaatctggccagcatttttaccaagacagcttcatgtagctttcttgagaagcttcattaagaggcttcctcgagaagcttcctcgtgacttctttgagaagcttcctcgagagacttctttgagaagctagattcttatctacccacaatgctctatgaactaaatgaacctccttaaaagtaattacggataanagaatagcacatataatcaaacatcaaatatgagtactaataata

SEQ ID NO: 27632 - DNA, 414 bp, Glycine max
  unsure (1)..(414): unsure at all n locations
nttctaaaatttcctttaattctcttattatcatttttttctaattttattcacattatattttctttttccctatttctcctttatcttcctctatattacttctttcatcattttttcttttttttcagttcataccatatctcacctatcctatccatctcaccatgattatctccccttctcatattcccctcttccctctattttatcttattactttttttatcatatcttatcacaaacaatttttatccctctttctaaaattaatttttctctatttctattacatctatattctattctcttttctttttaattatatttatatttctttttctctttatctatctccttttttctttcttcctttttttttaatttattttatttttaaagaaaactaaaata

SEQ ID NO: 27633 - DNA, 417 bp, Glycine max
  unsure (1)..(417): unsure at all n locations
agcttcagcctgaagcaaccagctctcttgggcgagtttcccctacaccaaatggccttntcctataaatagccatgcaagggaggggtttcaggggttggaaaactgaggaaagaaaggaaaaacacagaataggagaaagaaaagaaggaaaatattaaagtcgaggtgctgctgaatcgaaccatggatcatttcctacatcctttcttttgctagccttgtaccctatgcaatagtcggntagtttttcttaagatagtgatgtaatatatgtacccttattaggtcctttgtgagattatgtgtgcatttatcttcttcacttatcattggtaatttcaatttatccgtaaggcttggttctaattggtcactagtgtcatgaaaaatggtttttagtatgaactggaagta

SEQ ID NO: 27634 - DNA, 340 bp, Glycine max
  unsure (1)..(340): unsure at all n locations
tctgttagtagggtattcatttgtgtaaggtgctgtatctcctgagctttcatgaccccctttttttgtactatgtagtacctctggtactttatattctataatataaattatctttgccttccaaaaaaaaacattgactctcctttgcacctttctttccatctttcccatcacaaactagtttgcagccattggttcaaactagtgttcaagcccttgcctcaacctctgacctcttcttcagtttctccccctttgttggtttgcttttgctctattntggtttgttggaacaaaaatangtgttggtactggtgctagtgtgtgtggtggcagt

SEQ ID NO: 27635 - DNA, 444 bp, Glycine max
tgcagctgctatcacactaagtttcagatctttatgaagtatagcccccccccccccccctaactattttccttatttcttcaaattcagtttaccagcatataaaattccaatactagatataagctccacatcaagcaagagaaattgattagaagcaatcaactgggaattatcagtctcagagtcaaagaactgtgacaagggtattttctgaactgaaatgcacttgttccaaacttccagtttcattatttatattggagatgatttgcctgaactataaaatcaggtacttgaattcttttcagaccaattcttattttcacattcagttcttattgctgaatgtcacctagaccttaatgctacaaccacttgttatgatcactattatgttttcaactaggagagcttccacagtccacattactcatacaaata

SEQ ID NO: 27636 - DNA, 270 bp, Glycine max
agtgaagacttgcaacttctctatggatcatagctggtgaggaaagaaagttgcaactgagtgagttagatgaaatccgcctagaagcctacgagaatgccatgttctacatagaatagaccaagaagttccatgatagtatgatagttaagaaggacttcatggttgggcaaaaagtgttattgtataattctaagcttggtctcatgagtgataaagttaggtcttaatgttattttattgttttgcgtatgtttttgattagtaatg

SEQ ID NO: 27637 - DNA, 467 bp, Glycine max
agcttcggaagaaagtgatgaggtacaagccctataggcatagcttgaaagagcccgagtagtcgaagagaagttcaagtccatagccatcaaagtctgaaaagagtatgatgaactaagggacgtcaatatggccaccgctgaagccttggaacgagaaaccaagaaggcccgaaaggaagaacacgtgccagcaaagttttgaggggctttatagggcagcaatagtaagctcaagcttcgaagaggtgaaaggaatcatcacgggtcaaaggcatgatcttgaaggacgagctaaaggcttaccttacgtcgaaaagaaatttgtcccaacagttaagcgagactgaagggaatatgtgggccgtcatcgatgagtgcaaagagaagctaaatcttgcggcgactcacgagcaaaggctagaggatgagtacgccaagatatcagctgaaagcgaagcaaggga

SEQ ID NO: 27638 - DNA, 128 bp, Glycine max
taaacatatgttacactcgtcacaaatgagaaacttgtgagacacacttcatagttcatcttctctccttattctccctcaatttccacgccactatctctttctctctctctcattcatttatttca

SEQ ID NO: 27639 - DNA, 444 bp, Glycine max
  unsure (1)..(444): unsure at all n locations
agcttataatatattgataagctcgaaattaatcatcggaaactctcgagaaattcaaatggtcataacttttcacacggatgtccgattcgatcgcataggatgtcgagaggctcgaatttgaacaacggaaggtcttgagaaattcaaatggtcataacttttcacacagaggtccgatncnggctttatttatatcgatacgctcgaaattaaacatcggaaacactcaagaaattcaaatggtcataacttttcacacggatgtccgattcaggcttataatatatcgatacgctcgaaattaaacatgaaaaactctcgcgaaaatcaaatggtcataactnttcacacggatgtccgatccaggcgaatcacatatcgagacgctcagattgagcaacagaagctcttgagaaatatcaatggtcattacttttcaca

SEQ ID NO: 27640 - DNA, 234 bp, Glycine max
tttccaacctctatacatattatgctcccgatatcaacatccttgttaatacctatgaccattaaaatatcaccatatttttcgacttataatttccatcgtatcattatattattatccccaatcgaaactccttattaaaacttatgaccattttaatttcaccatatctttctttgttacatcttcgatcgtctatttttatgattctccttattctatcatccgaattaa

SEQ ID NO: 27641 - DNA, 440 bp, Glycine max
  unsure (1)..(440): unsure at all n locations
agctntactgaggtaagtcactacccacactcttctattttcgataaaatcacacttcctctgcagggttaattcgagtctcctcgaatagtcatatcatagagtatgaatatggtaaaggatgtgcttgggttaattaatggagaggtggaatttttcaggagtaaagagtcaacatgacataacatgatagataaatatatgcattgataattatgacttgagaatgatatgttacttgacgagttatggaatactgtgctatttgatgattaatggactgatgaagacaatgatgtatgatgattgaacctttatgtaatggttgacaaactaatgattattatgagatgttntgtcatgagaattctaagacttatgctttatgtatgatttctacatgttatgttatgtatgtgagatagtgngttatgctttaa

SEQ ID NO: 27642 - DNA, 377 bp, Glycine max
  unsure (1)..(377): unsure at all n locations
tcttccgtgatagctntcttcttcaccttgcttccgcgcttgtttcttccncgtgcacccagcaatctcattcatgcttgttcttcctcctcgccctcatttcgttctgaatttgaaatttggagaagaagctgttgttcgtgtcctccattgaagttcacatcctccattgaagttgttgttcgtgttctccgccatcaaggttagtcttctaacctcctcgtaactatttcaatggcgtgaattgtgtaaatggctgtaggaaccttaggatagacaacattaatggctggaggttgaagatgaatgttcttccgtgagaagaaccttcttctgcgcgtatgaaaggtgcttctggaactcccgcggaagaagtg

SEQ ID NO: 27643 - DNA, 478 bp, Glycine max
  unsure (1)..(478): unsure at all n locations
agcttatattctcgaccaatctcttttgttttcgtttgtccgggatttaatttattttgttcattcctattctttggattttttttttggtatagtatcatactgtacagcttgtacaggaatgatgtaaatccttctttaatatataaaatcttgtctttgtcttttttaaaaaattactctctttgcatttttttcccatttgacgcatgttttctctgataattttctgagttcaaattttatttaagacatgtttggataaattattttggaaggatttttaggaataaaaaataagaagacaaaaaaaaaccttttttattgactaaaattaatttatgcataaacaaatgtgtagaaattntatcatattaatatctctaaaaaatgatttttcatttatacataaattaattttaactcataaaaaattctttcactttttctttttattgtctcttttaggagtatatct

SEQ ID NO: 27644 - DNA, 297 bp, Glycine max
  unsure (1)..(297): unsure at all n locations
gcttctcataccaactcaatacagagagggtaatttagtgagtttcttggtgcgcgcatgtgcaagctcctatntggggtgcacatatacattgcacatactcaaagtccctctttagttatcaacatagtaagaaagaaagtgctatttataccaccacattaacatattatcactctctaagtgagaacacaaaaggaaaattcaatggaggttaataagactaagatgtctgaggtgctggcattcataatcatggtgattatggaagggtggactataggactcacgaatttt

SEQ ID NO: 27645 - DNA, 429 bp, Glycine max
agctcgaatatcttcatttgagttatgcaaacctatccaaagcatttcattggctacacactctccaatctcttccttctttgacccacctagatttgtcaggatgcacactccctcactataatgaaccatccttgctcaacttctcatctctgcaaactctccatctttccttcactagtttttcccctgccatttcttttgtccccaagtggatattcaaattgaaaaaacttgtttctcttcaattatggggtaatgaaaaccaaggtccgattcctggcggtattcgaaacctcacacttcttcaaaatcttgacttgtctggaaattcattctcatcttctatacctgactgcttatatgggcttcatcgtctcaagttcctcaacctaagggacaaccacttgcatgggactatatctgatg

SEQ ID NO: 27646 - DNA, 473 bp, Glycine max
  unsure (1)..(473): unsure at all n locations
agctntgaaagcacaatacagaagtgggtcactctgacagagagggttgaagctaaaacacaaatttcttactcaaaggacttgcacaatgtgatacanaattggaatgcttcaacttgttcttcatagccttctaaaattccttataaagctcccaagaaaatcattgtagtgggctccacacaactgaaacatttctggagcaagtaggttcaccttataactatcatgaagtgacaatagacaaaaccatttggagattaccattctgaggaactttttttatgcggattctgaagaaccatcacaatagtcattatgatgtttgtaaagaatgagtccatgcttaatgaattcctttgacgaagtttagatagaaatttcaatccgaagttgtacaacttcatcactcttaacacttgttcacaactttgaaacattcttaagtngatttactttagaaagacttagta

SEQ ID NO: 27647 - DNA, 191 bp, Glycine max
attgtgtgccgtgttatgacaatcagttgatcactatatcttggatatcctttgatcatttaaatcatgtcattctttctggaagaaagcccaagaattctttgtcaatgatatccaaagcttgttttatacaaccattaaatttacaaccctcaagcaaaccattcatgacatgatcactcatgttggta

SEQ ID NO: 27648 - DNA, 456 bp, Glycine max
  unsure (1)..(456): unsure at all n locations
agctgtatctatctgcccagccttacaatgactcatcaattaaagctgtatatgtaacaacatttggcttggaaccttcaagcaacatcatctcaaatagtttatttgcatcaaacacctttcttgctttcaggtatgcatgaataagagaagtataagtcaccacatttggggtgcaattgtctcttaacatttcatcaaaccaattgcgagcctgttgaataaggccagctntgcaaaagctatcaattaaaatagtatatgtatacacactgngaacaatgccattctttttcatttcttcgaataacananaagccttctctaccttggaggcatcacaaagaaaaccaatcactttagaatacgtactatcatcgggaacaaaacccttgctcatcatttcgcatataatctcaaaggctntatcaaactttccagctccacagagacacc

SEQ ID NO: 27649 - DNA, 367 bp, Glycine max
  unsure (1)..(367): unsure at all n locations
cttcttctgttcagataggtacccttttgagcttggactatgctcgaaatgcttttggtgatgatgatggaaacatggcctccttgttcatgtataactgtcttattagaggttatgcttcagcagggttgggtgaccaagcaatcttgctttacgttcagatgctggtgatgggcattgtgcctgacaagtacactttcccttttttgctgagtgcgtgttctaagattttggcgctttctgagggtgttcaagttcatggggcggttcttaagatgggtttggagggagatatatttgtcagcaactctttgatacatttctatgcggagtgcgggaaggttgacttgngacgaaagctgtttga

SEQ ID NO: 27650 - DNA, 461 bp, Glycine max
  unsure (1)..(461): unsure at all n locations
agcttaagcccaactatagagcntttacaaaccgtaaaggtttacattatgctcgttgcgtaaatgccggggcgttcctccattcgccaatttcccagctggaaatcaggagggcatggtcgtaccaaatccaatgtactcggaacatcatcttcgcatatcgcgaccacttgacctttgtctcccagacccgtgcttataaagcttctacttatgtggcagggcgggcttccctcactttcttgtctccaacgcgagctttgaccactgctcttccttcccacgatgcttcttttcatatccgcctgagtgggcttatagcctaaaccatacttcccacgatttcctttggcatttatcaggctagttatgccgcccgtgcctttgcctaaacccattccgggttcataaccgttccccaacataactcgggccatcattactgctgcatcggacaggca

SEQ ID NO: 27651 - DNA, 354 bp, Glycine max
  unsure (1)..(354): unsure at all n locations
tcttgcgtagccgctcttggtgctcagataatcccaaaaacaaatccctcttattactagctatttcgaattctntagttcctgaatgtacaaccttcaaattgttgctcgttcccctctttcttttctgcaaaaaagacaatcaatatcaaagaatacatggatgaaatcctaacaacatcaatatcaaagaaaacatggatgaaatgacaattaaaaagcacaactacctatctttcagagtcctttgagtaatttggcttgtctacttatgtggtgggggtctgtttaataatattatactgttgccttccaaaaaaaacttatgactgatcctcttttcattaatctaat

SEQ ID NO: 27652 - DNA, 416 bp, Glycine max
  unsure (1)..(416): unsure at all n locations
agcttttcgattcattctatgcacccatggtgttccacattgtgtttcgtgcatttttattctcgttttgtttactttttataccccctgttgacgtgcttaagccattttacttaagtcatttctcgcttaacttaaaaataaaatcaatttccaccgaacgtttgaattgtattatccgttaacttcggttaaaatgaattccgaccgttcggtcgtgccgtaaccacgttggaaatcaaaaggaggtaaaaaatgatataataatcaaaaaaacatcttttagtaaaataaagcggaaaatcaatcggacgttntttctctttgggatttctcattcttaatcgaattgattaataactaaagtgaaactaaggctaanatcaactcgcctagtcaagctcgtccacaaaaat

SEQ ID NO: 27653 - DNA, 364 bp, Glycine max
  unsure (1)..(364): unsure at all n locations
gagttgatttagccttagtttcaccttagttattagtcaattcggttaagaatgagaaatcccaaaaagaaaatgtccggttgattttccgctttattttactaaaagatgttttttttattattatattattttttacctctttttttgatttccaacgtggttacggttgacgaacggtcggaattcattttaaccgaagtttacagataatacaattcaaacgatcgctggaaatttantttatttttaggttaagcgagaaatgacttaagtaaaatggcttaagcacgtcaagagggggtataaaaagtaaatgaaatgagaataaaaatacacgaaacacaatgtggaccaccacggg

SEQ ID NO: 27654 - DNA, 436 bp, Glycine max
  unsure (1)..(436): unsure at all n locations
agcgttgatgaagaagagtgaaagatagaactatgaaggcgaaaagggtgttatctaatttgagttccaacgagagtgagagtgagtagcanaaagagcatagcagagacatgttggttgcacacatattagattatatctcacaccttcataacatagatggtcgcttgtatgactctatatgaagcaaaccagagctaaatagttcgctcatggtgcttgatgtagtacgtacagtactttctttatgtataagcatataaagattgttataatactttgctgtttacgtgcagaatcatattgaagataatgagtgttatgcgaaatgagatatctcaccacgcgtggacgacgatatatatagataatattctacctctatgaatagtcaacatatacggtctaaaatgttgtttatatcatatataaatta

SEQ ID NO: 27655 - DNA, 439 bp, Glycine max
  unsure (1)..(439): unsure at all n locations
ttgatacccttatgatntccccctgtnnctggattccccttcatatacgcacactatagaatactctatctttacgaaccatcttgttgacctgatttcgtatactcactcctatttatgactcagtgaatagacttaatgagtcatccctcacttaaacattgttctgaaagctaaacttggccgtcgtattaattatgctactagtgtatcaataactcattgctttgaatgaaactacacttatcttttaagagatttgttaacctctgaatgcaactgtgattcctaattgtcacaatgacttatatgttaagcaaacttacaactctctgttttacattatttctatccttcattttattgttccttattctctaaatctttcaatatattattaaatatttttttaagtattatcttgggaggaggggggggg

SEQ ID NO: 27656 - DNA, 265 bp, Glycine max
tatttactaataatcacccttctaacctttctttcaattatacttattcaaattaatattctatttcttacattatacatattatacttaaattcactcactattaatatttaaaccatcatatacatctcattctataattacttttattttaatatcatcactacactataactatcttattctttaacttattacaatataccaccccttatcttcatcacctaatatttcttaataatttaattattaagaaaaagaaaaa

SEQ ID NO: 27657 - DNA, 474 bp, Glycine max
  unsure (1)..(474): unsure at all n locations
agcttgtgagagcncctatggtgacctgtgactgaggcttgctggcgaggtctgagacgaaccatgaccaagtctccaattttaaattcaatatccctgcgccttttatctgctgagtgtttcataattacttgggccttcggaagcttcttctttaagtcttgaaaaatggactccctattagtcagaaactcgtcaacagcttccacttttgaggtacctgtaacatatgatggcaaatctggtggcctccggacaaaggtgacctcgaagggggagacaccagttcctgaatggtgggaggtattgtangaccattcggcccagggaaggaacttaccccacgaagaaggtttcttgtggacaaaagctcgaaggtactactcaagcacccggttcagcacctccgtttggccgtctgtttgggggtgataagctgagctcatcctcagttgtgtgccacttaaccgaaac

SEQ ID NO: 27658 - DNA, 173 bp, Glycine max
  unsure (1)..(173): unsure at all n locations
cattcccataatgtattcccttacatttctnttgccttgatagttcatggaaatcaagttctgaaagagagtacttgtttccaccttatcactttttcatatcacttttttaatttcagtaagaaattcttaggcactagttatatcatctaaaacaatactcctaaagatct

SEQ ID NO: 27659 - DNA, 476 bp, Glycine max
  unsure (1)..(476): unsure at all n locations
agctgggttcgaggtacttacccgttgaagatcgaagaacgatgaagaacgaatgaagaacgtcgaagaacggttcaaacctttgcgagattcctcacggaaaacgttacggaaacgtttcggaagcgcctcggcttagattttctttacggaaacaatttttccaagcaaattccaaagagagagaagtgcctaaagggctgggatcccttccttcttcatttcctcccctatttatagcaaaataggggaggtggttgccgcccagctcgcccaggcgagcagggttgcttcctccagaagcaaccgccttctggaggaatcttctggagggcccaaatgggcctggttgctatttgcacccccatttttaccaagttcacccnccctgctggttttttggtgattcttttntcgtanagttacggaaacttacgaatttcgtaacgatacttgttttctttccgtaatgttac

SEQ ID NO: 27660 - DNA, 381 bp, Glycine max
tgtctcatcgtttatgcgagacggagaccaacatgctagctatcatcgccaagtaccaagaagagttaggtctagccacggcccacgagcatatgatcgtggacgagtatgctcaagtatacgcggaaaaagaggctagaggaagggtgatcgactctttacaccaagaggcaaccatgtggatggatcggtttgctcttaccttgaacgggagtcaagaacttccccgcttgttatccaatgccaaggcgatggcagacacctactccgcccccgaagagattcatgggcttctcggctattgtcagcatatgatagacttaatggcccacataattagatatcgttaggaaacttgtatggtctctcagaccttgacta

SEQ ID NO: 27661 - DNA, 475 bp, Glycine max
agcttgagggaaacccgctgagttctttgttagcaccgaaactctaggaggaggccaagaaactactgtgtaagattttctttttttccttgttagtgttcttgatttgtgaatctcacttaaattttgagcttaatatgtggcatgcattgtgaatcacatttttaatctttatcagctaagttgagttgtttatgtatgttgtagggcctttcaaggagaaacgaagcaatgagcttaaattctaatagctcaaaatcacatataattttcacatttgtcattgagtctttgtgtaaggtactgtcaaattttgtaattctacctaacattaccagcagttgtgtatggaaattgttgttttcctaagattcaagccaggtttatattttctctgttagttctattgctaaacatgaattttttaaactgatgttgcagggaaccacaaagggtttcaatatctcaaaaacta

SEQ ID NO: 27662 - DNA, 386 bp, Glycine max
  unsure (1)..(386): unsure at all n locations
tcagcttgcatacaagattctccttgcctggcacttcanaaccttcttgttgggtcatatagatgtcttcctctaaatccccatgcaagaatgcagttttaacatctaactgctccaagtgaagattctctgcagctactatgctcagaataactctgatggtagtcatctttacaactggagagaagatctctgtgaaatcaattccttgtttctgctgaaaccctttcaccacaagtctcgccttgtatcttcttctaccgtcagattcttcctttagcctatagacccacctattctgtaatgccttctttccttctggcaatttagttaaagaccacgtcttattcttctgaagggatgtcatctcatctttcatcgctagc

SEQ ID NO: 27663 - DNA, 465 bp, Glycine max
agcttaaccttaatatattatatgaatatatgaatgaattataaaattaattcttcttaatgtttactcatacaatcgatctatctatcctgttgtgggtgattacatcttgaagcatcacccaatagtactagactccggagtttgattgttccgggttgaagatcccgatctcaatccccaacccgcctttctcgtatcgtatgtcctccatttcacaagcacaacacaacaacacttccctccctcagatcccaacgtacctgaaaacaaaaaaaatccacactcaccacaccaaaatccatcacatttgtaatcacacactccaattgaaatcgaaactcatcactagaaaagaaaagtaatgtgatggattccccaccttcccagcactcgtggagaaggtcaccaacctccctctcctcttcttcttcatctctctccaaatctaattctgatacaatc

SEQ ID NO: 27664 - DNA, 389 bp, Glycine max
  unsure (1)..(389): unsure at all n locations
ctcagcttcttaagatacgacttanatcatatatctccagatagacaatcataggaagcacacctgcagtcaatcagggagtccaaaaacacaaggagaaacttttcaatattgaactccttagataattctaataaaacctatatgaactggaatttaatatatcataaatataaaattctaataaatttagtatttgaatggagaatatatgaactggaatcaatcgttggttttattgttagatcagatcagctggttcgattgacttaattagaaattagtcttgtgtctagcctgttaattccaaaaattaactcatcttaattacaaccgatgaaaactagtaataatcgaattttgaacctgtaaatatttaanaataacca

SEQ ID NO: 27665 - DNA, 411 bp, Glycine max
agctgtgagccaaaatcctaactcaccatattctcttgacccagggtgagaatgtcaatccttaccctcggaagcaaaaaagaagagaaggaatatttccaatcaaagaaaaaaagaaggaaaatttccaatctatgagaaagcaaaaaatataaaagagagaaggaaaatttccaatcataggaaaaaagagaggaaaggaaattcccaatcaaagagtgggagaaagtgaaaagaaaagaaagaaaattcccaaccaaagagtgggagaaagtaaaaggaaggaaagaaagctcctgatcaaggatcgaaagaaatcagataaaatgtgcagaaaggtctttggaccggacaatatctgtacaatacagaattgtcaccaaatgaacaaaataaagggaaaggaaacca

SEQ ID NO: 27666 - DNA, 224 bp, Glycine max
  unsure (1)..(224): unsure at all n locations
gtgttagagctagaggtgacagtgaacaatatntataactttgttgaaagtgattggaacttggttgattaccaagaattgaacattgtcttagtgacagaaacaaaccaatataaatctctttgtgttgaaagttatctgttggctaatgctaagtcgagattttttcttttgataactacatttttactctgctataataacattggcatgattatgcttgt

SEQ ID NO: 27667 - DNA, 445 bp, Glycine max
  unsure (1)..(445): unsure at all n locations
agcttaacaatcaatttcgagcgtctcgttatatacgggactcaatcagacatccaagtaaaaagttatcatcgtttgaattggctcagagcttcaacattcaatttcgaacgactcgatatatgatgggactcaatcagacatccgagtaaaaagttattgtcctttgaaatggctcagagattccacattcaatttcgagcgtctcaatatattacgggactcaatcagacatccgagaaaaaaattattgtcgtttgcatatgctcaaaggttcaacattcaatttcgagcgtcttgatatattacgggactctatcagacttccgagntaaaagtattgtcgtttgaataggctcatagattcaacattcaatttcgagcgtctcgatatatgacgagactcaatcagacatccgagtaaaaagtgattgtcgtttgaata

SEQ ID NO: 27668 - DNA, 181 bp, Glycine max
ctttatcaattacacacaataacttttcacaatgtctatttatccattattaaccaactctctaattgaatgtgaatctcttatccaattcaaacgacaataacttattaataagattttttatttcctaccataacatatttttaattctttcactacttaatttatataaaatcaataa

SEQ ID NO: 27669 - DNA, 447 bp, Glycine max
  unsure (1)..(447): unsure at all n locations
ttaatttaggccattacacctcctctacgagagagtctagagcggaggtacgcgcaccgcgacatatctagccttcattctacggcaaacaccctgaagatactcagaattggagggtgttacagacactgggngatcgccccgcattgcagcgtaattcctttctgcttatggggaatattctggcgcaagcaaagtatacgcttcgactaatatggacaaggaaaatgggaatcatccttaacccatgggctgataattctaccataatgatctagagaatacttcggccgtttttggtactccacccccagccaattgcaaactaccatcctgttttgttgggagtacgacaggattatggcgtactcctntgcactgatatactgcaaggcggcgaggcactgtatacgataagctacttccgtcgccatacgtaacactaag

SEQ ID NO: 27670 - DNA, 322 bp, Glycine max
ctattacctacactatatatactcagcttattcttaactaatacctacatactcactgttcatactcatttacacacaccctaatagtctctccatacacccactatcatcacttctctcactattttcctctcactgtacatactactattcaatactatattatacatcctcaacttcttactcccttaaccaccccctttcttccttctattatcaccatacctatctaacacatttacaaacttactcctacttttcttcatttcaatccataactcatatacttactttataatcaatctaatcatattcttctata

SEQ ID NO: 27671 - DNA, 423 bp, Glycine max
  unsure (1)..(423): unsure at all n locations
agcntttcgtcttacagacagcatatagtttatacggataaccactccggtatttccgcccgtcagcgtgactcaaaagtcaatatgacagatcttgtgagcgcggaagatgatgtaaatctccgcgtgtcaaagggcttgtcggccgcgattgacgaatggcgcagaagacgacgtaagtctctgcgtgctatcaggcttttcggcttacagcaacaaaaagtttattcggataaccactcagttatttccgcccatcagcgtgactgaaaagttagtatgacagatcttgtgagcgcgggagatgacgtaaatctctgcgaggcaacaggcttgtccgtcgcgattgacgaagggcgcacaagacaacattagtcaatgcgtgctatcatgcttttcatcttacagacagcgaaaagttta

SEQ ID NO: 27672 - DNA, 374 bp, Glycine max
  unsure (1)..(374): unsure at all n locations
ngataacacgcagagactaacgtcaactttagcgaccttcgtcaatcgcggccgacaagcccgttgacacgtggtgatttacgtcatcttccgcgctcacaagatctgtcatactaacttttgagtcacgctgacgagcggaaatacccgagtggttatccgtataaactttttgcattctgtaagatgaaaagcctgatagcacgcagagactaacgtcgtcttctgcgcccttcgtcaatcgcgatcgacaagcccgttggcacgcggagattgacgtcatcttccgcgctcacaagatctgtcatactgacttttgagtcacgctgacgggcggaaataccagagaggttattcatataatacttttgctt

SEQ ID NO: 27673 - DNA, 469 bp, Glycine max
  unsure (1)..(469): unsure at all n locations
agctngaatgaggaagtgtagaatggtagaatcagtnntgaaaactgaggggcaagctgggcatttgtctgctagaggaattatagcagctactgctatctgaacgtgctcaaacgtctcacttaacattaatagcacgttcactactgagccaaaacaaattcgaccgttgcttcacacgtccctctacattcctcattcaaacttatattttcgtggtaatctcgttttcagcataccccaacagctctcagagatttacgaaatcattccaaacgctctgcttctccatggctacctcaccaaaagaaacttcagctcctggttcaccctctgtaccatcatctccatcatccaccanagcaccatcaaaccaggaacgacctgaattcaatatccagcccatacagatgattcctggtcaagcccctgttcctgaanaactggttcccaaacgacaacagggagt

SEQ ID NO: 27674 - DNA, 380 bp, Glycine max
tataagaacaaaatagccttaatcatttccaaatatgcatgtgaattaagacgcatcaacaagaatcaagccaaagctattgtgcaagcaatcaatggggcaaaacacaccaaatgattataatgatggatggctcaaattctcacaaaggtaaaatcatcactttcaaattgagctttcaaaactatcatgacatgtagagaagaatcaaggatttcaagtcacaaaatgtcaagaacttttattttcaaaacaattacccatttcttgaacatatcctataattcaaagaaaaacatgcaaagtcgtacgtgcacatgaaattgacccaaaatattaaactgaaaatccgacgaaactaacaacattaacaaattaac

SEQ ID NO: 27675 - DNA, 434 bp, Glycine max
  unsure (1)..(434): unsure at all n locations
agcttgtgtcacactttcaactgccgaagctaaatatattgccgcatgaagttgttgtgctcaaagtctctagatgaagcaacaactacaagactttagagtaaaccttgatcacattcctctaaaatgggacaacacaagtgttatcaatctaaccaaaaaccctgtcatgcattttaggactaagcacatagaaattaggcatattaaatgcatcaagcatagaataacattctgtttgtacaagtatgtgattcacattgctattcatatcattttttttgtttagtttgtgtcttagttattgatttatgtgcatactcattagtttgtttgaatatcacatgtttttcttagtaatttcgtgatttctctttgttttaattgattatgcttggttntaatcaatttttgtatgatatctgtttggtaag

SEQ ID NO: 27676 - DNA, 255 bp, Glycine max
ctttatactaccgcttaaaggagctatgacttatcaaaatgtggcataattacttgcttcccttgataacttattgagccttaggctgagaagagaaaaaatttcaacatctggtgcctgaaatgaaaaactttcgagaaaactataaagacaaaagatgtttgtgtacattgcaatcatagaacaaatagtgaaattgtataaataatttatattataaattaaatttagttttatatattttttattaatttt

SEQ ID NO: 27677 - DNA, 449 bp, Glycine max
agcttattcagaggacagcttattatcatgcacagcctgcgagagttggctcacaacaggccaatcatacctatggagcattttcttgagcaagtatcctggcttgaagctcaacttccattggtgagacccaatgaggctactcctcctgagcctgcaccaacacgggttgaaccaatgccagctgagctacgatctccagtggtgaatccacctccttctccagagcttgaagtagttcccccatctccacctttgattatcatctctgatgcatcatcagatgaaaccgctgcccctcctgattcaccagctggagaaacagctaatccccctgattccccagttgaaggaattgtcgatctttctgattcgtcatctagagaagctgttgctttcacttgattccccatttagacattgttgacattgtagattcctgatgatgc

SEQ ID NO: 27678 - DNA, 362 bp, Glycine max
  unsure (1)..(362): unsure at all n locations
tatagaatatataataaaagaactatgactatngaagaatctattcatatttcctgtaacagccgtaacctttaataaataaataagaaattaataaatcaataaataaataaataagaaaaaaaataggtcataaattcccactatataagccaaatgttaacccagagcagcttttataaaacacattctgttcctttattcttttatgacgcacaagaaccctaatagagcaactagaggaggagctctatagagcaccatagacgccacaattgctaacggagaacatttaagcgactacatcgaggtaagggatgagttactcgcgcatggggattagaatgaacatgtgtagggat

SEQ ID NO: 27679 - DNA, 471 bp, Glycine max
  unsure (1)..(471): unsure at all n locations
agccttctcccttatttgctataaataggggatgaagtgaagaagaaaagggttcagccccttaggcacttctctctctttcgaatttgctgaggaaaattagttccgtgaagaaaatccaagccgaggcgcttccgtaacgtttccgtgagtaattacgcgaagattctcgaccgttcttcaaagattcatcgttcgttcttcgttttcttcagtcttcaacgggtaagtacctcaaaccaagcttttcaattcactctatgtacccgtggtggtccacattntgtttcatgtatttttattctcgttttcatttactttttatacccccttttgacgtgcttaatccatttatttaagtcatttctcgcttaatctaaaaataaaataaatttccaccgatcgtttggattgtatcatccgttaatttggtaaaatgaatttgaccgttcggcgtgccgtaccacgttg

SEQ ID NO: 27680 - DNA, 385 bp, Glycine max
aaatgttcacaaactgctcgtaatcgattaccaaatatgtgtaatcgattacatagtgcaaattgtgaattcaaactttaatagctgttgtaaatcagttttggtcactggtaatcgattacatcctctggttatcaattaccagagagtaaatctcttgaataaagcattttaacttatatttcttggcctagccttttgctacttcatatatgaattctcttcatatatatgatactcttgtctatgaccttttatgcgtatatatgatctatttagattttttattatttgtaatgcatatatgattgtcttatatatttctatgtctattactattatctgtttttattttggattggtattagggaggggcggggggggg

SEQ ID NO: 27681 - DNA, 472 bp, Glycine max
  unsure (1)..(472): unsure at all n locations
agcttgtgcatccaataccctgatgaggatgtcccatatgttcttaaaactggactgantccattgcttccaaagtttcatggccttgcaggtgaagatccgcacaaacatctgaaagaatttcatattgtctgctccaccatgaaacccccagatgtccaacaggatcacatatttctgaaggcttttcctcattctttagagggagtggcaaaagactggttgtattaccttgctccaaggtccatcatcagttgggatgaccttaagggagtattcttagaaaaaaaatttcctgcttccaggaccacgaccatcaggaaggatatctcangtattagacaactcagtggagagagcctatatgaatactgggagagattataaaattatgtgccagttgccctcaccatcagatttcggagcagcttcttctccaatatntttatgaaggactcagtaatatggagag

SEQ ID NO: 27682 - DNA, 232 bp, Glycine max
ccttgatcaattattgatgcgtcctcctccagcataggttaacacataatgtgcaccgtagaaaccgatgaataaaacccaatgtcaacaaagtgtgatccatcttaccgggagaatatagatgcttttcattctcagcaaaataacaattcgttagtgaggcatagttcatcatcttctaaccaacccaatccaagatagatgatgcctatgttggatcaattttatccat

SEQ ID NO: 27683 - DNA, 459 bp, Glycine max
  unsure (1)..(459): unsure at all n locations
agctngatggtcagccagagttgttcattcacattatttctgacaagaccaacaacacattgtctatcattgacaatggtattggcatgactaaggctggtaaggttaaatatttggtaagtctttgtgagattatcgccaactgtgcttgttagttagtctattttctctaatgcttgtgcgtttgatgttccagatttggtcaataacctcggtactattgcctctcttataacaatttttcactggcatgcaccatctgaactgatcaaaaccaaaagataatatatatatatatatatatatatatatatatatatatatatatattacgaaaaaatagttcacatgacaatattatggacaatatatattttaactaggaaatcatctatcatgtgtgtcatgatatgcagcgagtaaattntcacaacctcatcaacctcaaaaccacaatcc

SEQ ID NO: 27684 - DNA, 177 bp, Glycine max
tctgtgaacacctttccttcattaccaccccaatctcccatacatcttctatctatcttccagccaccccttcatcaccaataaattgcctgcatatcatatgatccccaccacaaacactctcattcactcgatttgctccacacttagaaacaaaaactcctgacgaatcatatt

SEQ ID NO: 27685 - DNA, 469 bp, Glycine max
  unsure (1)..(469): unsure at all n locations
agctngaatgctcatttgagcttatatgcatgttatttacacacaaagggaaagggagagataactgaccaaatcttttcatggctattcttccagaagaacgctcccctgatgtagtttcgtttatagcttggaccatctcatttttgctgacatatccatccttgttcttgtctaagaatacaaatgtatcaaccaaagtctcaaatgtgccctccagctttggcatcccaattcgtgatttctagggaagtcatggaaaaaaatttgaagatgtagcaaaacatggaaattcaaggtttattgttatcaatgcaagcatgatgaaattctaggctgccctgaagaaatgcatgaaatgtccataaaataaaataaaaaaggaatgaacatatagaattgaattgttcataaagtacaaacatcttctgaattatagaaatgataggcgcataagctgcanaaagac

SEQ ID NO: 27686 - DNA, 337 bp, Glycine max
  unsure (1)..(337): unsure at all n locations
ctaagcttgtggtaccaattattatctntcgtcatgaccttgtagctgggaacctattgtgtgagaacttctaatatgcccctatgttcgcttgaggttntttgcatggtgcctttcattgccccagtgtaaggctttgaggtacaatcgttgtctttcgtcatgaccttgtagcaaggaacatattgngtgagaacttctaatctgcccctatgttcgtttgaggtttatgcatggtgcctttcattgccccagtgtanggcttataggtaccaattgttgtcttgttttcacaatcctcgagtgaggaagaatgaaagatgcagttgattcttgc

SEQ ID NO: 27687 - DNA, 474 bp, Glycine max
  unsure (1)..(474): unsure at all n locations
agctntacgatcaacaaagtntgtcaattcatctctaatcccttagacactcattgggtggcagttaaacgtattctaaggtacctcaaagggtccatttctcatggtcttcatctcaaacctacaatttcaggaagacctctctccattcgagctctctgttatgttgattgggtctttgatgttgatgatcatagatcaacatcacaagtggcaatttatttgggccctaatttggtgtcttggtggtccataaaacaagttgtgacaaggtcaagcactggagcagaataccgtagcttaactcaggctacacataaaactttatgaattcaaacacttctcacaaaactgggagttcctttcaccgtaccagtcattttttgtgatatccaaagtgttgtagcactaacatataatcctgttctttgtactcaaaccaagcacatatgagataatgttttctatgttcga

SEQ ID NO: 27688 - DNA, 350 bp, Glycine max
agagatgaggaagtgttgaaaggtgaaacttcctgcttttattgttgatcacagagtggtacctggagatatgtcgcggtggtcaggagaccttgaggacgtcaggtggagtgctattgcccaaaaccaagcttgaccaatcccgacccaacccgggcatagtcggtcagtgagaacctgtgatgtacctaagcaggcgagctcctggcagtcaacagataaaaggaaaacaagaccacaaagcaaggaggcttgtggtggctggccagctgtgaatattgtgtaatatgtggattgtggcctctggtaatcgattaccaagggtgggtaatcgattacaaggcttaaaa

SEQ ID NO: 27689 - DNA, 473 bp, Glycine max
  unsure (1)..(473): unsure at all n locations
agctngcttgtggagcttctatggaggctggatctttgagcttcaatgaggtcctttcaatggtgattttccaccatggagatgcagcggaagacaaaggaaaagaggtgagaggaggcgccatccattaaggaataagccatggaagaaagagcttcaccaccaagatgaggcttagataagaagcttggagaggatgcttcaatggaggaaaagcaagagggagagaaagagagatgggggagcacgaaattgaaggaagaaaaagggagagaagttgaactttgaattgtgtctcacaagactctcattcatcaaagttacaacaagtgttacacatgcttctatatatagactangtagcttccttgagaagctntcttgagaaaacttccttgagaagcttctttgagaaaacttccttgagaagctagagcttagctacacacacccctctcataactaagctcacc

SEQ ID NO: 27690 - DNA, 248 bp, Glycine max
  unsure (1)..(248): unsure at all n locations
gcctaatgcctgatatgtctnttctgatggcagtggtcctagatcatggaagaatttctccaagaacaccctcttaatgtcatcctatctgaaaatagacctgngagcaaggtagtatatccattcttttgccactccagaaaatgatgaaaagcctttataaagatatgatcgtcttggacatccgtgggcttcatggtgtaacaaaacatatggaacctcttaagattcttatgatgatcttcacc

SEQ ID NO: 27691 - DNA, 465 bp, Glycine max
  unsure (1)..(465): unsure at all n locations
agctncaaggttttcattaatattaccaatgatgtggaaaaagagtctgacacagggacagccatgagatactgggagaaactcaccttatacatttttagcatgaaaccaaattatgcctgcttatgaatcctccttcaattcatccgaatcagagtcacttgcattataacctaacaaggaagcattcaaaacaagtatagtcacactaaattacggaggacaataaaatgaagctgcctcaaataacaagtgagggtatacctgtgtgcttatcacctactttccaaaccgaagacctagtccttgatgctttggtcagccaaactcttcccttaattgccaacagataagatcagtcacagaaaccagaagacaacagatattaagtacgtgcatagaatctgcaatccacaacttgctataactatgctcgagaatataacctttctctattcaactaat

SEQ ID NO: 27692 - DNA, 536 bp, Glycine max
  unsure (1)..(536): unsure at all n locations
nnaactaaantnnnnncccctnanaactctatactcttatatacaatttctacttattatacattaanaacacactatatatataatntnnttatattccctctgatttccttcctatntaccttctctntttnatactcaatcttctnttaccaccataactgtaatatttatttttctactacatttaattatctccttcttcaacattcattcttaatatatatcatacttctctaattaatcattatcatctcaatgatatttctataatattttattcttaaacaattaacataaataaatatctttaaatcatacttcatactataaattaaatctaattcatgcataaatataaactaacttaatcatttacactattcttatcttaatctataatcaattttaatctctttcatattcaaatacaaatcttattaataacatattttatcttcaattgattaattccttttactctcatctcattataacttaataataatctattcatatcggccccgaccccgggc

SEQ ID NO: 27693 - DNA, 463 bp, Glycine max
  unsure (1)..(463): unsure at all n locations
agcttaagcagaaagcacataaatgattntatgctaacacgctccctcacactggggcctttggccttgaagcacaggcccactacctttgcatgaagtcaaatnttattataagaatggaagcaacaaggaactcctaaccacttggtcatagagacactaatatatgtcaaggaccaattctcctaaaatgcttaagttgttaggtgaaagtgcaccattgtttatatctaatatataccacaaacaggtaaagctctcagacacccagaataacagcaacccttaattaacaaaaaacaactgcttgacacactaatgaccagttatcagttttcattcagatctatattttcagcattggtctagatgggaaaattgattgtccaaaggcccttcctagatgcttgtatttgagccttgatatggagaatgtagatacttaatcacatgtgacacttac

SEQ ID NO: 27694 - DNA, 265 bp, Glycine max
agcccaagaacttgagttgcaacctagacaggtagccgtattgttccaaaaccgtcgagccagatggaaaaccaaacaattggagagagattatggtgtactcaaagccaattatgatgctcttaagcttaactttgacaccctcgatcaggacaacgaatccttacgaaagcaggtagaataatactccttccaaaatataaacaaatttcgattatttatctgacttattaatgatattttctccaaattatattgtatttaa

SEQ ID NO: 27695 - DNA, 475 bp, Glycine max
  unsure (1)..(475): unsure at all n locations
agcttagggttaggctaacaaaagcttagaacatggacgaanaattccaacaactacacaatgggattttttttgaaagaattaaacttcataatttggtaattcaaacattctaccaaccaattatattaccttcaagaatttttggaagctattgatggaagcttgcttgtggggcttctatggaggctggatctttaagcttcaatgaggtcctttaatggtgattttccaccatgaagatgcagcagaagacaaaggagaagaggtgagaggaggcgccatccactagggaataagccatggaagaaggagcttcaccaccaagatgagccttggataagaagcttggagagggtgcttcaatggaggaaaagaaagagggagagaaagagagaggngggagcacgaaattgaagggaaaaaaagggagagaagttgaactntgagttgtgtctcacaagactctcacatg

SEQ ID NO: 27696 - DNA, 329 bp, Glycine max
  unsure (1)..(329): unsure at all n locations
ntgatctaacaggtatagatagtaccaattaatttctttaattcatcctcaactatacagtctcatacctgcacagcctttggacccctctgatttttttgtgattcatatggggtgttacatgtccatcaacttttgcttggttcatcctcaaaccacaccatactagaagaaaggtctaatttgatatcatttgtaacatccctgattgtcgacttatcgacaactctcacactatgacaagtcacttaactccttgatggtcataatctccaccggtcaaaaccctctgttgtagccctttcgtgagatctcaatttgctttccta

SEQ ID NO: 27697 - DNA, 470 bp, Glycine max
  unsure (1)..(470): unsure at all n locations
agcttaagaagttaagacaccttctaaatggttattatgggtttcaaatggatagtggcattggagatctaacatccctacaaacactacgtcaagtggacataaaccataatacagaagaagtagtaaaagggttggaaaaacttacacaattaagggtgttgggcttgacagaagttgagccaagattcaaaagttttctgtgctccttgataaacaagatgcaacacctggagaagttatatattacttcaagacgtggtaggaacatggatttgcattttgatgtattggcacctgtacttcagaaggttcgtcttatggggcggttaaaggagttcccaaactgggttgccaagctccaaaatcttgttacgttgtccttatcatgcaccgagttgacacatgatccattgccactacttaaagatctaccanatttgacgcaccttagtttcactattgcatac

SEQ ID NO: 27698 - DNA, 344 bp, Glycine max
  unsure (1)..(344): unsure at all n locations
tcttctgttgcctcaacaagatatttcctaatattaaaaactgtanaatggtttattaacaccaaagaagaaagtgcttacaattacaaaggttttgtcattcataccttatcttatgaagggcaggtatagagtccttattgtaagtttcgagcaagagaacgtgctctagaacactgacatgttatggaaaatatcacaattatgatagaacctggaaaaattaacaagttgaggcttatataacataaaacaaaagccatgcaactatgtatgaattaaaccagctaataactaaacttataatctgagtatctgactatcatttnggacaacanatcatg

SEQ ID NO: 27699 - DNA, 427 bp, Glycine max
  unsure (1)..(427): unsure at all n locations
agctntgaatnggtctctggtcttaagataaactacaataagagaaaanttgggtgtttgggcaaatccgaggactggtgtaaggaggcagcatcttctctcaattgtagtcaaatggatattccattgtcttaccttggaattcctgtaggggtcagctctaaaaataggtctgtgtggcagcccattattagcaaatgcgaggctaaacttacaaaatggaagcaaagaaatctatcaatggggggtagaataaccctcattaattcagtcttaacagccttacccatttatttgctatccttcttcaagattcctaagcttgtggtgcaaaagattacatctataccaaaggaattttgatggngcagcctccaagactccattaagattccttgngtgaggtgggacatagtctgcctaccta

SEQ ID NO: 27700 - DNA, 281 bp, Glycine max
  unsure (1)..(281): unsure at all n locations
tcctcaattgattnttgtttaagaactaccttagttntaatggtttctcctatagcttgtaagtatttgttggtataatttgcctgttccattatgctcttaatgtctctagaggttacttcctcgttgacatcttttgtcttgaatggaattgccatgacaggtttgttgttactgtctttgatatttggtagttgatattgtgtttggggaggtaattccgactggattatctaaccatccttcacttgacaattttgtattacatttgtttttggatt

SEQ ID NO: 27701 - DNA, 455 bp, Glycine max
  unsure (1)..(455): unsure at all n locations
agcttgtggaattcaccttaatctctatgtattatgttgagttgctgccatccttaatcaccaaccaaatggcagtggtgaaccctangaagatctaccaatctcccttccctcgatggtacaactctaacacaacctgtgcttatcatggaggtgtcccggggcattcaatanaacaatgcctggctttcaaacacaaggtcaaaattntaattgatgcagggtggctaacttttcaagaggatagcccaaatgtaaggacaagtccttatgccattcataggggattgttaattaatgcggtggaggaatgtggacctcgagggctgaagcagatggaagatgtgttaacatctangaggttcctattagaggtgttgtgcgaagtangcatgatttgccttgacgtgggtaagggagatccttgttngatacatccgggagcgtcacacaat

SEQ ID NO: 27702 - DNA, 123 bp, Glycine max
  unsure (1)..(123): unsure at all n locations
agctctanattacattgatgtttgtatttatgggaggaggttgtatgccattcttgttntaagagtagtgtcccactggtaaaactaactttccaaatattttccttcacaagaaatggcccc

SEQ ID NO: 27703 - DNA, 471 bp, Glycine max
  unsure (1)..(471): unsure at all n locations
agctnggacttcctgtgttgtgggaacctctccttcctcaggtgtacccaaacccaatcacctggttcaagcacgactttctttctgcttttgttggcttgccttgcatagctcgcatttttcttttcaatttgaaccttcacttgctcatgcaacttcttcacatactcagctttagcctgtgcatccttatgcttaaacatagcaatgttaggcataggcaacaaatcaagaggagtcaaaggattaaatccatacactatctcaaatggtgaacaattagttgtgctatggacagcccgattataagcaaactcaacatgaggcaaacaggcttcccaagatttaagatttttctttaaaacagtcctaagcagtgtgcctaaagtcctattgactacctcagtttgaccatcagttngtgggtgacaagtagtagaaaacaacaatntagtaccaatcttaccccac

SEQ ID NO: 27704 - DNA, 214 bp, Glycine max
cttcttgatcctaatcctactcaccatttccttacccaatttataatgtctatccttaccctcttattcaaataataaatttatgtgtaatttccaatcaatgaataatagaatgaaaatttccaatgatatcaaaatataaatataatgaaaattccccactctaatagtgttagatatcttattatgatattaaagattattccccaatcat

SEQ ID NO: 27705 - DNA, 479 bp, Glycine max
  unsure (1)..(479): unsure at all n locations
agctntaggaagtgggaaggagacacaagacataattagcatgtttcttgtgaaagactcgcatgaatatataaaacaacaacattgtgggagaattacgcaagaacaactactgcatgcttcaagaggacacacatcatccggtctttggggctttgccttaatttggttgggcactaatggtgggtaagaggctttctacatgaagcctagtggcatagtgggttcattaaaaatcacagtatgtgtatgttgcccataatttttttaattatattaataaaaggccacatcttccattggaatgactttggtagatgtttgaacatatgcatatcaatcaatcatcacttctcacattatagaggagttgttcatacaactgtcaagtcagcctccattgttcttaattntctatttcctttntcctctntctgctttnggtattgtcacccttctttctgttagacatctatggg

SEQ ID NO: 27706 - DNA, 361 bp, Glycine max
tgagttactgagaagcgatacggaaatagatgaggaaaattgagaggaagaagaagcgcttacggaaactgaagtttgagaaagtggctttacgtaacggaaattgaagaaatgagagagtgtgttgaaatatttgttgggaagttgaagcagcagcatcagcatcagctgaagaagaagaagctggctttcttatccttctttgtttttttgaaatgcaaccgttttgctctatttcgccggtcatttcttttcaccttttagtcttcattgttatttttttaaaagatgagagcacgtggtcggctctgggcttttatatagaccatataatgaatggagttgctaggtgcacccatca

SEQ ID NO: 27707 - DNA, 498 bp, Glycine max
  unsure (1)..(498): unsure at all n locations
agtcacctgcggcatgcaagcttctcaaggaagctacctagtctataaatagaagcatatgtaacacttgttgtaactntgatgaatgagagtcttgtgagacacaactcaaagttcaacttctctccctttntcttccttcaatttcgtgctcccccctctctctttctctccctctttcttttcctccattgaagcatcctctccaagcttcttatccaaggctcatcttggtggtgaagctccttctttcatggcttattccctagtggatgacaccgcctcttacctcttctcctttgtctttcactgcatctccatggtggaaaatcaccattaaaggacctcattgaagctcaaagatccaacctccatagaagctccacaagcaagcttccatcaccttgcccttggtgtggtggagtttccatgtccttgtggttgtgaatgagcttctatcccttactgcgatggactntgagtatgacatggagaggg

SEQ ID NO: 27708 - DNA, 262 bp, Glycine max
tagttcctaaacaaaaatcaattgatgaagcttcgccaagtatccccattgaaaaacctttattcaaacctttcaaagttagtgagaaggctaaacgaaaaattatggaacttagaaaaactaaatccttaattgaaggcgtaggtgataaccatagtgaattacttaacaagattgatagtttacttaaagtcattccagatactccccaagcctcggaaaatacttccaaaatggttacaagaagtacctccaaattaat

SEQ ID NO: 27709 - DNA, 471 bp, Glycine max
  unsure (1)..(471): unsure at all n locations
agcttggcaagtgtcgcgacgtaccctttcgcgggcaagtgaaggcgaggctcacgggtgcgctttccaaaaggaggaaagatgcgcggagtcgccaccaacgtttatttgtgggaaacgtcggaaaaaccgaaggaaaccggtcaaaatgaaaattctaagttcgggagttgtatttacgtttgaggaaggtattagcacctctcacgtttgtctcaaaggacaacaacctattttttagaattgtggaaattgtgttaccttaactntatttctttttattttttgaggtcgacaaaagcgaggcttttgctcctacataccctccatcgaagaggaaatcagacctacgtagttctttcttaagagtgaatcaagcgattctttntacttgaaaggtgatcattntaaggcgttggaccttaagaatgatccatntacttggtaagaaaaaaaactgaggtaataaac

SEQ ID NO: 27710 - DNA, 361 bp, Glycine max
atgaagcaatcaccaagtcaatggtacaagagacttaatgagttcattgtctctcacgggtacatcagaagtccctatgactcatgtgtttatcatagtaaggtgaaagacgattctcacatctatctattgctctatggggacgacatgctcaaagcatctcaaaatttgttggaaattcagaaggtgaagtcactactcaatagtgaatttgagatgaaagacttgggagttgttgaaaagattttgggcacggagatcaagagggataaagtccaaaagaagttctttatgcataagaaggaattcattcaaaaagtactaactcattctgggatggcatctgcaaagcaagtatgta

SEQ ID NO: 27711 - DNA, 482 bp, Glycine max
  unsure (1)..(482): unsure at all n locations
ggcactgcaagcttttcttccatggcttattccttaatggatggcgcctcctctcacctcttttcctttgtcttccgctgcatctccatggtggaaaatcaccattaaaggaccccattgaagctcaaagatccagcctccatagaagccccacaagcaagcttccatcaagtggtaatcagagcacaagagcttcaagtaggtgctccttaaacctccattaattntttgctttaccttctcttccattggtgtttcttcattttttctccatgtatctcctcacatgtcttgtgctaaatgtttttaacatgattctttagagtttccaccgattaaacttgctatagaagctagatttgattttctatgggtcaaatttcttgttcttgttcttgaaccatgaattatgttgagtttaggttcctttgagttntgtcttgttattttttgtggctganacctaaatcataaaattctta

SEQ ID NO: 27712 - DNA, 344 bp, Glycine max
tcgtcattgggtctaggtagcttgcttgtgaagcttctatggagactgaatctttgagcttcaatgaggtccttcaatgatgatttttcaccatggagatgcagcatatgataaaggaaaagagatgagaggaggcgatatccattaagaaataagccatggaagaaggagtttcgtcaccaagaatgtgccttggataaaaagcttggagagaatgtttcaatggaggaaaataaagagagagagagagagagaaaaagagagaaggggagcacgaaattgaaggaggaaaagggggaaagaagttgaactttgagttgtgtctcacatgactctcattcatc

SEQ ID NO: 27713 - DNA, 470 bp, Glycine max
  unsure (1)..(470): unsure at all n locations
nnagcttgtttgcatggagacaaaattccagtatggtaaggtggtagtacaaaaattattattatgttattttgaagctctcatggcccaacatacaggtcaacaataattgcggaattgtgggacagggtggaaatcgaagtctatgcaagcctattagctatttgcttaattatgtatgtggcgctgttcatgaggcgtcctangaaattttctactacccaagttagtgatgaggtggttttgctggaggcatggccaattggtaatatcccaattaatccaatgataagaatagtatattgctctcaacacctttggaaaagaggataaggggacaaataaaataaaacagagataaaggaaaagtttagcctctaggccttcattntgaaggtctttattctgcatatgacacaatgacagtacattaattgcatcttctggtcaaaaataagagtacttcatct

SEQ ID NO: 27714 - DNA, 257 bp, Glycine max
  unsure (1)..(257): unsure at all n locations
tctacattcatttgctaaatatactccaccttatatagagacaacgctnttcgtctctaaagtacattttccgtctctgaccaattcacagacgtaattgataaaacatatattggttaacttttaatcttatatttgggatcaataatccgattttgtttgggacaataccatntacaatataaaaattgatgagccatgcattaccaatcgaatgcctcacagattcgcaataggtatcagccaccatgacttgc

SEQ ID NO: 27715 - DNA, 448 bp, Glycine max
  unsure (1)..(448): unsure at all n locations
agcttctagagaaagctacatgaagctgtctcggtaaaaacgctgcccagccttcattaaccgttggatcttctcgaaattgggtctgcaacttcacaagacacttgtccatgatctgaccgttgggatctttgagaagttatttggagtatgctagaagcctcttaatgaagcttctagaggaagcctcttaatgaagcttctagagaaaactacatgaagctgcctcggtaaaaacgcttcccagccttcgttaaccgtttgatcttctcgaaatttggttttcaacttcacaagacacttgtccatgatctgaccgttgggatctttgagaagatctctggagtgtgctagaagcttccgttcccgagagcatctcttatntaagcatttcaacctttgctttcgtgtagcttagganaaacatcatttcttcttctttctttct

SEQ ID NO: 27716 - DNA, 371 bp, Glycine max
  unsure (1)..(371): unsure at all n locations
ntcatctagccaagtttatacaaaggtgttacaagagaacctaacagtttctaattatatgggccatcaaatctatcatgtgttaacagtaattgattagcccatgaatctcctcgggggctgtacacacttcggtcatggcttttgctttggctaatagtcgcgggaggtcttgacttccattcaaggtcaaggcgaacctatccatccacatagtcgcttcttgatgcaatgcatcaatcaccctccctcttgcttctttttcggcgtacacttgtgcaaaatcctccactatcttttgttcatgggtcacagactggttcaactcttccttgtactgccctatgatagctagcatgctttgctccgtg

SEQ ID NO: 27717 - DNA, 462 bp, Glycine max
  unsure (1)..(462): unsure at all n locations
agcttttggaaaaggaataagaagaagaagatgttcanaaagatgttcaaaaagttatgaaaaaagttattaaaattcaagtcaaggtcttgcttttatagactcttcatgtctggtcaagaaaaccattagaagagttataaccttgaaaaaaacctgaaaacaattggaagagttatatctcttgactttttattcaaaacttgtcattggtaatcaattaccaaaatcatgtaatcgattacacaaagcattttatgaaaagatatgactcttcacaattgaatttgaatttcaatattcagatacactggtaatcgattaccaatatattgtaatcgattacaccatttaaaaattaattggaacgttgcaaattcagttaanaacttttgaaatcaaactttgccactggtaatcgattacaggtaattggtaatcgattaccagagaataaaaact

SEQ ID NO: 27718 - DNA, 327 bp, Glycine max
tatgctacatatatctacaacagacctcctcaagctcagcagctaaatcaacaacaatagaacaattatgacctctccagcaacaggtacaatcctgggtggaggaatcatcccaaccttagatggtcgaatccttcacaacagcagcaacaacaacaaccttattttcaaaatgctgctggcctaagcagaccatacgttcgtccaccaatccagcagcaacaacagctacagccccagaaatagaaaacagttgatgctcctccgcaaccttcccttgaagaacttgtgatgcaaatgactatgcaaaacatgcagtttcaacaa

SEQ ID NO: 27719 - DNA, 470 bp, Glycine max
  unsure (1)..(470): unsure at all n locations
agcntgttggggcgaccgacactctatagaactaatagaggcctataatcagagcaagaaatcccaaggccctgttggacttctctgggtccactaggtgtcttgtaggcgctatccctgcaatctggtaaatagcgttagaaatcagctgagccatatgtacactcacctatgtcaggatggcgtagaccaactaacacttcggcaggctgaggtctgagttgtggccgctggggaaaatgttgctaagcagcaatgtcatccagatctaagtaatagtggtcacatgatccacacccgtctccccgctacggtccgagcaaagttctgacccaacacgcacaacaactaggcgatagcctcctcatcgaagcttgaggcctgactcctcatctggttgtactcgcactgctggcattcatccaagatcagtggatgcccaaaaaattggctgatggcatctctgtcaa

SEQ ID NO: 27720 - DNA, 376 bp, Glycine max
  unsure (1)..(376): unsure at all n locations
ntaggagataccattaaaactaaagtagttcctaaacaaaaatcaattgagggagcttcgccaagtgtccccatcgaaattgaaaaacctttattcaaacctttcaaagttagtgagaaggctaaacggaaaattagggaacttagaaaaactaaatccttaactgagggtgtaggtgacaatcatagtgaattactaaacaagattggtagtttactaaaggtcattccagatactccccaaacctcggaaaatacttccaaaatggtaacaagaagtacctccaaattaattaatgttataaatgaagatagtgaccaaacctcaaataacacaactgagataggatcagtgtcagataagaatataaatccaa

SEQ ID NO: 27721 - DNA, 451 bp, Glycine max
agctgtgagccataatccctactattatatttcttgacccaggatgagaatatccatcctcgcccttggaagaatacacaacggagacagaagttcccgatcttaggtcggaaggagacagaagaaaaagaaaattctcaatcaatgatcgacagacagctgaagagaatattccctatcacagcgtggaggaaagcttacaagagtgatgacgatctacaggaaggtctttggactatacagtatttaaacaatacataattgtcacaagccaactatataagaaaggaaacctcgactggaagtgggcctcttcctttgattaccaaccaaaatcttgtgcatcgacgaatatttcgcctcgcactacacaagcacatataaggaaaaggccataacactcagagccatatttcccaccagaaacaccattacctagaaaggtcctatt

SEQ ID NO: 27722 - DNA, 198 bp, Glycine max
  unsure (1)..(198): unsure at all n locations
tacccaaaattctcaatttactatacactcatgaccctcataaattaaataccactcttaataaatgctatataccaacttgactttttttaanaatatcatgtatcatcatatcatctatacaattagctcttatctaattatgtattctcacatgctataaatgcactttactaaacttttttattgcctataatg

SEQ ID NO: 27723 - DNA, 467 bp, Glycine max
  unsure (1)..(467): unsure at all n locations
caagctttggcanaggaagaggagaggaagaagttcaaaanaatgttcaaagagattcaaaggttgtaaaagtatatatgaaaagttatatcaagtttttaaaatgcaagtcaaggtcttgcttttatagactcttcatgtcaggtcaagaaaaccattggaagagttataatcttgagaaaatcttgagaaaaccattggaagagttacatctcttgatttttattcaaaacttgtcactggtaatcgattaccagaaccatgtaatcgattacacaaagcattttatgaaaagatgtgactcttcacaattgaatttgaatttcaacgttcagatacaccggtaatcgattaccaatatattataatctattaaaccatttaaaaatcaattggaacattgcaaattcagttaaaagctttngaaatcaaactttgccacttggtaatcgatacaggaaactggt

SEQ ID NO: 27724 - DNA, 363 bp, Glycine max
tctgtccctgagatactggttcccagaagacaacatggagtgtagattgctgaataccctagccctgctacaattcctatggaagtatacacggagatggacaagataatccgcggtattgtgagtagcattctgaatgatgcttctgtgcctgatgctgagaaagatgttccaacatcttccaccccagatgtttctgtgcctgatgtcaataaagatgttccaacatcctccgctccaaatgctgaagccctcccttcacccagtgaagaggaatcaacagatgatgaggatcaagtctcagaggagacccctgcaccaatggcaccagaacctgctccatgtaacctcattgacttggaa

SEQ ID NO: 27725 - DNA, 464 bp, Glycine max
  unsure (1)..(464): unsure at all n locations
agcttgtaggattatggggtacccatcacatgtggtactaggtggcagtcgggcgatggtgcacaacaagttttccacatccacaaagcgcgcataaacccaccatcccctgttgcccacctccaactgagctcacgtactcccacgtagcccataacctcgtttctctcaacaccgggtccccatcaatcctcccaagcttccccaacatcaaagtaaatcaacattcaaacagcacaaattaccacagccaagaaaacagggcaaaggcagaaaactctgcccaaaacaccaaccaaaatcacagcttttctcacttaaagaccccagtaacaattccttcgatccaattcgttaaccggtggatcgactccaaaattntactggaagtctatagtacantaagcctacatttgaccgttgggatctactagtaaacatncagaactcattctgcactactc

SEQ ID NO: 27726 - DNA, 351 bp, Glycine max
  unsure (1)..(351): unsure at all n locations
tcattaagaggcttcctccagaagcttcattaagagacttctatcacactccagacatcttcgcatatatcccaacggtgagatcatggacaagtgtcttgtgaagttgcagaccaaatttcgagaagatccaacggttaatgaaagctggaaagcgttgttaccgaggaagcttcatgtagctttttctagaagcttcattaaaatgcttgctccataagctttctcgtggcttctttgagaagctttctcaagaggcttttttgagaagctagattcctatctattcacacccctctatntaactaaataacttccttattaatatattcggatgaaaataacgcaaca

SEQ ID NO: 27727 - DNA, 424 bp, Glycine max
  unsure (1)..(424): unsure at all n locations
agcttgagggtgcgtagcccaccatctnttcatagtagagtatcgataatgtgtctaccatcatgattatcgtctccctttccatcattgggggtaccacttgggccgccagatccctccaccttttgggcgtgttctttgaaagatccatccccctttttgcacatgttctgtagttgcatcctattcagaaccatatcaaaattgtactgatactgcctaacacaggcaaccattaggtccttccaagaatggactcaagaaggttcctaagttagtataccaggcgacagttgtcctagtaagactttctcaggaaaaatgtatcagcagttttctcatcttttgcgtatgcccncatcttccgacagtacatctttagatggtccttggagcgagtagtccncttgtacttgccaaagtc

SEQ ID NO: 27728 - DNA, 365 bp, Glycine max
  unsure (1)..(365): unsure at all n locations
tgtgactcnttcattttaaatttgaatttcaacgttcaatgacactggtaatcgattaccaaaacattgtaatcgattgcagccttttgaaaatatttggaacgttgtaaatntcagttgaaaactttttcaaactcattttgctactggtaatcggttacaacaatatggtaatcgattaccagagagtaaaaactcgttggtaaaggttttgtcaaagactcgtgtgctattcaaagttttgaaaaaactttttaatacttatcttgattgagtcttttcttcattcttgaatcttgatcttgattcttgagatcttgaatcttgattcatgaatgtagactttctttttgagtcttgaattc

SEQ ID NO: 27729 - DNA, 440 bp, Glycine max
  unsure (1)..(440): unsure at all n locations
agctngngtgatgttgcgcgtactgatgggtaccatgaggtgtttgctgnggtttgacccatgcgggtgttgaagagacggcatgggcatctccttccttcctttttgcccctgttgccctgattcttttggcgttcacgcttgtggaggaaacgtgatcaaactttcctctcttcaatccaacctcgattctttccccggcaaacaccagatccgcaaagctggacggcatgtaaaccactagcttctcatagtagaacactggcagagtgtctaccatcatggtgatcatctctctctcaaccatgggaggagctacttgtgccgccaaatccctccatcgctgcgcatattctntaaaggtttcaccctctntcttaaacatattctgcagttgagtacggtcaggagccatatcagaattgtactgatactgcctt

SEQ ID NO: 27730 - DNA, 208 bp, Glycine max
  unsure (1)..(208): unsure at all n locations
tgtaattatgaaattgagatgcccgaagttacaccattttctagttaacaatgcattatgtaccatgttcaattattttgtttttaagtgaaacgggtttatgatcccaacacggtttgctcgtggtgcctaacacatgaaactaagaatgtagtgtgaagtttcacacttccccctttntgtttttgatatgtataggaaaacgcaa

SEQ ID NO: 27731 - DNA, 483 bp, Glycine max
  unsure (1)..(483): unsure at all n locations
atcttaagtcacctgcggcatgcaagctnggactgtgctagagagaagaacaaatgatcaaaatgaacaaagagctatttctagggcaaaattgggtgttgaggagtcaaattttgattcggtggaattttaggtgtaaattcagtttgagcaagtttagattgatgttatggacttgtgtgaggtgagagtttgcttcaaatttacctcattctaaatttcacttttcaaacctagaaaacccattgaattgaggggtgttggacacctagattctgtgttgctgtgctttaaagcttgaatttggtttatacatgattgatacatgatttgggacttgtaggaattgatttgggcaagattggatgagaggaagtgtgattttcgaaatctgcacttatgcagaatttttgctgtgaaattgtgcagcagaattttgcacaagtgcagaataatgcttgtgtgtggttggctgtggaaagt

SEQ ID NO: 27732 - DNA, 352 bp, Glycine max
  unsure (1)..(352): unsure at all n locations
nntttggagtagaaacatgggaccaactcattntatttcataaaggaagtcgtatctagtcaaggtcttagagaccatacaagtttcctaacgatttctaattatgtgggccattaagtctatcatatgctgacaatagccgagaagcccatgaatctcttcgggggcggaataggtgtctgccatcgacttggacttggctaacaatctgggaaggtcttgactcccgttcaaggtaagagcaaaccgatccatccacatggttgcctcttggtgtaagagtcgaacacccttcctctagactctatttccgcgtatactcgggcatattcatccgcaatcctatgctcgt

SEQ ID NO: 27733 - DNA, 480 bp, Glycine max
  unsure (1)..(480): unsure at all n locations
agcttgcctaattaacctanaattgagagagaatgattattaaacacataaaacgaaaatactaagtatttattacctttacttaacagaaaatacttataacattacaaaataaccataaattgggagagtttgatacaatttatacaagttttatacacaaaagttagtcgttttctccgactaacacttatggtatattcctagtactcaaaacttgggatgaatcataagaatgtgttaaggaggtgttgatgatgagttaccaacttttaattaaaaattgaaattttaactaatttaatagtttttttttttgctttaatcatatatgtttttatcttttttctttagttcattctatcaattttaaaaccattagaaattgtaatttaattntttaaatcaatactgaagaatttaaaaactatcataaatcatttntaaaaaaattcaaatgtcaccttgacacttaataga

SEQ ID NO: 27734 - DNA, 394 bp, Glycine max
ctcagcttaagaataatggcctcagcaaacttcttattcccagaaggaaactctataaataggcctcctatttttaatggggagggttaccactactggaaaactcgaatgcaaattttcattgaggcaatagacttaaacatttgagaagccatagaagttggaccttatgtacccaccatggtggctggtaatacaacaatagagaaacatagagaagagtggtctgaagaagaaagaagattagtacaatacaatttaaaggctaaaaacatcattacttctgccttaggaatggatgaatattttagggtgtcaaattgtaagagtgctaaggatatgtgggacactctacaagttacacatgagggaacaactgatgtcaaaagatcag

SEQ ID NO: 27735 - DNA, 469 bp, Glycine max
agcttgtttaccccatgttgtaattgcttacaatagagctgttcatagcaccactaattgttctccttttgaagttgtttatggttttaacccactaactcctcttgatcttttgcctatgcctaatgtttctgtttttaagcataaagaaggtcaagcaaaggcggactatgtgaagaagcttcatgagagagtcaaagatcaaattgagaggaaaaataaaagctatgctaaacaagccaacaaagggagaaagaaggttgtcttcgaacccggagattgtgtttgggtgcacatgagaaaagaaaggtttccggaacaaaggaaatcaaagcttcaaccaaggtgagatggaccatttcaagtgcttgaaagaatcaatgacaatgcttacaaagttgagctgcccagtgagtataatgttagttccaccttcaatgtctctgatttatctctttttgatgcagat

SEQ ID NO: 27736 - DNA, 342 bp, Glycine max
gcttaacattcaatgtctatcgttccgatatattacgggactctatcgaacatccgagtaaaaatatattggttgttgaatttgctcagagattcggtcttcaatttcgagcgcttcgatatattactggactcaattgaacatacgagtaaaaacttattgtcgttgaatatttgctcagagcttcggtattcaatttcgagcgtctcgatatattacgggactgaatcagacattcgagtaaaaagttatcgtccgttgaatttgcacagaacttcggattccattctgagcaactcgagtatattacgtgactcaattagacattcgagtaacaagtta

SEQ ID NO: 27737 - DNA, 444 bp, Glycine max
  unsure (1)..(444): unsure at all n locations
agctntagtcaaggaaagtaacccataaatgaccaagaatagggtgttgaaagagcataataagactatcctaaattggtttaaagatacaatctttggtaacgataatgcttcagaaacgtcaagaaagttagcagatgggcctaaaagaaatgttataacttggcaatgatacgatatcaacaagtattcgatctacatttaatcacaagacgacaagagtaagatgcaaaataatggggttagtctaaggtttgaatctcaacactttgctactgtacatgacgacaatcctcaggtggctttcatgccttactttggagtcattgaagaaatctgggagcttaattatgtaaaattcattgtttgtgttttcaagtgtaagtgggttgataccaatatcggtgtgctaatcgatgattttgatnntacttggtagatatg

SEQ ID NO: 27738 - DNA, 360 bp, Glycine max
  unsure (1)..(360): unsure at all n locations
tgtttactggatagcagatatgtgttgattaatataaggcttgcaaggcagactgaacgatgcagaagatctgctcatcaagaagtgagtttatttgtgtttgtgcgcgcacgcctgcatgcgtgtgctttntggttatccttgcttgtagatttgcttcatatacatggaatctgcttttgtttgtggaggggatttgactgttgctgtttgttggtaattgtagatggctcttattgctcgaatccagcacccttacattgtggaattcaaggaggcatgggttgagaaggtgagagaccctctaagtttttgtgtaatgtaatcatagtcttaataattactacagtattgaactct

SEQ ID NO: 27739 - DNA, 468 bp, Glycine max
  unsure (1)..(468): unsure at all n locations
agcttcaacatcagaccacttccagggtgctggaactacttcacatggacttgatggggcctatgcaagttgaaagccttggaggaaagaggtatgcctatgttgttgtggatgatttctccagatttacctgngtcaactttatcagagagaaatcagacacctttgaagtattcaaagagttgagtccaagacttcaaagagaaaaagactgtgtcatcaagagaattaggagtgaccatggcagagagtttgaaaacagcaagtttactgaattctgcacatctgaaggcatcactcatgagttctctgcagccatcacaccacaacaaaatggcatagttgaaaggaaaaacaggactttgcaagaagctgctagggtcatgcttcatgccaaagaacttccctataatttctgggctgaagccatgaacacagcatgctatatccacaacagagtcacactta

SEQ ID NO: 27740 - DNA, 154 bp, Glycine max
ttcatctgttctatcactccctcttcattatccattcttctggattgagtgtaataagggtgccttttcgctatcttatttattgtgatttccctatatatactaactatgtatgagttgccaccaatacatgaattttctttatgaatgatca

SEQ ID NO: 27741 - DNA, 448 bp, Glycine max
  unsure (1)..(448): unsure at all n locations
agctngtgaaatcaatggaatccatgatttcgtttgacacaagtcgttcaattttgttcttagaaacgtgacctaagcgcttatgccataatgctcatgaaattgtactatgaattctacgcttagtaccacacaattccgcattaaaggattcaccataggaagctacagtatcaagtaaatatagattatcataagtcaatagtgaaccagttccaacaatatctaaattgaaagacaacctanacacattgtttccaaataaacacaaataacccaatttgtccaaataagaaattgaaaccaaatttcgtctaagtgatggtacaacaagagtgcctttcaaatcgaaataaagaccaatacataatgataatctaaagttacctatagcttccaccttcgctaatttaccatctccaatgtatatccatctntcagaatcaat

SEQ ID NO: 27742 - DNA, 372 bp, Glycine max
  unsure (1)..(372): unsure at all n locations
tgttctgtgcagaattaaagtatacactttggacattctttttgctcagacttgtgcacactattccagagtgcctatttcgggataagagccctaaaagcagcttatgcattgaagcctatgttntgtaaattgagagaaattattgagttggagagtgagtgtgagatgctgagaagaggaggaggaatcccccttcttgtgtaaggaactatcattctctgtttttaatctcatttattgttagggtttctttgtaatggctggctaaacaccctagttggggatttctaatgaataactgatgtaaatacttaatatctaattgattatgttttctgtgttcaatgcttccttcaatgcttaatgttt

SEQ ID NO: 27743 - DNA, 466 bp, Glycine max
  unsure (1)..(466): unsure at all n locations
agctntaggtgaatgttgcctggtttaacaatttttatcctctcttaattccgcaggactggatgcatcgtcctttctttcgggcaggataaattccatggtgaggcagtggataccctccattatgttgtcaatcagtcagactacacagtgcagactctaagaaatgtgacagagtatcttgcgcttaccaaaactatcgtggtggcagagatgtttcttccatctaatatcatggatgatattgacaaattgaatgcagatctagattctgcagcagatacactttccaagcagacaaatgaaaattcatttaaaatacgaaaagtattcaatgctgcgtatgctnttcattaacttcacattgttcgattctcatttacaatntaatattggcaactggcatttgccatccatttatattgtaaactgattcattntgcaggcgtctagctntgattatgat

SEQ ID NO: 27744 - DNA, 377 bp, Glycine max
taataataaaggtgaaagctgtagaatatgtttaattaaattagagttcaattcaagaattgtttcattgttacaatttgaagataaattcaaaaaatttaaaatttgaagaatacaatgagcctaataatttatactcaagatacccatgtaggttgaaatttatttggatgcattactaacttaatttccactaaagatgaaatttttgtagaagggaatttgagccaaaaccattgagattgaggaacttgggatatcaactatggcctggttgtatttatgctcaattaagttattttgggctaaaagagtgtttttatggtcaattgatgtatctgaatgaactaagagtttaatatgtgtcatttcattta

SEQ ID NO: 27745 - DNA, 466 bp, Glycine max
  unsure (1)..(466): unsure at all n locations
agcttaagttaatgagtcttaagagaaatattatccattaacacacacacaaggtcaaagctcacttaaactagctcaaaaaaactttntttttatttaacataaatccattttatttttccttaataataatgcaaaataatatttgtttatttaactaattatgaaaaacaatttcatagtatatcatatgtttatttaatatagaaaaacaaatatcggggtgttatgtagactcttatgcaacttcattatgatattagatgctcttttgtagcctttgatttgtcttctatgtagggccttgttgtcttctacatagtcaagttcaagaactccaagggaagcactcttcatcatgcaaatgagctntaaaagatcttctgaggttttgatccttgacagtagatatgaaacaaacattttgatctttgttctgagcacctctaaagcatgcacatatctg

SEQ ID NO: 27746 - DNA, 287 bp, Glycine max
  unsure (1)..(287): unsure at all n locations
attgtgtgccgttactccagagagagttgtatgtgtatagagagaaacatttggggggagagagagatgagaggaattgatgctatananantggttgagcgagcttcaacgatgatcctctacagacatctacaacatgctactatggactgcatcaatgatatattcgacaaaactgactggataatggcgacatatcaacattatacttcacacgttttacagaggacatcacattagaaagagatgtggtatcactttatgatgtgcggtgacctgagggaga

SEQ ID NO: 27747 - DNA, 282 bp, Glycine max
  unsure (1)..(282): unsure at all n locations
agcttcatgatgatgaatcagtgttgtttcattatgtcttgatgataacaggagacgatgacacttagccctccagaatgatttcgagattgactcagccattgcggaagcaagagacagatgatctcgagactcgtgagacgatgatttcgcgattcccgagaagatatccagaggacttcactcgggaagtattgataagatgntactgagtcacaaacatagctcagtgttgccattcaaaagaattcttctcacagtttctaacttaccagagttttt

SEQ ID NO: 27748 - DNA, 214 bp, Glycine max
attcatacccattcttctataagattttcttgattatatttcatatttttatactcctaatattcttattcacatctttcatatactaattttataactaacctatttttataaacctacaatgttatctcttcactcaaatcataattatactttataatttaaatgctaactctaatcctccttacactatactctatatcttattaataat

SEQ ID NO: 27749 - DNA, 431 bp, Glycine max
  unsure (1)..(431): unsure at all n locations
agcttgaaccaaaaccgatgagagtgtgaccttactctgtgagtgaatgactagctgtgagtaataatctttgcatgaatctctgaattntagaatgaaatgtataaatgaggacatgatgaaggccatgattgtacatacacaagctctttcgaccaaacaacttaccttgaatgataattgcatcctttgctcccttttgaactgaatgataatgtcaaaaatttgaaccctgaacttaaataattatctcctgataccttgtttagattttaggagagcatatggttcaaggaaaaattactctaaatttgggggagggaagtcaattagaatgaaaagataaaggttaagcatcagcacacacaacaaataagttgtatgtgtcgcaacctactcttctgcgggaaggtgacgcgagactcacgggt

SEQ ID NO: 27750 - DNA, 339 bp, Glycine max
  unsure (1)..(339): unsure at all n locations
tgatcatccattagtgtgcatagttaggtgactctagcattgngaaatgcactgtcgccttataacttgattgaagcaggttcgaaacttggtcttacaagaggggtctgcacattaagttttggttttaattatgttgttacaataatgcttgttagtctatgcctagtcttacaataaggatctgcggacgaagctctggctatattaggctaaactctcttaagctgcttgaactgagtctagtcttgctagaagtgattgtggacgaaactcaatttaagtagtctaaacctaagagagctgtctcaattgtgctattccaacaagagggatctg

SEQ ID NO: 27751 - DNA, 356 bp, Glycine max
  unsure (1)..(356): unsure at all n locations
gcttgagatgaggaagtgttgaagggtgaaacttcctgctnttattgttgaccacagagtggtacctggagatatgtcgcgggggtcaggagaccttggggacgtcaggtggggtgctattgcccaaaaccaagcttgaccaatcccgacccaacccgggcatagtcggtcagtgagaacctgtgatgtacctaagcaggcgagctcctggcagtcaacagataaaaggaaaacaagaccacaaagcaaggaggcttgtggtggctggccagctgtgaattttgtgtaatatgtggattgtggcctctggtaatcgattactaagggtgggtaatcgattacaaggcttaaaattg

SEQ ID NO: 27752 - DNA, 356 bp, Glycine max
gtgttctcgatatgcgaagatgatgttccaagtactttggatttggtacgaccatgctctcctgacttccagctgggaaaatggcgagtggaagaacgccccggcatttacgcaacgagcataatgtaaacctttacggttttaaaaagctctatagttgtgcctaggctttaaagttttcattttgtaaggctttgtgtcttttgtttttgaatttataatacaaggatctttcttcatctgttcctggtctctacccattctcattcatttgcatgtttacttctttttctaaaacggcagattcgatgacgagtcccccgaaggtactaatacctgggacccgtctatcaact

SEQ ID NO: 27753 - DNA, 430 bp, Glycine max
  unsure (1)..(430): unsure at all n locations
agcttatgcgcatatttccttacgaacgttcacttgcacaagacatcctattaactaagaaaaatgcacccatatacaatcaaggcagcttcattacctagattatttacatgtacttccaaggtgtatttgttatttacatcacacacgtctccttggttaaatttacatacatgcatactcaaagcattttggggtaccaaaaattgcacgtgtgcacatcttggtatttctaatacctatacatacacaaacttcatgatgaatcttgactatctacacaataaggtgctacgtttcatgctcttttcaaatttttgctacctaaagtcgcatgcaaattcaagtatattttcctttgctgactaanattgtattaaaaggtatacattatttttgtaatgtattttctttacataacatgcaacat

SEQ ID NO: 27754 - DNA, 429 bp, Glycine max
  unsure (1)..(429): unsure at all n locations
agcttgtagaatggctggacatgatacatgtcagggtttggtttggttcaaggataaaagggatgccccacattatttccatgacacaaatgcaaaaatgatgatttggaaattttatgcaaaactggttatgcatgcacctatgcggacactcaagtgtcaaatttttatggtcatgtgatgctcgggctcaggattcatttcctctattttagtcaacccaacgtttccaaaatatgttcttttatcaatttgtgcattcatccgagtccattttgggcgtctgggaaaatcttcacagcattcacccttcaggtgtatacacattttttcaaaaactagttatgatcaagtgaattttccaaagaaaagttggaagtcatctcttttcaaaagcatgttggttnttcagcttgacaacttattttt

SEQ ID NO: 27755 - DNA, 427 bp, Glycine max
  unsure (1)..(427): unsure at all n locations
tcgcttaacgtatgccctagtcattcatccctatgagatgttgttgaagtatnggcgatcagaattgccattccttggattatagggttgaaccaagctcatgcttttacaaaaaggttcatcaagtcaagttgaaatatggaaggaaccgtcttgcaaaattggggcaaaagatgaatcgagtcacatcactgcttcgtctactgccaaacatatttaggattattgatgtccttgttacttccagtttcaccttgacaaagatgtcatggaccatgttgaaaatctaaattgattcaaccccatatcttgcgtaaaaattcgcaatacttcaattgtacatcattcgcatgcatccatgcttttcattggttgcattgctcgttgcactctttccttaaaagataaaataaaatgaacataatca

SEQ ID NO: 27756 - DNA, 435 bp, Glycine max
agcttcttcttccatggcttattctctagtggatggcacctcctctcacctcttctcttttatcttccgttgcaactccatggctgaaaatcatcattgaagggccttattgatgctcaaagatccatcttccatagaagcttctcaagcaagctttcataaaaaatacacaaatttcttgttgttaggtatggatctagggattatcggagttagatactccaatgcaaaatcaaaccttttcgtcattcaaacactaaatttagggaaaaacttttctatttcatctttgcccaaattaagaaggaaaccctccaaataaccggaccaagtgatgatagggaggaaaagagagtgtggtccttgcgcagaaacaatcgcaacacaacttatactcagcgatggtagtgagttccgacaccgtgttcatgcatg

SEQ ID NO: 27757 - DNA, 223 bp, Glycine max
gatacaatatttatataatattatgcagggcccttaacgtgggtactatatatgtatgggtactggtagctatgcttcctcatcataaatcatgcttattggctgagatttattttctcagatgtgcataattaccaaaatctggtgcaaaatttcactattccttttgtttcctacttcattgacgatacttaatattcttaatatggacagttctctttgt

SEQ ID NO: 27758 - DNA, 448 bp, Glycine max
  unsure (1)..(448): unsure at all n locations
tcgtacccgggatccttagttacaccttcggcatgcaagcttctataatgatgcattgtactaatatatggagttggccactgcttcgcctgatgatgacaattgctagaccataacatatgctactggcgataaaggacaacggttttttaaataaatatgtcgtacatgcaaaaaaaaataaaattaactcaatcgtacacaattgatttcataaatataaaaaaacttgatatctacaatgtacctgaacaaaatgattgccatagacgtgaccgatacaaattatgcgatgcaccgaagaatctctcggtggttgacttctaagagaaaaaaacgtcatgctttgttggtgaggcaaggattacattataccttgatgcaatcacatatcccatgttggttatatccatccacttatccatagtgacctanatgaaacanatat

SEQ ID NO: 27759 - DNA, 382 bp, Glycine max
  unsure (1)..(382): unsure at all n locations
tcgctntgtgtaatcgattacacttatttggtaatcgattacttgtgactgtttttgaaaaatcaaaatatgtaactcttcttataggttctgactttttcaaatgggatttaagtttgtctaaaagttataactcttctgaatggtcttcctgaccagacatggaaagtctataaaagcaaggctttgttttacatttcaataatcttgaacacttatttcatacaatcctttacaagccttgaatctctttgaacttattcttcttctttgtaccaaaagctatatgaagatatctggttttccaaaccttgaaaacttgtgctatccatctttttcattctcttctccctttgccaaaatgaattcgccaaagactaac

SEQ ID NO: 27760 - DNA, 452 bp, Glycine max
  unsure (1)..(452): unsure at all n locations
ggcatggacgtctgacccggactctttagcaccttcgcttccagcgtctctcattacctgaagacgtttactgtagcttgacgcaagacacttgaacccttgtaaccggggcgcaatatctaacagggggggttgagttaagatattccagacttttttcctaattaaaaaatccatcttactttttacttatggtctgaaatgccttaatgacaatcttcgtaaatattaattctgctgaggcgacttggattatgaatataaagccctcatcaacaaaggagattagggaagagaaaatgctcactccnttttatactggttcggccacacccttgtgccttcgtccagccccaagcaacccgcttgagaggtccactaacttggcaagtccttttcaagttctagacccaaggaccaccttctttggttacagaccttacacaagagac

SEQ ID NO: 27761 - DNA, 308 bp, Glycine max
  unsure (1)..(308): unsure at all n locations
cctgaggtccaagaggtgcatgataattggtaaagaactcttctggccttgagctgtgtctattgttgttagcttcaccttccttttgcatcttcatcaactggcggtggattctgacttgtttcctttgaagttcagctggcataccttgtcctggaaccctagggttctgatcacgagagaataaatgctgtttaagcctgggaaaccatgcctaagtgngctgaattgctcttcttatatcgatgtagaagcaagcttcatgatgatgaatcaagttgattcacgttgtttggataatgacgaag

SEQ ID NO: 27762 - DNA, 374 bp, Glycine max
  unsure (1)..(374): unsure at all n locations
ttgcctctcacacgttactctgatgagaacaatttttcctgagactcttgcttcaactttaagacatttctttataggtttatcatcacaaggtttgtttattttgaaacatcctaaggattccgtctttctcttcttgttctcttgttccagatctttcacatgctgctgaagatatttcacatactctatagcgttgctaaggacagaagccttgtccatctacacattaattagaaatatcttaattcttattttataagctaataaaggattggtgtgatataaatttctcaagtttggctttgatattacaatatctacaaaaactntattccacccgatgagncatatatatatatatatatatatat

SEQ ID NO: 27763 - DNA, 407 bp, Glycine max
gcttattatatgttatatttaatcattgtaatatataatactatatatggagaaaaatacttattttaatacataaatattaaattaatcacattaaatgcaaccttaatatatttgtttagatctcgtttaaaattttaaatttagttacttaaaaaatatgtattaaaaatattttttttacatatatagttaaatataaattaaaatatttttttggttaccatgcaatttatatagaatattcacctgctgtaactctaccgaaaccttagagtttttattttttaaatccgcaaacaaattatatatattagaagtaagtatcagagataccttaagaacaaaatataagcccaacattcagcaactcggttaatcaatattaatatctgatcaaaagatat

SEQ ID NO: 27764 - DNA, 522 bp, Glycine max
  unsure (1)..(522): unsure at all n locations
ccccccccctcgaactctcatatctgaacgatacttattgtcaaaccattctcaaaagcnacggagattgaacctgtaagccacgattatgatcgctgcattcaggacctttgatactccacttaagaaatagtgtatgttctaagaacatatccccgcttcaatggtcccgtgttaacttcaaagtgattgttactagcctctttacccctctggtatttgtatgatggtaccttcttttactcacatgctttccttatgacctgtgaagggttgagtcctgatgtacttactggttaacctttcattttgtaaattatttggtaatgcttataaagaaataaaccaatgtaattgcatcggtatttgaaatatgttacaggttctatccatntatgactatgagggtgcttattcattgccttgaaattatcttgcagaaatttttcttcaatggaggttatatttggaccaatgtgagatccctgcactgaaattattcttatcgtgctcctgtccacc

SEQ ID NO: 27765 - DNA, 401 bp, Glycine max
  unsure (1)..(401): unsure at all n locations
agctntanaaatntactcccaagtattgttcatacttcatacccgggaatgtagtaataccttgttatacttcatttttatcctcatagtaaggggtcagaatgttatatttccatagcaatatgagagtttattttctaactcaattgcaacttccattttcactcttactttttattctaattattttgagttttaaaaaatattcctaagaatattaaaatctaaccgaacatatttttaaatttactcaagaatagcattctaggaaagtattcctatgaatgtcattctgagaatgcaatattattccttgaaacaaatgtcaccatataaactatcttttcctccatccttaaaggttaaagctatatagtaaataatacacaattatgtagagt

SEQ ID NO: 27766 - DNA, 435 bp, Glycine max
  unsure (1)..(435): unsure at all n locations
agaaaggtnatgaacctgaatacnnanttgtgatcctgcattcggacctatgaaactcagctggtgaatatgggtaccatcaatgtggaccaggtggggtcggccatgtgcacaaaagctttctaattcacaatgcgcgcataaaccaccatccctgttgcccacttccaatgagctcacgtacctccacgtggccatatcttgtttttttaacacccggtccccatcaatcctctaagcttccccacattcaagcaaacaacattcaaacagcacaagctatccaggccagcaaaaaagagcaaagcagaaaactttgttcacacataaccaaaatacagctttcttacgtaagacacagtacaattccttgatccaatcgtaccccgtgatcgactcaaatttactggagtcttagtgataagccacatttgg

SEQ ID NO: 27767 - DNA, 442 bp, Glycine max
  unsure (1)..(442): unsure at all n locations
gcccttggcttgcgaccgggattgatgaaacttgacagccnanannatgaacttgtgcccggtcttaagcactgagctgccactttctatatcatagataacacctgactggagaactcgaacacatgtttggtaaaaaagtcaaatcagtttaatgtcactatttaaccctttctaatagccttctgattcatttcaattgggatggtattacactttgaaccattatgataatttttctcaccttgacttaaggccatcaattgagtaacccataccccaaaagtgttcaatcaggcctcgaagggaatgcttacttggagaagctagaacttcgtaagatgatattatgtgttctaactcatatacatgtattactattacctcacagttttccatgacttaagtgtgaaatgagggtaagaaaaaaaagaaaaaaacg

SEQ ID NO: 27768 - DNA, 431 bp, Glycine max
  unsure (1)..(431): unsure at all n locations
agctntcataagtgaaatcaggtgcagccatctccctaagagtcctctcacgaggtggaggttgagccatgttctcagtataaaaattagtagtggaatgctcaaaatcagaatattcagaatcactagcaacagaatactcaaaatgctcaaaatgcacagaatgatcaggatgcacactatgcctaactaatctatgaaatgtcctatctatctcangatcaaagggttgtaagtcagatggattgcctctagtcatatactacattcagcatgcacaactagttgccttcctatgcaagtaacagtgtaggtttgaactacagctaccttcaaatgatatccaaatgacttgaaattttgtgagcaacaccctagaatcatgaaaagattgcacaataattttcaggcaaaaattcaaagtctaacta

SEQ ID NO: 27769 - DNA, 338 bp, Glycine max
cacacctctctaatagctaagttcacctcatttagatgagaagctagagcttagctacacaccccctataatagctaagctcacccatatgccaaaaaacatgaaaatacaaaaaaagtccctactacaaagactactcaaaatgccccgaaatacaaggctaaaaccctatactactagaatggccaaaatacaaggccaaaacaaaggaaaaacctattctaatatttacaaagataagcgagctcatacttagcccatggactcgaaatctaccataaggctcatgagaaacctatggccttcccttggatctctagcccaatctacttggagtc

SEQ ID NO: 27770 - DNA, 351 bp, Glycine max
  unsure (1)..(351): unsure at all n locations
tagagcaattcccttatgttatcaaacataaaaagggaaaaggtaatattgtagccgatgctctttctcggcgtcatgcattactttctatgcttgaaacaaaattgattggtcttgaatgtttgaaaagcatgtatgaaaatgatgaaacttttggagaaattttaaaaaattgtgaaaaattttcagaaaatggtttctttagacatgaaggctntcttttcaaagaaaacaaattgtgtgtgcctaaatgttctactagaaatttgcttgtttctgaagcacatgaangatgtttaatggggcattttggggtccaaaagactctataaacattacaagaacattttt

SEQ ID NO: 27771 - DNA, 263 bp, Glycine max
tcggatagccgagcaaaatgttattgacgtctgaatatgctcagagctgcggtattcaatttcgagcgtctcgatatattaagggactgaatcagacattcgagtaaaaagttatggtcgtttgaatttgctcagaacttgggtattccattatgagcaactcgatatattacgggagctcaatagacattcgagtaacaagttatcgtcctttgaatgtggtcagagcttctatgatcaatttcgagcgaattaatatatta

SEQ ID NO: 27772 - DNA, 396 bp, Glycine max
  unsure (1)..(396): unsure at all n locations
agcttcttcaagccaaaacttgaatgattagaaatgaaactattatttccataactaagcanttgttgcaactgccaatctgtctgtatacccaacacaaatggttctgaacctgagttatcttgaaaatagaaaacatgcttctgatgccgctgaacccatatctttacactgcattcatcattttcgtgtagctcatgtgaagaattacgaactgtcctttccatgttacgcacatcatttcgagtgagaaaatcatcacggttttgggggccaccttgcttctgcatcccctctgcatggtgctggattatcttgtccaacgatattccaacataaagcatagacatcactttctggcgtaactcatccgaaattcgcggagcatacatagct

SEQ ID NO: 27773 - DNA, 422 bp, Glycine max
tcgcttgagtatatacctaataagcctgtacaaattcttcatagtttgtttctttaagttactgtgtaactgatgtcctcttggaacctttttcccacccataaatcttaaaatatttttcgtcatatatgctcaacctcaatcctttaggcaattaaggttgatttgatgtcactgctatttcatcaacttttggtaagtgctagaaaaaattctataattgcctatgtgagagtacaatactcgcttctgttacaatctagcttttatactagatctaagagtcctacaatgcaagcttctaacagttagctgccagctgtcactaagcagctgggtcactaactcccacactcttttctcactttaccgagtacaatactcacatattgcctgcttagtctttgtataattgatattat

SEQ ID NO: 27774 - DNA, 412 bp, Glycine max
aacagtacgcggtgtatatttaagaggcaactcgtatggtgggaatgaatgttttctctgaatctgaacatgatgaggcccatatgcatttttcactgtctcgcctccttgacctactacatctaagactggatgattcacttgattgaaaccggtcggttgaatcgggtccatctcagtagcagtactcgcatcaacaactatagcagtgttatcctcgatcatcttcctcatgctcatcattgcttccatcatcggtgtcatctattccttcatggccttcatattggccttcatttgttcatgtacttctttgaattcactcattattctgaccttagcacgcgtctggtaagggtgtcgtaaagcgcgatctttctctttggttacaatgattaccaatttgatttca

SEQ ID NO: 27775 - DNA, 334 bp, Glycine max
tgatgcctaaaatgtcttttcttatggcattggtcctagatgtgttgaataatttttccaagaacacccttttaaggtcatcccaactgaaaatggacctgggagcaaagtagtatagccaatcttttgccactccctccaaagaatgaagaaaagcctttagaaatatatgatcttcctggacatcaaggggcttcatgatggaacaaacaatatggaactccttaagatgcttataaggatcttcacctgcaagaccatggaacttgggcaacaaatgtattagtcttgttttgagaacatatggaacaccctcatcaggatattgaatgca

SEQ ID NO: 27776 - DNA, 410 bp, Glycine max
cgacctgcggcatgcaagctttttattttaactcgtagattcattaagattccttcatttccgaagtttatgggattaagatggtcatagaccagttccttttctttgaactcactcaattatccagtgacgacataccatttgagggtacacttgatgatgagtggaagtttgatttttctgtgtctgatgcccgccggatggtttgcaccaaccaagcggatatggatggaaggcttcttgccagttcattggcattcgaatgccgcatcatgcactacttgattgtgcacatcctactccctagatcttccaaccttgcacaggtttctgaggaagatttgataattatgtgggttttcttaaccggtcgtcaaatcgattgggcccatcttgtgagatatcgcatg

SEQ ID NO: 27777 - DNA, 369 bp, Glycine max
gctattacgtgaccttagaatactctcgcttctctgatgcctatgtgtggaccctcaagtgcaatcctccattctccacttttttcggaaccccatgaatgtcattgcctagcgctattcatgtgtcctccaccttcgagtctggagccccacgaatgtcattgcctagcactgttcgctaattctccattctccacttttattctgagccccatgaatgtcattgcctagcgctgttcatgtgtcctccaccttcaagtttggagctatgcttcattattgcctaagtgtggaccctctatagcaatcctccattctccacttttttctgagccccatgaatgtcattgcctaccgctgttcatgtgt

SEQ ID NO: 27778 - DNA, 324 bp, Glycine max
aaactaagccttgttgagatcattcgagcatttagatcctgatctcgtaggctatcaaataatatgaacagggcgttgagcattagagactagtgcgtggacatcacctaagacagtataattccaagcgaacaaatcagatataagcatgttaagtttttcccttaagacaaacatgggacaaccaataatctttctttgccaaatgtctttcacaactcgcaagcggtcagtatgatctgactacatgtgtatgaataataaaggagaacgaaaggattttggacgttcacaccaccctcttaataggggatggtgatctga

SEQ ID NO: 27779 - DNA, 257 bp, Glycine max
  unsure (1)..(257): unsure at all n locations
aacacaactcaaaatcatagcttntcacatacaaataccccagtaacatttccttcgttgcaattccgtaaccgttggatcgactcaaatattctactggaagtctctagtacataagtatacattntgaccgttgggatctgctagaatatgtacagaaccccatatgtactacccttttcacaaccagccatacataagcattnttctgacttatacaaaattctgctgcacatttcaacaacaaaattctgcat

SEQ ID NO: 27780 - DNA, 274 bp, Glycine max
aagctggagttgctgcacatgatgtccaacgttatgtcaaggaataagatccggctgcacaatgtacaaggcaagataaaatggcaaatgaagaattgaagttgcaggatccacgatgtcggatacaatgtcctgacatcctgcccgagaatactggagttgctgtacaatgcaagataaaagtcaagtgcagaagtgaagctgcaagatccacgatgtcggacacgatgtcctgacatccggcccgataatactggacatataaatctggtat

SEQ ID NO: 27781 - DNA, 322 bp, Glycine max
aaaatgctttgctcgtttacaaagggctaaaaccgcaagtggagagggttcctatttgtcacatcaatgagagcttttgagtgtagggtggatatacgaagattggggtgctattgtggataaagagaccaaccaggatcagccgaattggtgcagccatgtcctctggactttgaattgaaaaattggcagcaaccagatatttttgtttttgatttgatgtaattaaacaagtttagatactattactatgcctaaggctttagaattcacatattgtcaaagcgactttccttttcattctagtgatattaataaatgc

SEQ ID NO: 27782 - DNA, 453 bp, Glycine max
  unsure (1)..(453): unsure at all n locations
tgaatgaacctgtataccggcctttgatcctgcttcggccttgatctcacctgtggtgtttgtaggaatagaaaggggactataatacaatgtttatnaatgcaatgcatacgttggtcactacttggatgattgtgggctcttgtagaatggtcctcctcttctatctattaagaagcacaccaaaccttggaaatgcaacatattaagtgaatttggaaatcaatcacccgatgaaaattcatatgaatagagtttctagaacatgaatcatcctcaaaatgccttcatgtgtattgtgaaatcatatggacattaactaacttagtataaagcatttatgtgagatagttatgtcattttggacacatatagcttctcagacttttgtacttgtcacaatgtatttggacgtttgtttctacacgacataatggacgatgtattgtaccn

SEQ ID NO: 27783 - DNA, 393 bp, Glycine max
  unsure (1)..(393): unsure at all n locations
attacagctcaaccccaaactctgcctccaactctaccaccatcacctacccctgcaccttcacctcgtcagcatcgccctcatgttagtcgatgggtgcctattatttgtcattaaacttcattagttggtttaacctatgtctttgagagtgatattgctaagttcttcacttttatcagcttttgagagagcgatattactcctcagaataaattattggttctatttcaaagctacaattggaagtttgtgcttgtgcttactagctcaatccaactaccatttaaataaaattgcaaatttacatgtgattcttctccaatcgtcctattccttggcatcactctngtagttntcattataattttgtctattataacagtctctaga

SEQ ID NO: 27784 - DNA, 357 bp, Glycine max
  unsure (1)..(357): unsure at all n locations
ccgcttgcacatgatntatgttttgaatacttctggttgtggatacagaacttgcacttaactttatcttttgagtatgatatgtgaccaaattggtttaaaattaacttaataaaaggctatctaaggttgcacacttttgagaatcttggggcttgtgtatatgcatgggagctatgggtccgattgggataaaaatagggttttaaatattatatgcttaaagatataagtttacgtgttcaggagtgaccatagcatcttacgcaatgtaatacatgaattaatatgttgtcccatcgggaaataataattacgtaagatcaaatatcatgatatttctatacccatatgcat

SEQ ID NO: 27785 - DNA, 392 bp, Glycine max
cttctacgacagtaaaaatatttattcttttaatattttcagaaatgttttatagagaaatatagcatttctctaaaattattttaaatatttatgctagttggtaattcctgagtcattaagtgttgaaggggtttgttatatgctgactttggagggtatgtgtatgttttttctgcctttgtgatgtgattgtgattgtgcttgtgcatactgtgaagttgattggaacgtacttaaaagcagtgtttctatacttctatatcacattatccatcaatttctatctttttaaccaatattcttacactattgattaaataactaaaaaaatatttattatataacatataaaaaagtgtaacaagtatacataatataattaagaaatt

SEQ ID NO: 27786 - DNA, 387 bp, Glycine max
atcttgccaccttttaccccaaagcaatcaaaggacaagcccaacaaagggcaagcccatggaaaaatttatcatgaaggaggagacctctcttttcttttaccaatgacagaaatggcattggtttcatcgacttgggaatccaagctactaacaccattagaaacagtagcaacaacatcatgaccacatggccgggtaatgcagagccaacatctcgtagactcacaactagtgcctggtgctaggggtacatgccaataacctttttccgattcctgaaacaaaaaaaaaaatcacattttatacaataacagaatttagaaacagtagtaaagagacaaagttgttctgaatttgatagaggcatagaatacaaaacatttt

SEQ ID NO: 27787 - DNA, 304 bp, Glycine max
  unsure (1)..(304): unsure at all n locations
cgcttaagaaaagagctntgagggttatgttctcaacaattatttaataatctcgaaactgtttatccatatatcttcattctgatttgtagtttattgactctgttctgatgactatcatgtgaacaggtgattggagagtttttgtctttaaaaaaagctgctggaataaaaaaaggattccagctaatggatacaagcaataaaggcaagactaacattgatgaactgcgagtaggggtgcataaactangtcaccanatatctgatggggatgttcaaatacttatggatgctgtgagta

SEQ ID NO: 27788 - DNA, 500 bp, Glycine max
  unsure (1)..(500): unsure at all n locations
tacgtgaaccgtttgaaaacaggtgattctgtgatgagcccagtggannnccangnnanttanatganaccattggannnnctctnnnnntntnnnaganngcccgcagggctgccagcctacctataagagcttcggtactattagagtgtaattcttaccattctttattttctttgtagggccaaatggtagttaatgatctttgggagagtgcaaacactaaaattagtaggctaaggcaagaaatattaaccatgcaaggttccacttcttctattaaagcatagtggaaagaatgacctcatggaggttattcattactaatatgaaataagagtaatcgtgctagctggtaataacaaatattgatatcttttagtcctatttcatgcaaaaaatgctaaacaatctctatcnaaaagtatgttttaatgctgtgataccaaatcagatagatcttaaatgatattaatgaggattcacggtcaaaaaatatg

SEQ ID NO: 27789 - DNA, 387 bp, Glycine max
  unsure (1)..(387): unsure at all n locations
ctcagcttgtggattatggngtacccatcacatgtggtactatgtggcggtcgggcgatggtgcacaacaagtttttcacatccacanagcgcgcataaacccaccatccccagttggccacctccaactaagctcacgtactcccacgtaacccatttcctcggttctctcaacaccgggttcccattaatccttccaagcttcctcagcatcaaagtaatacaacattcatacagcacaaactatcacagccaagaaaacagagcaaaggcagaaaactctgtccaaacaccaacacaaatcacagtttgtctcacttaaagacgccagtaacaattcctttcgttcaattcgttaaccgttggatcgactgcaaattttactgg

SEQ ID NO: 27790 - DNA, 414 bp, Glycine max
agcttatgagtctaaacttgtagcttccatgcaaggaaacatgtttatagctaggaatccaaaatttggttttaggattagaaaagcatgaaaatagggacttgtttgtaagaatttgggctgccccacgattggcattttgcacctaagtaacatgggagatgtttttcaagggtgtgtagatatatgtgtaaatatatatggcataaaaatgtgttgcaaagtgtgtgaatatatggcataaaaataccttgcaaagtgaatgaatagtaaataatgcatttcaaaatatgtatatttgtggataagtagcataagaagtctttcaaaaatgtacccgtgccaaagatggcacgagaatgcttcccaaatgaatatatgatgtggagatgcccctcaagagtaggtagatga

SEQ ID NO: 27791 - DNA, 376 bp, Glycine max
cacccatcacatgtggtactaagtggcggtcgggcgatggtgcacatcatgtttttccacattcacaatgcgcgcataaacccaccatcccctgtagcccacctccaactgagctcacgtactcccacgtagcccatatcctcgtttctctcaacaccgggtccccatcaatcctcccaagcttccccaacatcaaagtaatacaacattcaaatagcacaaactatcacagccaagaaaacagagcaaaggcagaaaactctgccaaaacaccaaccaaaatcacagcttttctcacttaaagaccccagtaacaattccttcgttccaattcgttaacacgtggatcgactccaaaattttactggaagtctct

SEQ ID NO: 27792 - DNA, 100 bp, Glycine max
tatatccagacgctgaaattttaaatccacagcgctgagaatattgtactgacgctggctgatttacactgatgtacggctgaggacgcgtatttattga

SEQ ID NO: 27793 - DNA, 233 bp, Glycine max
tttggcgcgtctcgatatatgacgggactcgttcagacatctgagtaaaatgttattgtcgttagaatttgatacgagcttccattttcaacttggagcgtctctcgataaattgggacactctggcgggcatccaagaaaaaagatagcggcgatagatattttaaagagcttccgatttcaattcgaagcttctcgatatattacgggactcaaccagacatccgagtata

SEQ ID NO: 27794 - DNA, 379 bp, Glycine max
  unsure (1)..(379): unsure at all n locations
agctntatactaaatagaataactaaaatgctgaatcttacaaattttagcttcatttaatcatcattaaaagttaatcagtggtgcaactagctaccccctgttaaaataattgaccatgtgtatatgttttatgtgtcctagtatagcaaacaacaggaatggtgaaaatggatataagagcattcctcttttgcataagagcattgagtgcagtctatgacaatgactttccctttgaagctataagaatttggagcttttcaagatcaaagttgggtagtgcattgagcgcagtctgtggcaatgaatttccctttcaagaatttaggtgcaaataatgataaacacataacctatgcaccctaccatttagtta

SEQ ID NO: 27795 - DNA, 374 bp, Glycine max
  unsure (1)..(374): unsure at all n locations
ngatcagattacctcagttggctntgtgttggcctttgtctaaaatctcttctagtcatctaaggtccaacatgctatggattctgccaaggtctttcttcagctgagtttgacaatcctggaagagaatggacaaaggcaccaaaaggcgctaaacaaggtggtgtcattggaggctgagtttgccaaatggagggctactgctcgcatagtctagcaagtggagtgccctaaggtagctaatgccatcttcgtatttgttgaaattgtgaagtcgaaccaccaactatcttccaaggttggcagtgttttgaccaagttgttgtgctccaagttggatgatgattgaaatgttgaacgttgcaagggcttgc

SEQ ID NO: 27796 - DNA, 439 bp, Glycine max
  unsure (1)..(439): unsure at all n locations
gcatgcaagctntattatagattactttaatttaatgcatgatttttgtagagggccgacattgtacgtgttaatttggttaccataaacttagccacatgatatgtttctttttgtagaaacctcataagactttttttttttatttaaaaaattatcgtcaaacaactcttttttttgtctttttttgtttaattaattatccgcctgatatgtacattgtcaggaaaaatgttgaggatcttgtctttcttggtactttatattctacttctaggctttgcaaaattgttttttaattagatgttgcaaatgatgaagtattagacaagtaatctggctttcaatttcaaattgcatggtatttgtgtgggtgctaaaatatatatttccattctcctgatctgttctgtaatctgagtaaatgacaatatacatg

SEQ ID NO: 27797 - DNA, 331 bp, Glycine max
gaaatgcgtctaccccaagcattcttttcggcagtacaatttatttttgataagcaatctcctaagagtgctttgtcccatattgttcgaacaacatcattaagatcaggctccaataaccaagtatttttgaatctgacaagtctatgaaaaaaatgtgtttcgaactgcatcaagcagtaaatcattgaaatcaccaaagatacaacaaggaagggtagtatctgctgccagagaatgaaaaagactttaggactctcttcttttatatctatcagattaggtgtagaaaccagttaatcttcagggtgggtggtcaggatgaagaacc

SEQ ID NO: 27798 - DNA, 392 bp, Glycine max
  unsure (1)..(392): unsure at all n locations
ttccccttatttactctcatccgagaaatcatcattggagaagcttaaaactatggtgctatgtaaaaaacggagctattttcttcttcctttagagttttttgtttgttcttaggtgagggaatcccccctcttactttctttgagttcattttcattttcccttatgaatacactcaaaactccatgaaagtgttcatttgcaaggttttaaggcgctttctattggttatggggtttgggatggtatggatgatgtacaattgttttgggagtaaagaaaagctattactctggacccaaagctttcccctttattcctcttcttcatcctaaagcaaactcattgagtttgagaggtaaaggaagcttanaccatctntaatcatatg

SEQ ID NO: 27799 - DNA, 447 bp, Glycine max
  unsure (1)..(447): unsure at all n locations
natggatacgctagcttccccaacatctatgtaatacaaaattcaaacagcacatgctatcacagccaagcaaaacagagcaaaggcagaaaactctgcccaaacaccaaccaaaatcatagcttttcacatacgaataccccaggaacatttccttcgttcccattcgttaaccgttggatcaactcgaaatttttactgaaattctctagtacataagcctacattgtgaccgttgggatctactatcaaacatccagaactcattctgcactactctttccacaggcaaccacacacaagcatttttttgcacaaagccaaaattctgttgcacctattttgacagcaaaattctgcataagtgcagatttcgaaaatcacactttctctcatccaatcttgcccaaatcaattcctacaaatcccaaatcatgtatcaatcat

SEQ ID NO: 27800 - DNA, 353 bp, Glycine max
agcttcctaaaggctgcgcttagtggcttttactctttaaaaattccactaaatgttgggagcttagcaagtgaagctcgcttagcttagcggacaccgcaaccaatcgtgcctgggcccaggaaagctcggattagcgcgaggctatcaacaaaaaaaattggttaagttacctaggcttagcgattcagcctcgcttagccataggtagttcagcaagaggatgagtgttcatcctcaaaagatgaactctcttagcgcggtaaacacacttagcgagttcttcagagaatcacttacatacaatgagtattgatgaactcgcttagcgcagcatgctcgcttaacgagtt

SEQ ID NO: 27801 - DNA, 530 bp, Glycine max
  unsure (1)..(530): unsure at all n locations
tganattgataccctgctattacgngaccttttgatacgtcgctttcggtgacctatgatactccgccttgcgaattggtctttgccagtgagaagggatcgatgtcgtgtctttgattacaaataaggcaanatttacctcattcctgctttggacgacatgaganaaactgggtgccaaatgaaagatgggtgaaggatgaaaggagaaagccccgtgcctgtgtactgccattttccaatagcagcccannagtttctccacccanacccgcaacaatgggtcattatctcagcccaataacaatacctttgtgcttacccaccgcccagttatcgacaaaggccatccctaaatcaaccataaagtctgtctaccgcacttccaatgacgaacatcacctttagcacaatccataaacaccaaccaagaaaatgaatttgcagcgagaaagccttttgattcaccccaattccagtgtcctatgctgacttgcacccatatctacttgataattcaatggtagccn

SEQ ID NO: 27802 - DNA, 246 bp, Glycine max
aaccattttcaaatccacatttaccaaaccctccacaatatcctctcgccgctaactttgtcgacggtagcaacacctaagacctttcaaccaacgccacaaatcacgccctccgctgccatggtgattatccacaacagaccttttcgtctagcccttgccagattatcttgccacattgtcccaccccattcctttttccctttctttataacaaaacacaaacaccccaacacagatgcacac

SEQ ID NO: 27803 - DNA, 237 bp, Glycine max
ttgatgctatacatgcagagcctcgttgatgtaagtatacatgtcactctactgaaagctgcctcttactcatctgctttggaattgcccaaggttgtcagatggacttatttccagtttgaatctgctagactatgattttatcattatttgtccattcagaagtttattttagagcagctatgatggctattattatatgcatccttgattacatagagtaacctgttcatttga

SEQ ID NO: 27804 - DNA, 406 bp, Glycine max
agcttgcctgtccgatgcagcagtaatgatggcccgagtgatgttggggagtggttacgagcccggaatgggtttatgcaaggacaatggcggcataactagcctgataaacgccaaaggaaatcgtgggaagtatgggttaggctataaacccactcaggcagatgtaaagagaagcattgcggaaaggaaaatcggaagtcaaggttcgcggttgagacaagaaggcaaaggaagcccaccctgccacataagtaggagctttataagcgcgtgtctaggggacgaaggtcaagtcattacaatatacaaagatgatgttccgagtgcattgaatttggtacgaccgtgccctcctgatttccgactatgaaattggcaagtggaggagcgcccggacatttac

SEQ ID NO: 27805 - DNA, 324 bp, Glycine max
  unsure (1)..(324): unsure at all n locations
acaaatcgcgcataaacccaccattccctgttgcccacctncaactgagctcacgtactcccacgtaagccatatgctcgtttctctcaacaccgggtcttcattaatccttccaagctttcccaacatgcaagtaattcaacatccaaatcatcacaaactaacaaaccaagcaaaacagggcaaaggcagaaaactctggccaaaacacaactcaaaatcacagcttttcacatacagataccccagtaacattttcttcgttccaattcgttaaccggtggatcgactctaaaatttactggangtctctagtacatacgt

SEQ ID NO: 27806 - DNA, 406 bp, Glycine max
agcttcaacattcaatctcgagcgtctctatatatgacaggactcaatcaaacatccgagaaaaaagttaatgtcgtttgaatttgctcagaggttcaacattcaatttcgagcgtctcgttatattacaggactcaatcagacatccgagtaaaaagatattgtcacctgaattggctcagagcttcaacattcaatttcgagcgtctcgatatatgacgggactcaatcagacatccgagtaaaaagttattgtcgtttgaatttgctcagagcttcaacattcaatttcgagcgtctcgatgtatgacgggactcaatcagacatccgagtaaaaagttattggcgtttgaatttgctcagagcttcaacatttaatttcgagcgtctcgatatattacgaga

SEQ ID NO: 27807 - DNA, 390 bp, Glycine max
  unsure (1)..(390): unsure at all n locations
ttgagccaattcaaacgacaataactttntacatggatgtctgattgagtcctgtcatatatcgagacgctcgaaattgaatgttgaatctctgagccaatccaaacgacaataacttattactcggatgtctgattgtgtcccgtaatataacgagactctcaaaattgaatgttgaaactctgagctaattcatacgacaataactttttactcggatgtttgattgagtcctgtcatacatcgagacgctccaaattgaatgttgaagctttgagccaattcaaacgacaataactntttactcggatgtctgaatgactctcgtcacatatcgagacgctcgaaattgaatgttgaagctctgagccaattcaacgacaataactt

SEQ ID NO: 27808 - DNA, 397 bp, Glycine max
  unsure (1)..(397): unsure at all n locations
agcttgtagaatggctagacatgatacatgtcagggtttggtttggttcaaggataaaagggatgccccacattatttccatgacacaaatgcaaaaatgatgatttggaaactttatgcaaaactggtcatgcatgcacctatgtggacactcaagtgtcaaatttttatggtcatgtgatgctagggctcaagattcatttcctctattttagtcaacccaacgtttccaaaatatgttcttttatcaatttgtgcattcatccgagtccattttgggcgtctgggaaaatcttcacagcattcacccttcaggtgtatacacattttttcaaaaactagttatgatcnagtgaattttttcaaagaaaagttggaagtcatctcttttcaaaag

SEQ ID NO: 27809 - DNA, 407 bp, Glycine max
tcggaagaaagtgatgaggtacaagccctaaaggcagtatttgaaagagcccgggtagtcgaagagaagttcatgtccatagcccatcaagtatgaaaagagtatgatgaactaagggacgtcaatatggccacagctgaagccttggaatgagaaaccaagaaggccttgaaggaagaacacgaccaaaacaaagttttgaggggctatatagggcagcaatagtgaactcaagctccgaagaggtgaaaggaatcatcacgggtcaaaggcatgatcttgaaggacgagctaaaggcttgccttatgtcgaaaagaaatttgtcccaacagttaagcgagactgaagggaatatgtgggccatcatcgatgagtgaaagagaagtaaatctacagcgactcacga

SEQ ID NO: 27810 - DNA, 322 bp, Glycine max
  unsure (1)..(322): unsure at all n locations
gagccatgttctcagtataaaaattaatagtggaatgctccaaatcagaatattcaaaatcactagcaacagaatactcaaaatgctcaaaatgcacagaatgatcaggatgcacactatgcctaactaatctatgaaatgtcctatctatctcangatcaaagggttgtaagtcagatggattgcctctagtcatatactacattcagcatgcacaactagttgccttcctatgcaagtaacagtgtaggtttgaactacagctaccttcaaatgatatccaaatgacttgaaattntgtgagcaacaccctagaatcatg

SEQ ID NO: 27811 - DNA, 393 bp, Glycine max
  unsure (1)..(393): unsure at all n locations
tgtangaatatggngtacccatcacatgtggtactatgtggcagtcgggcgatggtgcacaacaagttttccacatccacaatgcgcgcataaacccaccatcccctgttggccacctccaacttagctcacgtactcccacgtagcccatatcctcgtttctctcaacaccgggtccccatcaatcctcccaagcttccacagcatccaagcaaaacaacattcatacagcacaagctatcgcagccaagcaaaacagagcanaggcagaaaactctgctcaacaaatcaaccaaaatcacagtttttctcacttaaagaccacagtaacaattccttcgatccaattcgtaaccggtggatcgactcaaaaatttactggaagtctatagt

SEQ ID NO: 27812 - DNA, 289 bp, Glycine max
cagcttatttaagctcatcttatcattaagtatttaaaccaaaacaataaagatgtttgattaagcatgtgaaagtagcttatgactgtcccaaagctcttatgttggctgaaagtcataaaaataagctaattgaattaagcccttagttatgacataacctcttatatgacaagcttttaattaaattgtttactcaaacatacctatatacaagataaaagcaattgcatcaatcagacagtaacttgatgttcatatgttctaactatagaaattaaatctgtct

SEQ ID NO: 27813 - DNA, 242 bp, Glycine max
  unsure (1)..(242): unsure at all n locations
tgtcttgtgtgacagattaagagggacggaataacaatgcttgtggtactaccccttatccccagttttctatatccacaactgggtcaaacatacgtgttcttgagcatgtattcangtactgcttattggcactttgtgaatactcttangtgattcaaggattactcttaatcaactgatatgatttaaattgtagggaagatgcctatatttctaagcttcctgtttccattataaac

SEQ ID NO: 27814 - DNA, 400 bp, Glycine max
  unsure (1)..(400): unsure at all n locations
agctngtatcgtagcatacatcgaaaacctcacattcgttttgtgccatcctcaagttctggaaaaaggggcttgcggaaccttcagtgaatttgagtttactgagccacaaaaggctccttttgataattcagccttcgaccgtgtcaggtaatgtcataagggacaaattattgtccaacggaatggtcccaatttttttatatacatatatcatatatggtcccaattaatctctgcataagatttagtttcttgtaaattaaagatcttaactgtatatcatgtagagcttattattattattattattattattattattattattattattattcgaagtgtattacaaatatggatatgtaataaattctcccatcataaggaaaccttttat

SEQ ID NO: 27815 - DNA, 433 bp, Glycine max
  unsure (1)..(433): unsure at all n locations
catgcaagctntcttacttatagtgctagttatgctctgagcttctttttcaaaatttattgtgcaatccctgcagcaagttagatggtttctgactcctgctttatcttcaaaagccacatccttgaaaaataccttgtttctctcttgagcttgaaaatcactgaaaaatgtggcaccacagagaagttacaacaaagctcatcacaatatgacaaggaaagagaggaattttagaataataaaaaaaatctaaaccagacaataatgaactaaatctagaagaataaataattaattaattacctgtcaagatttaaacttaggctgaggatgccaacaggaattgtgaagggatgaagctcccaaatggtttctagggatgggtgacatattttacacttcatgtatgtcttaaaagttgaaatcccca

SEQ ID NO: 27816 - DNA, 361 bp, Glycine max
  unsure (1)..(361): unsure at all n locations
acaaaattccttaaataacactctgtaaaaattatttgcccattctgtcgaattattattatttncacaactacactattcatgctgtaacagaagaaaatgttgagtttgttgagaggggaaaagtggtttaatgacaatagatcgggcacatgaaatatgagattagtttggtcaggtgtccattcttgtcaattaatgttcttctacagcttacattgttttattgtcaattaaagggttatacagtttaattatttttaatattacttttaaaaaaatcttattttttttatcatcataacattggtgcagaaaatntataagactcatattcaaaattttatttaagaatatcaac

SEQ ID NO: 27817 - DNA, 457 bp, Glycine max
cgtacccgggatccttagtatcaccttcggcatgcaagcttgagatgaggaagcgttgaaggctgaaacttcttgcttttattgttgaccacagagtggtacctggagatatgtcgcgggggtcaggagaccttggggacgtcaggtggggtgctattgcccaaaaccaagcttgaccaatcccgacccaacccgggcatagtcggtcagtgagaacctgtgatgtacctaaacaggcgagctcctggcagtcaacagataaaaggaacaaagaccacaaagcaaggaggcttgtggtggctggccagctgtgaaacttgattgatatgtgagatatggtctctggtaatcgattaccaagggtgggtaatcgattacaaggcttaaaaatgaagacaggaggctaagatggtctctggtaatcgattaccaagggggtgtaatcgattaccaggct

SEQ ID NO: 27818 - DNA, 434 bp, Glycine max
agcttaactaatcaaatgggacaattggctacacagttaaatcaacagcagccccagaattctgacagattaccttctcaatctgtctagaatcccaaaaatgggagttccattacattgagatcgggaaagcaatgtcaaggacctcaaccagcaacatcttcctcatctgcaaatgaacctgcccaacctcactctactccagaaaaagatgatgacaaaaatttaaagagtaagttacctaacaatttctatgaaggtgaatcttccactggtaattctgatttacaaaagcagcatatccctcttccattccctccaagagcaatttccaacaaaaaaatggaagaggcggagaaggagatcttggaaacatttagaaaagtagaggtaaacatacctctgctggatgcaataaagcaaattccaagata

SEQ ID NO: 27819 - DNA, 400 bp, Glycine max
  unsure (1)..(400): unsure at all n locations
tgcttctacagtctagtgattctagagagagaaaggtctctattccagagagttttgagagattttgctgtgtgaagatctgcagagaccagagcttgaagaggaagccgttttgagagcttgagatgagtttgtgagtggttatgagatcctagaggtgaaggagacatcctcaccacttgtatttttggaatctttcatcttgttcttctctttgttgtaaaagaggcttcctggttatggaaagctaaaatcctctgttggatcttcctcgtaggtacttgatgtaaatatctttctatctatttaatgatgttntgtgtgttctctgtgctatcagcttttcattctagtatgcctttaccttgatcatgtagatgcatgctttgtagggtcattc

SEQ ID NO: 27820 - DNA, 429 bp, Glycine max
agcttcacaagtaagctcctatcagtcaataccccagcattacaaatatattctcatgcttttggcaatcaaaacgttacgctctactcctagcaacgtaatgtaaagagtaaaatcgttcacttcaaattctaagattatttccagtctcacttaaaatccaatttcatgacactagtgatcaaataaaatcaagcgttacgagtagaatgaaataccaaccacgagtagaaaagacttatacatatataatatcaatagggatatataagggtacaaagattacatccagtccttaagaaaaactaaccgatcattgcacagagcacaagactaacaagagaaatgacgaaggatgtgatccacagtcacaactctacagctcctcggctccacttttcctttcctcattcttattccttagcctat

SEQ ID NO: 27821 - DNA, 430 bp, Glycine max
tcatctttgtcctcaaggcctcatgtatactcgtccaaatcgcgaagtgaaccttggatccctgtcagatacaatactagaaggaattccatgcaaccttactacttccttgatgtacaactccactagcttttccattctatacttcatattcaccggaataaaatgagcagatttggtgagtcgatctactatgacccacacggcatcatgcccacgactagtcttgggtaaactagatacaaaatccatagatatgctctcccatttccattccggaatctccaatggcttcaattctcccgatggtcgctggtgctcaaccttagccttttgacatgtcaaacatcttgctacatattcggctacatctttcttcatgccatgccaccaaaaacttctctcaaatcttggacatcttatcattcct

SEQ ID NO: 27822 - DNA, 323 bp, Glycine max
cttaacattcaatctcgagcgtctgtgtatattactggactcaatcagacattcgagtgaatagttgatgtcgtttgaaaaggcacatacgttcaacattcaattgctagcgtctcgatctattaccggactcaatcatacatctgagtaaaaagttattgatcgttgaattggctcatatgttcaacattcaactgcgaacgtctcgatatatgacaggactcactcacacatccgaataaaaagttattgcccgttaaataggctcatacggtcaacatacaatatctagcgtctcgatatatatcgggactcaatcagac

SEQ ID NO: 27823 - DNA, 373 bp, Glycine max
tactcggatgtctgattgagtcccgtaatataacgagacgctcgaaattgaatgtttaagctctgagccaattctaacgataataactatttactcggatgtccgattgagtctcgtaatatatcgacacgctcgaaattgaatgttgaagctctaagcctattcaaacgacaataacgttttactcggatgtccgaatcagtgacgtaatatatcgggacgctcgaaattgaatgttgaacctctgagccaactcaaacgacaataactttttactcggatgtctgattgagtcccgtattatatcgagacgctcgaaattgaatggtgaacctctgagccaattcaaacgacaataactttttactcggat

SEQ ID NO: 27824 - DNA, 256 bp, Glycine max
  unsure (1)..(256): unsure at all n locations
cgctagcttagaaagncatcgcgtcatttatgttagctgtctacatccttgataagattagggtaatgtacttattacgctgactgtatgctgagccagcatatgcgcgcctagcgcgtactgaacttttctttggatgccttatgagggtacaacagaactgtgctctaagcgagcacaccgtgctaagctagaactacacaccatgtgagacgtgtggagtaactacaatgagcgataagaaaactgtgttctt

SEQ ID NO: 27825 - DNA, 418 bp, Glycine max
  unsure (1)..(418): unsure at all n locations
ggatgacactagtgagactgcgaacgttcatgtgatatctgcctangaagaagcatctggaactcgcctattaaaagatggaaggacttgcttgcttcangtgaaatgagaacatttctaccttaactatgttcattcgtccaagaaaagatgtcttttgactcggatgcaactgggcgaataatactatgatctatgaactaacaggaagtaaaggaagcttcatgatcacatagtacatatataagtgctgctcataactccaaagcactatatgttagaagctatatatgtgaggaaaacagcacattgatctgttgtcacaccatttacacactgcatgtaccggtcaatacctgacttcgtgagagatagtgcgaaatctaaatatgtgagggaccttgattaaatattaacn

SEQ ID NO: 27826 - DNA, 411 bp, Glycine max
  unsure (1)..(411): unsure at all n locations
agcttgtaggccttgtatcttcttcatcaatggagtcctntgcttcttgaagatcaatggcagcaaaatgaaataggtggaaaggtgattggagacgccacttcaaggagaagatgagtcaagaacaagctcaccaccataggaagccatggataagagcttgaaggtaggaaaagatgagtggaaagagagggagagaggggaggcatgaaatttatgtctgaaataaggtctgaaatttgaagtgtaattctcaaatgatcaaagttgaaaaatacacacacaaggcctctatttatagcttaagtgtcacacaaaattggaggggaaattgaatttctattcaaatttcacttgaatntgaatttatggagccaaatgtggagccaaaatttcactaattatgattag

SEQ ID NO: 27827 - DNA, 218 bp, Glycine max
cccaccatcttttcatagtagaatactgggaatgcgtctactattattgacatcattgcttttatatgacattgaggtgccactcgagctgccaggtctctacacctttgtggcatattctttggaagatctgagccccttttcgcacatgttctggtgatgcatcctatccggaaccatattcgaagtgtactggtactacctaatgaaggcaacca

SEQ ID NO: 27828 - DNA, 412 bp, Glycine max
tagctttattaaaaatgataataaaaaattaaaaaataacatttaaaatgactaagtgaataaaattaatatcaatttattttttgctttatcttttacaactatttacattcatcttatcaaaaaaattatgttgtgcgacaagatctatttttttatgggagtaaaaaaatatttattctatatattcaattaaaaatatttagaacatgttatgaactaaataacatgtatgaattaaactcaaaattcaaaagataggttaagaatgacaataatacatgaacaaatatatctagaattcaatcaaaaaaataaaaattcaacacagacttagaacataatatgacaattattatgactaaacatgaactctagacaacatggattaagtgaattacacttagatttt

SEQ ID NO: 27829 - DNA, 275 bp, Glycine max
  unsure (1)..(275): unsure at all n locations
gggagaggatgcttcaatggagganaagaatgagggatagaaagagagaggggggagcaccaaattgaaggaagaaaaagggagagaagttgaactttgaggtgtgtctcacaagactcttattcatcatagttacaacgagtgttacacatgcttctatttatagactaggtagcttccttgagaaactttcttgagaaaactatcttgagaagcttctttgagaaaaattccttgagaagctagagcttatctacacacacctctctcataac

SEQ ID NO: 27830 - DNA, 394 bp, Glycine max
agcttttgacctcccaaacagtgccctgtaattccacagatgaagaaatgttgttcatatttgttgagggtcactctcgcaggtggagtggtgaaagtggcaataggagaggctgagctgcaagcatcgaagttggcctttgtaacctcctctacgttgtgtgtatttgatgcgtagttgaacactgcaaaacacaccaatgatttagtccaattgatcccaagcttttaaacaattcaagtagtttattttgtacgatgtgagacttaccaaggacgtctccaaccctgaagtttttgccagaggcccaagctgtgtaaaaggaagcgttgccaggaacaatccagccagcggtttctccaacaatgaaagtagctggttcagaggatggacc

SEQ ID NO: 27831 - DNA, 412 bp, Glycine max
tggatccaacccgaatgttacctatgatagcaccatagtgcatgtcagcatatggctcctctccagtcaagagttcccacatcacaataccaaatgaaaacacatcaacctaaaatgacaaatatcaaaacaaaagcctcaaacttacatagtgacaaaatatcaaggtaccattaacacatcaacaattcagcagttccggagccatccatggtagagttcctctcaccaccagaaatcagcgtctgacattttcctttggacagacccaagtcgccaacctgatatcagatgcaaaagtgtaaaaggtaaagaaactactgaaggatcaactaatcaattgctccgtgctacaagtagagttgtgctgactagaaagcaagtattgatgatcaaaaatcatttagcagaa

SEQ ID NO: 27832 - DNA, 559 bp, Glycine max
  unsure (1)..(559): unsure at all n locations
agacaccacgatggcgnattgaagnaccattagangannccaacnngannntnngnatagannanccattagnaannaccncaggnganntnnnattgaaggcccctagcangnaccgtcgnngatctctgataagaagtagcgctgcanngctagctataactttgatcaacataccagcaacaagttgttgtcgcttatatgagcatgagcctcacgctcctctggtctgccagactaagggataatatcaccgtggaccatacggagcagtgtctttgtatgcctatccactcactaatctcatatgaggttaactaatcgatcacacggttctagcaagacgcgctgaaccagaagggctctcagtttgaatcaccatagcccaaaatcattctgccctgtgaatttttcaacctcatacttggccgagcccatttcttgaatcgaactcaaaatcgatccacgctcaccgcactaatttgttgtgccaagatcagattctactcataagagatatgagttttttgttgaacaaaaatatcccatgcataatacg

SEQ ID NO: 27833 - DNA, 185 bp, Glycine max
  unsure (1)..(185): unsure at all n locations
tcaccttcagcatgcaagcttattctttaagccgatgcaaggctatntagtttgcagaaacgaatgcttaaatcgctaaagacaatagtatattctacactcatattaaggtcagggctgtaatatgattattagatgctattcattcacgatgatctcatatggtaaaaattgacagatgaata

SEQ ID NO: 27834 - DNA, 390 bp, Glycine max
gacactttaaactatgctatgctatgagttatttgcaaagtgcatgttctttttatgataagcattaaggtgaatatatatataattatttcaccattggccaattgtggagagtggggcctggtgggttaagttgaccatgtgtataatttctgacatgtggttaacattacaagcctttacacgctgatggaagcttattgataaataaaggttgaggatatcaatgctaattttacgtggccatccttatcaagtaaattttaataaggaaggaataaagaaagggaccgatatctatctagtgaaaacataatttatccttcaagtaggaaaattaagccacttgaaacttataaaatcaaatgcacagcattgttagaaagggat

SEQ ID NO: 27835 - DNA, 422 bp, Glycine max
  unsure (1)..(422): unsure at all n locations
agctntgccggagtnttgggaccacgggtgattggcttgattatttaccacactcatacaggttgttggggaacggggcgaggggtccatctaaggagatttttgtcctttaggaaactgatatgtgtaattttttgccaaacgaccctatgtgttgtgtatgcatataaattattcccaacctttattcacaactatgtggatcctagacctgaagtgaaacattgggattttccctttatttttttggttcatagcaatttttgcttttccatgttgatgttctcgtgcctatgtttatgttgcttgctagtacgatttgcactaaaatgctttnttgtcaaggttgatggnggtggcaactccacgtgaaattgagcttgagatgtggacgttgccatgccatggatcactaaactaat

SEQ ID NO: 27836 - DNA, 389 bp, Glycine max
  unsure (1)..(389): unsure at all n locations
tcgctngacgtgagaaagcgtggaagagtcggtcttcctacttnttgttgttgaccacagagtggtacctggagatatgtcgcgggggtcaggagaccttgtgacgtcaggtggggtgctattgcccaaaaccaagcttgaccaatcccgacccaacccgggcatagtcagttagtgagaacctgtgacgtacctaaacaggcgagctcttggcagtcaaccaataaaagaacaaagtccacaaagcaaggaggcttgtgtggcggctggccagctatgaatcttgagtgatatctggaaattagcctctggtaatcgattaccaagggtgtgtaatcgattacagggcttaaaatggagacaggaagttaaaatggcctctggtaatc

SEQ ID NO: 27837 - DNA, 353 bp, Glycine max
  unsure (1)..(353): unsure at all n locations
agctngttgattaagtcactattcatccatgtatcttagaaaccaaaatcagcttttatcttatagaaaatcagcttcaaagtaggtcactccatcatgaaaaacgctccaagtctcacattgaacaaaataacctcatgaacttctttcttccattatatatagaggaaaccaacaagccttatatgcacccgagaattaagtgagcttagcgttaagcatagagcccctcatggagattgaggtggatgaagctattgggtcaatgcattcttgggagtggatatgagatcctcttcattttcctggtagagaaattgttttatttgagggtagggggagtgagatttttc

SEQ ID NO: 27838 - DNA, 353 bp, Glycine max
tgaaaacaacaaaaagtgatacctactcactcatggcaggaatgagaacaattgtcagcacatcatcaaaagactgactactgcttactcgttcgaaggcacatcctcggctggaacacttcccccttctatgataaggacaacaaaacatgacaatttagttagttaattaattttgaagatgctaaagagaaatattataagttcagccatcttaactgaacactgcacgcaccaaaatcaaacataccttctcctgaaggagcatatggagatttccggtaacgtgtctgctgctgcgtcggctgataagcagaagcaagcagaaatttgtcatgcacattacatgaaaa

SEQ ID NO: 27839 - DNA, 426 bp, Glycine max
tcgtacccgggatccttagtggcaccttcggcatgcaagcttgttagagcctagtattctttgtcctaccaatccattgttggctttgtacatatcaaacaaaattgttgtttgtttgcacaatgactaactcataatcatcttacagacaaatatgtaattttatcacttagtcttttctctctgatgcaatcctaccccccaaggcattgataaaagactccaagaagattgggtcagagatgcaggagaaggccctagggttctgatgagccttaggatagattttgagctcatgggctaaatatgagcccacttatctttgtacatattatatttgagtttcattatttttgggccttgtatttagggctccatagtgtagggagtgtatcctagtaatgtagaatttttcagcccttgtat

SEQ ID NO: 27840 - DNA, 343 bp, Glycine max
  unsure (1)..(343): unsure at all n locations
tgagaagaaagaaaccttacaatgagccaatgtaaaatgattatagaggctagtgtagctaggaataaagttgagataaatgttgtcaaatccatgttctaatgctaataagtgtttgatctaaacaaagttgttttgtttcaagcaaaccctttgtttccattgatcttgatatgcatttttgcaacaattggattgaatgtttgccctgttttcaattatgatttgatcctttttatatcatattttagattaaatggataaaaatagttttctcttagacctttgtatagtttaatagttcacaatctttatgtgttcttatattctggtattntttctc

SEQ ID NO: 27841 - DNA, 148 bp, Glycine max
cctggctttccatacgcagcggattatgtatcagcagtgcctttaggggttactttattcagataaacatgctcaatgaattaactatgttatcagttccgacattatataaagggtaaataatcacttatgaacatcaatgtgatat

SEQ ID NO: 27842 - DNA, 404 bp, Glycine max
tagcttatcgccagcatgcacttaacccatcttgactactggaacataattgcattagtgagatggcttgctagccttattctgaaacagaaaagaaattacgcttagcgagcatgactcgcttagcgcatgaacagaatttaagaaaacaaaattgccttgggcttagcgagactgactcgcttagcccaggcttattcaagctaaagaagcatggtggcttaacgagactgactcgcttagccgccaatagaataccaaaagcctcaaacattctgacctaactaaactaactcggttagcgcggcatgccgacttagcgagttcatacaaactcagaaattaaaactggaaatttaaacactcgccaagcctaagtgcagtggcttagcaagttcatatag

SEQ ID NO: 27843 - DNA, 295 bp, Glycine max
  unsure (1)..(295): unsure at all n locations
aaactactanagatgctactatcactgacggactacacacatgagcccgcttaaaaggtagaaatgagtttatcacaattggggttagaatgaacatgtgtagggatcctttagggaccaaattgggatttattttggatgtttattgaattataatttttcccttatgattataaatacaatattgttgtgtttgacagaccaattgatgtcctgatgcanattggttgataaaattgagtgttcttggtgtttcgtgttttaacctaggattcgattcattgatttgtatgat

SEQ ID NO: 27844 - DNA, 397 bp, Glycine max
agcttaataattgttaatcttaattaacgtgaaagtattatatataccacaatctttaaatcttcaaaattccaatatctataagtaaagcccacattttctggaaatcacacctaagatattttttttttgtcatgagttaaacacttttggtgttttccaattcattgaatcatatattaatcatactcttaatgtgtgaatattgttagttcaagaaaattttacgctcgaagaaaatgaaatacaaaattgtttagagtttcaagaaaattccattatcgtgataaaaaaaaagcctaaaatttaacttttatgtaacatatataaacatactagaaaaacaactaaatacaattttggttttgtgttgaatacatcaagatacatacaaact

SEQ ID NO: 27845 - DNA, 373 bp, Glycine max
  unsure (1)..(373): unsure at all n locations
atgctgagcaatttatagaagctctcgtttaagttttcaaaaaggctgattttaacttataggctgactaattttgacttatgagaagaagctttagctttctattttttcttcttttatatagaangttatttaaccaggccctgtagtcctttttacagaacaaggcaacttaccatgttggaatgtttattactgctaatatagtgtagcggcaactcatttgttagggtattgttgattntagatcatatagaattataatgaacacaggactttgatatctggtgagtcgcatttattcaggtgtctgaatgtaatatgtatgcacatgcctcaattattgccctatttttctattaacttgttgcta

SEQ ID NO: 27846 - DNA, 410 bp, Glycine max
  unsure (1)..(410): unsure at all n locations
agcttgtaggattatggngtacccatcacatgtggtactaggtggcggtcgggcgatggtgcacaacaagttttccacatccacaatgcgcgcataaacccaccatcccctgttgcccacctccaactgagctcacgtactcccacgtagcccatatcctcgtttctctcaacaccgggtccccatcaatcctcccaagcttccacaacatccaagcaaaacaacattcacacagcacaagctatcacagccaagcaaaacaaagcaaaggcagaaaactctgccaaaacaccaaccaaaaatcacagctnttcccactcaaagaccccagtaacaattccttcgatccaatttgttaaccgttggatcgactccaaaattttactggaagtctatagtacataagccta

SEQ ID NO: 27847 - DNA, 398 bp, Glycine max
  unsure (1)..(398): unsure at all n locations
tagcccataaatatttgggaagaattgtatcattaattcaagttctgactattgtttctanagatctattcttcctctcaacaactacattttattgagggggtctatgtgcaaaaaaattgtgtttcatgccatgttcatcacaaaatgaatcaaaatctttattttcaaattcttctgcatgatcactcctaattgatgcaaattttgagattgttcttattttgactaatattaacatgttatttgaaagcatgaaaaacatcttttttatgagttagaaataatgtccatgtaaatttggagtactcatttactataacaagagcataataagttccttccaaactcgagctctagagggccaaaagatgcatatgcaacgtgtaatggtgaan

SEQ ID NO: 27848 - DNA, 409 bp, Glycine max
agcttgatcaaaacaattctctaaccattccaatccattcaaatcatacaattgctcattcaaatcattctcaaacactcatttcataccaaacaatccactgtatatcattttcaatcaactcactgtttaaacaagcaaacaactcaaagtgctgaaattttaaataactaaaatttaaaataactgaaaaataaaaactgaaattaaaataactgaacataaatcataaaataactaaaaatagactaaaatgtttaagatgcacaaatttaaatgtcctgctcatgatggatggcaagcccaagcccagaaggctctgcatgataatggactgccccctgtggatgctctggaaacccaagcctagaagagtcatgctgagcaatcatagaaatttgagctgaaa

SEQ ID NO: 27849 - DNA, 411 bp, Glycine max
  unsure (1)..(411): unsure at all n locations
tgtaggattatggggtacccatcacatgtggtactatgtggtggtcgggcgatggtgcacaacaagctntccacatccacaatgcgcgcataaacccaccatcccctgttgcccaccttcaactgagctcacgtactcccacgtagcccatatcctcgtttctctcaacaccgggtccccatcaatcctctgaagcctccacaacatccaagcaaaacaacattcaaacagcacaagctatcacagccaagcaaaacagagcaaaggcagaaaactctgcttaacacatcaaccaaaatcacagcttttctcacgtaaagaccacagtaacaattccttcgatccaattcgttaaccgttggttcgactccaaaattttactggaagtctatagtgcataagcctacattt

SEQ ID NO: 27850 - DNA, 387 bp, Glycine max
  unsure (1)..(387): unsure at all n locations
agcttcaatgtaattgcttgatgataaatataaacaataagcactatgaaacctacatctttgaattttagtgccaaaataccaattgaatactcctaagcttgaatgatctctattagttagagtcttactattttcaaaaaagtagtataagtctccaaaatgaagaggagagctagccaaaatcgattgcatgcctatctaatgtgtctcttacacactttattgcctacacctttaacattccaagataaactgaagtattttctaaatctatcattgaaaaaaaggttataatataaaaagagaatntgaagcaattntttaaaataccaaattaataagttgtttggtaacccactacatctctagttagtatcggtacat

SEQ ID NO: 27851 - DNA, 301 bp, Glycine max
  unsure (1)..(301): unsure at all n locations
taatattatggtcgntatcacttatccctggactggtgagtactttcagaagctattttagatgcataatttatagcgataaacttgcagtgcacaaaatcgccatgtttcattaacttggatatttttatgattttagtttactatgtgggaccaaatggatggaaaaaactgtctggtgatgatgttggggaacttcattaccattactacccagttaccccaagcaccgtggaacaagaaatggttgaggctactggtgcttgatgaagtaactcgtggatgtctttttaagttttct

SEQ ID NO: 27852 - DNA, 316 bp, Glycine max
  unsure (1)..(316): unsure at all n locations
tagcttgaatcggacctcagtgtgaaaatgtttgaccatttcaatttctcgagagctttcgttgttcaatgtcgagcatctcgacatgttatgcgctcgaatcggacatccgtgtgaaaagttatgaccatttgagtttctcgagagcttccgtggttcaatttcgagcatctcgtcatattatgtgcccgaatctgaccttcgtgtgaaaaagtatgaccatntgaatttctcgagagcttccgatgtttaatttcgagcgtctcaatatattgtaagcctgaatcggagctcagtgtgaaaaagtatgaccatt

SEQ ID NO: 27853 - DNA, 292 bp, Glycine max
gcgacactatgatactcgctctagggggactattctaatgggtcgtgctaacttactctcaagaagttctaagaactctaagagtttttagaagctctaagaagttcttagaagctctcaggaagctacctgtctataatagaacatgtgaacacttgtgaactttagatgaagctatgaaacctcaagtccatcttcttttattctcattcggcccgctttctttctttctcattaagcatctcttagcttttatcatggatttgggggactctttctgctatgctatgat

SEQ ID NO: 27854 - DNA, 424 bp, Glycine max
agcttttgtgatgactccatgtgctactcatatgtttgaaaaactttttaatacttatcttgattgagtcttctcttgattcttgaatcttgagtcttgaatcttgatcttgattattctttattcttgattcttgaaacttgaatcttgaaatcaaatttctcttgattcttgaattgttcttgactcaatcttgaaatcattctcttgggctttttttcatcatctttgttatcatcaaaacaccttgaatcaatcttgattcatcatcatgaagtttgcttctacaatgtcccccttttcgatgatgacaaccctgaaatcaagaaacacatacacacactttttcctagtcgatcactcacttaattctccatattctccctctgtgtttttgagtttatgcttcacttgaaagtattct

SEQ ID NO: 27855 - DNA, 371 bp, Glycine max
  unsure (1)..(371): unsure at all n locations
tcaagaatgaaaaatgggagatntgaatcaagtgagatgtattaaggaataatgatgaagtatggaaagttttggtcacaaatcaagatataaaaaagagatctaagagttattttaatatttttataagcattttgatgatggactgggattgactttgtaatatggaaggactagtaatgtaggaggacaaacagaatttggcttaccaccgtagaattcagattggagtggtaaaataggtccttaagaggatgatggatggatagtggtgaaatgattggtctagatggtattcctattgaggtttggaagtgtgtacgaatctcgagttaagaatattttaagaatcttggataagactactattg

SEQ ID NO: 27856 - DNA, 337 bp, Glycine max
tattactttaatctgggctatatatatatagtagaggctgtacagcttcatttgtctagctacaacggcaatatctacgagggcgaaggattaggtcacattcgcttgcgatgccaatgttggtcgtacgtgtatacaaactcgtaccattcactttgatctagttaactgaataaactacatcgcccttgtatagttgcatgtttgatatcacgttcaaactctacattatgaagggttggactaaaaaatcatattcattcacatttatatatgctggcgtacgtctgcatgtgtctgggacacacgttcaaacacacatatatgcgagctctct

SEQ ID NO: 27857 - DNA, 247 bp, Glycine max
actcgtgcgagtcctttacgacgaaactatggcgagtttggctccacgacacaatggggttggtgtgagggtactccaccatttcaaacgtcttcttcatgaacggaggggggcccacctcgtgcaaccctatcatcggtttgggcgaagtcgactactactatgaccacttagcggagccgtcatccatctgttctttcactgcgtgagccgtcgtcactcccgagtccttgctctcgctcaaaac

SEQ ID NO: 27858 - DNA, 434 bp, Glycine max
  unsure (1)..(434): unsure at all n locations
agcttactatgtaaacactatttgagttattagaatacatattctatcaaacatctattgtttgtgaaagctaggagtgacttcgtgacaaaaaatacttggctcttattctcaagaggagattaagggtagtgccagaagtggcctanagagtacttgttgtagccagaagtggcataaagaatactcgttgtaatcaaagttttgattagtgaaacccttcaagttttgaaagagaattggacgtaacccaagagttagggtgaactagtataaaacctctgtgttttctatattgcttttatataactagtttctttctatagtttacttctacgttattgtgtccaagtcttgtgagctggtttttaaacacaaagtaattttgaacccttggacaaaacccatcatccattgatatctatatgagaaaa

SEQ ID NO: 27859 - DNA, 418 bp, Glycine max
  unsure (1)..(418): unsure at all n locations
cgagaactaggaaacagtgaatggaattctatgtattgaaaattagttctcaaagttgtacagatggttatatatatatatatatatatatatatatatatatatatatatatatatatatatatatatatatatatatatatatatataatcaattacaacgagaactaacttccaactcactaaactaacttccaacccactaaactaactaactaacactaagatctttcttactaacgcgagaccacttaactaatttattgaatagtttattttcttatgaaatgaactagggaaatntatgaaagcacacgctcaatgcgtgatttattataaatattacattatcccacatatttgaacaagaaaaatttttttattagagatcaaaagtgtgtggcataaacaaaacacg

SEQ ID NO: 27860 - DNA, 425 bp, Glycine max
agcttgtaattgattacataagtcttgttatcaattaccagaggagattttcagattattatttccaagggtcacaacttttcaaatggtttttacatggccatcaaaggtatatttatatgtgacttggaacatgaatttgcttagagtttttcagaacaaaaagtcttatcctctcaaaaagcaaaatcattttatcctcttaagaattccttggccaatacacttgcaattcaataaggaattaattgagtgcttaaattgttcaatctatctctttcaagagagatttcttcttctctactttctatttctaaaaggggattaagagaccaagggtctctcgttgtaaagaaatctgaacacaaaaaaaggattgtccttgtgtggttcagaactgcaaggtagtggaactctcaagcggg

SEQ ID NO: 27861 - DNA, 355 bp, Glycine max
acaaattaaattaaacaaaaaagaaattattttacttctatgataatcccaagtttcccttgtcactagatagatggagattaagtttggaggtggactcttcaactcccgcaaggcctctcctttgtcctttcccttcaccgtcaccaagatctaatcaaaatcttgttctcccactctcgctgccaccatcaccacctgtgacagttgtatcccactctttgttctcactggcctagttcccactccatcctctcgccaccagcacggacaatgcaacaccaccactttaacaacaacaagtcgatctaagaaccacataaattcagatcttcgctctcggcacacgattatg

SEQ ID NO: 27862 - DNA, 413 bp, Glycine max
gcatgcaagcttatatatctgcatccatatcacattctgagcactcatttggaagaggtctgttatatataattagttactggtgttagtaaataacaacaaaagtcttacctaggtgagtttaagtaacatagccaatttcaaaactctatatagataagatgtaattgtatgtgtgatttcatactcatagttgcttaagtaacatactcaaagttttgttgccgtaaatatttgcagcaccattgaaaggcagatggagtgcaatcataaccacattttttagtcacttaagaactctatcataaccccaccaagttcttcattcattatccttgcattttacatgttcagcgaaataccttaattatgagtggattatgttgtcttctgctgtttataaggacatacat

SEQ ID NO: 27863 - DNA, 423 bp, Glycine max
tccgcttattagtgcacagctccttcaagaatttagcatatcttggaatttgctttattgcatccagcagaggtatgtttacctctacttttttaaatgtttcctagatctctttctctgcctcttccatttttttgttgggaactgctcttggagggaatgcaagagggatatgttgcttctacaaatcaaaattaccagtggaagattcacctgcacggaaattgttaggtaacttactctttaaatttttgtcatcatctttttctggagtatagtgaagttgggcaagtgcatttgcggatgatgaaggtgctactggttgaggtccttgacactgctttcgcgacctcaatgaaatggcactcacatttttgggattctggacagattgagaaggcagcttgtcagaattctatgact

SEQ ID NO: 27864 - DNA, 405 bp, Glycine max
  unsure (1)..(405): unsure at all n locations
agcttacccttaaagaatgatggagctctggaattcntntgggaataagtgtagggggatatgtttcattgtaagatatgatttttggccatgcttaatgttgtattatggccatgcttgatgtatatatatattgcctaggtcttgctataatcttcaaatacgcactgttttaaaaaaattgattgaaaaaaagagaacacgaaaatacgcgaagttgaataaatgaggtcttgttatgcgaacttgatttaagagccttggttgattttggtgatattagagggttagggtttactacttgagcttaatttccatttagttcccattgctcctctattgctttgggatctagctacttattccatatattctccactacctagtccttggccccattataac

SEQ ID NO: 27865 - DNA, 215 bp, Glycine max
gagcatagtgttcgctgcactcgagcatcgcgacaactctgtgctttctctccttcgccacctgacctaggtatgtttcgtctaatcctggataaatatgcgatggcattcatgtatcgcacacttagtgaactaaacatggctagggtatcatatatttaactcgagcatcgtgacaactatgtgcttgttcttcttagcgaagtttcccttac

SEQ ID NO: 27866 - DNA, 404 bp, Glycine max
  unsure (1)..(404): unsure at all n locations
agcttctaaggaggtgagcttagttatgagagggtgtgtctagctaagctctatcttctcaaggaagatntctcaaagaagcttcttaaggaagttttctaaagaaagcttctcaaggaagctacctagtctataaatagaagcatgtgtaacacttgttgtaaccttgatgaatgagagtcttgtgagacacaactcaaagntcaacttctctccctttttcttccttcaatttcgtgctcccccctctctcttcctctccctctttcttttcctccattgaagcatcctctccaagcttcttatccaaggctcatcttggtggtgaagctccttcttccaggcttattccctagtggatggcgcctcctctctcctcttctcctttgtcttccgcttcatct

SEQ ID NO: 27867 - DNA, 286 bp, Glycine max
ttggaaaaatctttggtctttgttttccatggtcaagtcaataatatcaagaaaggagactttatctcttcaagaatttaaatcccatttttatgtacaatggttttgctaaaagtatgatagaaaaggactgcatcaacaaagtggacttagcacctccaacaagaattaggattccatacatacaaaaattaccaccatatgcatcttgagtatatgtggccatgcgaatttgagggttaattttaaaatgttatatttttgtccaaatattgtagatgtatat

SEQ ID NO: 27868 - DNA, 405 bp, Glycine max
  unsure (1)..(405): unsure at all n locations
ttgctttcacatnttttgaaagactaagttttatccatcacactattcaaccctccttctagtgtgtttcaggtacttcatttggtattagagtttggcctctgagttgagctcttgatagagtaaaggaaataaaattcttgaaataatggaagaaggatttgccgcaaacaagcctcctatgttcaagggagccaactatgcatactggaaggaaagaatgattgtcttctttgaatccattcacattgatatgtgggatgttgtagaaaagggcaatcacattcctttagatgcttagaagaatgagatccccaggagaaaaatggatcgataatcataagtgcgtatttttctcaattcacgcgtaaggaatgcttttttgtgcactcacaagaagaatat

SEQ ID NO: 27869 - DNA, 382 bp, Glycine max
  unsure (1)..(382): unsure at all n locations
catatgtccttaagacatactagtatcacgggattattgattagatgggagaagattgatgcatagcagtcagagatggagtatacaagctcctcanaggcaacttcatcagagaattcagctttttcaccaggctcaccaatgtcgtcatggtcaaaaaggccaatggcaacatggtgaatgtgcaccgactacaccgatctgaccaggtgtgtcccaaggatgcataccttttgccaacatcaccagctagtcaatgagtgtttccagttctaagctactagancctactatgatacactagatccgatgctgctcagacgagagaaatgacatcatcatgaaatgcaactttgctcagggcatgcatttgcttaaaagn

SEQ ID NO: 27870 - DNA, 387 bp, Glycine max
  unsure (1)..(387): unsure at all n locations
agcttgaactacaacaaagacgtccagctaaagacgttaaagaagcgctcctgtgaggcaacctagtatttctaaaccttactttntaattntatttttgtctaatttcatacttatgttatttaaatattgtttgtttgaaaaatatttataaattattntagggttatacttatgttatttttttcttaaaaaaaaaagacccttaactcgcctgggcaagtgaacatctgcgagaaacataaagaggggggtgaaatcanatttcaccccatccactcacaagttcaaaacttcatcttaaaaacatgaaacctaccctttcaacagtcaataattcatccaagtgccatccttcaaattttntcatttcacttcgtttcatcc

SEQ ID NO: 27871 - DNA, 374 bp, Glycine max
tgcataatgaattaaatgtcaatatgtcaaagcaattgatgaagcatatgtaccgcataaagagcaaaggaaagtctcatggcattgtaaagtgaccaagctgatgccctatgatcaaaacacaaggcagtgaccatgcattgaaagctttccaagaaacacattaagtcggtgctcaagtaaagaattggaaacttcttgcttatgtctgtttgaaacgagaaaacaagtatatgataatatagtgattctataagttcttatataaagagaacaagtggttaagataacttataacgatgcttacttgaattatgaaccatcctacctaaataagggtgctaccaattaaggacacataaagggcctggatg

SEQ ID NO: 27872 - DNA, 413 bp, Glycine max
agcttccacaacatccaagcaaaacaattctcaaacagcacaagctatcacaaccaatcaaaacagagcaaaggcagaaaactctgccaaaacaccaaccaaatcacaacttttctcacttaaagaccccagtaacaattccttcgttccggttcattaaccgttggatcgactcgaaacttttactggaagactttagtacataagcctacattgtgaccgttgggatctactagaaaacatccagaactcattctgcactactctgtccacagccaaccacacacaagcgtttttctgcacaaagccaaaattctgttgcacctattttgacagcaaaattctgcataaagtgcaaattcgaaaatcacacttcctctcatccaatctttcccaaatcaattcctacaagt

SEQ ID NO: 27873 - DNA, 399 bp, Glycine max
  unsure (1)..(399): unsure at all n locations
tctactaatgtggcagggcggngacccttcggcttgttgtcctaaccgcgagcctttacctctattcttcctttccgaggtacttttccttatgtcagcttgcgtaggtttatagcctaacccaaacttcccgcggtttcctctggtggttactangctggttctgtcgccgttgttcttgcccaaacccattccgggctcatagccgtaccccaacatcacccgggccaccatcattgccgtatcagacaggcaaggctggccagagagggaatctacagaggcaatgcttactacctcaaaagattggaaagctgtttccaatgactcctccgcggcttccacatatggcatagaggaagggcaacttaccaagatgtcttcctcacccgatactat

SEQ ID NO: 27874 - DNA, 266 bp, Glycine max
  unsure (1)..(266): unsure at all n locations
tagcttctcttggaccttangcaaaccttttactcatccttcaagaacaaaatggctactcgtgattgggtcctttcctctctctagagcttaagctcattgttactgccccacagagcccctcggaagttgtttcggccgtgttcttccctacgagcccttttggtctcttgttccaaggccctggtggtagctacatttacatctctcagttcggcattctcctttctgatcttaagagctgctgatttgaacctttctttgac

SEQ ID NO: 27875 - DNA, 290 bp, Glycine max
tgctcgctaagccagggcggtttattagagtagtccactaagcccgccttgccacgctaagcgcagatcgttctttgttttgaaaatttgtggaattgggcttagcgagcctgcttgctaagccaattctgcagaaaaaattggatctgtgttcactcgctaagcgtgtggctatcgcgcttagcgcatgagtcatttttcctaatgcgcgctaagcgccgagtctaaatattagttttattttctgctttttattttgaataaattactggctaatcttgtgttttgat

SEQ ID NO: 27876 - DNA, 277 bp, Glycine max
tgactcatttacaatggagatatattgttatttcttaagcatgtattttactaataattagtaaatgttgatggtaatactgatgttcttacattatttgggtggaggttcaatgcctctcaaacattactctaacaaaaagaaagagttgtgtgtataagtttatatgtgcacctaagagttggaactctaattctggattagaacagtggattggccaatttatatactcaatggctcagtcctggtcacaagataatgaaagacaatttttttt

SEQ ID NO: 27877 - DNA, 338 bp, Glycine max
  unsure (1)..(338): unsure at all n locations
tcaaagaaggagccacatantatatgtatttttccatttgactttgttgcttgcattcagggtatctcatttaaagagcctcaaaagaattatgtgtttgcagagaggtgacagtgcatttaattgtgactggtctagcaggtttctgtgacagtagttaccctgtctactgttctcttttatagtctgggccaaggattatttgacctagtatggcagattatgaatttggttaaacttcattactggagaactgattctttggtttagctatctactttcttcagaattaatgtattattgttctcagataaagcctggtggagatagcatcaatg

SEQ ID NO: 27878 - DNA, 407 bp, Glycine max
  unsure (1)..(407): unsure at all n locations
agctntaaccgtctgagatctttgccttatcacattggagggtacatcctttgtggtataagtagagggtacatctacttgggtttgactgagaacaagagagggtacatctcttgtggatcagttctagtggagggtacatccactagggtttcgaagagaacaagggagggtacatcccttgtggatctttgcttgtaaaaggatttttacaaggttgaaagaaatctcaaggaccgcangtctcttggggattggatgtaggcatgggttgttgccgaaccagtataaaaactcttgtgtgtttgtctccttcttccctactcttttaatttttgctgtgcatttaatttccgcttttactttctggtaagtttctcttatactccttattctcttaacaactt

SEQ ID NO: 27879 - DNA, 289 bp, Glycine max
atgtggtactatgttggagtctggcgatggtgcacatcttgtttttcacattcacaatgcgcgcataaacccaccatcccctgttgcccacctccaacttagctcacgtactcccacgtagcccatatcctcgtttctctcaacaccgggtccccatctatcctcccaagcttccacagcgttcaagcaaaacaacattcaaacagcacaagctatcgcagccaagcaaaacagagcaaaggcagaaaactctgctcaacatatcaaccaaaatcacaggttttctcac

SEQ ID NO: 27880 - DNA, 398 bp, Glycine max
gctatttgaagtccacaatttccactgtgcagtttactcatatcatgcaatcatattaaatcatatcaaaataacagaaaactattagaatattaaaccataactaccgttaaagtgataaaccatgactacttgttaaaactaaaacctacaagatgaaatgtctaaaaaacaactgaattaaataaagtccaggtcctgtcactcaatcctgtgtgggtgtgggccatgggtcttaagtcccctgtgcatcaggtgtgtcctctacaccctgggcctcaggagcttcaccccccccccccaagaaaggaaggctggactccgggctagaccacctgctataagaactacggtagagacattaccagctgctgttgggataggttatgcatgttcta

SEQ ID NO: 27881 - DNA, 355 bp, Glycine max
  unsure (1)..(355): unsure at all n locations
tttgtaactacctcatgcactcctctaatgactatttcatcatttctggcactaaactgctgggagttggaggccatcttctcaattaaatntctggcttcaacaagagtcatgtctccaaaggctccaccactggcagcatctatcatacttctctccatattactgagtccttcataaaaatattggagaagaaactgttctgaaatctgatggtgggggcaactggcacatagtctcttaaatctctcccagtactcatacaggctctctacactgagttgtctaatacctgagatatacttcctgatggctgtggtccctgaagcanggaaaatattttctaataatactc

SEQ ID NO: 27882 - DNA, 405 bp, Glycine max
gcattgagaagaatattagctctttgtgatcttgacatggatgaagcccttaatgtctcagaactaaatgagtttcaggcttttgttgattttggattcttttaaatctccttttttttatttaatatgctgtgaatatttattgttttcaagtgtggcctatttattcaaaatgtgcaaatatatcaacaggttagatgcgttaatgcaccattgctatcctctgaaatagcatgagtcacaagggttgtacagcagaaagtacctgaaggattcaactcacatggtcttacttgttctggatttatttatgtccacaatatgttcctcaaaagaaggcgtccaaagacattatgggctgttctaagatactttggatatgataataatttgcaactcatggat

SEQ ID NO: 27883 - DNA, 414 bp, Glycine max
  unsure (1)..(414): unsure at all n locations
catagcttatgtgtccccatttctccaccaatacctcaacacttctttcccaaccgtggcagattctcctcatcagctctctcatcccaatcccccactattcaggcaacccttttccccttttcactcaagttcttatctttttttcaatgcactctcacttcccgagattactgttctggggtttgtatatgttatgttttggtgttttgagtaattcaagtttcatttttttttaataaatttcaattnttgtggtgcagataattggcgtgggaggccccaattggagggaaaatggatatggaaaccccaacaacaacaacttgtttgatgggtgccaaggagagagtgatcattggagtgaacttgacactgatctctatcactggacaaaggcattgcgccctgtgc

SEQ ID NO: 27884 - DNA, 408 bp, Glycine max
  unsure (1)..(408): unsure at all n locations
actattaaacaagcttgtatcttaactgaccctatctccaagacaggtgtaatgataacatttgtcattagaatattttcaatcatttattatgttataaatgctttaaggccatttgtattccttcatctaacaaattaaagttttggaatgattggttgtgacatagtatcaaagcctctttaaacaagtggtcaagactctctagatttctatccttatattgcttccatacttctttataaagaagttgaaattgaaatcaagcataagtaagcctgcacatgattcaaactcccacaagggattgtgtttgaaacgctataaaacattgctaatatatctttgcctaacagttataagttgtaacttttgggataatnggttcacatcacactataccacttg

SEQ ID NO: 27885 - DNA, 393 bp, Glycine max
  unsure (1)..(393): unsure at all n locations
aacacttaggatttagaggtattctgtgttgtacgatgtccgaactcaaaccgggcatatcttggtatgaccaggcaaagatgtcttgatagttttttagcagggccatcatttcttcatggatgggtgcgatcatacccgtgcctatctttacttcctttttcccactattggttcctaagtccactagttccgtctcttcttgatgaggccccatctcttggtcctcatgggcaactatattctccaactctgggggaagtcccacatcctcatcctctttactttccgtctgatctgtttcttgcttgaaatcgatggtcgggtcccaggtattagtaccttcgagggactcgtcgtcggatctggcattntaagagtaaagaaataaac

SEQ ID NO: 27886 - DNA, 434 bp, Glycine max
gcttacagagaacgacattttactcctaaaaatatattattgatgcctactatttatgcatttctactcacgatccaagcatccttactaattcttattgtttatctgttgttgcttcttatattttctaaattagagaaacaaataaaaaaaattgcctaaataattcaatattgcatgcctgcaacttggaattcaagtgaattgcatatcctcttttgaggataagaggataagagtgaggtgctttttaattgtggttccataagaatcagtggaacctcaaaatggctcgatattggtgtttggagatgatgtcaagagccacacatgtctaggataatctttgttagcaattgaggtttttggttatctgcttctatatatatataaacatttcgttttgctttaggcggccttattagtttttctca

SEQ ID NO: 27887 - DNA, 390 bp, Glycine max
  unsure (1)..(390): unsure at all n locations
ttgctntgattgattcagtctaactagggatcgaggtttagtaacttaggctacaacatanaacacaaaagcatgattgattagagaaatatctttatatacatcagttggtttattagaatgacccaacatatctacctactactatcgaatttacttacttgcatttttactgtttttagcctagactaagtttaatcctgttctanatcatcaattatcaatgtttctttcaacaatgtcttatttacgaatgtaaccctgtcttatactagttctctgagtttgatactctgattcatccattctaattttaaatacttgacgatccggtgtgcttttcggcaaaccggatttcccttgaacatatntgtataaagaaaaagtgga

SEQ ID NO: 27888 - DNA, 402 bp, Glycine max
  unsure (1)..(402): unsure at all n locations
ngctcaacgtctctgtgagggtctctatttgattggctaggagcctgttttgggctagtagtgcgtcttatgatctgagctcaagaagactcttctttgtaggtgtgtaagctcgatcacaaaggatgacatggtcactggctgcaatgtttttaatcaactccatagcttcatcaggtgtcttcaatttgatcttccctctagcagaggcatcaagtagctgcttcgaatggggtcgcaagccatcaatgatgatattgagttgaatcggctcgctgaacccgtgggtgagagtcttctggagtaaaccatggaggtagtcaaaagcttcactcgatgattcatcggggaatnggtggaatgaagagatctccacctttccctcaacggtcttgaactctg

SEQ ID NO: 27889 - DNA, 390 bp, Glycine max
agcttgctctaaatacacattgatgtttgtatttatgggaggaggttatatgccattttttgctttaagagtgatgtcccactggtaaaactaactatccaaatgtttgccttcgcaggaatggccccgaggaagcttgcctcaaagaggtccaggaaagacaaggcggccgaaggaactaattccgccccggagtacgacagtcaccgctttagaagcgttgtacaccagcagcgcttcgaagccatcaagggatggtcgtttctccgggagcgacgcgtccagctcagggacgacgagtatactaatttccaggaggaaatagggcgccggcggtgggcaccactggttactcccatggccaagtttgatccagaaatagtccttgag

SEQ ID NO: 27890 - DNA, 279 bp, Glycine max
  unsure (1)..(279): unsure at all n locations
ttcataagtgaaatatgtgcagccatctncctaagagtcctctcangaggtggagggtgagccatgttctcagtatgaaaattagtagtaaaatgtgttgcaacctacccttgggcgggaaggcgaccttgaactccgatgctttcaagaaggaaatgcgcaagtcgcccacgttatttaggaaacgttgaaaaaccggagaagacgtgatctacgaactntatgtganaggttcgggagttgtatttacgcacggggaatgtattggaccccacacgt

SEQ ID NO: 27891 - DNA, 382 bp, Glycine max
agcttgtagggttaaagtctcacgattgtcacatgctcatgcaacaattgttaaccgtggctataagagacatcttgccaaacaaagtcaagttagccataactcacctgtgctttttcttcaatgctatatgtagcaaagtcattgatcctgtcaagtttgatgagttggaaaatgaggccgcaattatactgtgccagttggagatgtattttccccctgctttctttgacatcatgattcacttgattgtgcatctagtcagagaaatcaaatgttgtggtcctatttatctacggtggatgtacccggttgagctatacatgaagatcttaaaagggtatacaaagaatctttatcgtccagaagcatctattgttga

SEQ ID NO: 27892 - DNA, 392 bp, Glycine max
tcaaccgatcgtttaagctgttatctcgcctaataaaatgataaaatgaatttcaatcgatcatttgtgttgtaatctcatttaatcactggtaaaataaaattcaaccgatcgttcacattgtaacctcagttaacaaaaagggggtaaataagctccaattggacattttactttgaaagttcttctgaatgagttgataaataaccaagtgaaactaaggctaaaatcaactcacaaaccaagctttgtccgtgaaaaggttatttgaaaccgttttaaggtccaacgccttaaacggtcctctttgcttttatcaattaaaatggaccattcaaaagtataaaatcaacacaccgcataaccttcttgctttttttaaagaactacgt

SEQ ID NO: 27893 - DNA, 410 bp, Glycine max
  unsure (1)..(410): unsure at all n locations
ctgcaagcttgagtttcttcattttcctttgtagatgcctctntgctagcataataaatatatacaattatgttcatccttttctcttagtagcttaattataatttatttggcataattttatcatctgctttacatcatttttcacaattaaacagaagacctattctaaattaattaagattcaggattttcttaattagttcagtatattagaacgaatgttagcatttagtaaattttaggtttggtttcattctaaaaattattttttattctatcaacttttaaataaaggttctcacatcgacaaggagattcaaacacacgtccatgtgggatataagtccaatccttaccaaatggactaacatttgttggctcaactactactacctctatcaatttta

SEQ ID NO: 27894 - DNA, 403 bp, Glycine max
tgctaccccatgcaagctcctaatatctcccacactttttatggtgggccattcttggatgtccttgattttctcagggcccacttggaccccatttctaccaactacaaaacctaagaaaactatattatctacacaaaaggtacacttctatatatttgcatagaaggtgtttttcttaaggactgaaagaactttcctgagatgtcctaagtgatcatctaggctcctactgtatactaaaatatcatcaaaataaacaacgacaaatctacctatgaaatcctttaagacatgatgcataagcctcataaaggtgcttggtgcattagtgagcccaaaaggcatcactagccattcatacaaaccaaacttggtcttgaaagcagttttccactcatca

SEQ ID NO: 27895 - DNA, 303 bp, Glycine max
  unsure (1)..(303): unsure at all n locations
agctntgccaatctccatttgtgtttttgtttgtgtttaccctctacattgattgtttcaaatttcaacgttgaaaagttgcatttagtgcactaacgcaacccagaaggtttcctcttttccggttacttcattatggaattcagggtatcttttttgttttttttctttcgaaaaccgttagcgccaaagagtgactattaatttcatcattttaatcacagaattagtcaaactcagacgttcatctcctgcagcacaacttggattaaaataatcaaaaccagcatatgaccttaacat

SEQ ID NO: 27896 - DNA, 401 bp, Glycine max
tgacagagagacaaataaaatatcaacccaacttgaatatatatagaaagatgtcctcataaataatttagttttttttcctcaacttaactacatctcattaattaaatcaactgcgctaggaaaatgggatacaaactatcaatgctctcctaatgtccgttatcacttagttcttccttacctgactagcactaatttaaatcactaactatggaacaaataccaaaccagctcagaccgattcgttgacctatttctgatctataacctattggaatctaaaaacataaatccttagatagccttgttagaattataattttatctcaattatgcaaacttttatatgcatattaatgaggtcaaactttaattctaacggaaaaaaacaatactac

SEQ ID NO: 27897 - DNA, 268 bp, Glycine max
  unsure (1)..(268): unsure at all n locations
cacaaaagcatgattgattagaaaaacatctttatatgcatcaaccggtcttttagaaagacccaacaactttacctactgctgtcaattntacttatttgcagttttactatttttagcctagacttagtttaatcctgttctaaatcatcaattatcaatgtttctttcaacaatgtcttatttctgaatttaaccctgtcttagactagttccctaagttcgatactcggattcatctggtttaattttaaatactcgacgatct

SEQ ID NO: 27898 - DNA, 354 bp, Glycine max
tcacctcattgagaattacaattccatgaaggatgtgtctgtctttgatgaaggctggttgtctctcatcaataaggtcagatataacattcctcaatctatttgctaataacttagctatcaccttgtacatacacccaatcaaagagattggtctgtaatcatcaaaggtctgagggtgtttaactttgggaattagggccaagaaggaagcattactgcctctaaggaagcagccatgcacatgaaattcgtctataaatcttctaaagtcagttttcaacactccccaaaattctttaatgaaaatgaagttgaaaccatccggtccagggcatttgtcccaccacaact

SEQ ID NO: 27899 - DNA, 392 bp, Glycine max
  unsure (1)..(392): unsure at all n locations
aagttggttaagctgaatatatatatatagatacatatatatatatatatatatatatatatatatatatatatatatatatatatatatatatatatatcatgggcacgtgtcctctggactctaatttacacatgtctacatatgtgtgtatgtgatgcatcccaagaacatgtgcgaatttcaacgattgcctgtctcaatgatgctgcatacttttgtttcccatgcgcaaccataaccttggtggctcgatgtttgtatatacggagtatccactcgctggctttatctctcaatatgtatctgtcacgaaacaagattattctccgtgtgggttgacattccattctcgtgacgtgtgaagagacagtatacacaacacagccctn

SEQ ID NO: 27900 - DNA, 305 bp, Glycine max
  unsure (1)..(305): unsure at all n locations
agcttccgttattcaatctctagcgtctctatatattatttcaccgaatcagacatccgagtgaaatgttatgaccattcgaatttgtcgagagcttccgttgtttaatttcgagcgtctagatgagttatgtcaccgaatccgacatctgtatgaagaggtatgaccattcgaatttctcgacatcttccgttggtcaatttcgagcgtctcgatatattatgtncccgaatctgacttctttgtgaaaagtttggaccattcgaatttctggacagcttccgttgatcaatttcgagcgtctc

SEQ ID NO: 27901 - DNA, 186 bp, Glycine max
tctctacaattgcatcacctctcaatgagctggtgaataagaatgaggcatttacctggggtgaaaaacaaaagcaagcctttgctttgctcaaagaaaagcttactaaagcacctggtctagctctatctgacttttctataacttttgagctagaatgtgatgcctctggagtgggagttggag

SEQ ID NO: 27902 - DNA, 425 bp, Glycine max
gcttatagaaataaacaaacgtttatcatcttgaaagagagcatgaggatctcaagacacctcatcaagttcatttagttgagtttgtcttggaaaccacttctcttagtaatgtataagatgcctctgtttgtgaggacgtcaaggcactactggacgaaaaggtatctagtggatgcaaaaagtttcttaaggattttcaagacttggaagaaagggtgaaatccttaatcacagctcttaaagattcaaaagaagggtgcaaggaaatgcttaaacaaaaactcttagttaaaaaagaatgccccttttctaatgatgaacttgataagatgaaaaagaagaactcagatctctagacggaatgtcaacattacaaaaaaatgtcttctgatttgaactataagcttaacggacatgaagtc

SEQ ID NO: 27903 - DNA, 430 bp, Glycine max
  unsure (1)..(430): unsure at all n locations
ngtcngagtatgtgtgtacccatcacatgtggtactatgtggcggtcgggcgatggtgcacaacaagttttccacattcacaatgcgcgcataaacccaccatcccctgttgcccacctccaactgagctcacgtactcccacgtagcccatatcctcgtttctctcaacaccgggtccccatcaatcctctcaagcttccacaacatccaagcaaaacaacattcacacagcacaagctatcacaaccaagcaaaacagagcaaaggcagaaaactctgccaaaacaccaaccaaaaatcacagcttttcccactcaaagaccccagtaacaatttcttcgatccaattcgttaaccgttggatcgactccaaaattttactggaagtctctagtacataagcctacattttgaccgttgggatctact

SEQ ID NO: 27904 - DNA, 343 bp, Glycine max
cctattaacacacccggccatgaatcacatatctgaacctgtcagcagtctctgtggtttatgcttctttggcgaccaccacagatacctttgcctctttgtgcggcgaattgaagcaatcgaacagctcgaagcttatgctgccaacatctacaatagacctcctcaaccgagcatggaaatcagtcacaacagaacagaacagtgatgacctctccagcaacaggtacaatctcgggtggaggaatcatcccgaacttagatggtcgaatccgttgccacagcaacaacaacaacaacatccttattttcacaatactaatggcccaagcataccatacgt

SEQ ID NO: 27905 - DNA, 434 bp, Glycine max
tacgcttgaatgctctattcaatggagttgacaagaatatcttcagactaatcaacacatgtacagtggccaaggatgcttgggagatcctgaaaaccacacatgaaggaacctccaaagtgaagatgtccagattgcaactcttggccacaaaattcgaaaatctgaagatgaaggaggaagaatgtattcatgacttccacatgaacattcttgaaattgccaatgcttgcactgccttgggagagaggatgacagatgaaaagctggtgagaaagatcctcagatccttgcctaagagatttgacatgaaagtcactgcaatagaggaggcccaagacatttgcaacatgagagtagatgagctcattggttcccttcaaacctttgagctatgactctcggatagggctgaaaagagaagcagaacttgg

SEQ ID NO: 27906 - DNA, 402 bp, Glycine max
gcatgcaagcttgatgtgagaaagcgtggaagagtcagtcttcctacttttgtttgttgaccatagagtggtacctggagatatgtcgcgggggttaggagaccttagggacgtcaggtggggtgctattgcccaaaaccaagcttggctaatctcgacccaacccgggcatagtcaatcagtgagaacctgtgacgtacctaaacaggcgagctcctggcagtcaaccaataaaagaacaaagaccacaaagcaaggaggcttgtgtggcggttggccagctatgaatcttgagtggtatctggaaattggcctctggtaatcgattaccaagggtgtgtaatcgattacagggcttaaaaatggagataggaagttaagatggcctctggtaatcgatta

SEQ ID NO: 27907 - DNA, 387 bp, Glycine max
tagcttctctccgtagccgctcttggtgctaagaaaatcccaataacaaatccctcttattactacctattttgaattctttagttcctgaatgtacaaccttcaaattgttgctcgttcccctctttcttttctgcaaaaaagaaaatcaaatgctgtgaaagcatggatgaagtcctaagaaaatcaatatcaaagaaaacatggatgaaatcacaattaaaaagcacaactacctatctttcagagtcctttggttaatttgtcttgtctccttatgtggtggggttttgtttaataatgttatacttttgccttccaaaaaaaaattatcactaatcctcttttcattaatccaattttgtatgttattgtataaaagatcat

SEQ ID NO: 27908 - DNA, 233 bp, Glycine max
  unsure (1)..(233): unsure at all n locations
gaaggagattgaacaactatttgcaactaagggtaaatatntagcttatataatctttgcggatatatgagttagaattttaattttttagaataaaaaaaactttcataaattgatgactttacaaaaaaaagacatttgttttatttttcactatcattttacactaatattaactaattacagcgaataatattttataaagccagcgattaatttaagatttttaaaat

SEQ ID NO: 27909 - DNA, 297 bp, Glycine max
acctgctcgtccttcttcaatgaatgatgatgtaggaatgctcaatggaaaaatggagcctccccaattgcctgttgaatactctccttcaaccccttctaggttccctttcaagtctactagaaaaggcaggtgagtatctagttctaatatctgataacacaatttcataattagatgttaaactagtatactggcagaggaagtttgccttcgacagaaaaaaatgtatacggattttaggaggggaaagctatgctctcaccatttgagattgctcactctctcttatcatca

SEQ ID NO: 27910 - DNA, 376 bp, Glycine max
  unsure (1)..(376): unsure at all n locations
tacattataattaatcatcatttcatactttcaagagttaattggagggttgacttaaaatatactttagctattaagctaaaggaaaggaataattcatgctttaataagacgagatttatttttggtagtacaacatatgatgacattaagtcagagcaaatattataatacaatgcaccttgctctacaaaccattaattgattcatgtatcgggatagctggctatggacctttaaaagcacctaggtaaagtctatgagaaatcagggattgtcattcatatatggacccaagcttgtntatgacagcgttgattgtgttagtagtgcattggtcaaagcatgtaaattccaagactcngaatcattagtt

SEQ ID NO: 27911 - DNA, 336 bp, Glycine max
aaggtctgcgattatctcctcatttcacttatttgttatgaatgcatgtacgtgtattgactatattgactttacttatactctaacctgccaaagaaaaaactatcattatattttgtgatggagtattctaaaattcagacaaattaagatgcatcaattaaaattttttatttggataaactaatttaaatttccagaaattcacaatagctccaccagactgcttcctcaaaattaagatttttgtataagctttcaatttcaattcaaaataaactcaattttctataaaatataacggtaaaatccttaaggtccattatgatgatatgt

SEQ ID NO: 27912 - DNA, 401 bp, Glycine max
agcttgcgaaccataccactatccacgtatatgctagctccatcatatccttggcctctaactttttgaatgataagattatcatgagatagtattgaacaaactccttgcttaagagtagatgatgtacaatctatcacatgtgagatatctaaaaaatgttctaacatatcagcacttatcaacaaatctaatattaggagtaatttgttttcttctagattcatcatgagcttcacctacaattcaccagaattttgcattatcaatctctttttgaatttcattttgcaacttcctagcaaagacgtgtagaatttctttttgaataatgggtgaagtgtatcttgcattctaagggacattttccaagacaacttcatctatttgcttattataag

SEQ ID NO: 27913 - DNA, 336 bp, Glycine max
  unsure (1)..(336): unsure at all n locations
gttgcaaaatgatatgatgagaatccatatttataccgttattaccacaatggttaaaaaaaatactatatcacaaccgcacatttttttatttccaatggtaaattatctttttttcaacctttcccatatattatagccttctgcacttccccacaccattctagagccttcntcttgtatatattatctttacaataaatacttttacatactaaactccaatctaaaggtagagaacaaaatatacaacgcatcatgattatcaaactctcgggtaactcgctaactcttacgaggttacgagtctacttaccctttatgaattgactcttg

SEQ ID NO: 27914 - DNA, 400 bp, Glycine max
agcttgccgcccagctcgcccaggcgagcacggttgcttcctccagaagcaacagccttctggaggaatcttctggagggcccaagtgggcctggttgctatttgcaccccctgtttactaaatgcacccccttttctattttttgtaattctttttccgtaacgttacgaaactttacgaatttcgtaacgatacttattttccttccgcaaggttacgaatccttacggattatgtatttactcttttttggctttcaaagaagttacggaaactcacggattgcgcaaaaacacctcttttcgatttccgccatattacggaatttcacggattacgcaagcctgcttccttttggatttctgagacgtctcgggacttcatttattgtatgtcatc

SEQ ID NO: 27915 - DNA, 402 bp, Glycine max
  unsure (1)..(402): unsure at all n locations
gtgcggatntggtcttcaacggtaaaaggatcgagttggtctaaataagggcaaatctgatcatcatgctttcatgaaaaaaactggcgcaagtaaagagagtgagaatgagagacaaacccatgccgtgactgccattcctatacagcccagtttaccaccaacccaacgatgtcgttactcagccaataacaaaccttcttcttccccaccacccaattatccataaaggccatccctaaatcaaccatatagcctgtctaccacacaaccaatgctaaacaccacctttagcacgaaccataacaccaaccaaaaaggaattttgcagcaaaaagcctgtaggattcaccccaaattccgatgtcatatgctaaacttgctctcatatctactcgataa

SEQ ID NO: 27916 - DNA, 368 bp, Glycine max
  unsure (1)..(368): unsure at all n locations
caatgaacgattctatttgtggttaaacccacatcacgatcgttcttcggagtgaaaaagatctacaccaaacttgcttattcaatgtgccctagagggcatagctcaacagattatatcccgcgacacacaatatgcgccgcgaatatgccattgtgtcatgttattcatccaaaaacacaatacaatgatgtttgcattacgaaagatcaggtgtgaataaataatgtaattcatagattaatctattgttaatgctctcaattggaatgtttacttgctctctgtttttagatggaatgcacaaaatgcattgcctatgccttagactacaggactataggaatgtgtgattgtgcaacatgtan

SEQ ID NO: 27917 - DNA, 338 bp, Glycine max
atactttagttcctgaatgtacaaccttcatataggtgctcggtcccctctttcttttctgcataaaagaaaatccaatgctgtgaaagcatggctgaagtcctatgaatatcaatatcaaagaaaacatggatgaaatcgcaattaaaaagcacaactacctatctatcagagtcctttgggtaatatggattgactccttatgaggtggggctttgaataatgatgttatactactgccttccaaaaaaaaaccatcactgatcctcttgccattaatccaattctgtgtgtcattgtataaaagatcatgggttcttcacctgactgcactactc

SEQ ID NO: 27918 - DNA, 274 bp, Glycine max
actgagcccttcctatgagacaagacttatgaacaagctttcttggcttttaagaataccatacgcatactcctatatctctcagtagctgatgaagccgttagctcaacccacgtacaagaggaagggaaacattagtttcctaaaactttcaccagcaacatactctataacgccgagaagtgctaccataggcacaccatactctataatgtcgggaaacattaattcctggctttcaagaataccatagccacaccaccaatagcactca

SEQ ID NO: 27919 - DNA, 355 bp, Glycine max
  unsure (1)..(355): unsure at all n locations
agcttttctccctctctctctcacgtttctattcccttcttcttcctcaccattgaagcttccatcaaagctccaaaccttgctcaccatttatgctccaaatcgcaaaaggaagccatttttggagtcatgaagcgcacctctacgttgtgggacttcaaatttcaaagttgggtaaacttctttctcacatgattttcgtgggtattgggttttgggagatataatgggtagttctactaggtttatgccttgtgatagttatttgtgaaggaatttgttaaaagcatgctaaacttgtcatgtttgatgtgagctaaatatacccattctattttangggttataatgatgc

SEQ ID NO: 27920 - DNA, 393 bp, Glycine max
  unsure (1)..(393): unsure at all n locations
ntataagtgcgggtctgggagacgaaggtcaagtggtctcgatatgtgaagatgatgttccaaaaactctggatttggtccgaccatgccctcctgatttccaactgggaaattggcgagtggaggaacgccccggcatttacgcaacgagcataatgtaaacctttacggttttaaaagctctatagttgggcctaagctttagagttttcattttgttaaggctttgtgtcttttgtttttgattttataatacaaggatctttcttcatctgttcctagtctctacccattctcattcatttgcatgtttacttctttttctaaaacggcagattcgatgacgagtcccccgaaggtactaatacctgtgacccgtctatcaacttcgag

SEQ ID NO: 27921 - DNA, 317 bp, Glycine max
ctcagagtcacctgacgcatgcaagcttgtaaagaactgatggaatatcaagaacaagcttgtacgctcatcgttcacgtgtatgatatccactccacaaggtctgaagtagagaagagcttcaaccatatcacgcaacgtggcggacaaaagtgtgcagttaacttgaatggtcatcattgtcaatgaggaaagtattctgcgcttcactatccatgttcacacattattgcagctagagcgtacgtgagcatgaattactaccaatatatagatgtcgttatacatacgagcacatgctaaaagcatactccgca

SEQ ID NO: 27922 - DNA, 160 bp, Glycine max
gacttgtaggaaatgtcttgtgccacaattgatgaagtgaagtgtgatcttctaaatccgcccctttgcgaaagtttgctgtcaaaaaaagtgccacaggattctggcttgtgtcgaaaaatgcctgccgggggctggctgtggaaaaaactttgcagaa

SEQ ID NO: 27923 - DNA, 311 bp, Glycine max
actccgagggccgaatctggcgaataatatagcgagacgctcgacagtgaacaactaaagctctcgagaaattcaaatggtcatgactcttcactcaggtatccgattcacgcgcataatatactaagacactcgaaattgaacaacagaagctctcgagaaattcatattgtgctgactcttcactcagatgtccgatccacgcgcataatatatcgggacgctcgacattgaacaatggaagctctcaagacactgaaatggtcataacgtttcacacagatgtctgattcctggaaataatatatcga

SEQ ID NO: 27924 - DNA, 468 bp, Glycine max
  unsure (1)..(468): unsure at all n locations
ccaccaccctctcccgtcctactctctcttacanntttantanntgtatcttcatnactcaactaaggcgtggggnnnnttgttgagacttgaacacttagngaacttaaaacactcagcctgactttgggtaatacatgattggacttgattcgggactcgggggaaacgccttggggcaaattggaataaggaaaaagtgattatgaaaatctgttcttaggcgaaaatctgatgtcaagataagagcaaaagggatttaggccttgagcaaaaaaaagactaccctgaggttggctgacgaaacaccagagccaaatgggatctggagggaacgcctaatgatcccaaccggcccaaaaggtaggcctaggcgaatatatgactattcaataaaatcttggagtcaatccaaccgttaaccaaaaggatacaaggaattgttaccggggtcctaaaacaaaaaaa

SEQ ID NO: 27925 - DNA, 361 bp, Glycine max
  unsure (1)..(361): unsure at all n locations
agcttgtagggttcaccccanattccgtcggcatatgctaaactngatcccatatctacttgataattcaatggtagccataaccctagccaaggttcatcaacctccatttctccgagaatacgactcgaacacaacgtgtgcttgtcacgaataagccgcggagcgttccattgagcattgtagggctctgaagtgtacggtgcgagggctaattgatgctggctgaaatttgaggagaatcgtgtgtaatcctgacattgacgagagatgccacacatggcgcaattttgaaagctgttgttagatgtctctaatgactcaccacgattttcaactttcaccggaatgtgggtgtaag

SEQ ID NO: 27926 - DNA, 332 bp, Glycine max
tgttaaagaacttcgaaaaaatcaagaacaagcttgttcgcacatcgttcgcgtgtatgacatccactccacaaggtttgaagttgaggagaccttcaatcctattacacaacgtggccgacaaaagtgggcagttaacttgaatggtcattattgtcaatgcagaaggtattctgcgcttcactatccatgttcacatattattgcagcttgtggttacgtgagcctgaactactaccaatatatagatgttgtttatacaaatgagcacatcgtaaaagcttactccgcacaatggtggcctcttgggaatgaagcgactattcctcctt

SEQ ID NO: 27927 - DNA, 304 bp, Glycine max
  unsure (1)..(304): unsure at all n locations
agcttctagcacaatggacttacctngaattaattcctttgatagcctctttgagccttgtttccctttccttgttttgaagctcactacaagccttaagtgaaaaaccatgatattaccatatccttataggaatttggagctttggaattgttttgggaataagtgtggggggtttttgtttcattggacaacttgttttgttggctatgcttcatgatgtatgttgggccatacttgatgtacattgcatattggttaaatgttggacatgctgaatgaaatgttgtttctcaaaggcaaa

SEQ ID NO: 27928 - DNA, 332 bp, Glycine max
tcaccataatggatgaagagtctatggacgacacatttggcagacttcaagttcttatgaacaatctggaagcccttggatagacatattccaaggtttagatatacttgaaggtgttggacaaactactacaaaaaagtgttttaacaatgtcatttccatgtcatttataccaaaaccatcatagaaaaaaatgcggtgacatttttgaaaataatgcatactcttttaagacggtttttgaaaaaccatcttagaaaaagattttcaacatcgtttttgtgatagattcagaatgtagaagaagaagaagcaacaattaaattaatcaa

SEQ ID NO: 27929 - DNA, 239 bp, Glycine max
tgcatgacacgtcggcttgcccacgacttatttagctgcaccctcgtgctcgccgcgagtgaggcgattgcatcttatcgcgccgacaacccatatgactgtcggaacacacctgatgctcagacagcactaactatcccgctgagtgcaagacgcttgccgctgctgccctaccagaaaaaaatggcacgctactagcactgaagatgcgcttctcaccggatgcatggtttggcaaa

SEQ ID NO: 27930 - DNA, 324 bp, Glycine max
  unsure (1)..(324): unsure at all n locations
gagaagaaaaagatgaaggattgaatatatacaagcggtggggatgtctcctccacctctaggacctcacaatcactcacaaactcatctcaagctctcaggacggcttcctcttcaagctcggttctctgcaggtcttcacacagcataatctcaaaactctctggaactttgaccttccactctctagagaaccctagacatgcagaagcttcaagaagaggcccaaactccactccaaaatatgacttcacgcttaaagagatggctntgtttgtgcttacgcgcttagcgcaatactgaaccgcacaacgctcattagtg

SEQ ID NO: 27931 - DNA, 335 bp, Glycine max
tgactttggtttagacatgattgatcatgatttgggacttgtaggaattgatttgggcaagattggatgagggaaagtgtgattttcgaaatctgcacttatgcagaattttgctgtcaaaataggtgcagcaggattttggcttgtgtagaaaaatgcttgtgtgtggttggctgtggaaagagcagtgcagaatgagttctggatgtttgctagtagatcccaacggtcaaaatgtaggcttatgcactatagacttccagtaaaattttggagtcgatccaacggttaacgaattggatcgaaggaattgttactggggtctttaagtgaga

SEQ ID NO: 27932 - DNA, 445 bp, Glycine max
  unsure (1)..(445): unsure at all n locations
agcttcatgatgaatcaagaatgattcanagaagttttgatgatgacaaaggtgatgacaaanagctcanagatcaagaacaattcatgataacaaagatgatgatctcaagaatcaaagaataagttcaagattgaatcaagaacacttcaaggttcacaaggaaatttgatttcaagaatcaagaatcaagttccaagaatcaaaatcaagattcaagactcaagattcaagaatcaagagaaggttcaattaagataagtattaaaaagttttttcaaaaactgagtagcacatgaattgttctcanaaccttgtaccaaagagttttactctctggtatcgataccagatattgtatcgataccagtagcaaatggtttcaaaagcttcactgaattacaacgtcaatgattcaaatgtgtatcgatacatgattgatatc

SEQ ID NO: 27933 - DNA, 322 bp, Glycine max
tgtaccttgaatcttgaatcttgattcttgaaatcaactttcctcttgaaccttgaaatgttcttgattcaatcttgaacatcttgaactcattctttgatgcttgagatcatcatctttgttatcatgaagtgttcttgacctttgagctttttgtcatcacctttgttctcatcaaaacttctttgaatcaatcttgattcatcatgaagcttgcttctacaaaccctacaaaatatttggaaaaagatcctgctatatgcaaattagaaattataaatccagacctggtaataaaaactaaggatattcagtatgggaa

SEQ ID NO: 27934 - DNA, 528 bp, Glycine max
  unsure (1)..(528): unsure at all n locations
atcctcagagtcacctgccgcatgcaagcttgtaaaataatacttgggtgagcatgttaatgcttatagaatattagttataagagcctgaggaggcttcaaaaaagaaagaatacctagttgtaagagcttgtgaggcttcaggaaaataagaataccacaaggggcttggtctttgtggaaagcctacagttgtatggactggacataacccaagttggaagaaccagtataactccttggtgtgttgtgtctgtgacatcctctacccctcacatatatactgataaaggaataaaaattcaaatattagttaaaagtatttttaaaacatctctaaatacaagcttttcataggggtaaaaggctcacattcactttcttctacatcatattcaaacttgtccaaataaataataaagtcgtctcgactcanacaagactgtctaagactctatacannataatataaaccctatactccaatgtcacatcctatcagagtgttgtgttctgatgtccttcaca

SEQ ID NO: 27935 - DNA, 329 bp, Glycine max
tcatccgtgggtcaagaatcttagcaattgaaagaatgacattatagtcactccaatacttgccaaacttttccatcatcaacactgccatattttgcaatactggatcatcacacttcagtgtttcccgcaacaaccattcaattttccatacttgcatgaagtattcattggaagttggataagatgtacctaaaaaaaattcaaataagataattaaactataaatataaatctgaaactatttattataattatgaaatttgaaaaaatatacctgaaatcaaattagtcatattataaaatggcttcaaaaattcacacaattt

SEQ ID NO: 27936 - DNA, 406 bp, Glycine max
  unsure (1)..(406): unsure at all n locations
agcttccatcaggatgtcttattgagtcccgtaatatatctagacgctcgaaattgaatgttgaacctctgagcatattcaaacgacaataactgtttactcggatgtctgattgagtcccgtaatatatcgagacgctctaaattgaatgttgaacctcttagccaattcaaacgacaataactttntaatcggatgtctgattgagtcccgtaaatatatcgagaccctctaaattgaatgttgaagctctgagccaattcaaacgacaataactttttactcggatgtctgattgagtcccgtaatataacgagacgctcgaaattgatatgtgtaactctgagccaattcaaacgacaataactatttacttcgatgtctgagtgagtcccgccatatatcg

SEQ ID NO: 27937 - DNA, 316 bp, Glycine max
taaacattcaatttcgagcctctcgatatattacgggactcaatcaaacatccgaaaaaaacgttattgtcgtttgaattcgcacagaggttcaacattcaatttcgagcgtctcgatatattacgggactcaatcagacatccgagtaaaacgttattgtcgtttgaattggctcagaggttcaacattcaatttcgagcgtctcgatataatacgggactcaatcagacatccgagtaaaaagtcattgtcgtttgaataggctctgaggttcaacattcaatttcgagcgtctcgatatattacgggactcaa

SEQ ID NO: 27938 - DNA, 433 bp, Glycine max
  unsure (1)..(433): unsure at all n locations
ctcgaccgcgatccttaagcacctgcangctgaagcttgtggantatggagtacccatcacatgtggtactatgtggcggtcgggcgatggtgcacaacaagttttccacatccacaaatcgcgcataaacccaccatccnctgttgcccacctccaactgagctcacgtactcccacgtagcccatatcctcgcttctctcaacaccgggtccccatcaatcctcccaagcttccccaacatccaagtaactcaacattcaaacagcacatactatcacagccaagaaaacagagcaaaggcagaaaaatctgccaaaacaccaaccgaaatcacagctnttctcacttaaagaccctagtaacaattccttcgttccaattcgttaaccgttggatcgactccaaaantttactggaagtctctagtgcat

SEQ ID NO: 27939 - DNA, 336 bp, Glycine max
ttagccttaggttttccatgtttctcatgttgttgctccctttatctctaataataagcctatcttgcaataatattcattgtcaccctctttgagcctttaacaccttctttcattttgcatctcattataaaccaaaaagtgaaaaaccatgttgtcctaaactttagggagaaaaagggccttggacttgtttttggaatgggtttcaaacaagtgtgggggatttgtactttattttatgaaagttcctttgttttcgtcatttcattttcttatgacttgttgaaaagaaaaaaaaaagaaaagaaaaaaaaaacgaaaaaaaataaataa

SEQ ID NO: 27940 - DNA, 432 bp, Glycine max
  unsure (1)..(432): unsure at all n locations
agctnggctttggccatcagaaccatctcattctctacttcatccatcttgcaacanatattccagtcaagtgagtgtttctctgcatcaaacaaatcanatgtgatcttccaatcatctattcccatttctagattacctttccccatatccaccacacaattggcagttagcatgaagggacgacccacaatcagagggatttcagcatcctcttcaatgtccatgatcacaaagtctgtagggaaagtgaactgtcgcaccttgaccaanacatcttcaaccacgccataaggtcttgtaatggaatgatctgccaacaacaatgtcattcttgttggcataatttccagctctccaattcttctgcacatggagagcgacatcaaattaatgctagctcccacataatgaaagctttccaactgacac

SEQ ID NO: 27941 - DNA, 327 bp, Glycine max
tgatgtgagaaagcgtggaagagtcagtcttcctacttttgtttgttgaccacagagtggtacctggagatatgtcgcgggggtcaggagaccttggggatgtcacgtggggtgctattgccccaaaccaagcttgaccaatcccgacccaacccgggcatagtcagtcagtgagaacctgtgacgtacctaaacaggcgagctcctgacagtctaccaataaaagaacaaagttcacaaagcaaagaggcttgtgtggtggctggccagctatgtatcttgagtggtatctggaaatttagtctttggtaatcaattaccattcgt

SEQ ID NO: 27942 - DNA, 375 bp, Glycine max
  unsure (1)..(375): unsure at all n locations
agcttcataatgaatcaagagtgattcacagatgttntgatgataacanaacatgatgacaaaggtgatgacaaaaagctcaatggtcaatcaaagaatgagttcaagatattcaagatagaatcaagaacacttcaagattcaagaggaaagttgaagaacacttcaagactcaagaggaaaagttgaagaactcttcaagatttaagaggaaagttgaattcaagcatcaagattcatggatcaagcttcaagaaccaagattaagattcaagactcaagattcaagaatcaagagaagacttanacaacataagtatgaaatggtttttttcacaaactgagtagcacatggatttttctcaaacatgttta

SEQ ID NO: 27943 - DNA, 323 bp, Glycine max
tgcttctacataagtatctcttcatggcatcgtaatggacgtatcgttcctgcatttgtctcttatcatttcatgcattgcattttgcataagtcatttattcaccgtgcatctgcatctaacatgttttttgtacaccttctattttcatgttcgctcatgcatgatccttgcattttcgtctgcaaaacaaagaaagtcacaataaagctcaaacaatgcatcattcgcatacatccgtgcttttcattggttgcattgctcattgcattctttccaagaaaaccaaactttaatcattgttatcataagggaagaacgca

SEQ ID NO: 27944 - DNA, 217 bp, Glycine max
tcatacatttggtcgttgaaaccatagtgaagcactcattttattaccaaacaatccactgcttttcagtatgtatcaattcaactgagaaacatacttttaagtcctattcaaaccactcaaagagctgaaattattcataaacttagccttaaaactgacttttactgaggtaaacataattgaacataaactattaaatttcttaaaataagct

SEQ ID NO: 27945 - DNA, 273 bp, Glycine max
  unsure (1)..(273): unsure at all n locations
ctngtggttcgctggagcgtaatacaactcttatgtttgacaggttatcaaagagaccttgggactcatccgttagttacactgactaagccgatcacgacacgtttatggcatccgtactgccttaataagtaacctctgagtgctatgatgcgaactgtagttttataaataattcgacgaaaacacgcattaaatcggtaaatagaattcaattgctgtgcttatgaccgttgggctcctgatatacatctcttgggaagatgagaaacg

SEQ ID NO: 27946 - DNA, 325 bp, Glycine max
  unsure (1)..(325): unsure at all n locations
agctggccttgaatcagaaanttgtaccagtcgcaagagtctgtggtttatgctcctctgctgaccaccatacagacctctgcccttccatgcaacaacctggagcaattgagcagcctgaagcttatgctgcatacatttacaatagacctcctcaacctcagcagcaaaatcaaccacagcacaacaattatgacctctctagcaacagatacaaccctggatggaggaatcaccctaatctcagatggtctagccctcaacaacaacaacagctactgtgccaagcagaccgtacatttcttcaccgatccaacaatagcaa

SEQ ID NO: 27947 - DNA, 332 bp, Glycine max
tcctttacaacaaagagaagtgatgtaagctccattggagcttgtaggcctaggatcttcttcattaatggattcctttacttcttggaagatgaatggcagcggaatggtgaaaggaagagagagaggaggcgccacttcaaggagaagatgagtctagaagaagctcaccaccataagaggccatggataagagcttggaggaagaaggagatgaatgaggggagagggagagaagagcacgaaattttgtgctctaaatgagctttcaaatctgaattttaatattctaatgatcaaagttgaaaaaaatgcacacacatgacctctat

SEQ ID NO: 27948 - DNA, 256 bp, Glycine max
gtagtcatcccgtgctgagatcataatttatgtctgacaggttaatcaccgaatttctgcccttccatctctaatattccttattcaggcgtacaacctagcttttaagttccataacttgtttaaaaattacctcgcgcttctatcatgcacatctgtgtatcctttactatctgcctttagaatcctcatatcggatgaagaaccagagctccgcggatatgtctctttcctaggattattatgcctgtaaacc

SEQ ID NO: 27949 - DNA, 173 bp, Glycine max
tagtcatgttggagtatattctgttaattatatctgcttatggtaacactgtctctagaacaattgcattggattttatgatgaaatctgtgcgtcttcaggtgaaatagatgctaagtttcgaattgcataaagtagcagttgggctaagcgcatatccatcactaattgca

SEQ ID NO: 27950 - DNA, 320 bp, Glycine max
tgtaggattatggggtacccatcacatgtggtactaggtggcggtcgggcgatggtgcacaacaagttttccacatccacaatgcgcgcataaacccaccatcccctgttgcccacctccaactgagctcacgtactcccacgtagcccatatcctcgtttctctcaacaccgggtccccatcaatcctctcaagcttccacaacatccaagcaaaacaacattcaaacagcataagctatcacagccaagcaaaagcagagcaaatgcagaaaactctgctcaaacaccaaccaaaaatcacaactttctcactttaag

SEQ ID NO: 27951 - DNA, 398 bp, Glycine max
  unsure (1)..(398): unsure at all n locations
agctntatcaggtatggctttttggttgttgtgaagctctccaagggttgaatnttgtgtnagtttggtgttttgcctaaagggaataaatcaactcacgaatgaactttgggaattaactcaatgttgtcctcaaccaatgacttatgtgtagttttcttatatagcttgattataatccaaaattaactcacgtggcatcaaaatatctaaggaaactaaataatatgcccaagctttctttctgagaagattaaaataaaatagaaaaacaaggaaacagggaaatagaattaggatagtattacaatcttaacacttcgttgggcccttgtaaagacttagtagagatgtngtcaacgttatccttggaacaaacatatgaggtcttgatgatg

SEQ ID NO: 27952 - DNA, 338 bp, Glycine max
tggagatacttctagtctttagaaggaaacaagcattaatatttattgtataattattgtggggaatggtcatttaatttggatatgatggagttctgtgctgaaagttcccattcaaatcagaaacaaactttgaagcattttaaacctgcagatgaagtgaagagatccagagaaaaggcccacagaagttctcattccaatggaaagcaaaatctgaagcaaacttctacttttgttaatcatggtgagcttgtcactgtaagctctaataatcaataaaagctttggaatatacctaattgtgttaactgataatgaagtagctcaagaaaatg

SEQ ID NO: 27953 - DNA, 262 bp, Glycine max
  unsure (1)..(262): unsure at all n locations
acccggtgttgagagaaacgaggttatgggctacgtgggagtacgtgagctcagttggaggtgggcaacaagggatggtgggtttatgtgcgctntgtggatgtggaaaacttgttgtgcaccatcgcccgaccgccacctagtaccacatatgatgggtaccccataatcctacaagcttgagatgaggaagtgtagaagggtgaacttcctgcttttattcgttgaccacagagtggtacctggagatgtgtcgcggggg

SEQ ID NO: 27954 - DNA, 340 bp, Glycine max
tgggttcctaggcctagaattgcattcgggcactcattttaaatccttcatgctgtccctatacatataaaacagtcccacaacccaaagctcacaaaaccatgctcatatctcgttgaggcatttcaccgagcacttggtgggcgcatgtttaggcacgaatatcaagagaatggggacaatgtggcatgcgccatcacttcagaatacaccctaggccaaggccatcccttacaacccctcaattcaacaaaaacaagcaacaatttgaggataaatccctcacgtttcttagcaaacacatgcaatttagagcaccaaactacatcaatggaaagct

SEQ ID NO: 27955 - DNA, 348 bp, Glycine max
ctgcagcttcaaaaagagaattagcatattccatttgtcgctcaaacatccaaaagctgtaaaattgaagtcgtactatttggactaagactcttggatccatagcattcctagatgtttgatctcaccatcttcttcagaaaacacttgcctgatggatctacatataccctcaagcaacttacaagacaccattaacctcacccgccatcagcctgttgctaaaatctttattgaaagagatgttttaattctccatatagagtttatggtcatcacccactgccatcatatgaagcctcttatggtgtatgactttcgcctcttgttaccatggtatgtaaaact

SEQ ID NO: 27956 - DNA, 325 bp, Glycine max
tatatgttttttagttgccttgtaccatgctcacctaatccaaaggtcggtattgatgtttatctagagcctttgattgatgatttggagaagttatggagtcgtgttttgacacatgatgtgtcaaggaagcaaaatttgatgaggactattaatgacttccctacttatggcatgttgtctggttgtggaactcatgataaatttttttgtccgcattgcatggagcataagaagttgtttacattacaatatgagaggaaaagttgttcatttgactcgcatcgtaggttcttacccagcattcattcatttaggactaaca

SEQ ID NO: 27957 - DNA, 282 bp, Glycine max
  unsure (1)..(282): unsure at all n locations
agctntcacctttggtcctcctcatagttggtgcatgataaaacatgctctattntcatctcccactccaagtatgcctccggatcattctttcctttaaagggaggaatgttgagtttaataccatcaattcggttttgtctaagaacaccctcattccctcttctcctcctttcttcttcattatgatctctattctccatttgatccaacctctcatggagcgcataatctctttgtttcattaacctctccaaatgttgcatcaaagcttgcatttgg

SEQ ID NO: 27958 - DNA, 330 bp, Glycine max
tatgctgcaaacatttataatagacctcctcagcagcaaaaccaacaacaacagaataattatgacctttcgagcaatagatacaatctaggttggaggaatcatccaaatatgagatggacaagtccttcacaacaacaatagtttgtccctcctttccagaatgttgctggtccaagcaagccgtatgttcctcctccaatacagcagcagcaacaacagtagtcacaacaaagacaacaagcaactaaggctcctcctcaaaattccttagaagagttagtgaggcaaatgaccatccagaatatgcaatttcagcaagagacaaga

SEQ ID NO: 27959 - DNA, 300 bp, Glycine max
  unsure (1)..(300): unsure at all n locations
agctntctctnttctctcaataggtcttcattcttcttcatctnttcacttctattccaccactttcttacaccaaatttgtgatttctccattggtgatgatcatggagggctaaataattaatcaatccaaggatccactccaagtaaagctgaattcgggtcttggtttgggtttctactctntgtgaatgttctttctcttcaatcctattnntcattttcatgattgtgattatgtctaggattaaaaatggattaggttatggattcatttcctaatttcaaaaattaatcaca

SEQ ID NO: 27960 - DNA, 342 bp, Glycine max
agagcatgatccattggtaaatcttatcctaatcttctagattagtgtgctaacttctattgggatatgagtactcagagtgaaccttgtacattgcgactcaatgcacagtgcaattcttgcacatatggaaatctagctcaaataatttctgtatctctgtcaagctttactaaaccaatcacatacacacacacacacacacacacacacacacacacacacacacataacatgaaaatcaataattaaaagcatataattgctgcagctaaatacgcacaagcacaaaagacacaacacaaagttttctctgtcagtctgagttgtaatttttttgga

SEQ ID NO: 27961 - DNA, 221 bp, Glycine max
  unsure (1)..(221): unsure at all n locations
agcttcttattagacctcagggatcggtcatctttcctggccgacgtcgactgtcattnttttcgatcaatatcggtgaattatatttttctgccgaggtgggctaacgtttttctggccaaataaatgggaacatgcaagtttccgtcgaaacataacgtcggttgagctcgcacgacaaaacctacccagcctacattgtagaatttttaagccacacc

SEQ ID NO: 27962 - DNA, 333 bp, Glycine max
tctatataagctgaaccattttatcaataaacacaagttgagttttattcagaaaattagagtttatctcttttatcttagtgagagtgattctcctaaattcttgagtgattcaagaacaccctggctgtattaaaggtcattcacaacctttgtgtgttgccctcgctggaaagagtgattctttccttcctttcatcttcacccttgttctttcaaaccacaattccagaaaattcacctctgcccagaattatctcgtggccataactcccattttacgcactcaaattaagtgattcttgagcctaaattgactttcaaaacgagacc

SEQ ID NO: 27963 - DNA, 335 bp, Glycine max
  unsure (1)..(335): unsure at all n locations
agcctttcctcattctctggagggagtggcaaaagaatggctatactacctcgctcccatgtccattntcagttgggatgaccttaagagggtgttcttggagaaattattccctgcatctaggaccactgccatcagaaaagacatttcaggcatcacgcaacttattggagaaagcttgtatgagtactgtgaaagattcaagaaattgtgtgcaagctgtcctcaccaccagatttctgagcaactcattcttcaatatttctatgagggacttaacaacatggagaggagtatgattgatgctgctagtggtggagctctcggtgatatga

SEQ ID NO: 27964 - DNA, 329 bp, Glycine max
gctttcaaccatggtggttaagcactattttgagtttttgcgatgggtgattaagcattgaaatgttatgatttttgcttctgtattgagtggttaaatattattttgacttttactcttgatggttaagctttattatttctatcatatgatggtaaaacattctcattgatttatgcttgtcaaatgattaaacttagagatatagattttgcttggtggttaagccttactttatgcctttgattattttagcttctacctatggtggttaagcttccttcatatcattttcagccgttgtatttctcacatttttctttcattgg

SEQ ID NO: 27965 - DNA, 335 bp, Glycine max
  unsure (1)..(335): unsure at all n locations
agcttcagcccagagttaacanaactgttaaagaggattaatatgatcaataagtccctaatacatattcgggatttccaataaggtacttatactttgaaagttggtaattaggtccctaaaatttcaaaaatctctaattgggtcccttctgtagttctgctaaagaactgttaacagtaagcagaatccaaggagccattataacattactggatcccccatacttttaagtgatttctaattgggtcatcaaatctatcttaccattagaaatttctaatgatagcaataaggaacttgtccaggaccaactttcccagaagtttaaactg

SEQ ID NO: 27966 - DNA, 342 bp, Glycine max
tagaaacccaaactttttaaagctttaatgcaaggaaacatgtttatggctaggaatccaaaacttggttttaggcttagaaaagcatgaaaatagggacctttttataagaatttgagctgcccccatgattggcactttgcacctaagtaacgtgggggatgcttgtcaataatgtgtagatatatgtgtaaatatatatagcaaaaatgccttacaaagtgaatgaatagtaaataatgcatttcaaaatatgtatatttgtggataaatagcataaggagtctttcaaaaaagaaatgtgtgtgcctatgccaaagatggcacgagaatgcttcccaa

SEQ ID NO: 27967 - DNA, 448 bp, Glycine max
  unsure (1)..(448): unsure at all n locations
gatctctgagtcacctgcggcatgcaagcttcttaagaaaacttccttgagaagcttctntgatgaaactttcttgagatgctagagcttanctacacacacccatctaaaaactaagctcacctccttgagaagcttccttgagaagctagagcttagctacacacccatataaaaactaagctcacctccttgacaaaatacatgaaaatacaaaagaaaaagtccctactacaaaaactactcataatgccctgaaatacaaggctaaaaccctatactactagaatggccaaaatacaaggcccacaagaaggaaaaaatctattctaataattacaaagaagagtggacccaaccttgacccatgggctcaaaaatctaccctaaggttcatgagaaccctagggccttctgtagtnnctctatcccaagcctcttggagtct

SEQ ID NO: 27968 - DNA, 340 bp, Glycine max
taataatctatggcttgaaacaagcctcccgccaatggtatctaaagtttcatgatgtcatcacttcatttgactttgaagagaacatcatggatcaatgtatataccaaaaggtcagtgagagtaagatttgctttctgtgttaaacgtggatgacattttgcttgcaactaatgataagggtttgctatatgaggtgaaacaatttctctcgaagaactttgatatgaaggatatgggagaggcatctcatgtaattggcattaagatccatagggcaagatctcgaggcattttgggtttgtctcaagagacttatattaacaaagttttagagaga

SEQ ID NO: 27969 - DNA, 284 bp, Glycine max
  unsure (1)..(284): unsure at all n locations
ctttatagtaaagaacttgtgtccactacttgtaattaaccagtgtttaaaaatagagtatctattgttgcacatacactagaactatatgactttgcttaaacattntattcattcacacaagtcaaagtctagtactcaccgatggtaagatcactgtaaagagaagtaatgtaatgttgctttttacaagtcacatctgcctttctttttgtgtgaataactttcttattcaagcaaaagtaatcagaagagcactctcatcttttatcattatcacagta

SEQ ID NO: 27970 - DNA, 321 bp, Glycine max
tcatgatgatgaaccaagcaattttgatgatgccaaaagcctaagtgattgattcaagattgattcaagacttcaagatcaagcatcaagaatccaatccaagattcaagattaaaaagaagaagtcaagaagcaactagtcaagacttcatatgggataagtattaaaagattttttcaaaaaacaaatagcagagttttgttttacaaaagaattttctcaaattttctaagttactagagtgattactctctggtaatcgattaccagttgactgtaatcgattaccagtgaccagtttggctttcaaaatgttttca

SEQ ID NO: 27971 - DNA, 419 bp, Glycine max
  unsure (1)..(419): unsure at all n locations
agcttgtagcaatcactagtaattaagaattgtactttataaatatataacatttaaagntttgcgggttatggaagtgtcggagctgcatgattgaacatctgtcaactttatatggactattatggtactgatttcaagcttcgattcagggagttaatttgtttcttgcgtattttgatgattgaaaactttctaaattctactgtaaggagatgtgaccaaacttttcattatcaagtgcttataacatgtatctgtggctcttttctgcataattatccagagcagattagctgcatatatgtatcttgtaacaacgttatagttgcataaatgatgctctgacatgaccaaagtgaatagtgttgcaggaatttgctatcatggattaattgctagaattggcaagcattttc

SEQ ID NO: 27972 - DNA, 331 bp, Glycine max
ttatagcttgatttaatgtataatgttttggatttagagcattgttggatattattattgtgtttaagtttgttattgaacatgtaatgaattatttatattttaattttatattttaatatttgaattaacatgtatttatttaattggtgttcattttaacatttagaaaagattatgtgtgcattattatgccaattaaaaagtaatccactgataaaaatattagtaattaaaaatagtaataaattatgactaattttttttacaataatatcgataaccattgttgttataaactctaaattgtgacgattaaattatcacaatt

SEQ ID NO: 27973 - DNA, 526 bp, Glycine max
  unsure (1)..(526): unsure at all n locations
ttggtttgtcgtcgctccatctcagagccacctgangcatgcacgcctgtcaaaaatgaagcgcgtananaacactatccatagtaattatgttgtgtctacttcgaaaccccgcgaacttctatagaaccccttgaactacttcacatatacttagttggttcctctagaactatgagaccgggtgtgtatcactatgacctagtgatagtagatgaatactgaaggttcacatggactctgtctttgaaaccaatatgaatcttatgtgctttttcagactagccatctattgtaaataactacggctcacattgtacacttgaagtgatcatgatgtgaagttcaaatagatcttgaaaagtttggaccaaaatggattaccacactcttttgcccatacagcttactaatgggtgtgtgagaaaatattccttgtaatgacactactttttaaggacaagaacctatcttctggtatgtgactactgtgctccttcacaagtcttattaacattgagaaact

SEQ ID NO: 27974 - DNA, 344 bp, Glycine max
tagacttacgaagacttcctgacaaggctaggcatcaagcacctagtcaactctatcgaacatcctcagactaacggacaagtagaggcaactaacagagtcatcctcaaggccctgtgtactagacttgacaagtctaagggcctatggaaagaactctactacatactctcggtgaaccactattcaccctagatagcaaccaatgaagtcagggaaccgtcgacaagaagactattgttccaacaacaactaaatgaagaaaatacaatggtggaacttgaaaccaccgaagaagtccaagaaacgacaaggattagagaagaagctgccaaactccgagc

SEQ ID NO: 27975 - DNA, 384 bp, Glycine max
  unsure (1)..(384): unsure at all n locations
agcttgtgcaaatcanatcactcctacatttcatctctatcatgcattntctntctttacccactcctcacgtttggttttctagggaaaaacaccataactaaacgcgccgcaagggatccctatcgcaccagatccaaatctagaatgatgggtgatcaagaggagacgcatgaacagatgaaagccgacatgtctgctctgaaagaacanatggcctccatgatggangccatgttaagtatgaagcagctcatagagaagaacgcggccaccgccgccactgccagttcggctgccgaagcacacccgactctcttgtcaactacgcaccatcctctctcatacatagtatgacggggaagggacacactgtggcacgat

SEQ ID NO: 27976 - DNA, 337 bp, Glycine max
tctcgattcattctatgcacccgtagtggtccacattgtgtttcgtgcatttttattctcgttgtgtttactttttataccccctcttgacgtgcttaagccattttacttaagtcatttctcgcttaacttaaaaataaaataaatttccaccgaacgtttgaattatattatccgttaacttcggttaaaatcaattccgaccgttcggtcgtgccgtaaccacgttggaaatcaaaaagaggtaaaaaataatataataatcaaaaagacatcttttagtaaaataaagcggaaaatcaatcggacgttttctctttgggatttctcattctta

SEQ ID NO: 27977 - DNA, 327 bp, Glycine max
  unsure (1)..(327): unsure at all n locations
agctnntagatgccttanagttttaaggctgaagttgagaaacaatgtggaaaacaaattaagatcgtgagatcagatagaggtggggagtactatggtagatacacagaggatggacaagcaccacgttcatttgcaaattntnttcaagaacatgggattgttgcccaatacactatgtctggttctccggatcagaatggtgtggcagaacgaagaaatcaaaccttattagacgtggtgagaagcatgaggagtaatgtaaagctttctcaatttttgtggattgatgctcttaagacggctgcgtatatattaaaccgagtt

SEQ ID NO: 27978 - DNA, 336 bp, Glycine max
tattaccatgagcataagtgcatagctacaagaattgagacctctttcattatgttgctgataaatgaaataacattttcatttttaattatatcatgttattctcaacatcttctgattgcttggtttgaaagtttgggactgagattatgtgtctaaaaaccaatagtacatctttcttgcgcctcagtaattctcaagcatttctaataaaattcataattgtgctttttaggcttgacttggattcctgtcacttttcatcactccttttgtcgaaaggcttaaaagttatgtgttaggagtgaggacaattagttgggacagttatgatag

SEQ ID NO: 27979 - DNA, 181 bp, Glycine max
taccaatattaaatggtctaagatgtaacaaccaagatgacaaccaataccaatgccactcaatggagttggggatgtaaaaaccaaaacttcttcaagctctagcccttatggtgttcagaagctagctagttagttaagttgaacatcctttagattgctagctgggtgaaatcaagct

SEQ ID NO: 27980 - DNA, 329 bp, Glycine max
ttagttgaaattaagttatttaattatataagttcttgatttaatccaaacttctccccccttttggcatcaacaaaaagccaaaatgtgtatagagacataaaatcatacattcactcataatcatccaaacaaggaagacaataatgcatacataaactaagcaaggatgataataattcattcataaactataatatatgtcatataatttagagattcatccaagataaccaaattaaaacaactaaattagaaagtaacatactaataagtgtttcaaaaaacagtcataagacatcaaaacataaaatagatcatttttctaa

SEQ ID NO: 27981 - DNA, 443 bp, Glycine max
  unsure (1)..(443): unsure at all n locations
agcttatgcgcatatttccttacanacgttctctngcactagacattctattaaccgaagaaaatgcacccatatacaatcaaggcagcttcgttacctagattatntacacgtacttccaaggtgtatttgttacttacatcacacacatctccttggctaaattcacatacatgcatactcaaagcagtttgggggaccaaaaattgcacatgtgcacatcttggtatttctaatacctatacatacacaaacctcatgatgaatcttgactatctacacaataaggtgctacatttcatgctcttgtcaagtttttgctacctaacgccgcatgcaaattcaagtatatattccttcgctggctaacagtgtattcaaattaaaacgtatacatntttntggtaatgtatcttctttacatagcatgcaacatatttatg

SEQ ID NO: 27982 - DNA, 327 bp, Glycine max
tctatataagctgaaccattttatcatttaagacaagttgagttgtattcagaaaattagagtttatctcttttatcttagcgagagtgattctcctaaattcttgagtgattcaagaacaccttggctgtatcaaaggactttcacaacctttgtgtgtcgccctcgctggaaagagtgattctttccttcctttcatcatcacccttgttctttcaaaccacaattccagaaaatccacctctgcccagaattatctcgtggccataactccaattttaagcactcaaattaagtgattcttgagcctaaattgaatttcaaaac

SEQ ID NO: 27983 - DNA, 383 bp, Glycine max
  unsure (1)..(383): unsure at all n locations
gctttagggacggattgcgagagggccaaatgtcttgaaaccaaattaagctggtatccaaccaggcctaaatagttcgattgaacacctgtacgacaagacaggatctgtggattcaagtaaaatgaccatatttcgttcacttcttcttcattgtccggatcaacagcaggaaaatagtcagtgaaccaggccgggccaacctctcgactaatgaatggagcatgttgaggaagaaacttgtcaaagctcagaaaaatcctcatgtactttaggaacaacttttgtgggttntgatctaaggtcttgggtgttaatcgaagtgctctatggccttcgatcgagcgatntgcaacttcttcagcataatcttgtgggatatt

SEQ ID NO: 27984 - DNA, 342 bp, Glycine max
ttacaaatgggtaaaaggctcacattcactttcttctacatcatattcaaacttgtccaaataaataataaaggcatctcgactcaaagaaagccatataagatctcatacaattgatatagaacctatatcctaatgtcacatcctatcagagcgtggtgttcccgtgtcctctagcatgaggttcttcatagtcatccacctattcatctgctgccccgaacacaaagttcaaatcatcacaggatcgaaacacaaacagcaaaccgggagtgagttatcacattgctaactactagagagaaacaacacagcatatagtgaccaaatacaatttactta

SEQ ID NO: 27985 - DNA, 472 bp, Glycine max
  unsure (1)..(472): unsure at all n locations
agctngcttgtggagcttctatggaggctggatctntgagcttcaatggngtcctnntaatggtgatttccaccatggagatgcagcagaagacaaaggaaaggaggtgagaggaggcgccatccattaaggaagaagccatggaagaaggagcttcaccaccaagatgagccttggataagaagcttggagaggatgcttcaatggaggaaaagaaagagggagagaaagagggaggggggagcacgaaattgaaggaagaaaaagggagagaagttgaactttgagttgtgtctcacaagactctcattcatcanagttacaacaagtgttacacatgcttctatttatagactangtagcttccttgagaagctttcttgagaaaacttccttgagaagcttctttgagaaaactctcttgagaagctagagcttagctacacacanccctctcataaataagctcacc

SEQ ID NO: 27986 - DNA, 333 bp, Glycine max
tgtagggttaaagtctcacgattgtcacgtgctcatgcaacaattgttagccgtggctatacgagacatctttccaaacaaagtcaggttagccataactcgcctgtgctttttcttccatgctatatgtagctaagtcattgatcctgtgaagtttgatgagctggaaaatgaggccgcaattatactgtgccagttggagatgtattttccccctgctttctttgacatcatgattcacttgattgtgcatctagtcagagaaatcaaatgttgtggtccagtttatctacggtggatgtacccggttgagcgatacatgaagatcttaaa

SEQ ID NO: 27987 - DNA, 419 bp, Glycine max
  unsure (1)..(419): unsure at all n locations
agctngccacccagctcgcccaggcgagcatggttgcttgttgcttctggaggaatcttctggagggcccaagtgggcctggttgctatttgcacccccacttttactaagtacacccnctgcccttntttttggtgattctttntcgtaaagttacggaaacttactaatttcgtaacgatacttgttttctttccttaatgttacggaaccttgcggattacataatcatcctctttttgacttacgaaatgttacggaacctcactaattgtgcaacgatgcttccatttgatttccggtgagtcacggaaccttacagattgtgcatcaatattttcttttgtttttcggcatgttccggaatttcacaaatggcctaatgatgggtgccaagcacctcacaaggaccaaacaaa

SEQ ID NO: 27988 - DNA, 324 bp, Glycine max
tgcctcaaagaggtccaggaaggacaaggcggccgaaggaactagttccgccccggagtacgacagtcatcgctttaggagcgttatacaccagcagcgcttcgaagccattaagggatggtcgtttctccgggagcgacgcgtccagctcaaggacgacgagtatactgatttccaggaagaaatagggcgccggcggtgggcaccactggtcactcccatggccaagtttgatccagaaatagttcttgagttttatgccaatgcttggccaacagaggagggcgtgcgtgacatgagatcctgggttaggggtcagtggat

SEQ ID NO: 27989 - DNA, 556 bp, Glycine max
  unsure (1)..(556): unsure at all n locations
cgcgattgttctactcgaagcgattctcagagccacctgaggcatgcaagctntgacagtntgctagttatggttggccaattagatttggaagttcattttgggganccggccaaaatattctgttatggaactatattcctcacaagaagaatagctcgaatataacacccagaagattgttacgtcaacctttatatcttgaaatatgcagaattattttgagaagatagatagaggaagagggtcatcaccatagtcggcggaagaaattgttagatgtatgaactggcgctctgttctttgacagaanaacatggtcttcctttaggggttggagaggtctagctcattactggtgagcttctacagtaagcctccatgaactgatccaaactggattttacctatgcagtttgtccatctgtggtgttgatcaccagcctctgcactgcaaaacacatgctcttttatcatgcaccacttcggtgggcgccacctgaaagaacgtggaactgaagctgttaccaaaaaactgattatatttctggcaatg

SEQ ID NO: 27990 - DNA, 336 bp, Glycine max
ttggatttttacactgaagagctctgatactaggtgcgcctttttcttctgcttcctactccttttataggcttagggtaatttacttttcacgctgacttcacactgagtgcgcattctgcgcgttaagcgtgcactaggcttttcctcgtggatcttctcgtgctaagcttggcctatgttgagcaagagcatgcgctgagtgatacttcgtgctaagtctggaattgcccgttaagcgagagttgcacgctaagcctggattgcacgttgagcaaattgtctaattcttccgactcttcttcaattctttttcttccacattattttgtcaat

SEQ ID NO: 27991 - DNA, 653 bp, Glycine max
  unsure (1)..(653): unsure at all n locations
cagtattgactgcatcttctactacnggtaagttngtattanttnnnttcgtctcccccancnaaaaaacgagcttgtgccgtcgacctgcgatctccagagcnacctgaggcatgcaagcttntacatataatntnnagctgttcgatatattgcgtgactctttctgacatgcgagataaaagatatagtcgtgtgaatctgctcatagtcttcctgtatttcatcctcgagcgtcttgataaattacgggactcaatcggacgtcgtagttataagatatagtcgtctgaatatgctcatagctacggtgatcccaattcgagacgtgtcgaataatcacgggactcaatcagacgatccaagtaaatgtattgacgatagaatcagctcaatgctacgatcttcatttcaagcgtctcgattattactggacttaatcggacgttcgagataaaaggtactgtcagttgatatatgcttagagcttcctacttaaatacttagcttgtngtgacatcactggactctattacacattctatagtaaaggtcatcgtcttcgaattgctacagcttccatattacatctaacggtctcggatattatccgactaacagatatccgattatattgactgtgacgatatccc

SEQ ID NO: 27992 - DNA, 336 bp, Glycine max
ttgagaaaattcaaacgacaataactttttactcggatgtctgattgagtcccgaaatatatcgagacgctcgaaattgaataccgaagcgctaagcaaattcaaacgacaaaaactttttactcggatgtctgattgagtcccgtaatatatcgaaaagctcgaatgtgaatgtagaagctctgagcaaattcaaacaacaataactttttactcggatgtctgattgagtcccgtaatatatcgagatgctcgaaatggaataccgaagctcggagcaaattcaaacaataataactttttactcggatgtccgattgagtcccgtaatatatc

SEQ ID NO: 27993 - DNA, 656 bp, Glycine max
  unsure (1)..(656): unsure at all n locations
tagattcgcccancacagcatcgcaggaccgantatatgtttnatgtcatantgatngtaatntntcncncannnaccgnnaagacgaattgaacctgtcgtcactgcgatcctncagagncgacctgcagggcatgcagcgtgcctgacagaagtacaaaacagtatatgcggccgataggacttatttccgttcctgagtatgacagacaccgcttgaggagcgctgtacaccagttgcgcttagaggccatccatggatggtcggttcgaccggagctacacgattaacttatgcgcgatcagtataccgctctccattaggagagacggctccggcgtgggcatcactgttacctccttgccaattacatccagaatattccccgtggtgtatgtcgatgcctggcctacataagagggcgcgcgtgacccttggtcccagcgaaagggaatacggatcccgatagaagcagacgctatcggccatctcctaggatattctagcgtgtgagatcatagtcactattgtgaaggttgcctatgatgaaccgggctcatgtgtgagtgatgtggatccagaacactgctttcgatacaggtgcgagattccctcgactgttgttgaagcgacgctgatcgtgtcgccactatcg

SEQ ID NO: 27994 - DNA, 331 bp, Glycine max
tcaacctagaggagacgaaccattccaagtgttggagaagatcaacgacaatgcctacaagattgacttgcctagtgagtataatgtaagtgccactttcaatgtgtctgatctatctctttttgatgcagatggaggagccttggatttgaggacaaatccttttcaaggagggagtgatgaggacataaccaagggcaaggaccatgaagcacttgaaggtcccatgaccagaggcagacttaaacaagcccaacacatcatagagacaaggctggtcatttgtatagctgtcattgatgatgattgaaagcccaagtggagaaagatg

SEQ ID NO: 27995 - DNA, 601 bp, Glycine max
  unsure (1)..(601): unsure at all n locations
cgctatgctattgctctntactcatgcgtttctctacttngaaatctantatttagntacatttactncncnaccggcacgaggattgancctgtcgacnctgcgacctccgagacgacctgacgcatgccagcttcacaaatccacaatttcatataataagcctaactcacataatatgttcncagcggagtcacctactgtcgcaacgagcccttctgcgggcgagcgaaagcgatgctcactggtgcgctttccataggaagaaagatgcacggagtctccaccatacgttatttgtgggaaacgtctgaatatcgaagaaaccggttgaaatgaaattctaagttcgggaggtgtatttacgcatgacgaaggtattagcacctcttattttgtctctatgacaacatcctttcataaaattgtggaaatggtatcctaacttctgtcttttattttgaggtcacaaagcggctcttgtctactacctcttcaagagaatcaactcgtgtctttttaagggatcaacattcttttcttgaagtgtcattaaagtgagacctaaaataccttactgtcaagaactgtatcaccttcn

SEQ ID NO: 27996 - DNA, 331 bp, Glycine max
tctcagatccagtcatggaaagacttggcaactgccttcattaggcaataccaatacaacacggatatggctcctgatcgaaaccaacttcagagcatgaccaagcgggaacatgagtccattaaagaatatgctcaaaggtggagagacctagcggcccaagtcgtcccgtcgatgactgaaagggaaatgatcacgactatggtagatacgttgcctacgttctactatgagaagctgataggatatatgccggctaactttgcagacctcgtcttcgccggagaaagaatcgagtccggactgagaaaaggcaagtttgaatatgcct

SEQ ID NO: 27997 - DNA, 196 bp, Glycine max
tcagcatcaatctttctctctgttgatgacttaatacctttaagttctgggtgtccggtgggccaccccggcgaaatcacttgaaaccgggtggttcttgaggctaattgtttgtggaggacgtatcttcatcgagaaggtacctttaattcgtcttgagttactctatatttctctttttaagtctaagggtata

SEQ ID NO: 27998 - DNA, 295 bp, Glycine max
tggaatttaacttcatccaacaaagattttaccattactgggatgtttaattcaaaaataaacttgttccttgctttccatatgcagtgaattatgtaacagcagtgccttttgggttttttttatttagataaaataaataaataaataaattaggttatcaattccgtcattatataaagggtaaatagtcacttttgtccctcaatgtgtaattcgttgacaaatatattcctgaaagataaaaatacaaaatttagtctctcaaagagtaaaaaatgccacaaacatatcc

SEQ ID NO: 27999 - DNA, 333 bp, Glycine max
tggtggcaatcacattccaagtggccttaccctaccgtaagtttgataaataagaactcaataagtacatttttacatcaagctttttgggaaaaagcttttaaacatataggccaagtttggattaatatttagtttgtgggagcttttcaattgaaatagtattaagtatttgattattaacttacaagaaagtccttgtaagtttattggcaaatacagagaaaattaaatgagcttagaaaatattgaggtgttataagttaattttaacttatgagaaaagtttgatttcctcagtttattttattttcttctcttacaagagtgctt

SEQ ID NO: 28000 - DNA, 349 bp, Glycine max
  unsure (1)..(349): unsure at all n locations
agcttcttatccaaggagattctnggtggtgaagctccttcttccttggcttattccctagtggatggtgtctcccctctccacttctcctttaccttccgctgcatctccatggtgtaaaatcaccattgaaggacctcattgaagctcanagatccagcctncatagaagctccacaagcaagcttccatcattaaggtttcattatttttgggccttgtatttagggttcataatataggtaaggtatcctagaaatgtagaatttntaagcccttgtattntatggcacctagactagcttttgtattaggggtagtttcgaatttcacatgcattaagtgaata

SEQ ID NO: 28001 - DNA, 336 bp, Glycine max
taaggagatttagctttttcagctctaacttttgcatctcaggatcaagtacctaagtccccatatcaaccttatttatctagactttgttccaagtttgccatgccaagatttgatgtcatctaaacataaggtagaatttgacattaacatttggtttagcaagaatattcttgtagggaatagatggaggcaatgaccttgaaggaagtagtcactcagtagcttgttgttgatcctttctttttagacattgatcaatattttctaagagagttaatggtctaataggttctgtagtggcttgcatcactttcctttgttctagccctgctt

SEQ ID NO: 28002 - DNA, 398 bp, Glycine max
  unsure (1)..(398): unsure at all n locations
tgcaagcttgcatgattacattctcncnctntctcaagcatattcttaattcttctcgacatcatcaaaatcttcatgatttacattctcccctntttgatgatgacaaccacctgtatgttatgagccacaacaaagaaaaaatatctanttgcatatagntcacctccccttggttttgcaatgattgcttatatgagacagttgaagatnttcatattttcatatgtaaacaaattgtctcataaacaatagataattgttcttactattctatcttttatctttctctccccctttgtcaacatcaacaactaatcatgaatagagaggagaaagatgttaccacatgttgcaatgtatgataatcaagtgataccaaaggcattaaaacaatc

SEQ ID NO: 28003 - DNA, 330 bp, Glycine max
tttcctttggttgctctgataagctttccaaacgttagagagaaggagaagagattgaagccttcattccactgtctgcatgaaatgagtatttctccctccctagacattattttccacatctcaacggttaaaatgtgcgggacttaatttcaaacctggtgtccaaatttcacaatgatccaacggttaatatgtccaggattgtagttttattgggacaagttttgggtctccgctggaaatggaaaagctatgacgtgaagggaaattctttcaaatcctagtgctcaaattccaaccctgagaatgttcagaaatgagttccaa

SEQ ID NO: 28004 - DNA, 389 bp, Glycine max
  unsure (1)..(389): unsure at all n locations
agcttcaacattcaatgtcaagcgtctcgatatattatgggactcaatcacacatccgagtaaaaagttattgtcgtttgaattggctcggagcttcaacattctaattcgagggtctcgatatattactaggactcaatccgacatccgagataaaaattattgtcgttcgaattggctcagaggttcaacattcaattntgagcgtctcgatatgttaccggactctatcaacatccgagtaaaaagctattgtcgttttgaattgctcagagactcaacattcaatttctagggtctcgatatattacgggactcaatcatacatccgcagtaaaagttatcgtccgttgaatatgctcagaagatcaacattctatttcgagcgt

SEQ ID NO: 28005 - DNA, 305 bp, Glycine max
ttgagacaattcaaacgacaacaactttttactcggatatctgattgattcccgttatataacgagacgctcgaaattgaatgtttaagctttgatccaattcaaatgacaataaattttttctcagatgtctgattgagtccaataatataacgagacgctcgaaattgaatgttgaagctctaagccaattcaaacgacaataactttttactatgatgtctgattgcgtaccgtaacatatcgagacgctctaaattgaatgttgaagctctgagacaattgaaacgacaacaactttttac

SEQ ID NO: 28006 - DNA, 337 bp, Glycine max
  unsure (1)..(337): unsure at all n locations
atccttgagtcacctgcggcatgcaagctngaccaatcccgacccaacccgagcatagtcagtcattgagaacctgtgatgtacctaaacaaacgagctcctggcagtcaaccgataaaagaacaaaaaccacaaagcaaggaggcttgtgtggtggctggccagctatagatcttgagtaatatttggaatatggcctctggtaatcgattaccaagggtgggtaatcgattacaaggcttaaaaatgaagacaggaagttaagatggtctctggtaatcgattcccaatggtttgtaatcgattaccaggcctagagatgggatcaggaacgtga

SEQ ID NO: 28007 - DNA, 342 bp, Glycine max
tctgccagtcaaccttcgcagcctggtagtttgtctagtcttcctttttgtgattgcgctaggagaatctggaggtggaggggatctccggggtgttgccatggctgcatagaaaaagaaaataaaaaataagccaagttaattagcacaacgtacaagtatgaaattgtaatgaaagacaggtaattggaaattcaaaatgacaatggacaaggtaaatattatttgggtatataccgcattcaagtagccatattttcccataaaccttcatcatgatcgatacgatttgcatatacatcatcctcctcattttcagcatttacagaaggcatttgtgtg

SEQ ID NO: 28008 - DNA, 479 bp, Glycine max
  unsure (1)..(479): unsure at all n locations
atccttgagtcacctgcgggcatgcaagcttggctgcgcacgagctccgatttcgtgagtatttatagaagatgacgcattgtaatcgattacaggtattggtaatcgattacaggcccaataagccttctggtaatcgattacaggatgttgtaatcgattacaggctgcctgttcaagtgtaatcgattacattgagtggtaatcgattaccagagcctatcctaggctagtttctaagagaatatctatatttatgctcaaatacatcttatatgactaattntcactactaatacactaaattcaatcattcaattactatatacacaagaaatcatatattctatcatagaaacaagaattcaaacaagatcaaacaaaataatctacaatcaanagggtaaaagtaaatcaatcaatcaatcaactaatcaatcaaccaatcaattcctatttttctaaatctcttacatcta

SEQ ID NO: 28009 - DNA, 332 bp, Glycine max
tggaaggatgcttcaatgggggaaaagaaagagggagagaaagagagagggggggagcacgaaattgaaggaataaaagagggagagaagttgaactttgagttgtgtctcacaagactctcattcatcaaagttacaacaagtgttacacatgcttctatttatagactaggtagcttccttgagaagtttcttgagaaaacttccttgagaagcttctttgagaaaacttccttgagaagctagatcttagctacacacacccctctcataactaagctcacctccttgagaagcttccttaagaagattcctaaagaagttagagctta

SEQ ID NO: 28010 - DNA, 420 bp, Glycine max
  unsure (1)..(420): unsure at all n locations
agcttatantacctaaaggagagtggangatgattgaatctaattgcgagagacttgcgtaattttgctctgcctgcgatgtgaatggccacagggagaagctctatcctatgattcaaaactcactacacaggtcccaaaaccaaaatcactattaactgtccaatgtctcgaattcggctgcccaaaccctattcagccaacattgagtgttatggtcacgttacttcaanttaacaaacgggccaacttaactaattaggaagactcaaactaaaagtacttgccttcagttgaggtttcagttcagctaacacagcaaattagccgaatctgatactgatatgttaatggctggctccatatcatcaatttaagtacatctatggtattgtcagcaatagttaagctctatataca

SEQ ID NO: 28011 - DNA, 326 bp, Glycine max
tgtctctgaacaagacccagggcgtcgtcgggaagagtttcagcaagtctcacggtgtactaaaatatttttgtaactaagtctcatctaacatttataagactgaaccaaagagcattcaattaagaccatcatcataatatgctctcttagctctgtcctcggggttgttatacacacgggtctcctcctaagttttgtattagtgacctttgtctttaactgctcattaatcattattatgaggactgtgtaacgatttttggacaattattacaactccaaaggaggttataagaaaggttttccattattaacatgaaatc

SEQ ID NO: 28012 - DNA, 312 bp, Glycine max
  unsure (1)..(312): unsure at all n locations
tcgtctacagacagcannaaataatggntatacggatcaccactctagtatatccgccagtcagcgtgactcataagtgagtatgacagatcttgtgagcgcggaagatgacgtaaatctccgcgtgccaacgggcttgtcggctgagattgacgaatggcgcacaagacgacgttagtctgtgcgtgctatcaggcttttcgtcttacagactgcaaaaaagaatgtntatacggatgaccactcgggtatcttcgcccgtcagcgtgactcaaatgtcagtattacagatcttgtgagcgcggaagatga

SEQ ID NO: 28013 - DNA, 338 bp, Glycine max
tcttgaagttggaatgatatatgccatttccgatagttcatgggtaagccctgtgcaagtagtccctaaaaagggtggaataacactgataaagaatgacaagaatgagctgattcccacaaggaccatgaccggttggagaatgtgtatcaattatcgccttctcaacaaggcaacaaggaaacaccattttcctctccccttcatagatcaaatacttgagaggttagccggccaagccttctatttctttcttgatagatactcaaggtataattaaattcttgttaatccgaaggatcaagagaaaacaaccttcaattgcccatttggagtct

SEQ ID NO: 28014 - DNA, 414 bp, Glycine max
  unsure (1)..(414): unsure at all n locations
tacccatcacatgtggtactatgtggcggtcgggcgatggtgcacaacaagttttccacattcacaaatcgcgcataaacccaccatcccctgttgcccacctccaactgagctcacgtactcccacgtagcccatatccntcgttctctcaacaccgggtccccatcaatcctcccaagcttccccaacatccaggtaattcaacattcaaacagaacaaactatcacaaccaagaaaacagggcaaaggcagaaaactctgtccataacaccaaccaaaatcacagctgttctcacttaaagactccagtaacaattccttcgttccagatcgttaaccgttggatcgacgcataaatattactggaagtctctaatacataagcctacatnttgaccgtngggatctacta

SEQ ID NO: 28015 - DNA, 338 bp, Glycine max
  unsure (1)..(338): unsure at all n locations
tcaagaaaaagatggcctcagcaaattccttatttccagaagggaattctatcaatagacctccaatctttaatggagagggttaccactactggaaaacccgaatgcaaatttttattgaggcaatagatctaaatacctgggaagccatagaaataaggccttatatacccaccacagtagaaagagcttcaatagatggtagttcatcaagtgaaagcataactatagaaaaacctagagatagatggtctgaagaggatagaaaacgagtacaatacaacttaaaagccaaaaacacaataacatctgccctgngaatggatgaatatttcagg

SEQ ID NO: 28016 - DNA, 291 bp, Glycine max
  unsure (1)..(291): unsure at all n locations
cttgaagatgttcttgaacaaaatatctactangaggaatctatctcatagaaatatctcttagtaataatgctctaatatatgatttatgtggagaagatgatgactataactgatactatatttaatcatgtatcacaaacctatgctacaccaatctgttctctttatgtctatctttctaatcaatcagaatgtatcatctatcatccttatatctctattactgtctctctcttagagcgccagataacggattgtgcctacatgtttatcccatgacactatgtg

SEQ ID NO: 28017 - DNA, 332 bp, Glycine max
tgcacttgaggagggaaggatatttgcagctaatgaacaactttcttaactatttgtccttccgattttactggattcttatttgtcaacctatttttcataatttggaaaaaaataggaattatcaagttgtcatgacttaaacattcactaaaacccgatatatttgtgatttcaaattgaaagtgaatccaaaatagttaccgctaagaactctcctttattgaaaattgccgattttaatatgaatatatgataataataaatcatttataagaattaaatttaatgataaatgaacttatgtaaattttatttcttttttaaattat

SEQ ID NO: 28018 - DNA, 567 bp, Glycine max
  unsure (1)..(567): unsure at all n locations
agcgcatgatttgtcgcnctgcgatcncagagcgaccgaggctgcagcttagtgctctcaattttaaccaatattctacatccctatattgtattatctgacaactctttgtccttgatacttcatgagattaagttatgaagaagagcacttgtctgcaccatattctaaattaaaacatttctagagtaaaatattttaactgtatgtatctatcttaaagtgtagaagctcatgattggtattttaacttactacaaggacctctacaagtaagaatgagcgcaaagctatatatatatcgtctgtatacatatactctatgtctctatatatatatatatagttaatgacgcactgttaccttttatatgagctatgcattctaatatctgttggtaagatctatccaaatatgtaagatggttagattctattaaaatgagaatattccaacagcctgaatatatataattctaatatcatactgaagcgagtatgtgttgttctgtaccaatagttaaattcatcatatacctattggttgtaccaacaatataatctacg

SEQ ID NO: 28019 - DNA, 333 bp, Glycine max
tgtgttaagaggaagagtgatgtgattgatgtattcaagaaattcaaagtttcagtggagaaacagtgtggaaaaaatttagagatattaagaacggatggtgggggtgaatatgtatctgttgagtttgctgaattttgtgagaaagaaggcatcacacatgaagtaacacctccatacactcctcaacataatggagtagttgagaggaagaatagaactttgttgaacatggtgaggagcatgttaaagagcaagaaactaccaaaatatttgtggggagaagctgtgaacattgctgcatacatcttgagcagaagcccaactaggaaa

SEQ ID NO: 28020 - DNA, 339 bp, Glycine max
  unsure (1)..(339): unsure at all n locations
agcttctaggttagtgtaccagatgactgttgccccaaccaaactatcttgaaaganatgcatcaataacttctcgtccctggaatatgcacccatctttcgacaatacatntttaggtgattcttacgacatgtcgtccctttgtacctatcgaagtcaggtaccttgaacttcggatgtatgacgacgtctggcactatgcacaggtcagtcatgtctgtgaacggataatcgccgaatccttcaacgaccctcagtctctctttgatgagatcaagtttttcctttccttctgttgtcgggggcggccctcccaccgacataaacattggctgcgt

SEQ ID NO: 28021 - DNA, 281 bp, Glycine max
ttgataccaactgaagtacctgaaacacactagaagggggggggggggtgaataatttcactgataaaacctgaatattcattggctccctcttttagccccttagctgtttataataagaaagtatcattttaagcgattaaatgaacacccctggcaagcctaacttttgggagaaagacgcggcattgcaaaatttaaatgtcgatggacaacgattatatgggattcgtacttaactcattgaaggttccttttgttccatatacccttttcttatg

SEQ ID NO: 28022 - DNA, 342 bp, Glycine max
gagagagatcgatcacgagcacattgcatggtcttaaaagaagagttagcagcttgcttaaggtccataaggaacttgactcagcgtttgtgcgagacagagatcaacatgttggctatcatcaccaagtatcaataagaactaagtctagccacagcccacgagcatagggtggcaaacgagtatgcccaagtgtactcggaaaatgaggctagaggaagggtgatcgtactcgtacaccaagaggcaaccatgtggatggaccaatttgctcttaccttaaacgggagtcaagaacttccacgattgctagccaaggccacagcaatggtggacacctac

SEQ ID NO: 28023 - DNA, 333 bp, Glycine max
tctctgaagggcatggttatttccagtttcctaaaaatacccaaaaatctcgccaaatgatggtccttctccttcttggaaggtaccacaggatatggtacttccttaccttcgttttcatccttttcaatttttttattttttttctttttcttggtcattaaattctttttgcttgaccattatttttttctctttatcttgattgctttcacctctcacctcatttttcttgccatcagtacctttcttttcagcagttttctctttgtgcacaatactctcctcctcctcagcctccataaaccttttactccttgtcatcacatcttt

SEQ ID NO: 28024 - DNA, 328 bp, Glycine max
  unsure (1)..(328): unsure at all n locations
gtatttcataacttatataaatataataaattcttaaagaagaaaaacatcctcgtgacttctaaaatctgaaaatcaaattcatcaatacaaaaatataaacacagaccaaaagtatagaataaaaaacttgtgcttaagatcttgtttgatgtgggcttagcccactacgatttaacactaaaatgggccttcgtgtacaatagggcctttcgcttatgtgttgctagcaacacctacgctatactacgcatgacatgacnaatacagattacattgttagtctttgcaattttgacatgctntctttgtcgctgtcactcaacat

SEQ ID NO: 28025 - DNA, 330 bp, Glycine max
tcaagctcatgaattggttcacctcaaagccaaattcatctggaagctcatagcaaaacctaagatcacaattcatagaaaacttaaaacttagcagctaactagggtctaataatgctacttttggataagctcttatattggtcgatcaaagtcttgaaacaaaaggaaagatcaagcatatataagtctaagtgaggaaaagtatatgtatgtatcgttttgaaaactaatataatctaataagattttttgtcttatccaggacctagttcaattataatgattttccttagaattcatggacagtttatgatgattatgcgtatt

SEQ ID NO: 28026 - DNA, 369 bp, Glycine max
  unsure (1)..(369): unsure at all n locations
agcttagctacacacacctctctaatagctaagttcaccttcttaagatgagaaactagagcttagctacacacccnctataatagctaagctcacccccacgacaaataacatgaaaatacaaaaaanaaagtccatactacaaagactactcaaaaagccccgaaatacaaggctaaaaccctatactactagaatggccaaaatacaaggcccaaacgaaggataaacctattctaatatttacaaagaagagtggatccaaccttaacccatggactcaaaaatctaccctaaggttcatgagaaccctatggccttctttagtagctctagcccaagcctcttggagtcttctatccaataccc

SEQ ID NO: 28027 - DNA, 328 bp, Glycine max
tgatatatatatatatatatatatatatattgttattatttttgtcagtgagcttattggttttgtttaaggaaaagcaaagcatcaattgtttgaatgttgaacgttgaaatttgaaattgaagagtattttgacgatctcaggtaatgtctctgtgtgctggcccgcatgcatgtgtatcgagaacaaaggaggcggtcaattttcaacttcgttcaatatttctttattggattggatagtataatatttttattttatttacaactaaattattattattcttatcgctactatatatccatatttctattttactatctcgtt

SEQ ID NO: 28028 - DNA, 565 bp, Glycine max
  unsure (1)..(565): unsure at all n locations
tggatgattcactgcccgcgaccctaagcaccgcngctgcagcttataaatggatgaaaagtgcttcttaatgttttcattcaagacgaagcatatgcagaacaacctcccggaattgagaactcagacaagccttctcattgtcttagattaaaaaacgcattatatggcttacagcaagctccttgtgctcggtatgagcatctaagttagatccttttatataaggatgtctctagaggcaaacgagatactacttctttcataaagacgaaattacacgacatctatatcgttacaccaaagttaatgatctgaatcttggatctaccgatgaagtatagcgcaaggacgacttttatgacatgcaaagtgagtgttgtatgctcatgaatgtgagacattcattctttcgtggcttacaaagtaaccataacacgactggaaatatttgccatatacatccacgtgtagcacacacgtatattcacagatgtccgcatagagaatgctcagctcatggcttcatccatgtgcactcgctgttatttacaataacatgacg

SEQ ID NO: 28029 - DNA, 327 bp, Glycine max
tcttatccaaggcactctcttggtggcatagcttcttcttctatggcttattccctagtggatgactcctcctctcacctcttctcctttgtcttccgctacatctccatggtggaaaatcaccattgaaggatctcattgaagctcaaagatccagcctccatagaagctccacaagcaagcttccatcaagtggtaatcagagcacaagagcttcaagtaggttctacttaaacctccattaattttcagctttaccttctccttcattgttgttcttcatttttctccatgtatctcctcacatgtcttgggctaaatgttgtc

SEQ ID NO: 28030 - DNA, 446 bp, Glycine max
  unsure (1)..(446): unsure at all n locations
cggatctctgagtcacctgcggcatgcaagcttatagatattntcctgattcgtccttcagtntgtgacattntcatacatccacaagtgaacttccatgctattcgagtaatagatgagatgaagacatttacatctctagaacgatatttgcagccaaaaaatagatatgatgatcaaaagtgaaacttccatgctttcttgggttagaattatatgtacaattctgtttgagttgaatatcttttagaatatgataagattaaatttgctagtgagtttctnttttccatatagttcaaatctatgtgtgtgtgtgtgtgtgtatttgataaatgtcatatccatgaatggattatgtaaaaagagaaccagaggttatacacatatgctagatgtgtgggacttgctagatggagaatacatacttgttgaagtagatcatt

SEQ ID NO: 28031 - DNA, 342 bp, Glycine max
ttgtccgtaaaaatcacagaaaaaacgttttaaggtccaacgccttgaacggtcctctttgctttttatcggttaacatggaccgttcgaaagcataaaatcaacacatcactgccttttgtgagaactacgtaggtttgatttcctcttcgatggaggatacgtaggagcaaaagccctgcttttgtcgacctcgtgagatggttagaggtccaacgccttagcttttctcaccaagtaaaatggatgattttaaggtccaaatgccttaaatgaccaccttccaagtaaaaagaatcacatgattcgccccttttgaaagaactacgtaggtctaatttc

SEQ ID NO: 28032 - DNA, 375 bp, Glycine max
agcttctggtagagtccaatccagatttttctttccattatcctagtactagtctctgttattactttgttcgtgtggtggaataatcctgacaatctttatgtgtagttactgtgtcgaagcttgggcacatgagttctgatctactcgcttatggagcatcatatggaaccttgactgtgtgcagtgtatctgacaatccattagtcatcaaacaattaaatgggcattccaaagatgtaacacggctggatatactgtctctgttctatatttaatcctgcatgacatgtattgtcaagtgcactaaggcaatatcatctaatgtattacttctttaacggtggagtatggatcaatgaatcttgatctata

SEQ ID NO: 28033 - DNA, 326 bp, Glycine max
ttagtatgacttatcatgcaaataatcttcctatgaattaaatagtctttaaacaaactgcacaaatactaattttattttattttttaaaaaaaagtgggcctatactaaaacaactagcataacagtcctaaatgaagcctaaacaagttagatataattattaagattgatgatttttatagtaaataaaatatacaagtagatgggtaaagtctgggttatgagttataacgtttgggctaacatggttcaaactaccaaaatagtgctttggccataaaaaaaaaatgaatttctagtcaattatttaactcgttataata

SEQ ID NO: 28034 - DNA, 387 bp, Glycine max
  unsure (1)..(387): unsure at all n locations
atctaatcattccaatccactcaaatcatacaatttctcattcaaatcattctcaaacacttatttcatgcaaaacaatccactgcaaatcaatttcaatcaattcactgttcaaacaagctttttggtacaagcaaacaactcatagtgctgaaatttaaataactgaaaagtaaaaaatgaattaaaatgttgaacataaatcataaaataactgaaaataaactaaaatgttcaagatgcacaaatttaaatgtcctgctcctgtgcatgctcattaaggtccaacacctgagcaactggtgaatactaagagataggctgctctaactcagatgctatggcatcatcaggtatgggtgctgnggatggctctgggatttgtct

SEQ ID NO: 28035 - DNA, 325 bp, Glycine max
tctagaaaaagctgatgcataaactaattttatgtttatggaagaactttatttcatctaaagagaccctagtgaagccagctatttatgactaaagtactattttgttcttgaatttgtaacgctctaatcggttagtccttcaaattaggtaaatttgaaaagaaaaaagaagttctaaaaacttgttcccgcgactgggaatacatcgatacatgtaaaaggacacaggcactgcatgtcagtcaaaggggccaagacgtcaagttttggactagctttgttgatggaaaaccaaattaagagttttttttttttttttttt

SEQ ID NO: 28036 - DNA, 335 bp, Glycine max
tgcttggggccatttcctgcgaaagccttcatttggtagttagttatacaagataatgcttatcttaatgcaaaaaatgtcatgctaatccctctgattttaaaacgaactcatgtaatctatttatgtacacacgtacgtgtggaatatcctaccatttatatcatcatagaggccgtccaacacattctaattgtcacacacatatatgcatttgaaaagaacatacgttcttacgctcaaggcattgcggcaaaattcacacctaatttatatccttaacatttgctattacaaactacctacatatatttgaaatatatatcatacaaatt

SEQ ID NO: 28037 - DNA, 382 bp, Glycine max
  unsure (1)..(382): unsure at all n locations
gatccctaagcacctgcagctgcaagctgaganattttactcatgcttaagccttcatgttaggaactacttaagaatcaacatgcaactctgaaaatgtataataaagtcttttcctggcttccatagggttccaaaactcaataaacttcatataaagccaacatttgagactcaaagtngaaaaccaatcgtttcaaacaataaaactcattacaattcagagaataagcttcctttaacgattcaaacacanaagatgactttgcaaagaaggaaaggaaagaagggtgagctctacgtccaagagaggagctgttcttcactcctacaacaaccacactactgatgcatcaaccaaaccccaaagtcaaccaaaaat

SEQ ID NO: 28038 - DNA, 333 bp, Glycine max
tgctaatttgactttttcatttcatgagacatattggatggaggaattgtccctttgattgagtatggtgtacattgatttgcttctttgaattaaattagacaattcaatctttaaaaaaataaaataatgaataatacgtttatgtcattatttcttttgtatagttttaacatatttattttgttgtagaattttttatttttttcatatttaattattttttattttaaattatttttgtgttattattttttatattgcatgatttgataatggagcgagataagatagaatattttatttattttacctattttcgatttacaaaaa

SEQ ID NO: 28039 - DNA, 470 bp, Glycine max
  unsure (1)..(470): unsure at all n locations
atccttaagcacctgcggctgcagctantctttttcccnctcgtgtatacacatatatatacacatatttnntcttttatgatgaactacnttattcattttcagaanagaaaaggcaaaaagntcaataaattaactgtaccaataacttcaataaattatttgtaaatcagccactactttaaaaataaaagttggtcagagcccaaaggaaacatcaagaagttaaagagaaaagacacctcacaccgatacagaaagtacagaatttttctatatgataaacctattgcattcatgaagtgatataatatttcgagatgtttcatttataaggaatgttatatgaatctgtgtcattttcagccaaagcaagaatntgacaagatgatagtgggatgtgcataattgttgaggacactcgttntgaattataaatntcccaacaccatgtagatatgctaagaaag

SEQ ID NO: 28040 - DNA, 335 bp, Glycine max
tgtgaaccaatttaaaaaatctttgtaatacagtatgacacgtataatttattaactcatcccttaaaattataattgaaggacaaaacttatagtatccagtaggtgcttttagtgttctccaattaaatgttagagtttcatctcagtaatttctttaataaatgtttgcatacaaattacgaagatgaaactctaattatgattagagaacaaaataaaaaatacctatagaaatcctttcacacacaaacttaatgccattcaatagaacacaaaaagtctagatattgtggcttatctaacatcctcaacatgtctcttagcttgttcaa

SEQ ID NO: 28041 - DNA, 379 bp, Glycine max
aagcatcaacaagaatcaagccaaggctattgtgccagcaatcaatagggcaaaacacaccacaagaatatgatgatggatggctcgaattctcacaaaggtaaacttatcactttcaaatatgagcttcaaaactatcatgacatgttaaggaaatacaaggatttcaagtcacaaaatggcaagagacctttattttcagaacaaccacccataacttgaacatatcctataattcaaagacaaacatgcaaatctaacacaactaaactaacaaaactacactagaaccccacaaaactaacataattaaactaagttaacacgactaacataacccaaaccaatgaacacacctcccccatacttaaaccacaca

SEQ ID NO: 28042 - DNA, 333 bp, Glycine max
tctaaactttatacaagaatgaagctctgataccacttgttagacaagtggcctcagatatcttaagaagggggaggttgaattaagatattacaaactatttccccaattaaaattctatcaagttataaattcccttaataataaacttcttaaatattgactcaaatagaacaatttgaatatgaatataaaacaataataaataaaggagtttaagggaagagaaagtgcaaactcagatttatactggttcggccacacccttgtgcctacgtccagtccccaagcaacccgcttaagagttccaccatcttgtaaattccttttaca

SEQ ID NO: 28043 - DNA, 418 bp, Glycine max
  unsure (1)..(418): unsure at all n locations
gcaagcttgtcttctacactcattgtcacgagagacttacatatatattagtgggatgaaaggaaagataaacggattgaaacggatcggtcagagctccaatanaaaaatatccttgtattggcttctttcctattctctacttttctgttctgcttcttctatggttactttgtgcttaagaaatcaaatgtttcatttctttttatatgcttcaccaattgatgggtcaatcataacttttctattcgcttagcgcaacactcatgttgagcgcatatgtccaactggatcaagtgaccacacgctaagccgcaatatcacgcttgaccggatagtagcttctagtgtggttcttgcgctagcagctttttggaccgagcgatataactaccactggaaatcccttgatcctatt

SEQ ID NO: 28044 - DNA, 340 bp, Glycine max
ttgatgataactcttctatatttaagatcattttttcgtattgcaacacaaacttatttgttagttgattgagaatacagtacaatatataaggaatctaaagatgatcacacacatgcattcctaaacaattatgagcattaattagttccttatacgacatatgaatattgggttaaaacccctcgatttggaaggaaaaaaaactacatggacgggaagttttaatttgggttcatattttaagtttttattataaatttttaaagactgaaaatatatcaattgttttgctataagaaatttcagagttattttttttcgtagttttagaagatcg

SEQ ID NO: 28045 - DNA, 484 bp, Glycine max
gctgaatgggactcctatgtatataacctcagtagagtctattgttggagactatgccctggttccattattggactacaaagaacaatgacatgatgccttcatcttcttttgagttgataagggcttgtgacttctccaaatccaaaccacttatcagaagcgaatacccatctatatagtgtagttgtatcatcccactttccgccattactctagctatgatgaatttatcgaacattgataggtgcttcaagttacctataatactagagaacatatgttgttattttcctccctctacgctcaccatatcttatatcatatgcccattctcttgcacctgagtgattctatgattaacgtactctaccaatcataacatacgtatttgttatgcctttggattacatctttcttatggtatgcttgctattcccttctactactattcgcttgctaggtatgacactatctattttga

SEQ ID NO: 28046 - DNA, 331 bp, Glycine max
tagcaccatattcagcacgaaatacatatgattgctaaataaaagttatatatcactctataaggttgataaaagatgcatttgtttaagctttgaaaaaacaaaagcgctttataatgtagctttttttcatacgttgcttattataactaccgagacaaggactaaaactaacatgttattttttagtttttttcttgacatacatataataaacttatctaattattacagaatttaatcagatttttaattgattttttttcttaacagaaactcaaatgaaaggcaaccaaactatacactcagaaatgatatttactacttattt

SEQ ID NO: 28047 - DNA, 406 bp, Glycine max
  unsure (1)..(406): unsure at all n locations
agcttgcggatntggtcnttgctggcgaaatgatcgatatgngtttaaaaagaggcanatctgatcatcatgccttgacaaatgcaaaaaanaatattgtggcaaatgaagagggtgagaatgaaggagaaacccatgttgtgactggcattcctatacagccaagtttcccaccaacccaacaatgtcattactcagccaataacaaaccttctcctggcccaccacccagttatcaacaaaggccatccctaaatcaaccacaatacccacctaccacacaaccaatgctaaacaccacttttagcacaaaccaaaacaccaaccaagatatgagtttgcagcgaaaaaaacctgagaatcacccaattctgggtctatgcgactttctccctatcactcgata

SEQ ID NO: 28048 - DNA, 329 bp, Glycine max
tattttatatagctcatgagaaatgaactagcttaaaagctactaccgttcttatcttctcaattttattttcattaatttatttgaaattttattttattattttattcaattcaaaattcttgttacttattttaacatttttataaacactatatgacatatttaattttcttagttattattaaacttgaaattttactttgactaaaataagttactattttacaagcttatttttacatttatcggttaactttttcaattaatcttaccaaatatttttaattaaatatgctagtttataaactttctatttttcagcttat

SEQ ID NO: 28049 - DNA, 432 bp, Glycine max
  unsure (1)..(432): unsure at all n locations
agcttgtaggattatggggtacccatcacatgtggtactatgtggcgatcgggcgatggtgcacaacaagttntccacatccacaaatcgcgcataaacccaccatcctctgttggccacctccaactgaactcacgtactcccacgtagcccatattctcgtttctctcaacaccaggtccccatcaatcctcccaagcgttcccaacattcaggtaaatcaacattcaaacagcacatactatcacagccaagataacagggcaaaggcagagaactctacccaaaacaccaaccaaaatcacaactttttctcacttaaagaccccagtaacatttccttcgttccaatatcgtaaccgttggatcgactcagaattttactggaagtctctagtacataaatctacattttgaccggtgggatctact

SEQ ID NO: 28050 - DNA, 326 bp, Glycine max
tctagaattatggcctcatcaaactacttgtttcccgagggaaattctataaatagacctcccatctttaatggagtgggttaccattattggaaaacccgcatgcaaatttttatagaggcaatagatttaaatatttgggaagccatagaacaaggaccttatgttccctctataatggccggaagtgcaacaataggaaaacctagagcagattggactgaggaagaaagaagattagtacaatataatttaaaggccaaaaatattattacatctgccctaggaatagatgaatactttaaggtttcaaattgtaaaagtgc

SEQ ID NO: 28051 - DNA, 227 bp, Glycine max
atcctgtgtttcatggagaactattcacattgagatagactgccttctcaatgagaagatcttatcaggtgacatcaccacttattttgttaacaacaatatggtcaattggcatgttcttcaccaaatctggagagttctcaaatagtatctctttgatacatgcttactacatatcatttatatgctccaacttcaaaggaagtgtttgagtctgttacatatct

SEQ ID NO: 28052 - DNA, 331 bp, Glycine max
ttggcattgaattgcaccagaaaattttttaagctatttacacacgttgttgggataaaagcaagtatggtaacagaaaacagaaagaaagatccaaacatgaatgacaatccagtaatttcaagctagactagtcatgatttttttttaattatttagttattgcatatcaagaagaaagcaaacctcagttgcatcgcggcaaagggccaacatgccagcctcaacacagacagctttaagttgtgctgcattgacatcgggatgaacattcattttccgagaatggatctataacattaacgtgaaaagcattagtaaaagttctgtc

SEQ ID NO: 28053 - DNA, 334 bp, Glycine max
  unsure (1)..(334): unsure at all n locations
agcttctcgattattatgcaccttaatctgacttccgtttganaagttatgacaacttgaatttctggagagcttccgttgtgcaatttcgagcgtcttgatatattatgcgcctgaattggacttctgtgtcataagttatgaccatntcaatttctcgagagcttccgttgttcaatttcaagcttctcgatatattatgcacctgaattggacttccgtgtgacaagttatgaccattctaatttcttgagagcattcggtgttcaatttcgagcgtctcgatatattatgcatctgaatcggacttgcgtgtgataagtatgaccatttg

SEQ ID NO: 28054 - DNA, 340 bp, Glycine max
tctatataagctgaaccattttatcaataaacacaagttgagttttattcagaaaattagagtttatctctttgatcttagtgagagtgattctcctaaattcttgagtgattcaagaacaccctggctgtatcaaaggactttcacaacctttgtgtgttgccctcgctggaaagagtgattctttccttcctttcatcttcacccttgttctttcaaaccacaattccagaaaatccacctctgcccagaattatctcgtggccataactcccattttacgcactcaaattaagtgattcttgagcctaaattgaatttcaaaacgagacctttcacc

SEQ ID NO: 28055 - DNA, 384 bp, Glycine max
  unsure (1)..(384): unsure at all n locations
agcttaggttctaggagagcattcatccatagaataaccttcattnnttttacacagaanagaaacaatgtgtatatactattttctntgaccatttcaatccttacccagagccttccncanatttggaacgaatntacctcgataataactcccccaaatttgggacaaattttccttgaaccatcttctgtggatgatgctctcctacaacctaaaataaggtagcagaagatacaactgaatagtctcgaggttcaatcaatcaatcaattcattcatctcaactgggtgcaagggataattcattcaatcacaaggttagctntttggctaactagctattcataataaaacatggccttcatcattcttcaagtcatg

SEQ ID NO: 28056 - DNA, 327 bp, Glycine max
tcaagagatcgtccccttgacaacattattggtgatatctcaaaaggggtaacaactagacattctcttaaagatttatgcaataatatgacttttgtgtctatgattgaacctaaaaatttagatgaagccataatagatgatcattggatagttgctatgcaagaagaactaaatcagtttgagagaaacaatgtgcgggaactagtagagaaacctgaaaactaccccatcataggaacaaaatgggtatttaggaataagttagatgaacatggcataatcattaggaacaaggcaagattacttgcaaaaggatataatcaa

SEQ ID NO: 28057 - DNA, 422 bp, Glycine max
agcttgaccaatcccaacccaaccctggcatagtctgtcagtgagaacctgtgatgtacctaagcaggcgagctcctggcagtcaacagattaaaggaacacaagaccacaaagcaaggaggcttgtggtggctggccagctgtgaattttgtgtaatatgtggattgtggtctctggtaatcgattaccaaaggtgagtaatcgattacaatgcttaaaattgaggacaggaggctaagatggtctctggtaatcgattaccaaggcgtgtaatcgattaccacgctcgaaaacgaagtcaagaaacttatggagcctctggtaatcgattaccagcctgtgtaatcgattacacagaggactgggtcactggtaatcgattaccacgcatgtgtaatcgattacacagtgtattattgca

SEQ ID NO: 28058 - DNA, 325 bp, Glycine max
tcggcaccgttaagggtaaagactcttcctgtggccttcggatgtccaatttggtcattcaggcccccaccattttgctccttcttgggatatggacaatctttctaaatatgccccttttgtctacaattaaaacaggtcattccttttttagcataatttgtggagatgtgccctggcataccacatttgtaacaagtgatctgagtgggcaaaatattgggtttgctaccactaccacccgcaaaccccatagcaacagtcttctgattgttgggacagcatattgcttaagaagggtcgagtacggttttccccgatgttg

SEQ ID NO: 28059 - DNA, 392 bp, Glycine max
  unsure (1)..(392): unsure at all n locations
agctntagaagaactctntntntcttctcgtctgaagctgacttctccgattntgagggtagtggaatatctcttaagcaaatgatattggttctgaaggtgaacttcattaactcttaggatacctaacaattcttcccatgctagtgtnttcatatntttagcttcttggatggttagtgtatttggttcccacgccttgtgaaagttgtctagaatcttcaaatatatttgagctttggtgaaggtatgccctagatctttaagattgttacgagcacttgaagtcctctaaacatgtcatccacaaattcttcttctttatggagaagctttcataatgacatgtgagagctgcaacctttctaagttgaacatcttgttggatcgag

SEQ ID NO: 28060 - DNA, 334 bp, Glycine max
tctataagtcagaggtcgataattttactgcacaaacctttgacaaaaagttggctaacatagcaccttgtggtgacaaggaggctgttgtcgaatcgagtgacaatgttgtccactctgtcaaactccatcctacctatgggtttatatgggagagggaggaaattgatgctgttccctctgaagatggagttattccaccaactgggtggaatatatatgaagattaatatgactgaggccactgcatgggccagaattacggcttatatggccgaaaatagaataaatacggcctttgaggctgaatctcaacaaaatatggcagttgaag

SEQ ID NO: 28061 - DNA, 426 bp, Glycine max
  unsure (1)..(426): unsure at all n locations
agcttctccttcctgacttattccctagtggatggtgcctcctatcacctcttctcctttatcttccgctacaactccagggttgaaaatcaccattgaaggaacctcatgaagctctaagatccaacctccatagaatcttgtcaagcaagcttcgatcacattgttagaaagaccataagaagatgttgagtaaggccaaattgatgagccatganttgtgggttgtaaggctcgacantaaaattgatatacctggatccagggtgtaacacgctaaaggtattatcataattacactttttgatctaaaatatgaaaaataaaaatatttatacaacaatctcatgcgaaagctaacatataaacattacaacttgattccattgataatatcaatacaactttattctcatagctttcaca

SEQ ID NO: 28062 - DNA, 332 bp, Glycine max
taacactaaggttttgaagaagttgttggacaagagtgcaattaatttaaaaatgaaagtcactcattgcgttactcacaaagaagaaaggggaagacccatggataagggtcaaaccttgattacatgcttaagagatatctttcaactatatcgttaatcatatcatgttggtttattaatgactattgacgagtgaatgaaataatttttttaaaaagaaaaatgaaataactaaataccatatttgattaggtttgatttattagacaaatatattagattttgagtcagattttgaattttgatgatataaatatcagttactattg

SEQ ID NO: 28063 - DNA, 367 bp, Glycine max
ctgcagcttttcttctaaatactggctcaaataccataattgcataccagaatactgcaatgcacatagccgaggacataatgctaaaccatgccactcttccatttgttgtttcactcacagtcctcattgcagcttccctgaagtaataacccaaaaaacaaaaattaagcatatgaaaagttgtttataaattatttgcaataaacaatttacaggggaagatgttgatgtgattggaattaccttccctcaaaaaattatttgggcgaaatgaatagaagtaatagaattattaacggcgaaatgagaaataaacactgaacatatatagagctcaactggacattctgcaatggggacaaga

SEQ ID NO: 28064 - DNA, 333 bp, Glycine max
ttggattggggcaaggttctgttggggtttgattttgttcttttagtttgatcttgaagttttaatatttggtacaaacccttggttggtctttggggaattaacgtctgtaagcactgtttgtggtgttctgagaaggaattgaagtggatagtgaaaagaaggttcttttttcttggtgggtggttgtaggtgatgaagggggtttagccctttggtgaaatgagaagcatatcaagcacttcgaaatgggaattcaaaaacatatggttaacataaaggttacttttggggttctttcggttcttcttcttgtggcagcagtcagttcta

SEQ ID NO: 28065 - DNA, 241 bp, Glycine max
tgcgcggagtcgccaccaacgtttatttgtggaaaacgtcgaaaaaaccgaagaaaccggccaaaagaaattccaagttccggagttgtatttacgcttgatgaaggtattatcacctctcacgtttgtcacacaggacaacagccaattatctagaattgtgtgaagatgtgttaccttaactctatttcttttttatttttgaggtcgacaaaagccgggctcttgctcctatgtactt

SEQ ID NO: 28066 - DNA, 339 bp, Glycine max
ttaaaagattggctaagattttgttaaaacataagcacttagacaatgaaggaaagctggagttgctgcacatgatgtccaacgttatgtcaaggaataagatcgggctgcactatgcacaaggcaagataaaatgtcaaatgaagaattgaagctgcaggatccacgatgtcggatacaatgtccaggacatcctgcccgagaatactggagttgctgtacaatgcaagataaaagtcaagtagtgaagctgcaggatccacgatgtcggatacgatgtcctgacatctggcccgataatactggacatataattctgttatatctttaacagattat

SEQ ID NO: 28067 - DNA, 381 bp, Glycine max
acgggtctgggtgtgtatgacagacacatgagtatgcagagtacctctccacaggctctaagaccagtgtggtctccaagaatacgttaagcgtggcagcatcaaacttgatcagcttcccctacaccttgcattcgttgggggagcgatcctctgggttatagagattatcataaaactccttgaccaaggcaaggtcaatatgattatccatctgcctggtcaaagccctgtgccactggcgcctctctagctctcggaggaactcgtcgtagtgggagtaggccagctctatattcctctttgggaggatattcctgttgtgcacattaatcgtgtatctcttccaagtgacctcacacacaaatctggatgtgtcat

SEQ ID NO: 28068 - DNA, 345 bp, Glycine max
tctagcactaaaatcaaaatattaaattttaactttttaaaatttgaaaaagagccaacgagaggttaactagcatgattagtcttctacgtacccttacaaagataggatttgaggtcgattctacaaatactcgctgagatttggttggtgtagttttgtatgcatggaagcaacccttctctttatcaatttcgtttttcataaataaaatatgaaaaaaaacaaatagataaaatactttattgatttccaatgtaaagccataataaacaaagtacaaaataagagaaatatgaataaaacagaaaaacaagcaaagggcgattgtgaaattataagaca

SEQ ID NO: 28069 - DNA, 454 bp, Glycine max
  unsure (1)..(454): unsure at all n locations
agcttctntgagaaaacttccttgagaagctagagcttatctacacacacccctctcataactaagctcacctccttgagaagcttccttaagaagattcctaaagaagcttgagcttagctacacatacctctctaatagctaagctcacctccttgagatgagaagctagagcttagctacacaccccctataatagctaagctcacccccatgacaaataacatgaaaatacaaaaaaagtccttactacaaagactactcaaaatgccncaaaatacaaggctaaaaccctatactactagaatggccataatacaaggcccagacgaaggaaatacctattctaatatctacanagataagcgggctcatacttagcccatgggcttgaaatctaccctaatgctcatgagaaccctanggccttcccttggatcgctagccaatctac

SEQ ID NO: 28070 - DNA, 328 bp, Glycine max
tccagaaatcatcctcttaacgacattattggtgatatctctaaagggataacaactagacactctctcaaagatttatgcaataacatggaatttgtttctatgatagaacctaaaaacttaaaagaagccataatagatgatcaatggatagttgctatgcaagaagagttaaatcaatttgagagaaataatgtttgggaactagttgagaaatcacataactaccccattataggaagaaaatgagtatttaggaataagttagatgaacatggcatagtcattagaaataaggctaggttagttgcaaaaggatataatcaag

SEQ ID NO: 28071 - DNA, 296 bp, Glycine max
  unsure (1)..(296): unsure at all n locations
agctntaagcanaatcaatcaacaataacagtttactcttctgtccgtttgtctccctttgtatattgagacgttcgatattcagaatagaatctctgagcaaaatctaatgacaataactttgtactcggatatccgattgtgtccatagtatatcgagacgctcgaaattcagaatggaagagttgagaaaaatcaaacgacaataactntttactctgatgtccgattgtctnccgttgtatatcgagacgttcgatattcagaatagaagctctgagtaaaatctaacgaca

SEQ ID NO: 28072 - DNA, 117 bp, Glycine max
gctataacaatatccttacccgctcctactgatcatatgctcgtaagtacatcagaccatagggagtgctgacacccaagttgacttagaaaagggccatgacttacaccggacact

SEQ ID NO: 28073 - DNA, 372 bp, Glycine max
  unsure (1)..(372): unsure at all n locations
agcttaaaggtgaaacaggatacctgcactgctcttccaccatcaaggcaccccactggaagcatgttaaaagcttgtatggttaagccacacctcgaaaatcataataaataaataaaaaggcaggcatgttatggaaaatgaatgatcaagaagagtctgtttggaaccacaaatttcttaaattgatttgatgtgtcattgaaagtaaattagattacaggaggaaaangtgaattaccagcctgcaatcacaagagggtgaatnggaactgtttcagcatgcattgctctgcacattgacattagcaaatagcaatcagattaaaaaacatacatacatacataagcatcaattccaatatacatact

SEQ ID NO: 28074 - DNA, 322 bp, Glycine max
ttggttaagaaatgtgggaagccaaagatgttggatgccatcaagttgcctcctcccgaactttatgaacatgttgaagtaggctcgttgctaccctttatcattttcttctatttgtttggtccagtttttttgaattctttctgatttgtgaatgtctcgggagatgttattctcccctaaacaattcctacattacttgacagttcctcaacagttcatatggtacaacagtttgttgtttgtttggacaatagtacccggctgagaaaatccatgtaaacagatcaaaatatgaccaaatagcaactgtaacacagta

SEQ ID NO: 28075 - DNA, 299 bp, Glycine max
  unsure (1)..(299): unsure at all n locations
agctngagatgagggaagtgtgaaaggtgaaacttcctgtctttattgttgaccacagagtggtacctggagatatgtcgctggggtctggagaccttgtggacgtcaggtggggtgctattgcccaaaaccaagcttgaccaatcccgacccaacccgggcatagtcggtcagtgagaacctgtgatgtacctaagcaggcgagctcctatcagtcaacagattaaaggaaaacaagaccacaaagcaaggaggcttgtggtggctggccagctgtgaattatgtgtaatattgtggt

SEQ ID NO: 28076 - DNA, 335 bp, Glycine max
tgcctaattaacctgaaattgagagaaaatgattattaaacacacaaaatggaagtactaagtatttattacctatacttaacagaaaatacttataacactacaaaataaccataaattggaagagtttgacacaatttacacaagttttatacacaaaagttagtcgtattcaccgactaacaactcccccaaatttacagttttgcttgtcctcaagtaaaaagagaacagttcacttgtcctcaagtgacaataacatgcagtgactatttacaaaggtgtatgcaacaaaagttactgattgcatgataagagaatggagtaaaatgctc

SEQ ID NO: 28077 - DNA, 489 bp, Glycine max
  unsure (1)..(489): unsure at all n locations
atcctcagagtcacctgcggcattgcagcttataataaataatattaacgcacaccatacaaattcgatntcctatannttttaatttttattgctgatgcatctttatatgtacagactcttttaaaaaagaaaaggtcaaagtatagttaataaatcagattcgaaaattaaaattctcatttcacaataggaaggagagaatgtaatgtatggtcggagattttgaaagcaaaagaaatgttgtagaagatttgaagtgacagaatttttcgtagaaaaatgttaaaatgaggtagatttagtttcaaatgttaaattggactcaacaggtgctgattatatgaactacatagtgcttagattagagttttgtaaattgaatttgtgaatcatgatctattaacttacattctgcgagtctatactagtgtaatttatgtctggagacttattgttcaaatgtgatatccgacaaaatgaatgtta

SEQ ID NO: 28078 - DNA, 317 bp, Glycine max
ctaacgaaaataaatgatctttgttataatgtacatcgactgttggggttggatttatataagaaaattttaacttataaaattttaagagactccaatttatattttaaatttattcggatgtgataaggcacaattgtatgattattgctttgtaaatcattatattgtagttattagaatgaattttgcaattgtaatattcttatgagggatgttaatggctttgaaaaattaaaggttttcaacaatttagaaggggaaaatatgcttttcattttttatttctttaaaaagtgccatgtgaactttagagc

SEQ ID NO: 28079 - DNA, 378 bp, Glycine max
agctgtaagtgtcttcttgttgattaaggctaattatgatgtgtctgcatcaaccagtagatatctgatggtgaagctcctagagagcttgcctcgaccgaaagtggtcatcaagtccacgtagtctctggtctcgactttctcgcctgcaaagctgaggagtggaccgacgtgaggttggacagtgttgggtgagacctcgagtctttggaagattttctagtataagatatcagtacaattgtcttggtcgatgacgatcttggacactatgaaattcgctatgatgatggagacaaccatggtgttgtcttggttgacggagttgatgcccttgaagtcctatccgtaaaggtgatctgagggagacttcactat

SEQ ID NO: 28080 - DNA, 326 bp, Glycine max
tcagaccaaagcaattcaaaatctaggtatctaaaacccctcaatttaatggattttcaaggtttgagaagtgaaaatgagaatggggtaaatttggagcaaactctcacctcacacaagtctataacattaatctaaacttgctcaaactggttttatgcctaaaattccaccgaatcaaaatttgactcctcaacacccaattttaccttagaaatggcccttgttttcactttggtcactcatattcctcatttgcacagcctaagctttctcttaagtcctaaatgacatttcaaactaggattaactcactttaaccccca

SEQ ID NO: 28081 - DNA, 314 bp, Glycine max
  unsure (1)..(314): unsure at all n locations
gtcgcgtgtatgatatccactcttcaaggatcgaagnagaggagagcttcaaccctatatcgcaacgtggcggacataagtgggcacctaacttgaatgatcgccattgtcaatgcggaaggtattctgcgcttcactatccatgttcacatattattgcagcttgtggttacttgagcctgaactactaccaatatatagatgttgtgtatacaaacgagcacatcttataagcttactccgcacaatggtggcctcttgggaatgaagcggctattcctccttctgatgacgcatggacacttatgcctgac

SEQ ID NO: 28082 - DNA, 327 bp, Glycine max
tatcattgggggtttaactttatcattttgtcaatgttggattaaattttagcttatatattgctaatttcagcttataggtgagaatgaagctactttagctcctatatataaccattgattaatagcaatatggcactttgagcaagatttactctctataagttttcatatcaagagtcaaatgctattgaaatggataaatgcacaatataattggtgtgtatcaaccctaacacaacaacactaccacaaaaacacacaccctatgatccacaatttgaaacgaagggaaaaagtcatgaaaagtgaaaaagaagagaacct

SEQ ID NO: 28083 - DNA, 332 bp, Glycine max
ttctgcagggaagctaagtgtgaagtatgcaatcttgcataggattggcactgccaactgggtacccaccaatcatacttccactgttgccacaggtttgggtaaatttctgtatgctgttggaaccaagtccaaatttaattttggaaactatatttttgatcaaactattaagcattcagaatcttttgctgtcaaattacccattgcctttccaactgtattgtgtggcattatgttgagtcaacatcccaatattttaaacaacattgactctgtgaagaagagagaatctcctctatccctgcattacaaactgtttgaggggacac

SEQ ID NO: 28084 - DNA, 393 bp, Glycine max
  unsure (1)..(393): unsure at all n locations
agcttgtctcgtggtttcgatagagaacgaagcccaatctgaccttcgcgattttcatcaaggtaaccgtgattctacgctcgttccttgttagtttcagcttgtctntgcatcttttcttactttagaaccaccattgtatgtctttgcgcttcctttgaaaaaccctagagaaagagactttataaaagttatctttttatgaaatgggtgttatattcgtgaccttcgctgaacctcgatcacattggcgtgatcggaattttaaaatgatgttcctgttgtagaatctgaaacgcccttagcctttatatgtaaagacatgagtagntgactcagaatattattggtaaccttatttctgaaatccatagaatttccttcattttgcgt

SEQ ID NO: 28085 - DNA, 332 bp, Glycine max
  unsure (1)..(332): unsure at all n locations
tagagtaagctaccagagttccgaaaagagtggattgatgatgagagtgcaatttcaccatgacccagttctcgacattaaaattgacatccctctgtttagtatcagcaagttgcttcataagggcttgtgccttcaaaagattcttcttgatttaagtgaaaatgacttccctgttagttaggagtttgtcaacaacatctagattagaagttctggcaatgtattgaggaatgttgaaanncttcttgccgaaagtaatctcgtacggagaagccccataaaccgaatgccatgatgtattataggatcattctacccagttccaaaat

SEQ ID NO: 28086 - DNA, 492 bp, Glycine max
  unsure (1)..(492): unsure at all n locations
cacctgcggctgcagcttaagaaccaaaaataaaaatattatcttattagggagataacacactattaaaaatctattagaaaagaaagtacatctaaatatttattaaagagtaaaatatatttaaacctttaaaatattcttactaaaaagaacactcggctagtaatactcgagtaacaaagaaagttatgatatgggtatttagtaattataactatcttgtaaacattacttaaatnttttaataatttatatacaggactttaattgttgttgtcaaaataataacatttattttgtaaaacatattcatatgtataacatattatatgcttgttgaatataggatatacatttcttaaaaaaatatgtataaacaatgataatatactccaattgaaaatacttgtatatatatataactccttagaatacgtttagtcatctgcatcgcaatagagaagaaatcataatatgatttacttagta

SEQ ID NO: 28087 - DNA, 337 bp, Glycine max
tgcgtgttccgtgaaattctgtaatgtggcggaagtcgaaaagaggtgtttttgcgcaatccgtaagtttccgtgacttcttcgaaaggtaaaaaaggagtaaatacataattcgtaagtattcgtaaccttgcagaaggaaaataagtatcgttacgaaattcgtaaagtttcgtaacgttacggaaaaagaattacaaaaaaatagaaaggggggtgcatttagtaaaaaaggggtgtaaatagcaatcaggcccacttgggccttccagaagcttcctccagaaggctgttgcttctggaggaagcaacctggctcgcctgggcgagctgagct

SEQ ID NO: 28088 - DNA, 262 bp, Glycine max
  unsure (1)..(262): unsure at all n locations
ctgcagccgtccaggtgtgttccctacttttatagattgaatactcaactatagttgccagctgtcatccgatgctgtgactctatcatgttcaccgcctgcgttttatggaagtngtaattgttgcaagattactccctctccacactcattaatatcttagtatcttaatgcgttcgcactctgcctcccaacactcgacttatcatcgtcctacttatgtttgtctgattgttagatatttcggcctggatcaccacgg

SEQ ID NO: 28089 - DNA, 401 bp, Glycine max
agcttctatagaaagttcgttgctaatatctctacaattgcatcacctttcaatgagctggtgaagaagaatgtggcatctacctcgggtgaaaaacaagagcaagcctctgctttgctcatagaagagcttactaatgcacctgttctagctcttcctgacttttctaaaacttttgagctagaatgtgatgcctctggagtgggagttggagttgtattgttacaatgtgggcaccctattgcttattttagtgaaagagaattcatagtgccactctcaactactccacctatgataaagagctttatgtcataataagagccctccaaacttgggaacattacctcgtttccaaagaaattgtcattcatagtgatcatcaatcacttacgtacatt

SEQ ID NO: 28090 - DNA, 318 bp, Glycine max
tgaagaggatgctttaatggatgaaaagaaagagagaaggggggagcacgaaattgaaggaataaaatatggaaagaagaggaactttgaagtgtatctcataagactttcattcatcaaagctacaacaagaggaacacatgcttctatttatagactacgtagcttacttgagaagctttcttaagaaaacatccttgagaagcttttttaaaaaaactttcttgaaaagtttctttgagaaaacattcttgagaagctcgagtctagctacacacacccatctaataactgagctcacctccttgaaaaactttc

SEQ ID NO: 28091 - DNA, 366 bp, Glycine max
  unsure (1)..(366): unsure at all n locations
agcttattaagaggcttcctccagaagcttcctcgtggcttctttgagaagctntctcaagaggcttctttgagaagctagatccttatctatccacacccctctattaactaaattaacttccttaaaaataattacggatgataataacgcaacanatattcaaacatcaaacataattactaatagtatatagatatatatatatcagggtgttacaactctcccacccttttagaaatttcgtcctcgaagattaccttactcaaacaaggatgggtgagcttctcacatctgactntctaattcccatgtggcatcttctcctgatgcacctncccagatcaccttgaccaacagaatctc

SEQ ID NO: 28092 - DNA, 329 bp, Glycine max
tccccaacatcaaagtaaatcaacattcaaacagcacaaattaccacagccaagaaaacagggcaaaggcagaaaactctgcccaaaacaccaaccaaaatcacagcttttctcacttaaagaccccagtaacaattccttcgatccaattcgttaaccgttggatcgactccaaaattttactggaagtctatagtacataagcctacattttgaccgttgggatctactagcaaacatccagaactcattctgcactactctttccacagccaaccacacacaagcatttttctgcacaaagccaaaatcctgctgcacctattttg

SEQ ID NO: 28093 - DNA, 375 bp, Glycine max
  unsure (1)..(375): unsure at all n locations
agcttcattctacacctgaaaagaggatgagatagttgcacaaaagagaaagcttcctaacaaanattntcatgcaggtggaccttcttctagtaattctaacttacagcagccttttatccctcttccattcccacctagagaaattccaaacaaaaagatggaagaagcgganaaggagatcttggagaccttcaggaaagtagaggtgaacatacctctgctagatgccatcaagcaaattccatgatatgccaagtttctaaaggagttgtgcacccacaaaaggaagctcanaggaaatgaaaggattagcatgggcaaaaatgtgtcagcattgatagggtaaatatattcctcacattcctgagaaat

SEQ ID NO: 28094 - DNA, 319 bp, Glycine max
tgatgaatcatgtatcgtagttaggaacaaggctagattgattgctaaaggatacaaccaagaggaaggcattgactatgatgagacctatgcctttggtgcaaggttggaagctattaggctattgcttgcttttggttgtattatgaatttcaggttatatcaaatggatgtgaaaagtgcttttctcaatggatacattgaagaagagatatatatagaccagcctccaagttttgtagactttgaacatcctaatcatgtttacaagttgaaaaagacactgtgtggtttaaaaaaagcacctagattttggtat

SEQ ID NO: 28095 - DNA, 413 bp, Glycine max
  unsure (1)..(413): unsure at all n locations
agcttgccaatagtataaccctttttcctaagttgccatcatctatgtgtctggttatacacgaactttgtaacatattcagaataagtcagggtgtgaccttcaacaaaagcttggtgtgcattcatccaagcaataaatgttgatttagaaattcttgggttagagaggagatcatcaatatcatcatggtcttggtagagaacgctatgttgtcctggaagatgaaactatagcctctatacagaaggttntctaccatgtattgcaaaaccaaagatcctccaagtagattcacatggagaaatgtatctgtaatcaacataaatatatcntaaatacaattataagatgatttacatattaaactcggctcatacctgccatccagatattcatttgattcatcattc

SEQ ID NO: 28096 - DNA, 338 bp, Glycine max
tcagaccaaagcaactcaaaatctatgtatctaaaacccctcaatttagtggattttcaagctttgagaagtgaaaatgagaatggggtaaatttggagcaaactctcacctcacacaagtctataaccttaatctaaacttgctcaaactgccaccgaatcaaaatttgactcctcaacacccaatttaccctagaaatggctcttgtcttcactttggtcactcattttcctcctttgcacaacccaagctttctcacagtcctaaatgacatttcaaactaggattacctcactctaacctccaattaccactaaatccagatttggcttttcaa

SEQ ID NO: 28097 - DNA, 467 bp, Glycine max
tcgcactaagtgcaaagacccttgattgattggctgaatggttcagctaagcgcacatcgctgcgctaagcccaacatcttcactgtaagttgcaccttaagcagtggacttagcgtggatggtgcgctaagcgccacttcctctatgtgaaaatttattatagttgcgctaagcgtgccatcttgcgctaagccccagattcattctgtaagttgagctttcaagctgagcttagcgggaaaggatgcgctaagcgccaacatcattatgttttgaagtcattggaagtgcacttagcataggtagtggcgctaagcctgaatcactcactgtaagttgaagctggatgtacgctaagcctcgcatctcatgctaagcgcatattgcaaaaagaatcttggattgcagaaaggctaagcacccgcttcgcgctaacccctaaatgcttactgggagttacaacttc

SEQ ID NO: 28098 - DNA, 326 bp, Glycine max
tctcccccattttcctataaatagggggagaagtgaaaggaaaaaatgttcggccctcctggtaattcgagaatcacttgaaattagtgaaaaaaattgtttccgtgaagaaaatccaagccgaggcgctttcataacattttcgtaacgcttcctacgtattcctcaatttgggatgagaaaatccgacctacgtagctcttctttatcaagtgattcttttttactttaagaggtgatcattctacggcgccgtacctggaaaatgatccattttacttactgatataatgaactgacaatctccacccccctaattacaagga

SEQ ID NO: 28099 - DNA, 370 bp, Glycine max
  unsure (1)..(370): unsure at all n locations
agcttgcttaagtgagcataacaacatntgaagcctccaggtatatggctcacttaagcggggctaaaaggctcacttaagtgaggtcaatgaattttggacctcanaattttggctcacttaagcgaggtcagttgagtggacttcgtgggtctttattcctcctctgttccattgagtgagcttcctactagttctccaaaggcacccttcaacaaaatccttcaaaactaaccaaaatgcaaatatcatgaagaaaaagtaacaaaactaaatttctaacttgaaaatgatgtttcaaaattcaactaaatgaagtacgaacatatagcccaaatgtataatcagaaatactacaaanatgcaagta

SEQ ID NO: 28100 - DNA, 388 bp, Glycine max
  unsure (1)..(388): unsure at all n locations
ttgtgacctcgacacttngagacctagtgacacttagaatactcaagcctgatgatgctctctaaggactttggactggctaccaagcacccataggaatgtctccttatagggttggctttggaaaggcatgtcatcttacagtggaaattgagcacaaagcttactgggcactgaagacttgcaacttctctatagatcaagctcgtgaggaaagaaagccgagattgagtgaattagatgaaatccgcctagaagcctgcgagaatgccaagttctacagagaaaagaccaataagttccatgatatcatgatagtgaacaaggacttcatggttgggccaaaagagttattggattattataggattggactcatgagtggtag

SEQ ID NO: 28101 - DNA, 497 bp, Glycine max
  unsure (1)..(497): unsure at all n locations
agcttcaagaataatggcctcaacatacttcttattcccagaaggaaattcaataaataggcaaagtaattaagatacattgtataatgaaacgtataataaagaataatggcctcaacaaacttctaatgctgatggttttctgtttggttntccaacaacatttggatccatggtttctcaatttaaagcatttntagaagacactataagcctgttgtggcttacacaggcactagcaggaaaacctgtagggttcttctctagcactagttctcaaggaggtggacaagaagagaccccatgagttatattaattattactgaattcttcaatattcatgattaaggtttccatcaattaatggttattttgtatatatccactcaacatgggagaagtcagagcanactattagtcactactttgtattattattactggtacgaagtatctaccaaccaatgagtcagcttgtcacgatgggatgatacat

SEQ ID NO: 28102 - DNA, 326 bp, Glycine max
tgtgaaaccttgcaagctccaaacaccccatttgaaaatctttctggattaaacttgtgagcatcaggcccccagagttgagggtcttgttgcagcactgagattggaatctgaatattcattccttttggaattaggatgccttttaaattaacaccttggagagctgttctaacaacaaaggctgctggcgaataaagcctcaaagtctcttgaatcaccatggtcaactgcaagtgtaacatttttatatatggccttcacagatcagtaagaatgctcatgaaacttggaaatgatcaactataattacaataaaatttgag

SEQ ID NO: 28103 - DNA, 376 bp, Glycine max
  unsure (1)..(376): unsure at all n locations
atccttagagtcacctgacgcatgcaagctnngggcaagatatatgncatatatgtcacgtgctatcgcgtgaatatcattatctttgcagctgtgtcgaatattattcagctaatttgagcgggaaagataaacgaactgctgtggttgtgtatgccaagtgatcttcaatggggtggtttcaatatttctattgtcactttgtgaacccacccaattgggtatacgcatccaattcatttattattagtattatgcctacaattggaatatgttaataacactgatgagaactatattacctaattagtatttgttgattattatgcctattcacaattaagtttaatgaccgatcacacaatgagttaatatg

SEQ ID NO: 28104 - DNA, 333 bp, Glycine max
tctatagttattttctatctaggaaagtttatgtgaggatgaaattggcaaaaaaacgcaagtagataagacgtcatgctgaaaaattgattcttgttatgaagaagacaccaaagaataaagaaatcgggactacttgggaacacattgcatgtgctattatttaataagtattcttataatttacctttagaccttatatgatagtattttttttctgcgctcaacatttttttaatacacccaacaataaaaggaaaaaataaaaaatatccttacatattacaattacaatctgtatggaacttacagattatgaattcataagcttcg

SEQ ID NO: 28105 - DNA, 540 bp, Glycine max
cgatggccggcgacggtgatgtgagcacgctggatagatgaaacggcttcgtctaaactgatgggtttggtgaggggttcgcacggcgagtgggagtagaagccggcgaagaggaggataataggactggaggggaaaagggtggtggggttcaccattatggtggaagaggagatattggactcatacaatttgagagtgttgcgtcgaagtgactgaaacataccagaacatactatcatatccacttatacactcttctgaggatgtgaataaaaagaaggcttaaatattctacttccctcctgttctaataattgttatcgaagttgttgaatctgccctagtcccttcgctctcacctaaagataaattaatcttcatccttgtatgcgattcatcaccaatggatctctatgacttttgatactgttgtttgtaaagattaatctgccaacccacactttggttgtatatactatgtattaacaaagttcattattttacatgctttacggcgcttgttaaatcacagccccg

SEQ ID NO: 28106 - DNA, 311 bp, Glycine max
caaatacctttcagaggcacatcaacttcaaagtgaagaggaacttgggtaacacacaattcactagtaacagaagacaagacacgatattcagcttcagtggatgattttgaaacagtgggttgtttcttagaacgccaagaaagaatgatatttcccataaagacacaaaagccagaagtggatcttctggtatcaacacagctggcccaatcagcatccgcaaaggcagggaggctgagagagttctgagcaaggaaaaacaaaccttgtctatgagcagatttgatatactacagaagatgatgaac

SEQ ID NO: 28107 - DNA, 476 bp, Glycine max
cgaatataaaagttggaaaagtctcaaaccaagtcaattcgcaagcacacagcaccagaacttaattctcaactctgaagcagccattaagcacatgacatcattacatggagattaattatttcctatataaaaagagaagcaaagaagaaaaaggaaaaaataaaatattacaaagggagagaattaatggcctggactccttgcaacaggaactaaagtgaatgcacaccatataacaaatgcatacctgaggatacttgttctcttccttaaagccagtagatttgtgtacatttttataccaccaaggggcccataagccatctattggttgtggacctgcttctcaactggagaattgacattaaatttcacactattatgatgctgaagctctacctaaacatccaacaaaccataaacatattaatcctattaataagcatacaacagaagaatacagatacacaaac

SEQ ID NO: 28108 - DNA, 432 bp, Glycine max
  unsure (1)..(432): unsure at all n locations
atgggccgataaccccgccncttaanccagctgccnggaacacagagacgaggagagacgaccttttttattttgtaaaaacgatcctaggagataagcctgcgggaggtgctggggcaccggaaacaagaaagcacgaaaaaacgttttaaaaccgtaaagaaaaaatggtttttttaatatattaactttattttaaatgaaggtatttaaaagttattcattgtgggtgccctagcacagcctattcatttgtgataattttgtacactccaaaaccagtgatacttcaaaagaagcggaattaacccaaacattgccaaaaatggccataaaacctagacagtgctagcatccaatggcctgatttgaaccccctcaagaacttaatattctcagctcatcttttatctaattgagattntatcttaa

SEQ ID NO: 28109 - DNA, 465 bp, Glycine max
  unsure (1)..(465): unsure at all n locations
acccatcacatgtggtactaggtggcggncgggttatggtgcaccacaagttttccacatccacaaatcgcgcataaacccaccatcccctgttgcccacctccaactgagctcacgtactcccacgtagcccatatcctcgtttctctcaacaccgggtccccatcaatcctcccaagcttccccaacatccaggtaaaacaacattcaaatagcacaaactatcacagccaagaaaacagggcaaaagcataaaactctgcccaaaacaccaaccaaaatcacagcttttctcacttaaagaccccagtaacaattccttcgttccagttcgttaaccggtggatcgactcgaaaattntactggaagtctctagtacataatcctacattgtgaccgttggtatctattagcaaacatncagaactcattctgcactactctnttcacaaccagcaaaacat

SEQ ID NO: 28110 - DNA, 318 bp, Glycine max
  unsure (1)..(318): unsure at all n locations
tctcttttatcttagggagagtgattctcctaaattcttgagtgattcaagaacaccctgactgtatcaaaggactttcacaacctttgtgcgttgccctcgccggaaagagtgattctttccttcctttcatcttcaaccctgttctttcaaaccacaattccagaaaatccacttctgcccagaattatctcgtggccataactcccgttttacgcactcaaattaagtgattcttgagcctaaattgaatttcaagacgagacctttcacctcgttntggaatcacctcatttggagccctgtagcttgagtttt

SEQ ID NO: 28111 - DNA, 280 bp, Glycine max
tgtgcctcctatcatacctgatatatgagtgttgacaatgtataatgctatacttctcctcccctactttttcgcatttacctaacgtacgggcccattccggcatccaaatttctctggtgttggtcatgaatctctcttatcattatcacttagtttctatgttctaaagtaggcgattataacaccctacacactggttcttctatatcggccttcaaaaccaaaaaataagcccttggggttattaactgtcacttccgctcttcgtcttcaattc

SEQ ID NO: 28112 - DNA, 270 bp, Glycine max
  unsure (1)..(270): unsure at all n locations
gtcgagtgtaattatgggtctggttgtagtcgaatatgagagcgatgtcctctttggctaagtnnttttaacttagtcattaaggggaattgaataggtagtgatgagtccaaatggttaagaatntagagcgacatcttatcaattgtatggtcattagacacatttaaagctttacacatcttcaaaaaggcatgatgnatgtgtccttgaaattaaaacatcattgggatcccaaggttttgctattccagtcgtgatctatctctc

SEQ ID NO: 28113 - DNA, 516 bp, Glycine max
  unsure (1)..(516): unsure at all n locations
cttgccccattgagcccctgannncgccataaaactaggctgagaggtgcttatggggaaagaagatgtgtatatatatatggggagcacgacaatgaaggaattaaagaggtatagaagtggaactttgaagtatgtctcacaagactcttattcattaaaagtaccacaagtggttcacatgcttctatttatagactaaggagcttccctgagaagctttcttgagaaaacctccttgagaagcttatttgagaaaactttcttgagaagctagagcttagctacacacacccctcttataactaagctcaccctcttgagaagcttccttaagaagattcctaaagaagctagagcttagctacacatacctttctatatagctaagctcacctcttgagatgagaagctagagcgtatctacacaccccctattataagctagctcacccccatggaccaaaacatganaataanaaaanaagtcctattacanagacaactcanantgcg

SEQ ID NO: 28114 - DNA, 261 bp, Glycine max
  unsure (1)..(261): unsure at all n locations
gaacatcacatatcgagacgctcaaaactgaacaacgaaagctctcaagaaacagaaatggtcataacctttcactcggatgtccgaatcaggcacataatatatcgagacgctcgagaatgaacaacggaagctctcgagaaattcaaatgaggataacatttcactcggatgttcgattcatgcgcatcatatatcgagacgctcgaaattaaacaattgaagctctcgagaaaattaaantgtcataactctttactc

SEQ ID NO: 28115 - DNA, 456 bp, Glycine max
  unsure (1)..(456): unsure at all n locations
tatttaagggaagaacgatagtatatatatactattacagttcacgggtgtcaccaagataaactcttaattaatttgggtatttcacaacaaaaaatattctcaagttctaccattatatatacacgagcatctagngaagatttactccatggccacatcatattaataaatacaatattgtgacaatagaccgaagtcctattagacatgtatattaaacaacaattttacattatctgtggatatatataaaataaattgccatgagtaataatgaattcataatcatcgtgccatcaatgtttctctgttctaaactaagatggttgcgagcgactaatgacgtgctcgctaatgttgatagcagtgataaccattaagatgagagacactatactgagaccgatgacaagactaacataatcacatgagccatgactcccttaacttcat

SEQ ID NO: 28116 - DNA, 242 bp, Glycine max
  unsure (1)..(242): unsure at all n locations
aaaacaaaaaaacaacccattgatacaaancaaagggcctataggaatcatgtggagggaaactctatacacacatatgaactccattctacaaacatataacataacctggttaataaagagtgaaaaaaacagaaggatgcaggatctataatggaaaaaattacacacctataggttgacatgtcaatgttatgttcaaacccagagagagagagagagagagagaaatatatgattga

SEQ ID NO: 28117 - DNA, 462 bp, Glycine max
  unsure (1)..(462): unsure at all n locations
tgcaagctcaagaatatggcctcatcaaactacttgnttctcgagggtatattctataaatagacctcctatctttaatggagtgggttgccactactggaaaacccgcatgcaaatctttatagaggcaatagatntaaatatttgggaagccatagaacaaggaccttatgttccctctataatggccggaagtgcaacaatagaaaaacctaaagcagattggactgaggaagaaagaagaatagtacaatataatttacaggccaaaaatattattacatctgccctatgaatagatgaatactctagggtttcaaatggtaaaagtgttaaggatatgtgggatacactacaagtaacacatgaaggcacaacagatgttaaaagatctaggatacacactttaactcgtaaatatgaactggttaggatgaatgtaaatgaaaatatacangacat

SEQ ID NO: 28118 - DNA, 301 bp, Glycine max
  unsure (1)..(301): unsure at all n locations
tataagagaaccttactatttctaattatatgtggccatcaaatctatcatgtgttgacagtaattgattagcccatgaatctcctcgagggccgtacacacttcggccatggcttttgctntggctaaaagacgcgggaggtcttgacttccattcaaggtcaaggcgaacatatncatccacatagtcacttcttgatgcaatgcatcaatcaccctccctcttgcttctttttcggcgtacacttgtgcaaaatcctncactaacttttgttcatgggccacagacttggtcaactct

SEQ ID NO: 28119 - DNA, 355 bp, Glycine max
  unsure (1)..(355): unsure at all n locations
ctgcagctaaagtatgcccgagtcattcatccctatgatatgttgtcgaagtattggcgatcagaattgccattccttggattatagggttgaaccaagctcatgcttttacaaaaaggttcatcaagtcaagttgaaatatggaagtaaccgtcttgcaaaattggggcaaaagatgaattgagtcacatcactgcttcgtctactgccaaacatatttaggattatngatgtccttgttacttccagtttcaccttgacaaagatgtcatggaccatgtngaaaatctaaattgattcaaccccatatcttgcgtaaaaattcgcaatacttcaactgtgcatcattcgcatg

SEQ ID NO: 28120 - DNA, 322 bp, Glycine max
  unsure (1)..(322): unsure at all n locations
tgaaagtgtgtaaccaaccatnttctcattgtagttcttctgtaacgtgtatactatcattgtgatcatctntntctctgtcattgaaggtgccacttgagctgtcaagtccctccacctctgggcgtattccttgaatgactcatgctctcttntacacatgttttgtagttgcgttctatccggagccgtatcataattgtactgatattgcctaacgaaggcaaccattaggtccttccaagaatagactcgggaaggttccaagttagtgtcataccctaatttcgtccggggattattacttgacgacatgcaacct

SEQ ID NO: 28121 - DNA, 358 bp, Glycine max
  unsure (1)..(358): unsure at all n locations
gcttggaagaggctcttaatcttcttgttttcttaccaatttcgngtaagctctcatttttggttgcaaatatcttttttttatcttttacagcttgagacatctagaattgagttctttgttcatctgagtatatctgtgtagctacatcaaggtaaagggggtctntccactttttgaaccctgatcttattatcnttggaagctagacttcattgcatgttgtggtgatgttccaaattcgtagctactgccttggtaggatctaagtgatatgagggttcttattgaaattttaggttaaaaatgtgttcattgagtgtcaaaacttanggttagccttaaattcacctggatc

SEQ ID NO: 28122 - DNA, 263 bp, Glycine max
gaaaaaaaaaaaagaagaaagaaaaattgattcacgctacaacaaataaacccaaaataagtcattcagataagcaaccagcaggaaatttacaagaatttacttagaatacagtgcattaagacttaaagagatttttgggaaatgctagaaaaacactttgagacattcttttaaggataaatactcattctgatccttgaaagtgtgaagcagtgacaaattaatcctggaaaatgaaaaattcaaatttagtccctaat

SEQ ID NO: 28123 - DNA, 375 bp, Glycine max
  unsure (1)..(375): unsure at all n locations
ctatggagaactnttcttaactgnaatttttacacacgttcacctatagtgggaattgatgaacaccttgataattcacagcttgcttcacctcaggtcgcaagccatttagaaacatcacacattntgagctttcaccatcccttccttggtaatgaggaanatacctcactagctcttcanacttggctgcgtattcagctacagtcgtgttcccttgcttgagttcaaggaattccatctccttcttgttcctaacatcttcagggaagtatttctccagaaataccctcttgaaggtttcccaagtcatagcttgaccttcagcctcccagcatnggtgagtgttctcccaccaatactcagtttcttcta

SEQ ID NO: 28124 - DNA, 294 bp, Glycine max
  unsure (1)..(294): unsure at all n locations
gtcaatccttaccctcggaagcaaaaaaaaaaagaaagaaggaaaatttcccatcaaagagaaagccaaaagaaaagaaagaaaattcccaatccaagaatgggagaaagaaagaataaaaagaaaagggagaagaagaaggaaagaaagctcctgatcaaggatcgaaagaaaacagaagaaatgtgcagaaaggtctttggaccagacaatatctgaacaatacagaatngtcaccgaatgaacaaaaagaaggaaaggagaccacgacctaaaatggtctttctcctttaa

SEQ ID NO: 28125 - DNA, 398 bp, Glycine max
  unsure (1)..(398): unsure at all n locations
ttcttccttcaccagtaacccccaatccaaggtaaataaattgagtttaatttctatccacttttagtataattattatcttacactctccatttatactggtaatcaatcagaaatcatatatgaaaacaactcttaagtaactttatataaaagttaacaaacttattatatgtaccatacataaactgcttactcataaattactatttttnttaggaaatgttttagctttgttaattatctataagctatgtgtatctttcccagcattattctgctatactattagaatgttcaatatgttaaccaaactagtggttgttttgttaattattggacgatacttgaacagaagggaaaaacatgatacatatgaagaacaatggtgggttgaa

SEQ ID NO: 28126 - DNA, 219 bp, Glycine max
cctgttggagcaataaccgttatactctcaacaatataccctttgtggtctggtagcttctgatactttatgggttaaggtgtctcttggaccttgcataaatactcggttgaatgactacaaatgtttaccccacaactttctggagctgtccacagaaaaaaactaaaaggtcacaagaagacacggtcatatatgtgtttgcagtaaacatcaaaa

SEQ ID NO: 28127 - DNA, 333 bp, Glycine max
  unsure (1)..(333): unsure at all n locations
gttcaagtccatagccatcaaagtctgaagagagtatgatgaactaagggatgtcaatatggccaccgatgaagccttggaatgagaaaccaagaaggcccgaaaggaagaacacgaccaaagcaaagttntaaggggctttatagggcagcaatagtgagctcaagctccgaagaggtgaaaggaatcatcacgggtcaaaggcatgatcttgaaggacaagctaaaggtttgccttangtcgaanagaaagggaagcaagggaaagggtaattgactcattgcaccaagaggcaacaatgtggacggaccgatntgctcttactttgaaca

SEQ ID NO: 28128 - DNA, 524 bp, Glycine max
  unsure (1)..(524): unsure at all n locations
aatgacnccatgantancngtgnancanccganacnnaannnnnnnagngnggnaagcnnanntatnaaaagagggcgcacagttttgcttttttttctcaganagcttctcgaagaagcttctcatggaagtttcttaagaaagaatctgaccgaagtttctcaatgaagactacataagctattaatagaaacaagcgcaacaactttggaacttttgtgaatgacagtctcgcgagacacaaacacagagctcaacttcgtttcccctttatctccttcaagttcaagctccccacttcctctctctctatctctctttcttttccttcattgaagcatcctctncatgctctttcattcaggcacagtcttagcggtgaagcatcttcttacatggcatacttcctagtggatgacgcctacgttgacctcttcctcttatactgtggtgcctctcacggaggaaatcacctcgtatgacctattgaagctctagatccacctcatagaacttccaaccg

SEQ ID NO: 28129 - DNA, 232 bp, Glycine max
ctcactctaacttgccattgagtgaaatcttcattaagccttactaaccttgtccaaaagatgtattcttcaggtaaaaacctcttaacgacctcaaagaagtacaactgcaaaaaccgcttaaggcatcacccctacttttcctgacacactaataaatcagctttaataaaaagggaatattgcaaatccacgtatataaccatataacacatgtctgccatttcttttt

SEQ ID NO: 28130 - DNA, 413 bp, Glycine max
  unsure (1)..(413): unsure at all n locations
ggtctgcattttctttccagggtaagtatttttcttgtgttgaccacttacctataaaaataagtagatttcgagtgaattaagtgctccaacatgtgtaccttcagtcataacagaggatgtccctaaagcttcttcaaatcgttctgccacggtctgcattttctttccagggatagtaattttcttgtgttgaccacttacctgtaaaaataagtagtaacacatataatgtatatagttatatacctctttgtcacttgatgatccactatccacaggttcaggggaatcttcactgttaatgactgtctcctacaagtgggatgttaggaaccaagaatngaaatgaggaagaaaataaaagatnttattgactagtaagaaaagaacagaanataggagagaaaact

SEQ ID NO: 28131 - DNA, 381 bp, Glycine max
  unsure (1)..(381): unsure at all n locations
ctcatttatttcanaataaagtcgtatctagtcaagatctgagagaccatacaagtttcctagcggtttctaattatatgggccattaagtctatcatatgctgacaatagccgagaagcccatgaatttcttcgggggcggagtaagtgtccgccattgccttggccttggctaacaatcggggaagttcttgactcccgttcaaggtaagagcaaaccgatccatccacatggttgcctcttggtgtaaagagtcgatcacccttcctctagcctctttntccgcgtatacttgggcacactcgtccgcgaccctatgctcgtgggtcgtggctagacttaactcttcttggtacttggcgatgatagctagcatgttg

SEQ ID NO: 28132 - DNA, 269 bp, Glycine max
tacacacacggcttctataactcagctcacctccttgagaaacttccttaagaagattcctaaagaagctagagcttagctacacatacctctataatagctaagctcacctccttgagatgagaagctagagcttagctacacacctcctataatagctaagctcacccccatgacaaaaaacatgaaaataaaagaaaaagtccttattacaaagacaactcggaatgccccgaagtacaaggctaaaaccctatactactggaatg

SEQ ID NO: 28133 - DNA, 382 bp, Glycine max
  unsure (1)..(382): unsure at all n locations
cagcagaacaattatgacctttccagcaacagatacaaccctggatggaggaatcaccctaaccttagatggtccagccctcagcaacaacaatagcagcctgcgtcttcctttcaaaatgctgttggcccaagcagaccatacattccttcaccaatccaacaacagcaacaaccccagaaacagccaacagttgaggcccctccacaaccttccctcgaagaacttgtgaggcaaatgactatgcagaacatgcagtntcagcaagagaccagagccttcattcagagcttaaccaatcagatgggacaattagctacccaattgaatcaacaacagtcccagaattctgacaagctggcttctcaagctgtccaaaatc

SEQ ID NO: 28134 - DNA, 311 bp, Glycine max
  unsure (1)..(311): unsure at all n locations
tcttttccatggctagcacctaatgctccatggtttaaacaagaactgcttaataatactagtatgagcaccaagagacaccccatntgagaaattgacatgattntccccactatcttcaaagaccatactattcttccttagtagcttctctgagcaaaagatggataatgaagatcaagatttgagacaccccttgatgttaacacaccagatagtggagaagaatgctgagtttaaaatagagatatctggttctcattcttacatgtgtaaaacataggtttgtcgatcaccaagaagaaagatca

SEQ ID NO: 28135 - DNA, 522 bp, Glycine max
  unsure (1)..(522): unsure at all n locations
atgaccatgaaactctgatnncntannncnanacnaagcncaccttntattcacaagattggcgnnaagtttaccctctantattcacccnctttctcaccgatggtctcccttcatatataaactggaaatttaccataccttccaagcatttctttttggttcacatctaaaggtattaatcaaattcaagatttaagatgcataatccaaactctagtgatctaatcccacccaaccattaaatggctgtagcacattcaccctaacaacgactatttcactcttaagaagccagcatgaagcaacaaaaagattacataggttgcaaagttaaatttgaaatattaataatgcagccttaccaatttcgattctatcaatcaattactanggcagatatcccaagaatctgacagtgagctcgaattaatgtaataacttatatgccatcatgaacacatatagttaaacagcaagtagtataagatattaacanataacaacctatctcacactgcn

SEQ ID NO: 28136 - DNA, 310 bp, Glycine max
  unsure (1)..(310): unsure at all n locations
agtttcataatgtggtctccaaatatggattggaggaaaatgttgtaagccaatgcatgtatcttaaagtgtgtgggagtaagtttattttcttagtcctatatgtatatgatattttacttgcaagtagtgacttgggtcttttgcatgataccaaaaatttcctctcacaaaactttgatatgaaggatacgggtgaagccttctatgtcattagaatagaaattcatagagatagatctctaagaacatcgagattatctcanaaggcttacatagaanaagttttgaaaagatttaatatgcagaa

SEQ ID NO: 28137 - DNA, 520 bp, Glycine max
  unsure (1)..(520): unsure at all n locations
ntganncctgggaaccnatcgtttagcgttantccnatgaataaccggcagattattgcttcatcatgaatacccaaggcattctggtgttatcattgangagggttttttagtaccctgcactctcccagggatggaactctcaaaagcccctagcagtcataatggacatattccaatatgggctttgtagtgtgcacaacctttgggaatttcgttagataccgtgctcacaaaacaaaagagagttcaccttatgatttccgtgtgagccttgcttgctcaaaatattcacgtttttttacactcatgtgacccagacacagataccacaaagaattattattggacgagccattgggtgcatggctcccaacttgtgaaactgttaaaatagagcctatcacattggacccttgaaggatgtacaaattttcttttttggtttgctgattatcacaactttctttcctctgattgcatacatccactaacacaccattaaaacttctaatcatgn

SEQ ID NO: 28138 - DNA, 312 bp, Glycine max
  unsure (1)..(312): unsure at all n locations
ttgttgccgcctctgttcgttaccaatctatctgtatgcaacgtatcttggaaattctgcattcattagttgattttgctatgtgagtgtcgacccttcatttaaggatccactatctctctgatagttgactcctcgactgcccttattaccgctcgtggtggatttactacgcctaccgcacatagtagcttatctctcgtatcgataatcgattcgctatcggttaacaccgtctacttgaatcaanttgttcatgccacacgcggttatactttcttattgtcacgttatccaactgtcttattcctg

SEQ ID NO: 28139 - DNA, 224 bp, Glycine max
  unsure (1)..(224): unsure at all n locations
gacacggtacctacgcacccgagcgggatgacacaccagccacggcgcactctcataacaaaccggcttgacgcagcaaagtaagccaagccccgacaccgccaacacccgtgacgctaatacncacgcacgacaaaaacagccaggacgggaccgaagccacaacaaacgcacgaacgactccacggcaccccgcaaccgaccgacagcatgcacgaagcacc

SEQ ID NO: 28140 - DNA, 368 bp, Glycine max
aacataaattataggccatcataatagatggatacaaggatgcaaaatctaaagtagcaattggtttttcataaaatccagcccttgcctccaatacctgcaagttgtaaagttcaaaatgcatgcatcaaaaggcaacacagcttgacaagtgaaacgtccaaaaggcaaatacaggaaaaggtgtagaacattaactccaataatattatgtagatctccatacataaagatacttgaaatttgagaattctttcaatttttcatttattaactgaagaacaagagggcatttaagattgagcttgattcaggcctaacatgctgttagagattcccaaacatcaatagttactaatcagagtaaa

SEQ ID NO: 28141 - DNA, 292 bp, Glycine max
gaatgaccatgaaagtcaacatgaatcttcacaaacttgccagaatttggaacaatgtgaatgaaaaactggagacaaatgaactgcctcatgatatagcggtgcgggctaaatgggtcaatgcttcacatttctacaaactattggttgagccactagatattgcagagtattatgggaaggggatgcacacaacctaggggcattacatacagcatggcatagagaggaggtatgagaattttgataggtgtgggaaggatggaatggtctacacggaagaaaataatga

SEQ ID NO: 28142 - DNA, 291 bp, Glycine max
gcttcttattttatatgatgcagatgggtttgtagctacctcatgcactccgctaatgactatggcatcatttctggcactaaactgctgggagttggaggccatcttctcaattaaatttctggcttcagcaggagtcatgtctccaagggctccaccactggcagcatctatcatacttctctccatattactgagtccttcataaaaatattggagaaaagctgttctgaaatctgatggtgggggcaactggcacataagttcttaaatctctcccagtactcatac

SEQ ID NO: 28143 - DNA, 392 bp, Glycine max
  unsure (1)..(392): unsure at all n locations
tactcagctgcttctcaaatggttgtatgctttcactcttgtattgtatgcatgattatgatgggagttgtgtttcttttcatgagtttgagcaagtgtgtatgttagacaaagaaagaacatgaatgtgaacttgcaattagaattgttagtcagcagatagattgattgagaaagaaaagcttaaaccaaaatcggtgagagtgtgatcttaaactgtgagtgaacgactagctgtgagtaatgatctttgcattaatctctgaattttagaatgaaatgtataaatgaggatatgatgaaggccatgattgtgcatatacaagccttttgaccanaagcttaccttgaacgataattatatcctttacacccttcttgagctgatgata

SEQ ID NO: 28144 - DNA, 452 bp, Glycine max
  unsure (1)..(452): unsure at all n locations
tcgatgtcagagtgagtcgccgaacatatcgagacgctcgaaatggaataccgcagctgcgagcatattcaacgacgggaactntctactcggatgtcagactgagatgccgaatatattgacacgctcgaaatgaatacggtgtcttgatcatatccaaagatactttctcttactctgatgtgtgaggactgccgaaacctccgaacgctcgaattgaatgttgagcgttgagctcttcaaccacatatcttttactcgcgtgctgaagaacctggatagattagaccccgaaaggataccggctctgacagttaaggaaaatcctttcctggcgtccgcgcgccatataaatgaagatagatttctctttttatacaaaccacgcgtacttcaccccctcaggttcggagaaacagcggaaaaatcccctttcatgacacaaggtttct

SEQ ID NO: 28145 - DNA, 554 bp, Glycine max
  unsure (1)..(554): unsure at all n locations
cggacnaattgaanccttgtgtanccccctcacgnnncnnatganttccattgtattaccccgccncaatagannactcangctgctacatctcaattcgatcttttcgatatattacgggactcatttcnttcatncgagtaaaaagntatcgcggttgaatttgctcacggcttccggatttcatttcgagcgactcgatatattacgggactcaatcggacatccgaagaaaaaagtattggtgtctgaatcttcccacagcttcggtattccatttccagcatctcgatatattacgggactcaatcagacatccgagtataaagttattggtgctccaatttgctcagggcttcggtattccatttcgagcgtctcgatgtattacggggactcaatcagacatncgaggaaaaaagtatttggcgtttgaactcgctcagagcttctacattcaatttcgagccttttcgatatattacggcactcaatcacacatccgagtaaaaaggtatatgccgtttgaatccgccacagccttcatatccccg

SEQ ID NO: 28146 - DNA, 296 bp, Glycine max
  unsure (1)..(296): unsure at all n locations
cgagactcgccaaggagaagttcanatcagctgctacacacatccggaaggagtgcaccgatttacaagagganaacgcgaccactacanaagcccttgaacaagaaaccaaaaaggcccgcaaggaggaatatggccgagagatattccgaggagcattgtggngtagtaacaatgagctcaatctccgaagagaggagagagatcggtcacaggtgcatggcatgatattaaaagaagagttagttgcttgcgtgaggtccaaaagggagttggctcaacacttggaagccacg

SEQ ID NO: 28147 - DNA, 361 bp, Glycine max
  unsure (1)..(361): unsure at all n locations
gctggactggctagagtaatatctttgatcaaaggaacatgattcatttctatggcaaaattgggtgtggaggagtcacaatttgattcggtggaattttaggtgtaaattcangttgagcgagcttagattgatgttatggacttgtgtgaggtgagagtttgcttcaaatttacctcattctaaatntcactttttcaacctagaaaacccatcgaattgaggggtgttggacacctagattctgtgttggtgtggtttgaagcttgattttgggttagacatgattgatacatgattcgcgacttgtangaattgattcggcaagattggatgagaggaagtgtgattttcgaaatct

SEQ ID NO: 28148 - DNA, 455 bp, Glycine max
  unsure (1)..(455): unsure at all n locations
ctatcttcttcctcttctccggttctcattntcccctatacctccgatgtttactctctctgcgctctgaaaatcatttttcacatcctcgaatccgattccatccaatacgcgtgctaccctgtgtcgtcttttcatgagatccacaaatacacaaattcctcctcaaacgacgagcctctctccgtcgttttggtcaattggggcaaccacagagacctcagcaataccctanacctcccctccaacgcccgcgttttcgtcgtcgacagccaccgccccatccacctccgcaacctcagcgaccagaacgacgccgttgtggttctcttcactaaagaggacgagggacaatccgatcttgcttacgatntcgacctcaccacactcgccaacgccgncaccaccgtcgattctgattncgattccgaatctgagtccgaatcggattcgga

SEQ ID NO: 28149 - DNA, 511 bp, Glycine max
  unsure (1)..(511): unsure at all n locations
cggggatgagccttttaacgtccncacttgatcncatcttaatgtcgcgttgatntatcttctatgcataccggccgntcttgctgtgttatctttcnacagcattctagcgcaggaaggcaccttggctttcatagctaatactaattgggcgatatggattgctagaaacaacagtcgttttcaagatacaaacatcatcttcttggctgccactcacctgatatctgcagcaaccactctctctggaaatatctcttaaggctctatgaaatcctcaagtgatgaattcactgctcttaagaatatatggaccagcattctaaaatatttatgatcaaatcggtaattagcaatatatatttcaaagaatttataacataagggtanatataactttcgttttctcatttgttttttttaaaaaagtactatgaccttttcttaaataagatattaatcttcatatttttaaaattaaattttttttatttttaaataaacatntttn

SEQ ID NO: 28150 - DNA, 363 bp, Glycine max
  unsure (1)..(363): unsure at all n locations
tacaactcaaatgcgacatgtgcttatcatggaggagttctggggcattctattgagcattgtatgaccttgaaacataaggtgcanagtctaattgatgaaagctggctaaaattcaaggaggacaattgcttgtgaattctaacgttgtcgagcgatactatgtatgataattgcggcaatttgttggttgttgttagatgtctccaacgactcattangattttcaagtttatgccattactgcaaacaacagtcacaatgctaataatgtgngataaattgatgtccttgtctcttattctctcacaattacattcttttatatttattgaacattcactggaatgtgaatgtacgtcg

SEQ ID NO: 28151 - DNA, 504 bp, Glycine max
  unsure (1)..(504): unsure at all n locations
natgaacctgaacncttcaacacnannctaagctcacanatcaaaaatcatctattatatgaaacttcctatttcttaaaacagagtagaggccgaaaactctggtcaaaactcattcaaattccataangttttctaaacacataccttaagaacattctcttctgtccaattccctaaccgttggatcgcctagaaatgtttactggaggttcctaatacagaaatctaaatgtgaccggtgggatatgctagaaaatttctaaaacacgatatatactacccttcccctgacctgcactggagcaccatntnttttgcataataggcaaaatttactcacgaacattctcttatttccgattcgttaaacgttggatcgccttgaaattttngctggaagttgctaatcagaaatctaaattttgaccgtgggatctgctataaaatgccttgcccccgangtgtactacccttcctgtgactaacaatgcataaatattn

SEQ ID NO: 28152 - DNA, 394 bp, Glycine max
  unsure (1)..(394): unsure at all n locations
aaatggctattgttacatagtgatttaaatgataaaaactattttttgccaaactggtaaatcttatcttaaacatcttgattaatgtgctaacatcctagattattgtactaatctccctagggatatgtgtactcagagtaaatttcaaatagagataaattacaatgcgacttagtgcgcagttcaattcttgcacagatgaaaatatagttcaaatagtttttatttctctgtcaagcttcactaaactaatcacatgtatgtatgtatatatgtatgtatgtatgtatgtgataagcatganaaataagaattaaaaacatataatcactggcaataaatacatacatgcatagatgatacaacatagagtctnctttgtcaacttgag

SEQ ID NO: 28153 - DNA, 424 bp, Glycine max
  unsure (1)..(424): unsure at all n locations
atatatgagaattataaccattctgcctttcaagacaaaatctttgagtgtgaccttcctttttgcagtgttaacatcttatattaggcacatttccattatttcctgactgtggctttgatttcttcttctcaagatggntgtctttcttggttcgtttcccttagactattaaaccttcaccactcacaaaagccttttgctcgtttctttcattcaattcctttgagttcagggcttattgaacctctaacagggacaaagattctctacaagagagtntctttaaaatgagagaaagactttggtaaagcacacaatagtaacagggcctgatcttcgtcatcaatagtcacatctatattttctagatcaagaatcagtttattgaagacatctaantgagattccacaattctatctt

SEQ ID NO: 28154 - DNA, 109 bp, Glycine max
catcgggtcagtacctggagcctgcgttatatttgccatggcgatacggggcgaaaagttgtctattgcccgttaatcaattgggaactatccaagttgctgtaccaac

SEQ ID NO: 28155 - DNA, 294 bp, Glycine max
acaacacaagagcgtgattgattagagaaatatatttctatgcatcaactagcttcttataaagacccaacatttctacctactgctgtcattttatttaccttgcattttatagtttttatcatacaagtttattataaattctgtttgaaattatcatttatacgtgttctatgaacaatgctgtagttctgaactcagttcacgctaacattatttccctgtgtttgttggatcaagtggcctcggaataattaagaatgggggttgaattaattattaatgtgtcttgac

SEQ ID NO: 28156 - DNA, 542 bp, Glycine max
  unsure (1)..(542): unsure at all n locations
agggtttgatcctttgtancatccgcactctgtatactcactctcggtgcgagctgaaagagaactgcgaacggttcgggctaggatataatcctacacgtgncgacgagtatttaagtgccctataaatgaagggtagaagcaccggtcacccgcaaggaccacaagtgaaagggattcccttatgtcacatcaatgaaagcgtcattatcgcgggctggatgtgtgaacggtgggtcgccatgatcaacgattgaaggcctcaagaacaaataaaatgggtgtggtcatgccctcctgagttcgagttaggaaactagccaattattcaacaacctggaattttcgtggcaaacataatgtaatttgttagtcctaaccctataactgggcctacgctttatgggtttctccctgtataagcctatctttngccatccactatatataaatacagcccttcttcatttggtcttgcactgtcattcattctcattcgcttgcatgtttaattttggtgcactatatggtacagatccacg

SEQ ID NO: 28157 - DNA, 452 bp, Glycine max
  unsure (1)..(452): unsure at all n locations
cttcttcataagggtgnctctttgattcttacagatcaatggcagtggaatggagaaggaagaaagatgattggagatgccacttcaaggaaaagatgagtcaagaacaagcccaccaccataggaagccatggataataagttgaagatacgacaagatgattggagggagagggagagaatgagcacgacattttgtgcctcaaatgaggtctgaactttgaagtgaaattctcaaatgatcaaagttgaaaaaatgcacacacatggcctctatttatagcataagtgtcacacaacaatagagggaatattgaatttctattcaaatatcactcgaatttgnaatcgaattcgtggagccaaattgattagtgaattctagctactggtcaacccactaatccaagatcaagttcaagatgctccactaagtgtgcttacgtgtcatg

SEQ ID NO: 28158 - DNA, 517 bp, Glycine max
  unsure (1)..(517): unsure at all n locations
gccaaagcctctgtgattgattcaagacttcaagatcaagcatcaagaatccaatccaagattcaagattaaagagaagaaatcaagaagcaacaagtcaagacttcatatgggataagtattaaaagattttttcaaaaaaacaaatagcagagttntgttttacaaaagaattttctcanactttcaaagttaccagagtgattactctctggtaatcgattaccagttggctgtaatcaattaccagtgaccaatttggttttcaaaatgttttcaaatggtttgcaatgttccaaaatgattntcaaatagtgtaatcgattacactatattagtaattgattacaagtgaatctgaacgttggaattcanatccaattgtgaagagtcacaacttttcataanatgcattgtgtaatcgattacacctttgtgggaatcaattatcagtaaacagttttgaagaaaaagtaagagttatactcttacatggtctcaaatgcatactcttcat

SEQ ID NO: 28159 - DNA, 435 bp, Glycine max
  unsure (1)..(435): unsure at all n locations
ttctcagccacttgacttaatcataattggtaacagtttcgattataaagttgttgagagtatatntatatcttgatactatggaatcattnttatgatggatagaatttgatataatatatatatatatatatatatatatatagtccctagtctaaacacattagacaataatatccattccatctaaagtgagtgtgctaaagactaaaagtattccttgcaattgacactatgagtgctgctgtcanattcatttgctaaatcatggaaagagctaagaccggagattattaacctaattaaattaaatatacttntatcctgtntgtggtgacaaaatttatcaccatgtacttctaaattcaatgattaattaaacacaaaatgaatggacaagccaagaatggtgaatactatntgaatatgatttat

SEQ ID NO: 28160 - DNA, 445 bp, Glycine max
  unsure (1)..(445): unsure at all n locations
tgggtaaaaggctcacattcactntcttttactttatattcaacccgnccaaataaataataaagtcatctcgactcaaagaaggtcatctaagtcccatacaattaatatagaacctatatcctaatgtcacatcctatcagagcgtggtgtgtccgtgtcctctagcatgaggttcttcatagtcatccacctattcatctgctccctcgaacacaaagttcaagatcatcacaggatccatacacacacagcaaaccgggagtgagttaatcacatttttactacttnagagaaacaacacaacatataatagcctaataccatttacttagcatatctcacattatatcatcaccttgtcattcatgcatgacacctttcatccatcaatcacaccttttcatcagcaatcactatacacaggaatcacacacttcgatca

SEQ ID NO: 28161 - DNA, 284 bp, Glycine max
gggcattccatgtcaacttttaatcgccataacatactatgagcgtcaatcggatatccgagtcaaaactttttccggtcggaattcacccgagttgttacatgatataatttgagagtcgcgataggttacttgcgttatttgaagatccggtggaagagttatggctgattgtatttgcgatgggcttcatttctttcctaagagcgtctcgatatattatgagcttcaatcgcgaatctgagacacatgttatggttgttcgaatttgcgcggtcagtcca

SEQ ID NO: 28162 - DNA, 413 bp, Glycine max
  unsure (1)..(413): unsure at all n locations
tcccgacccaacccgggcatagtcggtcagtgatattctgtgatgtacctttttatgcgagctcctggcagccaacagattataggaacaaagaccactaagcaaggaggcttgcggtggctggccagctctggattttgtgtgatatgtggagtatggcctctggtaatcgattaccaacggtgggtaatcgattacaaggcttaaaaatgaagacaggaggctaagatggtctctggtaatcgattaccaaggggtgtaatctattaccaagctataataccaaattangaaacttanggagcctctggtaatcgattaccagcctgtgtaatcgattacacacatggatgggtcactggaatcgattaccacgtatgtggnatcgattacacagtgcatttttgcatatt

SEQ ID NO: 28163 - DNA, 297 bp, Glycine max
  unsure (1)..(297): unsure at all n locations
aagatctgaacctttgtttcttgaccatctcatggaaggttcatttaaggtaaagggattatttttcatttcttaaaccttaaccttgntgtctntggaagctagactacattacatgttgtgatgtttaaaattntgtatctgcttccatgactggaactggatgatatgttgtttttatggaagttttaaggttaaaaatgagttctttgagtgtaaaaatataggtttagcctaaaattttacttaaatcggagttttctagcaaaagttatgaataaaacaagttttagaaca

SEQ ID NO: 28164 - DNA, 415 bp, Glycine max
  unsure (1)..(415): unsure at all n locations
tctacctcaaattttcatatcttcgattgcaaccaatcaatcgtacatcaaacttgtggtttagtgttattaatttggctatggttcagctacttcagccgtaacattgcacatgaaaccaaaataaaatcgtttttttatttttttggtgatggtaaaatatgtaggtgtagctcttcatcaaagaaaccaaagaaattaactactacttctatctcatattacaccataaacatttatcatttaaaaatattaattatttttcaaagctcacaanttcatgatctatntgcctaacacttgtgagtatccctttcttagaatgcctaagatanaaactaaaccctctctccaaacaccttacanatgaatattgtcagcangagcaaactcatatgagttaagtactttctct

SEQ ID NO: 28165 - DNA, 546 bp, Glycine max
  unsure (1)..(546): unsure at all n locations
ttcgggagccancctgcatgtatgctagctagggatgttgtgtgtctgaaaagaagtttctctattctaacatcccgtaccacaccgggctatctcacagacttcgactgctgatgaggtcaaacaaaaccatggctctctgcttgtgggtacataatacggaatacacctgtgactgttccttccattaaacgcagagcggagatttgtactacctaagtaccttcgaatacgttgtaagnaaccggagtgaatccactctggttaacgataccgaaaggaggacatcataatccccgaccattaggatntatagtgatacaaatgcgtagctagaccaacagtttcaagatatcgtatctattctctatattagaatgttacatgtgatctgacgaagaaaacaagtccatgggagatccctctatcataatagccaggtatcagtacacctagagggtcaagatagtaacagtccactaacagtagagactcttcacatgctccattgccaagataatgacttggccgcatagaaccatggct

SEQ ID NO: 28166 - DNA, 285 bp, Glycine max
  unsure (1)..(285): unsure at all n locations
gggcgatggtgcaaaacaagttctccacatccacaaatcatgtacaacccaccatcccctggtgcccacctccaactgagctcacgtactcccacgtagcccttatcctcgttcctctcaacgccgagtccncatcaatcctcccaagctttcacaacatccaagtaattccacatccaatcatcatggactaacaaaatcaagcanaacagggcaaaggcaaaaaactctgcccaaaatacaacttaaattcacagcttttcacatgccaataccccagtaaca

SEQ ID NO: 28167 - DNA, 167 bp, Glycine max
  unsure (1)..(167): unsure at all n locations
accttgaattatttcctttgatagcccctnttgcctatgttcccttttctttctttagaagctcattacaagccttaagtgaaaaaccatgatatcaccttacccttaaggaattttggagctttggaattgttttggaaataagctaggaataagtgtggtggggg

SEQ ID NO: 28168 - DNA, 215 bp, Glycine max
aaatggtaaattaccaaacgtgagggggaagaagtggaatgaggagtgaaaaaggcgaaaacttgacctggtgggagtgctattgagagtgtcttggagagccattgacggaagaaagagcgaatccccgaagtagtgagagaactgcgaggaaatttaataaaaagaaaaacgagaaaattagggttaacagagaaaacagagtggaaaatgag

SEQ ID NO: 28169 - DNA, 480 bp, Glycine max
  unsure (1)..(480): unsure at all n locations
tgatgcagctgagttttgttctacctcatgcactcctcattgactatggcatcatttctggcgctaaactgctgagagttggaagccatcttctcaattaaatttctggcttcagcaagagtcatgtctccaagggctccaccactggcagcatctatcatacttttctccatattactgagtccttcataaaaatattggagaagaagctgttttgaaatctgatggtgggggcaactggcacatagtttcttaaatctctcccagtactcatacaggctctctccactgagttgtctaatacctgagatatccttcctgatggctgtggtcctggaagcagggaaatatttttctaataatactctcttaaggtcatcccagctcgtgatggaccttggagcaaggaatacagccagtcctttgccactccctcttatgaatgangaaaagccttcagaaatatgtgatcctcttgga

SEQ ID NO: 28170 - DNA, 342 bp, Glycine max
  unsure (1)..(342): unsure at all n locations
ctctcttttgaatttgcttagaaaaattgtttccgtgaagaaaatccaagccaaggcacttccgtaacgtttccgtaacgtttccgtgagtgatctcgcgaaggttttcaatcgttcttcgacgttcttcattcgttcttcatcgntcttcggtcttcaacgggtaagtacctcgaaccacagctttcgattcattctatgtacccgtggtggtccacattgtgtttcgtgtaatttccttctcgttttcatttactttccgtaccccttttgacgtgcttaagccattttatttaagtcatttctcgcttaacctaaaaataaaataaatatccaccgatc

SEQ ID NO: 28171 - DNA, 426 bp, Glycine max
  unsure (1)..(426): unsure at all n locations
tgcacttcttcactttcctcagaaatntcagcctctntcccatttagactntttagctntgggagccttgttatcccttgcgttctagacttcaaccacttgtgatagccgccaatgacactgttgctacttcccctaagatccttatcttttctttccactctattccatgctttatggattttttgcagtatcttcgctttagcatcaatgaaaccttgcgtgatgaaaggcgtgatgatttccttcgaagatgcacctctcatagggtagcctaactgtcttatggctaggacaagattataattaatacaacccctcatccctatcaaggggacatttgggaatcctttgcatgagcataacactcctgcccctccttctttccaccgtgggaaccaactaacanacgctcccattatgcct

SEQ ID NO: 28172 - DNA, 437 bp, Glycine max
  unsure (1)..(437): unsure at all n locations
actcattggtaacaccttattcctaactcaatgacttttaagtcctgatgaatgagtacaaagtgacttgcagtagtttggtgagtaactcaacattgtatataatcagtacaaaaacacctttgtttgtcaaattttaaaatcatattctaagatgaacttaatattaatttcaagatgtgtcgagtaccatgtactcatttaagaaaggtgcaagattcacccatttgaatttgaaagggattacagaatgcaagattgtttataatcattggaggaagtctacaaaaattggctatggagggaggacttttgcataatcacaaaattcggaagctagaactcanattatatttgagttcccaaatgcaacatctaactntgttttattttggatttggttggaatttaagtacactatactatactaatatcta

SEQ ID NO: 28173 - DNA, 193 bp, Glycine max
cttttcggctcacgatgaaacccaatatttttcccgatttgaccccgaaagtgcacttggtcgggttcaaccttaatcgggacttccgtaacctcttgaacaactttcgtaagttgacgagatgttcttcttcagtttgaacttggcaatcatatctgccacgtacaccttcgattcggatgcatcatatcat

SEQ ID NO: 28174 - DNA, 360 bp, Glycine max
  unsure (1)..(360): unsure at all n locations
tcaccaagttcttgtaagcttcccaaccaatcaggtattcttccactcaacccgttgttattcatcaacatgtgttccatnttcttggagtatgagagttgaggtggcacttctcctgttaaattgttgaatgataaatcaagacagttgagaacagtaaggtggccaaattcagaaggaatgctttctgtgagataattctctccaagtctgagacggctgangtttctagaattggttagagtggaagggatgggacctgagaagctgttgttagtcaccgccataaaggcatggaatttgaccagtgagaggaaagaactttcctgaacttgtggtgaaagtatgatttgagctttt

SEQ ID NO: 28175 - DNA, 474 bp, Glycine max
  unsure (1)..(474): unsure at all n locations
catgcaagctngcaatagttgggcagaagatggatcttgttacatagcttctttggctacttccaacacatgattgagctaaataatttacaaaattagagactgttgatgtccatgttttatttccaattgcactttaactctaacaagatgtaatgaacaatgttattttaatgaaaatctgaattgattcgaccctatgttctactgaatgtcttgtgtaaaatttgtaatacttcaacaatgtatcattcacatacatccatgcttatttttcttttcacactggttgcattgctcattgtattctttccttgaaatcagaaatgtaatcattgtaatcaaaaggaaaaaatgcgctntacgacgcccttaccgaacgcgtggcatagctagagtgatgagtgaaatagatgaggtgcangagcagatgatcacaatgatgaaggccataatgagtatgagtaggatgat

SEQ ID NO: 28176 - DNA, 437 bp, Glycine max
  unsure (1)..(437): unsure at all n locations
ttgcncncnnnnttgtagcctgataaccatcgtatnancngacactatanantactcaagctggtggctgcattcacagggttccagaatatgtcattatattcttgatctaacgacgaggctactacaacgaaaggtaaatctgcattaaaatgatatttcacgacgtgagggtataaccgagtctcttgttcaacaacacgtcttataaatcccttgtgcttcactaaacgcatttataaaaccgcaaacacttataaagtgataaaanttcaaatatccaaatcatgtaattaccatgacatgttatttgaacatgatctaccataattgaatccgggtattggattgatacgctgataaaacttcttttattattagatgtttgcatactacccttttcgcctgtgatacacataactgatttaccctaaggt

SEQ ID NO: 28177 - DNA, 511 bp, Glycine max
  unsure (1)..(511): unsure at all n locations
tgcaagcttcagtttgcccnctgcgtctaatcacatgccggttctgtggagatatggttcaagctgggaggtctgccatggacgtccgtgacagattaagaggattgtctgagcgttctgtgatgttgaaggacatggatattcaccagatttctgttcatcaaagtggctagttgatagcagtgtagcagcaacagcaacatcagagaaaacagggaaagtaaacaacaatgcaggagtacaattagcaaaagcaaagaggagagttaccaggccagcatatctcagagattatgcctgaaatgcaatgcaaatgatgaggagatgagctggcagtgcaggatttgctagcttctagttgtcccctgctaggatgcatccataaccaattctgttatgcaaatattcctagaagatatggataattcctttagcagtaggcattatatatgcatatgtaaataactagcanaatcaataagaaccaattacactcctctcattccttccc

SEQ ID NO: 28178 - DNA, 267 bp, Glycine max
cagtcgatctcttacgttttgtccattcaatctcttattctttctatttacgcgcgcatcctagcattaaaggctccaaaactgtcataataaactatctcccgcctggctctactgagtatgcagcactcataatcttacgttgcatgatgtcatatatatgcttgttgacttgatcgcagggcttatctcctgtcgcttgaataattttttcaattgtcatcgggcatgattgtcctacgtcatatcatctcttgttgaacttct

SEQ ID NO: 28179 - DNA, 241 bp, Glycine max
tgaacatattgaactcattctttgattctttgagatcatcatctttcttatcatgaagtgttcttaacctttgagctttatgacatcacctttgttatcatcaaaactcctttgaatcaatcttgattcatcatgaagcttgcttctacaatctcccccttatagacgatgacaacttctgaaatcaagatacacacacacacactttttcctagtcgatcactcacataaatatcaattc

SEQ ID NO: 28180 - DNA, 323 bp, Glycine max
gcatgcaagcttgtgactgttaaagaaacgcttactgtgttgcaacccagctttttcttagtttcctcaatcattttttttttctgttcatcattacatgtagttaggttgtgactcatttgagattgctagagtaaagtgttaagcatgttttgtgtgataaaggggttggccaaaagcttctctgaagcataggataaggaaagaacttagaaaaatttttagtcatccaactcgctcagtgtgccccatgcactaagcgagacataccctatgcgctaagcaagtagcatctctcgctaagcgcactaacccccatccat

SEQ ID NO: 28181 - DNA, 399 bp, Glycine max
  unsure (1)..(399): unsure at all n locations
tctggttagatgataaatctccacaaatctaggatttttttgagcaccaatacctctcaaactctcagacacatctgctcaactctcgggcctaccttctattattgagaggagcaagaaagttgtttttagctctgtcaaagattgagtatggacatgtgtcaaccattggtcaactcgtcatctgtctaaggttggtaaggaaatacttatcaaatcttgcactcaaccataccatcatattgcatgagtgtgtttctgttaccggcttctcttgaagatcaaattatgaaaatgatgaacaattntaggtggggtactatcgcaacctaccctttggcaggatggcgacgcgagactcacangtgcatcttccaatggaggaaaatgcacggagtc

SEQ ID NO: 28182 - DNA, 306 bp, Glycine max
atgcttaagaagattcctacagaagctagagcttagctacgcatacctctctaatagctaagctcaccttcttgagatgagaaacttgaacttatctacacaccctctataatagctaagctcacccccatgaccaataacatgaaaatgcaaagaaaagtcctactacaagctactccaatgcccgaagacatgctcaaccctatctactaaatggcataacaggcccaatgaagaaacctattctaaattacaaatagtagctatactacccatgggtgaactacctatgtatgaaacctaggc

SEQ ID NO: 28183 - DNA, 269 bp, Glycine max
agttttagtgggacattactcttaaagcacaaatggcatataaccttcttccataaatacaaacatcaatgtaatttagagcaagcttatgcgcatgtttccttacgaacgttcacttgccgaagacattctattaaccgaaaaaatgcacccatatacaatcaaggcagctttgtacctagattattacacgtacttcaaggttatttgtacttccatacacacatctccttggtaaattcactacatgcatactccaacatttgggg

SEQ ID NO: 28184 - DNA, 292 bp, Glycine max
tcgagctgtcgtccgatgctcatgttcgtcgatcttatccgctcatgcagccattgatccatttattatacatggaggcgcactgatctgctgttggtcaccattatctgacgtactaattccccgcgccgtaccttctactgtctgtgactcatcatgtcttcttacattaatatcgacatgttttttaccaattactgcgcttaactcactgttcgtcgcacttcgtccgtctacgctggttgttgtttctcgatcttatcatctcggatcactgctttctttctcagtc

SEQ ID NO: 28185 - DNA, 89 bp, Glycine max
ttgagcttaaaccatcctgcattctgactatagaaccctaataatgaatacgaacataaacgccacggttttatactctctctgtctgc

SEQ ID NO: 28186 - DNA, 349 bp, Glycine max
acgctcgaactggaataccgaagctctgatataattcaaacgacaataactttttactctgatgtctgattcagtcccgtaatatatcgaaacgctcgatattgaatgttgaagctctgatcaactgcaaactacagtaactttttactcggatgtctgattcagtcccgttatatatcgaaaccctcgaatttgaatgttgaagccttgagcaaatttatacgacaataactttatactcggatgttgattgagtcccgaatatatcggactctcgaactggaatacgaagcctgagcatatcaaagacaataactttatctctgtgtctgataagaccgaatatatc

SEQ ID NO: 28187 - DNA, 267 bp, Glycine max
tttgagcgtttgaatatacgaactcttcaacatccgagaaagagtattgcggcgaattgccagacctccacatcaagccagcgcccgataatacggacacaacaacatcgagaaaagcaatgcgccgaattgcccaagcttggatccattcagcgccgacaatacgaccaacaacacccacaaaaaggaagcgcggacggccaacccacaaaaatgacgtggagacacaaccaacccccccacaaacaggcgtaaagccaaaaccaa

SEQ ID NO: 28188 - DNA, 468 bp, Glycine max
  unsure (1)..(468): unsure at all n locations
tatgcatgtgaattagttctcatcaacaagaatcaagccaaggctattgtgcaagcaatcaatggggcaaaacacaccaaatgattataatgatggatggctcaaattctcacaaaggtaaaatcatcactttcaaattgagctttcaaaactatcatgacatgtagagaagaatcaaggatttcaagtcacaaaatgtcaagaacttttattttcaaaacaattacccatttcttgaacatatcctataattcaaagaaaaacatgcaaagtcgtacgtgcacacaaaattgacccacaatattaaactaaaaatctgacgaaactaacaacattaacaaattaacacaactaacaaattaacataaccaacanaactagcaaaaccaaagaacactccccccatacttaaacaacacattgtcctcaatgtagcacaattaaaagaataataacaattaaatcatc

SEQ ID NO: 28189 - DNA, 463 bp, Glycine max
  unsure (1)..(463): unsure at all n locations
actagctcaaggctaccgctgagatatctttgttccccttactttatttttttgactaaccgcctgagaactttgtcgtaacacattggagggtacatcctttgtggtacaagtagagggtacatctactgggttgttgtgactgagaacaagagagggtacatctcttgtggattagttcaagtggagggtacatccacttggttgttcaaagagaacaagggagggtacatcccttgtggatctttgcttgaaaggattttacaaggttgaaaagaaatctcaatgactgcaagtcgcttggggactggatgtangcatgggttgttgccgaaccaatataaaactcttgtgtttgtcttcttcttccctacacttttaatttccgctgcgcactntgattatcgcatttacttttggtaaagntctatttctggtttgactttcttaacattatagtaaa

SEQ ID NO: 28190 - DNA, 538 bp, Glycine max
  unsure (1)..(538): unsure at all n locations
acgcttgcagccaaatgttgctcgagacantcacccatgatgatagtgncaaagattggcgaacagaattgccattccttggattatacgggtgaaccaagctcattgctttacaaaaaggttcatcaaggcaagttgaaatatggaagttaccgccttgcacaattggggcaaaagatgaattgaatcacatcactgcttcgtctactgccaaacatatttaagattattgagtgtccttgttactttcaagttcaccttgacaaagatgtcatgggacatggtgaaaatctaattgattcaacccatatttgccaaaaatcgcaatacttactgtgcatatcgcatcatcctgcttatattggggcatggtcgagcatccttctggaaaaaaaacaacagagctaacgttttttgaaacacaggaacctatagcacacgtccgaactggctaaacaaaataggggattaagtaaacaaaaaataagccacctgatcgctaaagaaggcaaatacgggcctaactcttataaaatcg

SEQ ID NO: 28191 - DNA, 306 bp, Glycine max
tcgatcgtaccatcttttactattctatgttatacatttatatatccatattctgatatacatgctctatctcttacttcatcctgctggtcaatctatcgtacctggtcttccattgttgttacagttaactgtcacgcatctatctctcatcggctcacatgatgacttttattattatgttcgatggatccctatttaatcgtttgatttactcctctttggatcgattctgctctttcttttatatgacttgtcaaatgatcgatcgttctttctttcgtctattatctcggttatcatccc

SEQ ID NO: 28192 - DNA, 238 bp, Glycine max
atattctaaattgtaattagagtgactttaaaatttttaatattatgagaaacgatagattgggtaaatagtcactttggtccctgaaagtgtaactcgctgacaatttggtccctgaatcgagataaattgcaaaataatccctgaaacgtgcatctgttagtcactaccgtgaatggagtagttacctccgtcatttatctctgatgtggttcgtttaatgccacacacacatgat

SEQ ID NO: 28193 - DNA, 268 bp, Glycine max
  unsure (1)..(268): unsure at all n locations
agcgcacaatgccaacgaatttaatgaaaattctactgagcagctatagaatcagaaatactgtttggcagtgaacactggcagtgaagtgctaacaagagccaactattagtgtagttgagatgagaaaactgaggtggatcagtggacatacaagaaaagatggaagggatatcgctctaaggtggttncggtatgcgagaagaagaccaacatacgcttcaatgagaataagataggagcagactgcagaggaagaattcaaaat

SEQ ID NO: 28194 - DNA, 420 bp, Glycine max
  unsure (1)..(420): unsure at all n locations
tgcagctgcccatcgaataagaatgggattgactgggattaatggagactgctatcaatattgggtataatacagtgattgcgcctttttaactttggcttcagtgtgataattggttctcaagatgtctgacatcaataaacaattgcaggttttcttgtagtttacttagacaaggaatgaagcagattatcattcatttggaaactccagatattaaaacattggagaaggctggagacaagggtgctattgtcaaggtaaagtaaatttcaatatgtagcttttatctatgatgatgcagtttgcactttgcatactatgtgtagtntgcatgttaacaaaatgtttacttattatgataaaccaatacggtcttctaacatggtgactngatgcgtgcattggatttgctttaca

SEQ ID NO: 28195 - DNA, 386 bp, Glycine max
tgcttcttgtaggtgtgctcttactggaagatgttgtgaattctctttatggtgaaggaattttggccataatagatggtgcaaaacaatggttcacggagtctcaaatcaaaaaagcagctggtaatgcaagctggtggagggtaagtacacaatatatattatccttggatctaaaaattatctgatatgtttggtagacaatatagattttgaatgacctgctgacacgggctatttttataatattgctgattctcaaacctctttttcggtggttactcttctctgttaggtatgttactgagaaagtagtgccccacaacctgcactcaaatctcaagatgcttcaactaggaaaaattatcaatgtcccactgggaatt

SEQ ID NO: 28196 - DNA, 323 bp, Glycine max
ctgatgaagatgaatttgtggctacttcatgcactcctctaatgacaatagcatcacttctggcactaaattgctgggagtttgaagtcatcttctcaattaaatttatggcttcagcaggggtcatgtctccaagggctccaccactggcagcatctatcatacttctctccatgttactgagtccttcataaaaatattggaggagaagctgctcagaaatctagtggtgaggacaactggcacatagtttcttaaatctctcccagtattcatataagctctctccactgagttgcctaattcctgaaatatcttttctg

SEQ ID NO: 28197 - DNA, 378 bp, Glycine max
  unsure (1)..(378): unsure at all n locations
ctaagctctccctatttgctataataggggaagaagttttatgattatggttcagccccttatgcacttctctctctctcgaattggctgaggaaaattatttccgtgaagaaaatccaagacgaggcgcttccgtaacgtttccgtgagtaattacgcgaagattctcgaccgttcttcaatattcatcgntcggtcttcgttttcttcagtcttcaatgggtgagtacctcaaaccaagcttttcaattcattctatgtacccgtggtggtccacattntggtgcatgtatttttattcttggtttcgtctactttttatacccncttttgacgtgctttaagccgttatttaagtcatttctcgcttaatctaaa

SEQ ID NO: 28198 - DNA, 441 bp, Glycine max
  unsure (1)..(441): unsure at all n locations
agcttgaatccttgatattattgagagatatttgtttgaacttgggaaatagtataagcaaaactaaaggggcaattcaattatcatcataacatngccaaagacttataaaggaaaaagggaatagtattactagtcatcctaagcaaattagcaaattagcaaattagcaaatcttatagactcgtaccattatgtatgttgaccaatgttaatatgaacaggaggctattaagtattagaataanaatttctagaatataggcacatggtcaaagccaattgcattacccatcntaaaagtttacaatattcaggatcatgagacaataataactagaatgatatacgatacanaatattactaaatttatcattctccagaaaggtgtgaaatccaataaattgccattggcatatcttcctctctgtgataaacac

SEQ ID NO: 28199 - DNA, 495 bp, Glycine max
  unsure (1)..(495): unsure at all n locations
atgtccttgaancntctnncttgatacatgtattacngcnccnnanacnaagctagtaggtcacgattttattttcgngacccttttttttcgccatcnaagcacccaaggggcttatcttatcagagaagacaacggaactttatttctctatccactattttttaccaactaattacctttattaaagaatatattaagttaaaaattattttacatttatgttataattagaataatatattgatgacttggtggtgttgcttggtcttatactattggagatggttggttagtctaaaaatcggatagtacttgtctatatggggatgagattagactcttttttttaattaattaatccctattntactatttttcggctagcccttcctacaattaacatctggatccctgtccctaacaatattanaagatggatactanataaactaatgatcgtgacgcctattttattaaatcgtatttcttgtc

SEQ ID NO: 28200 - DNA, 284 bp, Glycine max
  unsure (1)..(284): unsure at all n locations
tggcggncgggcgatggngcacaacaagttttccacattcacaacgcgcgcataaacccaccattcgctgttgcccaccgtcaactgagctcacgtacttccacgtagcccatattctcgtttctctcaacacctggtccccatcaatcctctcaagcttccacaacatccaagcaaaacaacattcaaacagcataagctatcacagccaagcaaaagcagagcataggcagagaactctgctcatacaccaaccaaaatcacagcttttctcacttaaagac

SEQ ID NO: 28201 - DNA, 461 bp, Glycine max
aagaaagagttatatggtaagccttggtacttctatcataaacttatgcataaaaacaaggaatacccgtaggaggcctctgacaacgacaacgaaggttggtggccagcttcttcctgagtgggaatatcctatacaagaggaaccatgacatggtactgcttcgatgtgtggatgccagagaggctaagcaaatgctggtagaggtgtatgaaggatcctttagcacgcatgccaatggacatgccttggcccgaaaaattctgagagtggggtattactggctcactatggagagcgattgttgcatccatgtgaggaaatgccataagttccaggccttcgctgataatgttaatgctccacccataccttttaacgtcttgtgtagcaccttggccattctctatgtgtggaatagacgtgatcagagccattgagcctaaagattcaaacggaca

SEQ ID NO: 28202 - DNA, 310 bp, Glycine max
  unsure (1)..(310): unsure at all n locations
tctttgcatcaatctcagaaatttagaatgaaatgtataaatgaggacatgatgaaagccatgattatacatacacaagccttttgaccaaaaagcttaccttgaatgataattatatcctttgcaccctttntgagctgaatgatattgtaaaaaatttgaaccccgaacttaaataattatctccagataccttggttagattctaggagagcatttagttcaaggaaaatttaccccaaatttgggggagtggaactaattgggatgcaaagaaagagataaagcatcagcacacacaacacacaag

SEQ ID NO: 28203 - DNA, 243 bp, Glycine max
acaaagtgtgcttttttttctcttccccctgccaagaataaagactcccccaaaactctttggtctccttttttttcaagaaattataggacaaccgcctaaattctttgatcttccttcccttagcaaagatttaaagactacagctgagatatctttgtcccttacaagatcaaagactaccgctgataattcttgtctacacatgtaggtcatattgtggacaagagaggtcattacttg

SEQ ID NO: 28204 - DNA, 333 bp, Glycine max
ggaagaagtgtaactaactaatgagagcttctgaatggaggctgctatgagatgggaatgtcttgagtgttaaggccatgagggcctctcttatataatgcttgagactaaggaataggtacatcactgtagttgttttttttaaattttcaaaaatacccatggttggcaaattattatgatggcacgtggcataattcggatgttatcccaactcccaaaacttaccttctattcagaggctttgttataaatgatgatgggtacttcaatgagacatggtcatatttgagttactatctgtacataaatcggaaatggcattcatgttac

SEQ ID NO: 28205 - DNA, 443 bp, Glycine max
  unsure (1)..(443): unsure at all n locations
aaggtgtaggacacccctatgttggttagagcccganatanttctcaccttatgaccaaaagtggtacaacataccactgagaaagttaagttaattgaagaaaggatgagaactgctcagagtaggcagaaaagttatcatgataagaggaggaaagatctggaattcgaggttggtgatcatgtattcttgagagtcactccgtggactggggctggtcgagcattgaaatcccgaaaactaacaccgcgctntattggtccttttcaaattcttaagagagttggccctctggcataccaaattgcattacccccgtctctttctaatcttcacaatgtctttcatgtgtctcaagtccgtaagtatatccgtgatccatcccatgtgattgaattggatgatgtacaagtgaacgagaatctgacatatgaaacattac

SEQ ID NO: 28206 - DNA, 371 bp, Glycine max
  unsure (1)..(371): unsure at all n locations
aaggaaattngaatttctattcagatttcactcgaatttgaaattgaatttgtggagccaaaatttcattaattatcattagtgaattttagctatggtttagcccactaatccaagatcaagactaagattctccactaagtgtgcttaggtgtcatgactcatgaggcatgtaaaacatgaaagacatgcacaaagtatgactatatgatgtggcaatgaggtgtagcaagcaaatgctcacctccccctctaaaatttaattggattgggcttctcccaattcaattaaatttatttcccaacacacacatgtacaatgttcctattgaaaaataaaggtttaattgcacttcttactccctaacttt

SEQ ID NO: 28207 - DNA, 289 bp, Glycine max
gccattccttggattatagggttgaaccaagctcatgcttttacaaaaaggttcatcaagtcaagttgaaatatggaagtaaccgtcttgcaaaattggggcaaaagatgaatcgagtcacatcactgcttcatctactgtcaaacgtatttaggactgttgatgtccttggtacttccagcttcactttgacaaagatgtcatggaccatgttgaatatctaaactgattcaaccccatatcctgtgtaaaaattcgcaatacttcaactgtacaccattcgcataca

SEQ ID NO: 28208 - DNA, 125 bp, Glycine max
acacatgaatgacaacgccactcattcatggggctccgaaaaagggtaaaaatggaggatctgcctgaaggtcctctcttaagcaatcatggaacacaactccatactcgaaagtggaggaccca

SEQ ID NO: 28209 - DNA, 471 bp, Glycine max
  unsure (1)..(471): unsure at all n locations
tgccttggtaacttgttaacccagctggccttgaataagaaatctgtacctgtcgcaagagtctgtggtttatgctcctttgtcgaccaccatacagatcttttcccttttatgcagcaacttggagcaattgagcagcctgaagcttatgtctgcaaacattacaacaaacctcctccacctcagcagcaaaatcaaccacagcagaacaattatgacctctccagcaacagatacaatctcggatggaggaatcaccctaatctcagatggtctagccctcaacagcaacaacaacagcctgctccttccttccaaaatgttgttggtccaagtagaccatacgttcctcctccaatacaacaacaacaacaacaacaacagccccagaaacaacanacagntgaggccccnntcgcaccttccttgagaacttgtgagganatgactatgcaaacatgcagttcaaca

SEQ ID NO: 28210 - DNA, 499 bp, Glycine max
  unsure (1)..(499): unsure at all n locations
tttcctgagacttgaanagcgaccaagaactagctgatgagattggaagattaagaannggttcttcttttcttccaccaganttctgagcaactccttcttcaatatttctatgagggacttaacaacatggagaggagtatgattgatgccgccagtggtggagctctaagggaattgacccctactggaacttagaatttgattgggaagatgacttccaacttccaacaattcaatgcaagaaatgatgctattgttcttaaaggattccatgaggtggccaccgattcatcttcatctactaaaaataaaaagcttgaaagaaaacttgatgccttggtcaacctagtaactcagcttgccatgaatcagaaatctatacctggtgcaagagtctgtggtctatgntcttctacagatcaccatactctgtgcttttcttgcagcatctggatcaatgagcaacctgagctatgctgcaacattatatagactn

SEQ ID NO: 28211 - DNA, 395 bp, Glycine max
  unsure (1)..(395): unsure at all n locations
tgcctataagttggacctcccaaatgagtatggagtcaacaccacttttaacatttctgatttaattccttttgaagatggaactgatactgaggaggaggaaccaacaaatttaaggtcaaatccttttaagggggaggggatgatgcaatcctccctaggaaggaaccaatcaccagagccacgagcaagagactccaagaggattgggctagagctgctgaagaaggccttaatgttctcataaacataagggtagatttctgagcccatggacgaaggttgggtccacttttctttgtgaatattagaatangtnttccttcttttgggccttatantttggcaatttaggttatagggaccctacaaataagggtacaagtaagagtact

SEQ ID NO: 28212 - DNA, 292 bp, Glycine max
ttgttagattgagtatgaaggaatgcattgaccgtatcccggtgagagtgtgatctttaaattttgagagaaacgattatcatttactactaattttcgcatgaatctctgaagtatggactgaatgcatgaaattgaggacgatgaaggccatgtttgattgtgatagccacttagccaaaaagctgaccacgtgcttgaatgatttatcccttgcacttaatttgagctgaatgaattattgattgattgaaccctgagcctatatagtgttatctccagctaccttgac

SEQ ID NO: 28213 - DNA, 496 bp, Glycine max
  unsure (1)..(496): unsure at all n locations
acggaaaaacaaatgatataatgaagttgatgtttgctttatcaaacctgattgatcctgagcttgagtaagtagaccacccaaaaacacaacgaagaaagtcatcggcattctgtaggatgacagatatacgagcaccatgttctgactctgacctgaaacggaatcgtattggctgacaaattggatcattgaaatcttatatgataacttggtccatccgaatcaatatcacactcagtaaattaatcactgtcaaaacagtgcaatgatatcaggtagacttgtcattatatgttaataggaaaaatagacttcctacaaaattacaggacataacattattttttctcaattcacgatccacatatcacgatttacaaacttaatgactaaatttggtattatctaacaaacaaactacttattaaattttaaagatcacatgtaataattctatctntaaacattatatatgaattagaagtcttaaata

SEQ ID NO: 28214 - DNA, 220 bp, Glycine max
acctcaattctatacaggaacagctcttacacttcattttgcacaagctcaacaaacacccaaacatattcatcggctacaccctatgggcattcatcacacttaaccgcttagaaccatctccggagcaacctctcacaaataacaacctgggcgtatcaggagatttctgctattctcataggccaacgaccaatgcgatctactaaactaatatgct

SEQ ID NO: 28215 - DNA, 333 bp, Glycine max
  unsure (1)..(333): unsure at all n locations
tgcaagcttgaggtgtctcaggaaaccgctatagattcngttatcacttccataaaatacatgngagtcctcttagagatacgagatgagtttatcgcaattgagattagaatgaacatgtgtagggatccttataggtctaaattgaggtttactttgggatgtttattgaattataatttcccttatgattataaatacgatattgttgtgtttgacatattaattgatgtcctaatgcgaattggttgataaaatngagtgctcttggtgttttcgtgtttttttatctatgattctgattaattgattctaatatgattatgtgaaatt

SEQ ID NO: 28216 - DNA, 360 bp, Glycine max
gcaccatccttttctttccatatctgtaactcttatgtttttgtatttttctagatacaaaagcaaagaagcaaagcatcttctcttctcgtacacatccacattgtcttgctttcccttgcaagattcaaccttttccttgcttaagagtttagctctctccttttttccccctttataagtccattgatgcactattaaaactgtgggtgtatcttctttttgataaaactcactttaagtttggaatcgctacgtaatccaagcgattaatgtggtcaaaatgggtcaagaattccatctttttgggtcttgatggcccaaagtttttgcacctgttcattgtttgtgatgcatgtg

SEQ ID NO: 28217 - DNA, 346 bp, Glycine max
gcatgcaagcttgactttcgttcgctcagatagtattctttctggatctcattctatctccattagaaaagaggaggaactaagcaaaatgaagacatgggaagccacatccacttcaacatctaaatcaattggcactggcctatccttacttgaagatttatatatttgcttggaagatcttcttaatgtggcatcaacgcaaaaagtgatttctaaccatcaaggtgagaaatgcatggaagaatagcttgatggttcagcgggaattctggatatttgtggcattacaaggaacaccatgccacaagttaatggaaatgttcaagcacttcattctgctctt

SEQ ID NO: 28218 - DNA, 349 bp, Glycine max
acattcaaaatcaacgccacatgtgtttcatttaagacatttctagcacaagcttttttatggggttcttaattatttttatgggttcgtaacactttctatggttccataatattatggcactcataaaaaattcatacacaattttactctaatgcaataaatcacaagaaatttatacatttaaattattttattataagaataattaattaaatttttcaatttttatgtatataaataataaatattaataaatgaagaaaatattaaatacgaattcaaagtaaaaaaatacatcacattaaaataaatatcttttcactttattcttttctcaaacctttcc

SEQ ID NO: 28219 - DNA, 315 bp, Glycine max
  unsure (1)..(315): unsure at all n locations
gataatgaatgttttacagcccaagcacctcaacagcatgagccagaaccagaaaacaatcactcatttcaagccaccatctctggagctgttgatggtaaaaaaagaagattagagacgagatccaatgaggatgctcatcatgaaccagtgccatcatcagttgatgcaccatttccaggagtagatccatcttcacctcaacacgcaacagactcttccattctgatcttatagatacatgagggccagaccataccagttctgcctttggacacttctcctncagttcctccagtatggcatctaacagat

SEQ ID NO: 28220 - DNA, 367 bp, Glycine max
ggaagtgagatcaatcacaatggcacgtagacttgaagctttcctcgtacctcaagtcaccacgaaatgtacctaaggttaaccgaaatgacacagctaagttacaatgaagatatgaagctgaatatatgaagcttagacaaaatgtaccttcagaggtttcacgaagaggaagagagcatgagcaaaaaaagggtatgtcacacgcgaggtttcacaaagaagaagagagcacgagcaaactaggctgcgtatgacataatttaaaatataagtccaacattggtttccaatacaaaactgatgtaacaaaatgatgtaacggtacatcgtgttttcaagaactgtgtaactgtcataacttaca

SEQ ID NO: 28221 - DNA, 267 bp, Glycine max
  unsure (1)..(267): unsure at all n locations
gagtgacatttgtattaattggtgcctttntagtcttaatccatctatgtgtacatcatgcatcatcatgtagagataggaagattgtttataaggttagaaacttcttcaatgtgtaaactctctgttttaatcgatntacctgctatctgtaatcgattacataagtcttttgagaacgttacagagagatcttcattttggtttaatcgattactccttatccgtaattgattactctgttcttttgagaccatcttagttttc

SEQ ID NO: 28222 - DNA, 511 bp, Glycine max
  unsure (1)..(511): unsure at all n locations
taaacttacgaatgttcgaggtttagtactttagtgttacaacacagtttatctagaacatgattaattagagaaatatccttatatgcatcaacttgtatgttagaaagacccaacgctttttatctattgttgtcaacttttacttacttgcatttactatttttaccatagaattagtttatttttgtttttaaccatcaattatcaatgtttgttccaacaatgccttacttctaaataaaactctgtctaataagcaagtttcatgagttcgatactcggatcattctgttttaattntaaatagttgacgacccggtgcgattgccgatatttcatttgccttgaatatannttgtaaaaattggagaaaaaggaaccatatgggaatgtaaacaaagtatttatgcgccgttaccggngaacttaattctttagaagagttcagttcacgtttacgacattgctntatattttcctctttgattcattggatatttttggtcat

SEQ ID NO: 28223 - DNA, 278 bp, Glycine max
tcttaaggaagttttctcaagaaagcttctaaaggaagctacctagtctataaatagaagcatgtgtaacacttgttgtaactttgatgaatgggagtcttgtgagacacaactcaaagttcaacttctctccctttttcttccttcaattcgtgctcccccctgtctctttctctccctctttcttttcctccattgaagcatcctctccaagcttcttatccaaggctcatcttggtggtgaagctccttcttccatggcttattcccgagtggat

SEQ ID NO: 28224 - DNA, 250 bp, Glycine max
  unsure (1)..(250): unsure at all n locations
gcccttggggngttccattttgttacatgtgtgatcgttanctacttaccttttatgatttcagagtccccttttagactaagaatgtgacgacattgtcgtactctgtatctatggctgtttatgatatcgagccatctccgcaataanagcgttttgttctgtcatgttcctccgtgattggacaacgatatagtcttgtatgctagagtcaatctcttgtcttactatgaatagtacttctcttgcn

SEQ ID NO: 28225 - DNA, 451 bp, Glycine max
  unsure (1)..(451): unsure at all n locations
agcgtggaagagtcaancttcctacttttgtttgntgattacgagtggttcttggagatatgtcgcaggggtcaggagaccttgtggacgtcaggtggggtgctattgcccaaaaccaagcttgactaatcccgacccaacccgggcatagtcagtcaatgagaacctgtgacgtacctaagtaggcgagccctggcagtcaaccaataaaagaacaaagtccacaaagcaaggaggcttgtgtggcggctggccagctatgtatcttgggtggtatctggaaattagcctctggtaatcgattaccattcgtgggtaatcgattacagggcttaaaaatggagacaggttgttaaatggcatcgattaccaagggtgtgtaatcgatcacatagagtgatagggcactggtaatcgataccagctgggtgtatcgattacacgggtgata

SEQ ID NO: 28226 - DNA, 379 bp, Glycine max
  unsure (1)..(379): unsure at all n locations
gtccgcttgcttgaccttcttatgctaattacatatacattangcataggcatttagatcaagaggtgttagtgggttaaaaccataaacaacttcaaaatcatcaaaagtgttagtggtcaaaatctgattttttcaaaacaagatatatagtgactgtttagcacgaaacaacctcttgacctcactntttgtggctaaatagctctccctcacttcaagtgtttcactcttcttttgttcactctttttcctctcaagtgtttccctctttttctcactctcaagtgttttgctcaccttttctttttctttcttctcttgaagaagatnttctctcattntcttttgatcctcacacacttcttgtggactcaat

SEQ ID NO: 28227 - DNA, 395 bp, Glycine max
  unsure (1)..(395): unsure at all n locations
aaatataaataaatttatacaagttaaaattaatttaagcataaattttagtttataaaaaaagttaaatntattttacttatcttttcaagtgcttagtttattcatacaaaacctatatgaacttgatgagaactcacctggtaacaggcaccacagccaacaccatttcgataaagattagatgcagctgatacgtccccaccattaacagtggcaccaaaggaaccaaattcacatgcaccaactacattaaattaattaaaatcatgttaacaaaatctcatttcatgtttacattttgttatctttttatcagtaattntcttaccgtctgtgccattttcttgagagnttgggtaaaatgctgcacgagattgaacaaatgaagtatc

SEQ ID NO: 28228 - DNA, 358 bp, Glycine max
  unsure (1)..(358): unsure at all n locations
actaagctatgctganatatttataatagacccctcagcagcaaaactctcaacttcagaantaatatgaactttcaagcaacaaatacaatccaggttggaggaatcatccaaatctgagatgggcaagtcctccataataacaacagcctgtccctcatttccagaatgctgctagtccaagcaagccatatgttcctcctccaatgcagtagcagcagcaacaacaacaacaaagacaacaagcaactgaggctccttttcaaccttccttagaggagttagtgaggcaaatgaccatccagaatatgcaatttcaacaatagacaagagcctncattcagagtctgacaaatca

SEQ ID NO: 28229 - DNA, 194 bp, Glycine max
aactctatagactttcttctaactcctacataatgatgcattaagcacatatgataggatcgagactaagacgcaacacacaatacaacaatccatacatatgtctctcaagagatctatgcatgcaaaagacaaaacttcttcaagcttcaaggctaatctttcatgtagtccccccctccacctattttaac

SEQ ID NO: 28230 - DNA, 409 bp, Glycine max
  unsure (1)..(409): unsure at all n locations
gtgtcagaaacaaataatgaccgtggctntgctattaactccaatgttgaacagaatgatgaatggccattgattgagcatcaaccagctgtttctgtatcctcagttgtagatgatcatccaacatctgagtaccatacaaactcatctaactctggtgaagctaatcagcagctgaagacccatgtaaatgaatttgtagctgaagatgatcctgttgagaatccagacaatgttggatctgcttctatatctgaagagaatcccgaaagtacatctgtttttgatggtagcacgtacaaggacatatattcctaccaatctcatcggcatcctttagaaactaatgaaggtgactaggatgcttatcagcttgcatgtctggtatctttatttatattgagcatat

SEQ ID NO: 28231 - DNA, 341 bp, Glycine max
  unsure (1)..(341): unsure at all n locations
catctccatgtcccgaaatggtgataccatccaccaatctatacatttcttccaccaaggccttcttcactcaaagcacttccttcgccatataagaacccacctttacctaccatactccaaactcctcataatttntatggtagcttctccttgttcggaattaacaaagattctaagaaacatggtttttaaacacccatcctcacaccacgtgtccttccgaaatcttaaatttctaccctcctcaattctccactcaaacgtatcatccaaccacccctcacttgacccccacaaactaattactnatttaatatctaaattgcgaaatataaact

SEQ ID NO: 28232 - DNA, 446 bp, Glycine max
  unsure (1)..(446): unsure at all n locations
gatgctaagggattgcgacattcatatatgccccacaaagcatgtgacatcaacaaaaccttgttgaaaaaacatgaagatntagtacttaattattgaaatattgaataatattaaccaaggttttaaatattggtcatcgtggtcgtattgcggttttatcgtgtttattaatattgtaataaattacgaatacatatgactaatgtaatctcaattattgtcgcattatggtgagaaacagttaaaaaaatgttgatattgtggattaaatcacggtcaccttggtattaattatataatatcttgtgtatgaaattangatacattnttgttgaacttggaattcagaagaacgtgtagggagcgtgtatgcgaacgagtgtgaaagaaagaggagagaccaagagaaagagagagacattccgtacttaagaagtctacgt

SEQ ID NO: 28233 - DNA, 272 bp, Glycine max
caccgcgcactactttttcatttgattaaaaaaacttatgtatactttaaagttgcatgggttccttttatttaaaatctaagttggtttaatttatgaaaggatattgatttttttataagtgtttatggaaaaatttatccgaaaattacataaagggtttcatttcacatggagcaaatgtggttgggatggagaaaacaatgcatcacaaaatgatgaaacacaaacatttagattcgttaagggtcctatattccgcttgacaaaat

SEQ ID NO: 28234 - DNA, 304 bp, Glycine max
atatctaactatattcattgatacatatagtgactactcataagaataggatgggcattgttaggccctactatctacctattaaaccattaccaagcaagcccaatttccaacccaattatacaagtgcaagagttctaacatccaagctcatttgaccctcgaaatggcataattggcccaagcttattttaacatattgaatatctctttcttagctttccaaggactactcacatgctccatttggagttctgtagtattctataggccatgcctcttcaattcttgtgtgtaattgatg

SEQ ID NO: 28235 - DNA, 109 bp, Glycine max
ctcgactgagtctgattatgaaaactcgaccactcctgctctatttcagcatagaaagatagtccccagaaaagaagtagggcttccttcctcctatcgagcatcctaa

SEQ ID NO: 28236 - DNA, 392 bp, Glycine max
  unsure (1)..(392): unsure at all n locations
ctcagcatcataatcaaccacaacagaacaattatgacctctccagcaacagatacaaccctggatggaggaatcaccctaatctcagatggtctaaccctcagcaacaacaacagcagcctgctccttccttccaaaatggtgttggcccaagcagaccatacattcctccaccaatccaacaacagcaacagccccagaaacaaccaacagttgaggctcctccgcaaccttccctcaaagaacttgtgaggcaaatgaccatgcagaacatgcagtttcaacaagagaccagaccctncattcagagcttaaccaattagatgggacaatnggctacaccaataaatcaacaacagtcccagaattctgacaagctgccttctcaatct

SEQ ID NO: 28237 - DNA, 460 bp, Glycine max
  unsure (1)..(460): unsure at all n locations
tataatactcaagctntgaatgctctattcaatggagttgacaagaatatcttcagattgatcaacacatgctttgtggccaaagatgcatgggagatcctgaaaaccactcatgaaggaaccttcaaagtgaagatgtccagattgcaactattggctacaaaattcgaaaatctgaagatgaaggaggaagagtgtattcatgacttccacatgaacattcttgaaattgccaatgcttgcactgccttgggagaaagaatgacagatgataagctggtgagaaagatcctcagatcctcgcctaagagatttgacatgaaagtcactgcaatagaggaggcccaagacatttgcaacatgagagtggatgaactcattggttcccttcaaaccttngagctangactctcggatagggctgaaaagagagcaagaacttgcgttcgtgtcaatgatg

SEQ ID NO: 28238 - DNA, 153 bp, Glycine max
  unsure (1)..(153): unsure at all n locations
agcttcatgatgaatcttttattgattaaagttgntttgatgataacaaaggtgataacataaagctcaaaagtcacaaacacttcatgataacacagatgatgatctcatgaatcaaagaatgagttctgatgtgcaagattgaatcaagaa

SEQ ID NO: 28239 - DNA, 399 bp, Glycine max
  unsure (1)..(399): unsure at all n locations
cactactagaaaatgtattttctacgacagcgaaacgactatggttcatcatgaaccgtcttaatatataaagcgatgacaattttgtaaatagggggctttcaactgtcgcaacgtgcccttcgcgggcgagcgagggcgatgctcacaggtgcgttttccaaaggaggaaagatgcgcggagtcgccaccaacgtttatttgtggaaaacgtcggaaaaaccgaaggagaccggtcaaaaataaaaattctaagttcgggagntgtatttacgcttgaggaaggtattaacacctcttacgtttgtctcgaaggacaacagcctattttttagaattgtggaattgtgttaccttaactttttatttcttttattntttgaggtcgacanaagcggg

SEQ ID NO: 28240 - DNA, 255 bp, Glycine max
accttcaactcacgctacacgatgaaacagataatactaccatctaaagaaaagtttcaggttcctgacatataatggaccttaattagctaatgacagaattaatgaactgaaacaacaatatacaagggaaataatcaaattcaactactgtatacgactggttattagttctgaaatcttagtgcttacgattttaaaaaaagttaattaatattaatataaaataaaaacgtttcttcggtgtaatttacc

SEQ ID NO: 28241 - DNA, 473 bp, Glycine max
  unsure (1)..(473): unsure at all n locations
gctgtgntgttgtancncntctcnncnatgantactttganngcncaccnatnnaaacnaagctaacctcatgggagcttttttattctttctcagcanggtcattctttatcatgnangannaacacgnatcataagtcagntgaggatgtcttccattacttatttactggtttttagtaccaaagccatcagaagatgaaatcctaacaattgttagatgctaattgtcttcttgatatacttgcgtatatataacttaaccatgtttacttagtagactccactttggtctgagtatcttcacttccatatatcacaaaatggtcgatatcctggccatgcagatgctttcttgcctatgtgtctgacatacattcacattatgctgactattttggtaaaattgaaaatacctgccttattccaaactatgttcactgtaggacagatttattttaacgctctcgcgg

SEQ ID NO: 28242 - DNA, 318 bp, Glycine max
  unsure (1)..(318): unsure at all n locations
gtcccgtaatatatcgagacgctcganattgaatgttgatggtcgntgcaaattgaaacgacaataactttttactctgatgtctgattgagtcccgtaatatatcgagacgcttcgaattgaatcttgatgctctgagcaaattcaaacgacaataacttnttactcggatgtctgattgagtcctgtaatatatcgagacgctctgaaattaatacgaaagctatgagcaaattcaaacgacaataatttttactcggatgtctgantgagtctcgtaatatatcgacacgctcgaaattgaatgttgatgctctg

SEQ ID NO: 28243 - DNA, 472 bp, Glycine max
  unsure (1)..(472): unsure at all n locations
ctgtccgtgtancnccttnnnttgagcccttgattacgacncatganactcagctcagaaacaanncgctcgtctattatattacgggactctatcatacatccaagcaaaacattattgtcgcttgaattaactcagagcttcagaaattcaatttcgatgggtctcgatatattacgggtctcaatcagacatctgaggtaaaaaagtattatcgnttgaatttgctgagagcttcaacattcaatttcgagcgtctcgatgtattacgggacttaatcagacatccgagtaaaaagtatcgtcgttgaatttgccagagctcacattcagttagagcgctcgattatacggactcatcaacatcgataaaagtattgcgctgaaatctagagctccgattcaattcagcgctgaatttaccgactaacaactccagtaaagtattgcgtgattgctaacctcacatcat

SEQ ID NO: 28244 - DNA, 458 bp, Glycine max
  unsure (1)..(458): unsure at all n locations
aaagacacacgcctgtttaccatttcttttcctgattacactccagattatttttcaaattcagcaaaggtgatgtttcgagtagactaactggttgacccaaagcactgtatgcagcttcagaaattgcacaggcagaaatagccccaactgattcaccacctaaagcatactgctggaaacctttattgcatgaagagtcctcttcaatatcataagaaaactgaataagttgattaccatataaatttctcaccgttccatcatatgcatcatacaaatcacgcatgaagaacataagtctacgtgtcagtgtaccaggaaggtccgcatggtcactgaaagagctatcacgatttgtcactgaatgaacaaaacattcaagtggattcaacccagttaaataagaactntcaactacagcatatggaatgtatgactgaacagaaatcagggta

SEQ ID NO: 28245 - DNA, 198 bp, Glycine max
tttataatatagaaaaattatgagtttcttgaaattttggagcatttttattcatggggaataatttgagttgctttgactggtatatatatatatatatatatatatatcaacaccacccatatgttttgaaattctacttatcaaacacaaatgagttgcaccgactgctgtgactgtgaacaagtagaatgcatt

SEQ ID NO: 28246 - DNA, 526 bp, Glycine max
tcttccccctcgagagtcaacattaatatggcccctcaaatgggtaaacccattcctcatatgagcaaatcaaccaacatcatcaccaatagtacaatcaattcatgaacatcaatttgccacaatattgagggtcaaacaccctctaacccaaataccaaagtgcaatgtataactaaacatcgtataatagaagcaacctcattatagaatcaatctcataatagaagaaatctcataataggagcaatctcattatagaagcaatctcataatagattatcatgtaacatcatccaataagcattaagaatctagttcatgacatggtatcccaaagtccaagtaaaaatccacacaattcataataaatcatacagtagcacactctattctatcgtagtgtagtaccaccatcttacaaaatcatatatatatatatatatcactcatcccttactggatttcataaaagtatcactatatacacctgtgtgtatagtttgaaatggattacacgtctcat

SEQ ID NO: 28247 - DNA, 381 bp, Glycine max
  unsure (1)..(381): unsure at all n locations
aaatttccatttttatacacaatttctatcggggtctctcanattcattccaacctccaacaagttcaaagtttgcacaaaatagggtcacaaatacgcacaaaaacgtcatcaaattttcccatagacatatatgctaactgtaaaaaattttaagacacgctctcaattgggtctctcaaattcattccaacctccaacaagttcaaagcttgcacaaaatagggtcacaaatacacacaaaaacttcatcaaagttcccatagacagatatactaactgtaacaattttcaagacacactctcaattggggtctctcatcaaattcattccaacctccaacaagttcaaaccctgcaagaaatgacanagtggagaaa

SEQ ID NO: 28248 - DNA, 402 bp, Glycine max
  unsure (1)..(402): unsure at all n locations
tttatcttagagagagtgattctcctaaattcttgagtgattcaagaacaccctggctgtatcaaaggactttcacaacctttgtgtgttgccctcgccagaaagagngattctttccttcctttcatcttcaaccttgttctttcaaaccacaattccagaaaatccacttctgcccagaattatctcatggccataactcccattttacgcacacaaattaagtgattcttgagcctaaattgaatttcaagacgagaccattcacccctcgttggaatcacctcatttggagccctgtagcttgagtntttgccatttctataattttggtcagccaccacttaaacctacgtttctcatctcattattccattatatgccaagaaccacctattcgca

SEQ ID NO: 28249 - DNA, 378 bp, Glycine max
  unsure (1)..(378): unsure at all n locations
actcctaccatgtgccacaggatgcttagctaaatcaattgctgatttgttatccatcaacaaccttataggactgcaatttctcaagtttagttcttccattaaagcttccagccataaagcttgacaggctgccatagcaacaacaatatattctgcttcacatgttgacaaagcaactacactctgcttctttgagcaccaagagattggtgatgttccaaatttgaaaacatacccagcagtgtttntcctatcatctttatcaccacaccaatctaaatcactataaccaaacacttctccttctatanttctttgattgaaggatataaaatgccaagatccaatgttcctttcacatacctcagaatcctc

SEQ ID NO: 28250 - DNA, 332 bp, Glycine max
  unsure (1)..(332): unsure at all n locations
agagaaagataaagctattgtactggagtcccttaccatgttaaagggtcaacttactttgtctatggtaagtttgctcctctgtagtgtgaactatttcgattcagattcaagtagtcactgagtaagagagaaagaaatacttggaaatcttgtagatgcctactactggtataagcatacgaatatgnttagtgccaatttttttaatgaggatagatgattagaaagaatcttatgactaatttaatcttgattttggctcatggggatgttagatgaagatgataattctggaatacaatgaatgcagtaaattttgtaaatgtttt

SEQ ID NO: 28251 - DNA, 248 bp, Glycine max
  unsure (1)..(248): unsure at all n locations
agcttgtaagggattgggtgggaaatgatatttatactcaacttggataccaagcttgtgcttcaacaattgcaacaagacccactatccataatgagagaacaatntttttttaaaaccttgcatctcgtatgaaatatgttctctctttaagtttgggctaggtcagcggatttactcccaaggagccctctcaccattagaagatcaccttcttcataggggaaacctcttcaatatgctcatca

SEQ ID NO: 28252 - DNA, 310 bp, Glycine max
  unsure (1)..(310): unsure at all n locations
tcagagaatcgatcgtaaatccgaacttcatataagtgaatagcaatgcaattattaaccaatgtatgatggctgtctatcaaaccaaacaacgtggaactccatcatgcatgattcaacttgtcttatcaggaagatttaacttacacaactcaacatgacagttgtcaattgctaaacantggtnagaaaaattaattaatctcttcaatctttatgtgtataaataatacatcttaattaatgaagaagatattaaatacgaattcaaaataaataaatacatcacattcaaataaatatcttttca

SEQ ID NO: 28253 - DNA, 506 bp, Glycine max
  unsure (1)..(506): unsure at all n locations
gtatacacttgcataaagtacttaatgtaataatatttagacaaatattataaaacaaaactatgactaaatgtataagaaaaacattaaaaattattgtcttaaacaaatctaggttataagaaatgacaatctgtataacttcataagcatatataagaaaatatatatctaaatttttatattttatacacttgcataaagtacttaatgtaataattnttacagaaatattataaaaaattataacctaaattataaaaaaaacattaatttttttaaaaaaaaaaataggaagaaccatacagattgtcattcatatggattgacaatccgtaagaatcatatggattgcaaatccgtaggttcatancgaataccaatctgtataattatacaagtttctattatatngtattacgcacagatccacttngcaacgaaaaactacctcattatacnacacactcaccatgaaacaacacgactgccacaaccactacaca

SEQ ID NO: 28254 - DNA, 517 bp, Glycine max
  unsure (1)..(517): unsure at all n locations
attgacctgagtaacnctgtannancngacncatagannactcaagctctgcataccncaaggatccattatgaaattacttgtgttagatactattatggngggctcatgggccactttggaatatacaagacccttgtcttactcaaagaaaagggttattggccccatattgaaaaagaagtccattagcattgcactaagtgttgtggctgtttacaaaccaagtctaaggtgatgccttatgggctatacacacccttacccatcccatttgcaccttggggagacattaatatggactttgtacttgggcttgctagaacccaaagagggggaaactctatctcttgggtggcggatatggttaacaagatggcacactttataccatgccacaaggtggatgatgctttccacattttacaacttcttttaaggaaattgtgagactccgtggctgtctcagaccttgtgcccatattagaccatagtccttaacaataagagactcctt

SEQ ID NO: 28255 - DNA, 369 bp, Glycine max
  unsure (1)..(369): unsure at all n locations
catgagagcccncaagtggaggattatattgttgcatacctctctntgatcttgccaattntatgtgatgatgtgccttgaatggcacttgaggaagtttcttcccttttcttttacatgttgtctctttgtttgcatttcattacatgtctctttgttttttgttttctctgttttttttttctgctttactgtttttgttgttattnttgttctgtattttgcttcaattnttgtgtctgtatctgtttcctatttgtgtttagttttattntgctctgtctatttttttgtatctatatgatgtttctattntgctgtatttgtttgngctttgtgntttacttttttacatataaaaaataatac

SEQ ID NO: 28256 - DNA, 332 bp, Glycine max
  unsure (1)..(332): unsure at all n locations
attatatcactcccggcacatttgtgcagacattgtcgcaccttccaagaggcagggcatatgcacatgaaccctttacatggtgttgtgggtgtagttgggaaaagaaaaagcttatcagcaatatatttaaataaatataatataatactgacaataaagtatgtctagtggctgttggtacaagaagctaattcctctaaagagtttgagtatgattagttgccgaggaanaaatatccagattctcacatcataatacatctaatccttcattagagatacacataaatctcgntctggtntctgtgtagcatttatcgatgtttatt

SEQ ID NO: 28257 - DNA, 233 bp, Glycine max
gaagagccttagctcaatatgtgttgatcaaccattaatactccaatagtgctaaatgcacatctgaaagggattagtgtatgaaaaagtgcataactactgtggttataaagaaggattgcctcacaaaatataaattaatttcaatttttattaagaattccatagtacaaatctttaagcttatttcaaaattacaatttgtttccccgtcatgatacaaaactatcttt

SEQ ID NO: 28258 - DNA, 255 bp, Glycine max
ctatcacgcgagcatattaagttattcacggggaactgtcaacagttcaccacttatgttacagactcatctcaccctcaacatcaacattatgatggactctatcattcacttatgcttaatcaggcccagctcaataatctatggccgcattaaagtcatgttatacctgagttccatgcaaaagccttgccaattcatgtaatagtactcagcaatcaccatttttctgggggttccctcctctcatctcta

SEQ ID NO: 28259 - DNA, 274 bp, Glycine max
cgcttgatgtgacgacattttaatatgtgaatgtccattaatttgatgcatgactaacgagaaccacccttacaactacgtagactcataaccggagataggcttgaggtcaagatctaatctagttaattagttggtagatgttcacaccaagcttgaactttcattctaaaccctttatctgaccagtaatataattgatcggtatctagcagataagacatttccaaggttgtgaatgtaattggtcggcatcaatgtcttgctgatggca

SEQ ID NO: 28260 - DNA, 367 bp, Glycine max
  unsure (1)..(367): unsure at all n locations
aacctataagtctatgtatgctgggagnatggttttttgcaattccttgctcataacaatgctaatgccctataatttgatgactcgatcaagatatatttcataaggaatactaatntgaccgtaccttccgattctggtacgaaccatttctttgtgttgcatattgaagtcaactgatttgattttacttgtaagcttaacataattcattccttatgtgtctgtgctanacaatttgctttctgatgattctgtcacaatcaagaaattatcaacatcttcatatgtgtgtacaaaatagccatggtntcatctctaacatcatttgatatttgctgttgattcagatggtgaccttcttgac

SEQ ID NO: 28261 - DNA, 169 bp, Glycine max
atttttgctgaccttttcaacctccgtcacccttggtgcccaaattcctttgatctctaagtacatcagccaatacacgtttcattttccaattccatgtaaaataacttcttgtttcctcgttattattcctaaacttttcttttgctggcattttttcattagatga

SEQ ID NO: 28262 - DNA, 454 bp, Glycine max
  unsure (1)..(454): unsure at all n locations
cgaaagagaattagttatttatgtatgttaagttcacaattttttgttgataattaacgctgattaataatgatctagattccatagaattagaaaagggataattaagtcataagagtttaaagtggagggcattntcataaatgaatatataactattctaaaaatagaatcttagtttaacttgttggtgacctaattaagtgtctaattatacgatgtagaataattaaaataattatgagtgtaacacccttgaaaattacatttcaaactaatagaagaaactttgtgttgngtcatctgtgcatgtatgannattaattcagcagncatatggttttatcaatgaantctggggtgcgggatatgtatgtgcgggcgatgactgattacgaaactcgatgagaatagaaccgctactagatttatatggattagaaaactgatggag

SEQ ID NO: 28263 - DNA, 413 bp, Glycine max
  unsure (1)..(413): unsure at all n locations
gcttgatccgtcgagattatcccaactagttttgtctaatagctttggcgtttgacacgaggccgctattgtgtaaagagagggggaaccacaaacactttntgcaagatatcttcagagaagtacaatctatcaangttgcctagtactcaaaactgactttcagcatacaattcaaaagaaacattagatacataagacaaaaggaattaagaatatcaaaataagacaatgtaaatcttcccttttgtgcactatggcatgaagttctcactgagcctatgacattactttcttgtgaatgtttntaatacttgaggatcgagtaactgctccattgctttctactatgagacaagtgctaaagcacttgtcttntcatgattggttatctaaagtagatcgtccaatga

SEQ ID NO: 28264 - DNA, 310 bp, Glycine max
  unsure (1)..(310): unsure at all n locations
atagctttggtctatatggttgccctctatatcaagatctttcgttcttgcgatggtatggaattcagaanaaacacatcaagaggaacattataaagggaaaaagctccagcaagaaatctttcactgctttcttatntatactagttcaagttaattacaatgacaactctagatacaatcgaaatgctaaaagcaatgatcactacaaaagctagagatatctcaattaaacttagctactcataacgtacacagcgattggtttggttgactaactcaccaaattacctaagaaacatgtcttctt

SEQ ID NO: 28265 - DNA, 304 bp, Glycine max
  unsure (1)..(304): unsure at all n locations
agcttcanacggaaagattataaattaatttgctttgaacgaaaggattaaaaatattgaagatgagtccatgaatgctcccaacgggttcatggcccctccatcaagggagcacttgtcgcgcatcagatattatctcacttactaaccaaaataattaatacaatctggccaaatattacaatatgaaatattttttccctcaaattttattttccattctaatttatgttggctgatgatntgcataatagaaaaccagaatataaattatttgcaattggttaatcactcacactgatat

SEQ ID NO: 28266 - DNA, 287 bp, Glycine max
  unsure (1)..(287): unsure at all n locations
tatgctttctcttnctcccaaattcattcttcattcttcctttctcaaaatcctttctttttcccgcatacactcaaatctatcccaataaaactacgatcccgaactcgttaaccggtggataatcctaaaatttgaacaccaccttcgaaactcatttacacacatttgcaccattggaacttgcaaaataatgtatgcagatagataaatgatcctcgcacaaagacagtgaaattgaggcttcaatctcttcttctctctaacacttagaaatcctagcagaa

SEQ ID NO: 28267 - DNA, 206 bp, Glycine max
  unsure (1)..(206): unsure at all n locations
gcctatatttcttattcattctttgagtgttatngaatcattgtatccattcaaacttttgttttgaaagtcaagagtgacttaatattaaacaatacttgagtgttcttagattcaaggggagtttaaggtgtgtcaaaagtggctagaagaatacttgtttagttaggagtaacagaatataatacttgttttgtaatcaaaat

SEQ ID NO: 28268 - DNA, 275 bp, Glycine max
cgatgctctcaaaagttacatgatactgacttcctactatggaggcaacaggcagaacctgtcatcaaggctcataaacttcatcattacatgacaaatccttagatcctaatgcgctttctcacatacgcatatagtgaagctgaaaacgcacatccagcgtacttcgattgggaacaacaagatcagaacctcttgttgtggctccactcgactctttttgcttcgagcttatctcctacaattggatgtgttcattacgatcaactttggga

SEQ ID NO: 28269 - DNA, 310 bp, Glycine max
agctttggggttgaacaactatataacaacaccaaggttctaggttagcctcttctcttctcttctctctcttctctcctctgctttttctttttatcgctatagagggctactctctttttcgctttacgtcaccttcttcgtttttagcaattaaagatttcatcctttgcttcaatctacaattttgttctctattgattaatggaaggctaagtctccaacgttgttttctcttaaggatcaagcacaattctttgggagggtccaggattactaataaatgctgatcagtttttctcttaccaat

SEQ ID NO: 28270 - DNA, 486 bp, Glycine max
  unsure (1)..(486): unsure at all n locations
tcagcttctatcaaggctcatcttggtggagaagctccttcttccatggcttattcattaatggatggcgcctcccctctcctcctctcctttgccttccgctgcatctccatggtgaaaaatcaccattgaaggacctcattgaagctcaaagatccaacctccatagaagccccacaagcaagtttccatcaaaattgaaatgggcttagctcagccttggccagcttagtggaccgaataagcctgagatgcaagggttgagcgctaagcgcttgagaccctcgacttagcgcatgaccaaagatgcgcttagcgagaggactgattttcagacaagaaaatttctaagttatttttcaatcccttcctcaagagatngaaacccttatatctatcattcaaaagaaagctgatataccccaatgtaactattatgaagcaagttccacattatacaatgcataaacaagaacataataacag

SEQ ID NO: 28271 - DNA, 359 bp, Glycine max
  unsure (1)..(359): unsure at all n locations
tttgcattcgggttttccagtaatggttaccctctgcatttaaaataagaggcctacttattgtattcccttctgggaataagaaagtagctgaggccattattcttgaggcttctaaactttatacaagaatgaagctttgataccacttgttagacaagtggcctcagatatcttaagaaatggggttgaattaagatatcacagacattctaagactcaaaancctagtttcatttaacccaaatcccaagattccttatcaaatgaactcctaaagaattatgcaaagtattattactggatagaagcgataagcaataanaaataatggagtttattggaaaagatacaaactt

SEQ ID NO: 28272 - DNA, 385 bp, Glycine max
  unsure (1)..(385): unsure at all n locations
tagctcgcataaactacccagcacacaggactagagtgaaagtgaaacacaaatgaagcgtaaaaccggaatgcgcactaaatataaagaaaaacaagacaggggcaaaattgtcattaaaactctaagaaaaccaaagctcgcattaaatattttttaattcagattattattataaaatttaatgcatattgttataaaataaataatatgtatttaatatatattacattttgaatacaaataaaatgtcgccatanaaaatattttttattttaaaaaaaatatacatattacataagtcaataactattattggaattacatgcgcattanatatgcattagaaatggtagtgataatatgtatagaaatatttatgata

SEQ ID NO: 28273 - DNA, 491 bp, Glycine max
  unsure (1)..(491): unsure at all n locations
tttggaaatgatttctatataaaagttagtcgtataaagcgactaacagattgtcgttaaacatagatcaataccaattaggttatgctaattcttactcgataatgttggttatttatattaatttgccaagacattgggatttaatctaaataatttaggctttttcacctaagacattgnggttagaatatatttgtgtattgaggataaattgtatgaataattaaattaattgtggttactacattgtaataagggaaaccaagttcaaccctggctgttgaaacctctcaattctcacaataacactataatcaattctgctacttcatttcacattgcttttatttatgcaattgttctttagttatttattttactgtttggtggtctntaaatngttccaaaaaccctttgagaaaatacttttacaaaaccttagttgtttaattagaattacctagataaacattggtcctttgggatat

SEQ ID NO: 28274 - DNA, 440 bp, Glycine max
  unsure (1)..(440): unsure at all n locations
agagagatagagagagaggcacatgcttgatgctcgtgtgctgagcgtgtgatggattgtgtataggggttcaatggaacctgtatatatagtaattgaggatgactgttggcctttgtttgtaagggctattgcaacctttctagataattctaggcttctagataatagccaggagcttacatataatgttagagataaacatttacttatagataaaaggtagaagataattgtaccttgtagataatgtgtgagcttatagataattaattatctgctaatagataagatattcacatacatttgaatattcataaattagagatataacctgtttgttggagagcccgactactaanggtcaatcgtctgtgctcctgtagtanggctcacattgagggtggacacgtgtctttgcgtgttatataagatgtcac

SEQ ID NO: 28275 - DNA, 368 bp, Glycine max
  unsure (1)..(368): unsure at all n locations
ttggaagaaagtgatgaggttcaagccctaaaggcagagctcgaaagagcctgngtagtcaaagagaagttcaagtccatatccatcaaagtctgaaaagagtatgatgaactaagggatgtcaatatggccaccgatgaagccttggaatgagaaaccaagaacgcccgaaaggaagaacacgacctaagcaaagttttgaggggctttatatggcagcaatagtgagctcaagctctgaagaggtgaaaggaatcatcacgggtcaaaggcatgatcttgaaggacgagctacaggtttgccttacgtcgaaaagaaatttgtcccaacagctaaacgagactgaacggaatatgtgggccatcat

SEQ ID NO: 28276 - DNA, 308 bp, Glycine max
  unsure (1)..(308): unsure at all n locations
tgtcgaatttgcttacaatanaactgttcttaacacctcttattgctccctttagcagatgctatcgtcttaacccactagctcttcttgatctatagcctatcgtgtctgcatttaagcataaccaacgtcaatctaaggcggactatgtgaaaaagctccatgagagagacacatatcacattgataggaaaacgtaaagctatgctaaacaagccaacaaatggagaaagaaggatgtcttctaacccgtagactgggctagtgtgcacatgtacacaataaaggcttccggaacaaatgaaatc

SEQ ID NO: 28277 - DNA, 466 bp, Glycine max
  unsure (1)..(466): unsure at all n locations
tcattaagaggcttcctctagaagcttcctcgtggcttctttgagaagctttctcaacaggcttctttgagaagctagatccttatctatccacacccctctattaactaaattaacttccttaaaaataattacggatgaaaataacgcaacaaataatcaaacatcaaacataattactaataatatatagatatatatatcaaggtgttacagtccccggacgaaattagggtatgacatatcctctggtaattgattaccaaagagaaaataccatatatttgaaatcacaaaatttttttataaaatatcctttggctaaacctgtgcattgtttgtcggtgaaaacgattaacttttgtgtataaaaattgtataaattatatcaacctctcccaatttatggttattttgtagtgttataagtattntatgttaagtataggtaataaatacttagtat

SEQ ID NO: 28278 - DNA, 112 bp, Glycine max
gttttgatgataactaagatgatgaccaacaacccccgagaatgagttccagattgaatcacgaacacttctagaatcaagaggaaatttgatttcaagattcaagaatcaa

SEQ ID NO: 28279 - DNA, 467 bp, Glycine max
  unsure (1)..(467): unsure at all n locations
ntacatcaaacaccttgtgtctcactatgcacatgtcacatacatatcgatcatcgttattgatgtacaaatcatatccaaacccaccaaccaagagtgtttgggcatggagttgcaccccacaagatagcagagaaggtaaataacattggacccaaacatcattttctcatggaacagtacaaataaactacttggaaaaggaatactcgaagagagtaatccaaagtaataatgagatccgagaattacctggatctagtgtcacgttcatctaattcttttttattttctttttctcattcttgcatgattaaagttaataacacgattatttaagtcacattaaccaaaatctttgattcccgaatgaacattntgtcccagacatactctaatatagtggtgtgatcgcgtagactttttttagtttcctttcacattacactctctcataataatttttc

SEQ ID NO: 28280 - DNA, 448 bp, Glycine max
agtgcatgtgaactatataggttcccggaccctatgcgctagtaacgaatatagagaatcggacctcaatctactggccatcgatgaacaacgtcaacactgggactaccctgacacaacccaactgagactgcgggcaacacagccccccttgatctacgggcgatgcctagaataagctcatagcgcacgccacattcaacagttgctcatccacaactgcaaacggcgccagatacagaatatgatgcctacgcatctgagccgtttatcacacagtctatggcgcactgtcaatacgagggagtcctatgccgaagagtacaactaacctctgcgcctgacaacagccgatgacgcgatacaactcgtcaattatgggtatttcgagtgtaggaattacttttgtaaagataggtaataacacttagtactcccattatgtgcg

SEQ ID NO: 28281 - DNA, 351 bp, Glycine max
tgcttgtctcagcgtttatgcgagacagataccaacatgctagctatcatcgtcaagtgccaagaagagttaggtctagccgcggcccacgagcataggattgcggacgaatatgcccaagtatacgcggaaaaagaggctagaggaagggtgatcgactctttacaccaagaggcaaccatgtggatggatcggtttgctcttaccttgaacgggagtcaagaacttcctcgattgttagccaaggccaaggcgatggcagacacctactccgcccccgaagagattcatgggcttctcggctattgtcagcatatgatagacttactggcccacataattagaaatcgt

SEQ ID NO: 28282 - DNA, 151 bp, Glycine max
gaacaggctacttactactctatcattaccatgccacatgcactttactggtgcctttaggccgtggacaactggaatgcctattgctgcctgatggagcctccgaaaatttgaacctgccgtactctgacctaggctgccgtacttgtat

SEQ ID NO: 28283 - DNA, 66 bp, Glycine max
cttcccctgagaattgactccaaagcaaatcaattttaatgtcacgggatcctaggccataacata

SEQ ID NO: 28284 - DNA, 475 bp, Glycine max
  unsure (1)..(475): unsure at all n locations
ttctcatacacaattntcaagtatattgctatgtccagatattttaaattttctctttcagtgccacacttggttntaattnttccatgctatctcattgtagattaaatatccaattattagaaaaccattaatcgtgtagtttatagtagcattccacaacaatagagtaatcttatatacccactgatttttttttgttctttcattcatgtagtttcattttctttttcctactatgtttttttgcaggacaccatagaagtgcctttttttttttaccacgaacaatgggcaccggaatatcctgaattggtccagttcagatatgatggagcgacgtaccaaatacgagtaagacaacatcagggaaaagtcttctttgctgaaggactaagacaactcagaaaagaattatgaatctatcaccattaattnttntgcatgcgactgcaaatccatatttgaccttcac

SEQ ID NO: 28285 - DNA, 88 bp, Glycine max
atccttaagtcgacctgcggctttagctcatcgtacatactgaactcgatttgattgttatcccacacttttgctaggaataccttgg

SEQ ID NO: 28286 - DNA, 474 bp, Glycine max
ctatactagaattatgtaattgaattggtgtcgaattacattctaactaaattatctagagtcctacacaatgcttttataattgatagattatgttcaattcaactatggaatgatactagcctcatggagctacaaccaaaatcttgcctgaacagctaacagaccgaacagagtaatcatttcccgacaaagcaagaaatttagatgttatcataatattttaagttttacaactaataaataagaaaggtggagaactttatcatgaatataaaagtttcattgtgatgatcaagacaaaaagtgactatcatgccttagctatcaacaaaacaagtatggcacatcattttaaatcaatctcaacaatctaatatagaggtaatagttctataaaagaacactatatgatggtgatatactggtgcaccacctattatatagttgatggttgaccctagaatcactata

SEQ ID NO: 28287 - DNA, 360 bp, Glycine max
agctttttatccggtcagtgtactatatcttcataaattgtcaaataactgataattattaagtttatataattataaaaaattcttacacttaagtattatgtcaaacttatgctttataaggctgatattataataataataataataataataatattaataataataataatactatgtacgctctaataatcgtccttattttttttaaagaaaatatacattaatttaaaatgataaatatgttggattgaaatgaaattccattgtttttttgaatatataattcgataataaaactttgtgagacatttggactaaacttttaattttatatataaaatcgacggtaatctt

SEQ ID NO: 28288 - DNA, 386 bp, Glycine max
  unsure (1)..(386): unsure at all n locations
ctattgtcaattgacactctgacatgttttattgtttttaagaccatatgtgattttttagggaaatcctctttgtgccgattaaacatttataaaataatgatcttaattttctaatgatatttgtaatatacaaaactcaaatttagaacacttgngaaggagaattaaactactggttgaatcaactcgntgnttactataatatattctttgccactcttatttatgaaattatataaaatatctcttaaatgtaatttgattggtaaagaaggagaaaaataccatcgataaacgtggttgggacatataactggagaatggttgggacatataatcggagaaagccacttctaataactggacgattgccctatagatta

SEQ ID NO: 28289 - DNA, 70 bp, Glycine max
  unsure (1)..(70): unsure at all n locations
ttcttacactatcaatctcgagcgcctctttattntacgggactcaatcattcttccgagtaaaaagtta

SEQ ID NO: 28290 - DNA, 211 bp, Glycine max
  unsure (1)..(211): unsure at all n locations
cttgggctaattcaaatgaacaataacctttgctcggatgtctgattgagtcccgcaatatattgagacgctcgaaattgaattctgaaccttagagctaattcaaacgacaataactttntactcggatgtctgattgagtcccgtaatctattgagacgctctgaattgaattctgaaccttagagctaattcaaacgacaataacttt

SEQ ID NO: 28291 - DNA, 451 bp, Glycine max
  unsure (1)..(451): unsure at all n locations
ttctttagataacttactttaacaatgattcacctagcaccagccttggatgtacgttgtggagtattgtcaagtcctttcaatgcactgttgaatacaaggaacattaaaatattgatgtttttgagtaatgctaatgcaaatgtattgaaaaacaacactgacctgttaattattcctttaaggtagttgtttgacctattatgcaaggaacaaaaccagacaacgagattttccttaggcaaaatgatgactattttccagtatgcactgcagtggagaccaatataggttattgtagtattatacattatttaaattcanttgttaagttttacttacccatttaggtagactcctaggtagacantcccgtttgaattctgcatcaagttctttatgtaaatntctgattcaaattgcgaatgctcagatatctggatgggctatg

SEQ ID NO: 28292 - DNA, 316 bp, Glycine max
tgagatgaggaaatgttgtatggtgaaacttcctgcttttattgttgaccacagagtggtacctggagatatgtcgcgggggtcaggagaccttggggacgtcacgtggggtgctattgcccaaaaccaagcttgaccaatcccgacccaacccgggcatagtcggtcagtgagaacctgtgatgtacctaagcaggcgagctcctggcagtcaacagataaaaggaacaaagaccacaaagcaaggaggcttgtggtggctggccagctgtgaaacttgattgatatgtgagatatggtctctggtaatcgatta

SEQ ID NO: 28293 - DNA, 283 bp, Glycine max
  unsure (1)..(283): unsure at all n locations
agcttaagctcccttaatggcacaagggctcttaatnatttgaagaatattcttggggaacctttacccgatgaagacactgaccaaaacctaattttttctttttggaccaaatatggccagctgggggcaaataaattttcttcccatcagaacttggatgcaactgggatcgtatgcccataatcactagatcttgacgggtattcaagccatccttcgtcttgccttgaatgttaaggagcgtcccaatcacactgtcacaaacatttttctccacatg

SEQ ID NO: 28294 - DNA, 421 bp, Glycine max
  unsure (1)..(421): unsure at all n locations
tcatgttcgattaattgcctctgagcctaacttgcgtttatgcttaatggacgaagggctaactggtgtatgtggtgcctaatcacgtattgacaaccctaagttgattttcgcttagtaaattgaaatagggttggattaagtggttaactgttagggacgaattctccataacccaggataagagaatggcttctgaatcagagggaacaacccgtttttaatattagtagtttcgtattccagtttacttgttctgtcctttaattcacaaaacaaacaacccccccccccaatcgttactgttactgcaagtatattatgaacattnggtttatcattgctcgttgggaaacgacctangatcacttcctagttactgtattttcatgtttatttgattcgggtacggcctcgatca

SEQ ID NO: 28295 - DNA, 362 bp, Glycine max
  unsure (1)..(362): unsure at all n locations
agctngacaagccaacaactctcgcacctgtagagtttaccaccctcgacaccggacaatacttattcagttgaagggcttgacaaaactccaacccctcttacttggtcaaggctactacctttgacaccaataatttttttgccacaagctactaaagcttggggattatgtacttgccggggtccacaaaatggacgtggcaagtgacgtggcactccagtgagcacgtcagccctctatgtcaaccttggcatangagcacagacaccttgcccttagcaaccaggctactgggccgataggttatctctgatacctcattatttgaatattaatgaataatgtagaactcccttatc

SEQ ID NO: 28296 - DNA, 465 bp, Glycine max
  unsure (1)..(465): unsure at all n locations
cgtagaatggccagacatgatacatgtctaggttnggttcgtttcaaggataaaagggatgccccacattatttccatgacacaaatgcaaaaatgatgatttggaaattttatgcaaaactggtcatgcatgcacctatgtggacgctcaagtgtcaaatttttatggtcatgtgatgctagggctcacgattcattccctctattttaaatcaacccaatgtttccaaaatatgttcttttatcaatttgtgcattcatcctagtccatttcgggcgtccggggaaatttcacagcattcacccttcaggtgtagacacatttttcaaaaattggttatgatcaatgaattttnttcaaagaaaagttggaaatcatctcttttcaaaagcatggtcggttttagctagacaacttattttctctttttccaccttgtttcttactngctttctttttcctta

SEQ ID NO: 28297 - DNA, 342 bp, Glycine max
acctttgattaggctcctctaaagcgccgatcgtgctttttagaagattctcgctataatgaccctcttacaaacccaatgattgatactatacttaattttagattttgtcgactatgagatacagatatagatagcgtacatatgactttgactttatcacaattttccaccattgatgtttgaagcgacaattgtatatgcactctatcctctaaatagcacctttcactaagagaagccaaaccctaaccttgtacaatccttgtgacctgatgtgataccaataaagtcttcttgtttttgggagaagaggcttacctttcccaatcttatgatcat

SEQ ID NO: 28298 - DNA, 372 bp, Glycine max
  unsure (1)..(372): unsure at all n locations
ccaacaacactacaaagaacaagaatggcaccatcaaggacacgcaaagccctctcaacctcgatggtaaaatgaacgtgaccaggcgtgtcaataatgttaatctgcaacaacacatttcccaggatattaaacatataaatatatgaagacaaaattacttacaacacgataattaaccacaattcactcagataataaaaatagtaacagcagaagcattcaaatctcaattccccctttatatttcttgattcctattggttcaaaattcaattcaatttaaaatcaaccaacataacaaactcttcaactctgtccaatttatggcacttcaaaaacacatagcagtaatgattnttacatacactc

SEQ ID NO: 28299 - DNA, 459 bp, Glycine max
  unsure (1)..(459): unsure at all n locations
ngaaatgatgaagtgtggaagggtgagacttcctactttttattcgttgaccatagagtggtacctagagatatgtcgcaggggtcaggagaccttggggacgtctggtggggtgctattgcccagaaccaagcttgaccaatcccgacccaacccgggcatagtctgtcagtgagaacctgtgatgtgcctaaacaggcaagctcctggcagtcaacagataaaaggaacaaagaccacaaagcaatgaggcttgtgtggtggctggccagctgtgaactttgagtgttatatgggatatggcctctggtaatcgattaccaagggtgggtaatcgattgcaaggcttaaaagtgaagacatgaagataagatggcctctggtaattgattaccaaggggtgtaatcaattaccaggcttaaaaacgagatcaggaagctaagagggcttctggtaat

SEQ ID NO: 28300 - DNA, 525 bp, Glycine max
  unsure (1)..(525): unsure at all n locations
aggtttataccctgatnnaccgttgcatcatgattgaacccttgaagaccagcaacttctgagtatatgtcatcttgttttagtagaggcgcagcctttttaangatgtttacgctaacaaatgcatgacctgctccttaaattctctgagatgatcaacctaataggggcaatcaagatattacaagctcatgtaactttgagcgcgcaatcacgatagccttgtgggagcaactatacccacaattcatctctctctgtctgatcatcatactacatgtgttatgaggatatggcgctatctacttgagaagtaagcacattctccccacgaaatgccaacatcctcattaagatactgtaaaccacacatatctctattacgtatcaagacttctagagattcacaaaacatttgaaatatatcattatcctcactaacanattcttcacctgttttagtaaatgtggtctaaaaaaccaaactcacaagttgacgtgttctcacagcgctgaacatactcg

SEQ ID NO: 28301 - DNA, 331 bp, Glycine max
atgatgtacagacttgtggatatcaagatgtacaagtgatgtgttaaatgctacagagaaccgaaggtgaagttataaaaaaccaccataagcgcaagcagtttcccttctggaggatctttgtatggtccaaccatactcaatctgcaaatcacgcttcaagttaaaaccacacacaagtttcaagtttacaaataaaaccgcttctgcagctggcaagccaccctccttttatcttcccattgccagcatcatgaatcttctcttcttcttcttggcttctaaaacttagcacatgtcgtgttaactcaaactctactaccctgtcaca

SEQ ID NO: 28302 - DNA, 453 bp, Glycine max
attgtgtaccttagttgctgcttgctatccaccaaatgcaaaagagaatgccctcaccaatgtgaaaagggaattcataatacaaaagagacatagtatagcctgcaccgttaattatcatctcaaaacaaataagagaattacattcaatagtagttgatagtctaggcaaaagattaggaaattgttaatttttaatttactacaaatggtttataaacagtgagctaagaactttcaatactgcttaatactgaaattatctgaattactattagcttcgtttaactactccattctccaacatgatatttacagggtgaaagtgggggattcaatttctttctttctttcttttcagtagattcaaaccttataaaattaagtttcttattaaaaaaaaccccttagcattactcagagctattataattaataaaaagaaatttctaa

SEQ ID NO: 28303 - DNA, 251 bp, Glycine max
  unsure (1)..(251): unsure at all n locations
tgctntgatgatatccaaaagaatttgcttgaaaaagggggagaatgtgaatcatgcaagctttgatgattgttataagaaatcacatgtttgtcatcatcaaaaagggggagaatgtgaatgtatgtatacatgattttgatgatgtcaacaagaatcaaacaaggctgcttcaaatgataagcttttgcttcaacaaacaaagccttgtttcaagattcactatagacccacccttggcttaaaacaga

SEQ ID NO: 28304 - DNA, 451 bp, Glycine max
  unsure (1)..(451): unsure at all n locations
tgtaatcgattacacacatactgtaatcgattaccagagtgagttttcaganaacattctcaacagtcacatctttttctctgattcttaagtggccatcaaaggcttatatatatatgactagagacacaaatttaacaagagttttgaagaacaaaaaggtcttatcctcttaacaagcaaaattgttttatcctcttacaaattccttggccaaaacacttgtgattcaataaggaattatttgagtgctcaaattgttcaatctatctctttcaagagagatttcttcttctcttcttctttattctgaaaagggattaagaggccgatggtctcttggtgtgaaaggattctaaacacaaaggaaggattgtccttgtgtgtttagaacttgaaaaggaattgcaagatagtggaactctcaagcgggttgcttgggactggacgt

SEQ ID NO: 28305 - DNA, 151 bp, Glycine max
agcttatgattaagtgcgccttggaagattatgaaggagacaaacatgaactacagtgttaagtcccaaactcactctgatcaagattcagataacaggacactcaacacgattctttgagttgtgttacaacaatttaaaaaattatttg

SEQ ID NO: 28306 - DNA, 487 bp, Glycine max
  unsure (1)..(487): unsure at all n locations
tgctgttattgacagttcctctgganaataccgagatgttaaagttgctgatgattacgtatctgttatgacactaacattagaaatccaagttagtatactgtttgtctttcatagatatatataaagaaagttgcttagtattatgagttgacagatgaaagattaatgattctgattctacttgtgctactaacaggaaaaggtgaagaattctggtcgttttggggttcatgctctcagtgaagttgcttcagacttagctccagattatcttgagcgtcatggacttaaatctgttcctaaatctgtggcttatggttacactgcttcaggatatggatttattcaagacatgccttatgcttacattcatgaatntaccagaacttccatggccggaaaaattcgacgattcaaaggtggatatacaagtctttggcagaggattgctgaatcacttcctataaaacttcattataacact

SEQ ID NO: 28307 - DNA, 163 bp, Glycine max
  unsure (1)..(163): unsure at all n locations
agtcgtctactatctaaaattacactactgcctagttttacaaagatccgctcttaaacttattttcagttatctaggcagtccatgagccattttttatgaatcttatatggtaccctacattttcacacctaaggaactcattnttaaagtcaaattttta

SEQ ID NO: 28308 - DNA, 394 bp, Glycine max
  unsure (1)..(394): unsure at all n locations
ntatgtgatgaacattggttaatggcaatgcatgaagagctgaatcagttaaagagaaatgatgtatgggatttagttcctaaaccaacctctcacaagccaatcgaaaacaaatgggtgttttgaaacaaacttgatgaatctggcatcatagtgaggaataaagaaagattggctgcnaaaggatataactaagaagaaggaattgaatatgatgaaacctatgctctagttgcaaggttagaagctataagattgctacttacatttgcttgtattatgaatttcagactttttcagatggatgtaaaaagtgtcttcctcaatggatgcattgaataagaagtgtatgtagaccaaccactangatttgtggatcatgaacatcctgact

SEQ ID NO: 28309 - DNA, 365 bp, Glycine max
  unsure (1)..(365): unsure at all n locations
tttattgtgctcaagataataattggttcatcttgacgctgncctgctgcataatgggttgcaattttgagtcctctagatagttggcgttaccgaattatttctttttggaatggtttcaaacaaagatgaaactcttggttgaactattcctaactcccttgcatccatgtgaatccacattaatggacataattcaatggtattcaaaactacatttataaaataaaaatcttctttctaatataatttccgctctttcatcaaacaaagctataataattttaaaagaaaagttttgagaaagttatttatttttttgaaatcattcttaccactgaaacacattttatgcaccattgcta

SEQ ID NO: 28310 - DNA, 440 bp, Glycine max
  unsure (1)..(440): unsure at all n locations
cttagaaactcaagcttgaaccaatatattgtcttatggagaagagctacctttgaaatgaatgtcaccactaatatgattcttatgtgggaaaagagtcacctccggaatgatcattggtgggaaggaagtaatcactaataacatagtctggtttatataagcttattgcattaaatatagttaaattataggagatnttatttccatatacaggatatgatatgcatataaatcagattctaatgagatgtccctatttttttttggtaaatgatgagatatccctctaattacaaagatcctaattaaataatgaanaatcatanaatataaaagaagaaaaatcctcagaaatatctagaatctctaaaatatttaatatcatcagatatttctaatttctcatttcttacaatggtcataagatgattctagtc

SEQ ID NO: 28311 - DNA, 388 bp, Glycine max
  unsure (1)..(388): unsure at all n locations
taagagaaccctactnttatttccaactagaaaaccctattctagcatgctctaagcgattcatgcgaccaaaaagacggtttaagaaccatacacaagaaaaacgagtaagagagatacaacctgagcaatctttccataaaaaccttgttggattgagaaagtgatattcttcaactcanaagacacaactcacttccaagaaaagatcttcataaccaaatgattaagaagttgtaaagctcttctcttttcttctttttattntactaagaataacacaggatctttctcattcaagaaccaatgggttgttttcgagatattgagtattctctcgatatgttttgaagtgaacacaagttggttatttatagaanaaacactt

SEQ ID NO: 28312 - DNA, 346 bp, Glycine max
ctctagattgctgcaaagaaggaccaagatctgtatggtgatctgcagaaaaacatataccacagacttttgcaacaggtgcagatttttattcgtggccagttgagttactatggtgaccaaggcatcaagttttcctcaacctttttattttcagtagaagaaaaagaatctgtggccacctcatggactccttttaggacaatagcatcatttcttgcattgaatttgtgagagctggaagccatcttcttcatcaaattccttagcctaacaagggtcatatcaccaagagctccacacttgccagaatcatcatgctcaattccatgtgctaaatccctca

SEQ ID NO: 28313 - DNA, 462 bp, Glycine max
  unsure (1)..(462): unsure at all n locations
tgtgtaagctntcccantatcttgatgtgaaacaaggttatctctacaagaaaaatgacttatgcctacggacaaaaaccatcactagatgttaaaaatgtgtaggtaaatgtaataaagactttatcctacagacattttggtcgtcaactttgagggggcgtacagtgacggattatcgtctgtcagtattggttttacctactgatttactttcacctacaattcacaatgtgtgtaggtaaaagtcattaatttatatctacaacctctaactataggtaaaaatattatcttgtacctacaacctccaactgtaggtaaaagttattaacttatgcctaccatagaaggactatagatacaggccatttacttgtacttatgcctacggacaaaaatgaaacatatgaaccaaggaacaagaaaagtagaaagaaaacaatgggttgcatactttct

SEQ ID NO: 28314 - DNA, 231 bp, Glycine max
  unsure (1)..(231): unsure at all n locations
agcttnttggagtagaaacatgggaccatctcattttatttcaaaaaaggaagtcatatctagtcaaggtctaagagaccatacaagtttcctaacgatatctaattatgtgggccattaaatctatcatatgctgacaataaccgagaagcccatgaatttcttctggggtggagtagggggctgacatcaccttggccctggctaacaatccgggaagttcttgacttc

SEQ ID NO: 28315 - DNA, 438 bp, Glycine max
tattcggagacccatgaattgattgcctagcgcagattatgcgtcctccaccatcgagtctaaagccccatggattgattgcctagcgttgttcgtctatcctccaccctcaaatcttattcggagacccatgaattgattgcctagcgcagttcatgcgtccccaaccatcaagtctggagccccacgaattgattgcctagcgttgttcatctatcctccaccctcaaatcttattcggagtcccatgacttcattgccttgctcggttcatgcgtcctacaccatcgagtctggagccccacgaattgattgcctagcgttgttcccctatactccaccctcaaatctaattcggagacccatgaattgattacctagcgctgttcatgcgtccacaaccattgagtctggagccctacgaattgattgcctagc

SEQ ID NO: 28316 - DNA, 80 bp, Glycine max
tgccttcatgaaagagtgcctattgcgaagaatgggcgtgccacttttatagggacgctactgcctatttttacacagat

SEQ ID NO: 28317 - DNA, 529 bp, Glycine max
  unsure (1)..(529): unsure at all n locations
cggtgaacccttgattacgttgactacctgaatcacgcgcacttaaaactaagctatntgcgttcgatgtngctcttattaattaaccacgcagttctgatgcgtgtcttctagcgaaccgaaccgaaattgagcatcgccgactggcatgttctcattttgtcgaccaggataacagtaacccacctcggcgtaaagaacaagaaccaccgatcttgacaggcgtatataaatgcgtggccgacgtggccctgatagaataccgacctaggtctctagatcaaacctgaccgggtgactccggtctaacatttccttaccgatatcatacacttattattcgtggctcgaagtgacctacccataggctgcatgggtcgttaataagccgagcatgatctctttcggacgaacgtgcatcatattcctaacattcggctgtccctaagagaggcgtttatcaattgcagcgagtgttcctgttaaagtgttcaatactcgtcccgcaagtataactttgcgaacttcn

SEQ ID NO: 28318 - DNA, 319 bp, Glycine max
  unsure (1)..(319): unsure at all n locations
gatgatgcagatgggtttgtaactacctcatgcactcctctaatgactatggcatcatttctggcactaaactgctgggagttggatgccatcttctcaaataaatttctggcttcaacaggagtcatgtctccaagggctccaccactggcagcatctatcatacttctctccctattactgagtccttcataaaaatattggaaacaaagctgttctgaaatctgatggtgggggcaactggcacatagattcttaaaactctcccanaactcatacacgctctccccactggagtgactaaaccctgacaaatcct

SEQ ID NO: 28319 - DNA, 451 bp, Glycine max
  unsure (1)..(451): unsure at all n locations
tgtgcgaatcanatcactcctgcattntatctctagcatgcattctttctttctttacccactcctcacgtttggttttttagggaaaaacaccataactaaacgcgccacaaggcatccctatcgcaccagatccaaatctagaacgatgggtgatcaggagacacaggaacagatganagccggcatgtcggctatgaaagaacagatggcctccatgatggaggccatgttaggaatgaggcagctcatggagaaaaacgcggccaccgctgccgctgtcagttcggctgccgaagcagacccaactctcttggcaactgcgcaccatcctccctcanacatagtangacggngaagggacacactgnggcacgatggcaagcctcacctgggatacaaccgagcggcttacccttatggatngccgcccaactactcaccacccgtc

SEQ ID NO: 28320 - DNA, 428 bp, Glycine max
  unsure (1)..(428): unsure at all n locations
tgatacgtcagcagaagatgaaggataggaagataaaagaactagaaanaaggggtgaacatgagnccggggaatgagacattgaancccngtggaacctggaaacccgggaganacattaggaaggagagaaagggggatttgttatgttattgaaaaagaataaagggcaaataaggagggagagatcataatagggaggaaaaaaaggaaaaaggggaattgagcggagatagggagacaagacggaagccaaaaaatttttaggggggagagagaatgaagaactgggattggtaaaaagagggaaatttagcatctgtcaaggaaaacaaaccggcatccaagggggcaatggggaaaaaaaaaaaaaagataggggtatgacgaaaactgagaaaaaagcggaaatatgtgaggggggtata

SEQ ID NO: 28321 - DNA, 456 bp, Glycine max
  unsure (1)..(456): unsure at all n locations
tactaatgctcctgttctagctcttcctgacttttctaaaacttttgagctaaaatgtgatgcctctggagtgggagttggagttgtattgttacaaggtgggcaccctattccttattttagtgaaaaacttcatagtgccaccctcaactaccccacctatgataaagagctttatgccttaataagagccctccaaacttgggaacattaccttgtttccaaggaatntgtcattcatagtgatcatcaatcacttaagtacatcagagggcaaagcaagttaaacaagaggcatgcaaaatgggtagagtacctagagcaatttccatatgttatcaaatacaaaaagggaaaaacaaatgtggtagatgatgccctttctaggagacacacatngttntgctccctangagcntcaaatttatgatttgataatattagggacttgtatgc

SEQ ID NO: 28322 - DNA, 325 bp, Glycine max
agcttcttagtttcagatgatgcagatggttttgtagctacctcatgcactcctctaatgactatggcatcatttctggcactaaactggtgggaagtggaagccattttctcaattaaatttctggcttcaacaggagtcatgtctccaagggctccaccactggcagcatctatcatacttctctccatattactgagtccttcataaaaatattggagaagaagctgttctgaaatctgatggtgggggcaactggcacatagtttcttaaatctctcccagtactcatacaggctctctccactgagttgtctaatacctg

SEQ ID NO: 28323 - DNA, 520 bp, Glycine max
  unsure (1)..(520): unsure at all n locations
cggcttgatagttgctattacggacctatgattctcagcttaacacctcccgctagtatgcttcanaataaatatatatatatatatatatatatatatatatatatatatatatatatatatatatatatatatatatatatatatatatatatatatatatatatgagagcgcacagacaattctatctacacccatccctgtgggcacactgtcgagcccctctatgcacacacatagagacaccgatttgtcgagagctatatatctatataactctcaagtgatacacacgcacagcaagaggtatcacaccggagagtgcgcagaactcatcgacacagacatatctgtagagcgacctaccacgcgagcagtgtgggcgggcccaccttcatcttgggcatagtgcgcagccagactcgaccactcgtgtgacacatagaaaatagtccagcgacttaaagaaggagacaccccgngtgagaagcttccgaccactntctctctgccgagccg

SEQ ID NO: 28324 - DNA, 343 bp, Glycine max
  unsure (1)..(343): unsure at all n locations
ttctttaatctaattggtctatgtttgagttgaacctttctttgaattctttttgctaaatgtgaacttatgtcgtggtggtgattcatagaacattaacttagctctagcattatctacttttggggtttcctttaatgtgtacttttttcatttgctnttttatataaaccgtattacgaaaccttgtgtcagctctgaacaaggtcatagcagatcgatactcatcaacatggtcaagttctgagtatcacgtgtatgaagtcttcaaggaacacttgatagcgctttcagtattctaatttttattcatgagaagaattggaaattgacattacaattt

SEQ ID NO: 28325 - DNA, 233 bp, Glycine max
tgcagtacgtggaacaaaaacacgacttatagttagaacgaatgtattcaaggacagttattagcaaataatcattgttgtattacaccattctagggcagtgtctacctaaaaatgtcttagaatgtcatcattcaaagatggtttttaactaaacaccgtcgtagaatggtatcattcaacaacggtgttaagatgtataaccggctttgaatgatgcctatctaagacat

SEQ ID NO: 28326 - DNA, 518 bp, Glycine max
  unsure (1)..(518): unsure at all n locations
gccagataccaaccgtatccgatcctacgcgcattacgcagcaattcgacttccaacgcttgcaccccaaccgcaancacaacacccttgaccccttcgcgnacccggagacctttgaaccgtccagacacgccgcaagcnnnganganatcaaaaagaagncgctttgaaaagggggagaatgcgaattatgccagctttgaagatgtccagaagaaaccacatgcttgtcatcatcaaaaagggggaaaatgtgaatgtatgtatacatgatattgatgacgtcaaagaaaaatcaaacaaggctgcttcaaatggaaagcattggcatcaacaaacaaaagccttgtttcgagattcactaaagaaccagccgggccttaaacagagcgctttcaaaaatgcacggctctggtattcgttaccacaagacagggttgacaactacctgtaaaaaagataacaatttgaattccaacagggatcaagacggcaacaaactccgaaatcaaattcag

SEQ ID NO: 28327 - DNA, 435 bp, Glycine max
tgtaatcgattacacacatactgtaatcgattaccagatgagtttttcagaaaacattctcaacagtcacatctttttctctgattcttaagtggccatcaaaggcttatatatatatgactagagacacaaatttaacaagagttttgaagaacaaaaaggtcttatcctcttaacaagcaaaattgttttatcctcttacaaattccttggccaaaacacttgtgattcaataaggaattatttgagtgctcaaattgttcaatctatctctttcaagagagatttcttcttctcttcttctttattctgaaaagggattaagaggccgatggtctcttgttgtgaaaggattctaaacacaaaggaaggattgtccttgtgtgtttagaacttgtaaaaggaattgacaagatagtggaactctcaagcggg

SEQ ID NO: 28328 - DNA, 392 bp, Glycine max
  unsure (1)..(392): unsure at all n locations
agcttgcacctgctagcccacggaattagtgggtcgacccatataaaaaatttttattaaaaaattaaattttaaaacgtaaaagttggaaaccatttaagaactatgaaatatcaaataaaaaattatttgtccaaaataattacaataattacatctcaagtcacctaaaaaaagtattnttttcatatcatatntacttaatttgtaattctatattaaatcaaaattatcaccattcaccanaccattgaaaaatatataaagtacttacattctatatgttttttaaaagttatttttttcttaanttatgccccttatttattagtatcatatatgttatattannaatataaaagtctgtcagtaaaacttgtttaaacacgcag

SEQ ID NO: 28329 - DNA, 489 bp, Glycine max
  unsure (1)..(489): unsure at all n locations
tcaagcttataaattagggatttgtgtgtaatcactttatttcttgttcttgatgcttagattcattggaaaattcttggttgctccacaccacgacattggaagagattgattggattctccttggttgtgagtaagctaatctactattgacactttaattgttttaagaagaagcaattaaatttcaaaataaactttnttggtgattntggttgatgtgagtatttgaaaatgaagtataatatttattttcctttgttggacttaatccttaatggtgtgatgatgtatttttaatagtttgaccatgtattttaattctgattgatttccatttgctactatgaagagataaagtagcctatgagtttgatactcatatattttttgttctctacaacgaagaaataatgtagcttatggattgaacactcatagtatgcatattattcattngctacaacanagaaatagtgtagcctatgg

SEQ ID NO: 28330 - DNA, 458 bp, Glycine max
  unsure (1)..(458): unsure at all n locations
tatgctgcacacatctacaacagacctcctcaacctcattatcaaatcagccacaatagaacaattatgacctctccaacaataggtacaatcctgggtggaggaatcatcccaaccttagatggtcaaatcctttacaacagcagcaacaacaaccttattttcaaaatgttgctggcccaagcagaccatacgttcctccaccaatccagcaacaacagcaacagccccagaaacaacaaacaattgagactcctctgcaaccttcccttgaagagcttgtgaggcaaatgactatgcaaaacatgcagtttcaacaagagaccagagccttcatttagagcttaactaatcagatgggacaattggctacacagttaaatcaacaacaatcccagaattgtgatagaataccttctcaatctgtccagaatcccnaaaatgtgagtgtcattaca

SEQ ID NO: 28331 - DNA, 467 bp, Glycine max
  unsure (1)..(467): unsure at all n locations
tgttggagataaaggtgntgtggaggcagccctcgctataggaagtgaagttagacatttgcaacgcgaaacttttgaaggggctcaaacattgatgtcaaattttactgaattcgccacggtggggaagcatatgacaatacttgcaggctcaccaaagcttgaagtgtatcaaactgactttgggtggggaaaacccaagaggagtgaagtagttcatgtagataattcaggaacaatctccctttctgactgtagagacaaagaaggtcgaattgaagttgggttagcactgcaaaagattcaaatgaatcaattcagtaccactttggaagagcacctcacagaaattggagttcttgactgaaaatctccactcacagaatatggttgcacaatgcacacttgcacagttcaactcctaccaaccgtacgcgtagaatgataatgatattaactgttacata

SEQ ID NO: 28332 - DNA, 461 bp, Glycine max
  unsure (1)..(461): unsure at all n locations
ntcgtaggtgaaatcaggtgcagccatttcccttagagttctctcatggtgtggaggttgtgccatgttctcaaaatgtgcaaaatcagaatgctcagaatcagaatgctcaaaattataatgctccaaatcaggatgttcaaaatcaccaataacagaatgcacaaattcaccagtaatggaatgctcangatgatcaaaaggtataaaatgatgcctaactaatctatgaaatgtcctatctatctcanggtcaaagggttgtaagtcagatggattgcctttagtcatacactacattcagcatgcacaactagttgccttgtcatgtaaataaaggtgcaagtttgaactacagctaccctcanatgatatccaaatgacttgaaattttgtgagcaaccttataaaatgatgagaagatagcacaaaaaatttcagacaaaaattcanagtctaac

SEQ ID NO: 28333 - DNA, 272 bp, Glycine max
agcttcccatccaccacattccatctgtggctctgaatagtaaatctgatgcacttgccacaattactcatgattccaaattatgatgaattcctcataagttagttttgactttacaaatcgtgattgaatttcacaacctctgaactaaattgttatttttgccatacatggctgacatgtcttctgggctgacaagcaacatgtccgggatgaaaacgatatattttaaaaaatctctacatggaactgtttgaacacaagtaatgact

SEQ ID NO: 28334 - DNA, 302 bp, Glycine max
cattgaagaaggatatgctggttcactccttcacaatgaaacacatattacgatgaataacttggaagtgaagtagctccattacccgggacactattgtcgtctggcgagtaccatgatgatctgagattcttagctaactcaacgagagtggtggctgtcactatagggttgagactttgtaatcacgccacgagccacacgccaattgaactactgatgtgataacccatcaacaaatacttggatacccattcccaccccgaaggaagttccaaaaagatatgatgctagtgatccca

SEQ ID NO: 28335 - DNA, 282 bp, Glycine max
  unsure (1)..(282): unsure at all n locations
agcttggttcaaggtctttacccgttgattatcgaagaacgatgaatatcgaatgaagaacgtcgaagaacggggtgaaacacttggcgaatntcttcacgggaaaccgttcgaacacgttttggacgcgcctcggcttagattttcttcacggaaacaatttttccagcaaatttcaaacagagagaagtgccttaggggctgaacccttatcttcttcctctcctccctatttatagcaaaaaaggggaggcggtcgccggtcanctcgcccaggcgagc

SEQ ID NO: 28336 - DNA, 452 bp, Glycine max
tgaggatgctctcctccgtcttacccagcaacaatcctacatgaccgacaaaatcgatgaagctctcatgcgtctcccgcccctatttcaccataccccgtcctctaccacttcttaccaaccttcaccgtcccctgcatcagttcataaaatgaaattagacgttccccggtttgatgggtccgacccttccgggtggatttttaaaattaatcagttttgtgaataccacgataccccaggccatgaacgattaaccatagccttgttctatatggaggggagagctttcacctggtttcagtggatgaccagcaacggtcaactcacctcgtggccggtgtttctgcaggctttacaaacccgcttcgccccatcgcaatataaagaccccaccggcgcactctttagactcacacagaagagcacagtgaatgcttacctagcggaat

SEQ ID NO: 28337 - DNA, 329 bp, Glycine max
  unsure (1)..(329): unsure at all n locations
agcttttctattcattctatgtacccgtattggtccacattgtgcnncgtgcatttttattctcgttttggttactttttataccccctgttgacgtgcttaagccattttacttaagtcatttctcgcttaacttaaaaataaaataaatttccaccgaacgtttgaattgtattattcattaacttcggttaaaataaattccgaccgttcggccgtgccgtaaccacgctggtaataaaaagaggtaaaaataatatactatcacaaagacatctttattaaaataaagcggaaaatcaagtggacgtttctctttgggattctca

SEQ ID NO: 28338 - DNA, 451 bp, Glycine max
  unsure (1)..(451): unsure at all n locations
tcttgtggaccttgaacaatcaatcaactcctctttcataaccatgctatgtgctcgcgattggtccctttcttcccttcgcaacttgagttcattattgctaccccatagagctccgcgaaatttgttccggccatactcttccttgcgagccctcttggtctcttgttcaagggctcttgcggtaattgcattctcttcccgtaacccggcacactccttccgaacgtgtgtagcagccaacttgaacttctccttggcgagttttgcctttcctaactcgctnttgagagcttggacttcttcgtcctcttccggtgcttcaaaattctcttcgctgacgactnttaacttggcgagccaatctaaacctcgtatgcgaactatcagccattcgtggtacccaccaatgatgccattacgaatgcctctaagctcttgatctttcctt

SEQ ID NO: 28339 - DNA, 402 bp, Glycine max
taagaggtctggcagtgctaatggatgtttcccttgattggagaaggtagaaatattgtctaagatggagtgctcttttgatatcaccttttgttgcagaacaatttttcttcttaacaatcttgttagaggaatcattttcctctttatccttccccttagactttgaagacaaggccttactatacttctttgtcttttgtgtttcttcctcatccctcttatctttcatagttagttgatcttttgccacctgtgaaggtgtttaaggatgcaacacaaattttgtgccaagatacgtgacggtaatctcattggttaggcaattgcaaacgatcttcctatcaaattgccatggccttcctaaaagaatatgtcctgcctgcacgggaactatatcac

SEQ ID NO: 28340 - DNA, 368 bp, Glycine max
tgttatattcatgggcaggaaaatgatctttgatcaagatagcctagacacaattgccaacaacaaagtccacagatcaatgcttctgtcagcctataattaacttgtatttttcagtggaagctatcaattgagcatgagtttgttcgtgcacctggcgaagttaggagatgaactcctcaatggtggtataggaacacacttgactagggaaacttagcaagtcaaagggggccacgagtaatcatgcaataaataacgtggaaaggactagcctggtactatgattatcgacattattgtgagaaaatatatcttgacagagtctaacatgccaagactttaaatgatcgcccaccaaaatgcat

SEQ ID NO: 28341 - DNA, 272 bp, Glycine max
agattcaagattcaagcctcaagaatcaagagaagacttaatcaagataagtatgaaaaagatttttcaaaaactgagtagcatatgaatttttcacaaaactctctgctaatcgattaccagattgctgtaatcgattaccaatagcaaaattgttttgaaaaagttttcaaattgaatttacaacgttccaattaatttcaaaaagttgtaatcgattacaatggtttagtaatcgataccagtgcctttgacgttgaattcaaatcaat

SEQ ID NO: 28342 - DNA, 413 bp, Glycine max
gctattacggacacttcaatttaagcttgatactgtttcgagttgttgggatgcaaaactgggatcaaaatgttgataagagccaagcatattagatacatgccttaatatctttatggttccaaagtctatatgtcagacaaaatatatgtctttcccttttttatacttaactagctaaaattctcctagaaaatgcattatatatatatatatatatatatatatatatatatatataatgatttgagctgcataagtgaagaataatttcataaataatttggacatttctcttttgaattaatccgagagttataaaaaataaaataaaaatggtgtgaatgaccaagcttgtaaagtcagaggaaaaacttttcatttgaatcacttatgaatgcagatgtcttact

SEQ ID NO: 28343 - DNA, 239 bp, Glycine max
tcgaccgggatcctgagaacctacctgcacgcatgcaagcttctacttatgtggcagggcggactttcttcaccttcttgactccaacgcgaactttgaccattgatctttcttcccgcgatgcttatcttcatgtctgcctgaatgggcttataacctatacgctacttcccacgaatttcttgagtatttatcacgctagtcatgccggcgttgtattttctaaacccatcccgggt

SEQ ID NO: 28344 - DNA, 427 bp, Glycine max
aaatagaaactgatcagtcgaagaacaaagaactatgaagagcgatgaagaacgatcatggaaacgttactgaagcattatggaagtgcctcggccttgattattcttcttttttctccttcttcttactaatttctctcaaatcctcttgatttcatatgctggacccttccttcaacccctctcactcctatgtataggaaatgaggggtagaggttgcacagcagctcgcccaggtgagctgcatgcttcctcctgaagtaacttgcttgcccaggtgagctggttacttcatccctatgctttctagtgggcccacgggctgaaaaatgtcccagaagtgaccatctttcctttctcttgaatatgttgcacatttccttccgaaacgtcacaaaaccctacggattgcacggagctcaattc

SEQ ID NO: 28345 - DNA, 487 bp, Glycine max
ggacacttaattagcttaatatgtctgagagaaaaagattaattatctaggaatgaatgaatatgcattgtgtttatgtattcaaatgagaattagtacaaaatgttcaaaaaaatgactaaaaattaaaaataaaaatcagtagtctaactctaataacacaaaaagacccacctgatgatagaaagtagcaagttctttgacccactacaatgagacagcaccagacacaatgttggaaattttaaataaacagtttcccttaatatttttttgctgacagaacatgtaactccagagacataacactcaaaacttcaataaaccagtaataacaggcaaaaataaaatagtgcagtgaatctataatagatagtttgtccaatttatatcagacagataaagttaacattctaatctaccaaggtgcctttgtaaaatcagtttgaaggaacagaagctgactcgtgcataatttataactaat

SEQ ID NO: 28346 - DNA, 346 bp, Glycine max
  unsure (1)..(346): unsure at all n locations
agcttgaagcaacatgctcgcccaggtgagctgttgcttcctctagaagattcttgatgggcccagggctgaataacacccctaaattgatcagctcacccccattntgagtttttttggcttatttcctttcgaaacatcgcgaaaccttacggatcgcatgacaattgtctttaagcagctcaactgacctggcgaaaatctgcctgtcgaanaacaattatccctggacgaaattagggtatgaaagttgcccttctttacttatctttcattggagataaaagggaagtaaagataagacactaatttcgttcaagctgaattctctcctaaccgacgatct

SEQ ID NO: 28347 - DNA, 366 bp, Glycine max
  unsure (1)..(366): unsure at all n locations
tatgtgtgggatacctagtgtgagcatagtttccaaactcttaaggaaaagttgacgaccgctactatgttagttttgcctaacatgagagaaccctttcaggtgtattgtgatgcaccaaagatgggtttaggaggagtattgatgtaaaatggctaagtagtggcctacgcttctagacaactccagactcatgagaggaattatcccactcatgatctagagtaggctactgtagttttttcccttaagatatggaggcattacctctttggccccaagtttgaggtgtttagtgattataagagccttaagtacttgtttatgttggatcgagtggcctcagaataattaagaaggnggggg

SEQ ID NO: 28348 - DNA, 331 bp, Glycine max
aataattgataatactttctgaggatattatatgttctttttttgactaacttataaggtaattatttgatacataaatttatattaatatattttttcatagcttactgtaaataacttattttcataagttatttgaaaaataatataatgtgtctgagataatcgaaaaaattacaatattttaataatcgattatgatcatgatcagatttggatagatttgctaaaaaaaatagttggaaatgattaatttctttggatgtacaaaaatcactttacacattaaaaagtacaaaatgcgtgagtaaaaaaaagctgtgaaacaata

SEQ ID NO: 28349 - DNA, 473 bp, Glycine max
  unsure (1)..(473): unsure at all n locations
gctggtggctggcagaaacagtgtcttctagtatttactnttaattatattttaaggaatatattatacatttaacactttattatgacaatatttttttctatttatctctccattaatttttttctctctcctctagttatcttaatttcttttaattatataaaatttattgcataaacacagttcctaatattttaactgaggaccttaaagaattgtttcctagtcaatggcgttacttgcatcataatcaagtatggcgtgaacgatgctgaagccacctttgttcatgcaaatatacctaattacgaaaagttgaccaaaccactatagcaagcaagcgagacacaacaaagtgcacgcggccaacgttcatgcacaactccaccaccgcaattgttcctttcaatttaattaatattntttgactgaagttgctcaatactaggcatatatttatggatattatc

SEQ ID NO: 28350 - DNA, 430 bp, Glycine max
  unsure (1)..(430): unsure at all n locations
taagtgtcttcctatctatcaaagcaaaatatatgcatcaacaagtagatatcttatggtgaagcttttggagagctttctttgatccaaggtggtcattaagtccatgtagcctctggtctctactcttttgcctgcaaaatcgaggagtgaattgacatgagggtggacagagtcaggggagaccttgagtctcttgatagttttctaatacacaatatcagtggaactaccctggtcaatgaggacttgggacaccatgaagtttgcaatgatgatggagacaaccacgaggtcgtcttggttgaaggcgttaataccctngaagtctctattcgtgaaagtgataggagggagacttcgttgtaatggtgcattgacaaaatnngattagatgtcctatatnggcgtaaaatggcattttgggact

SEQ ID NO: 28351 - DNA, 173 bp, Glycine max
atgcttctacattatgtggcagcggaccgacttatcttcacccttcttggtctccaaacgtctaacgtatgacgcatatgttctttgcttcccgacgatgcttactcttgatgtgtcccatgagtgggcttatagcctaaaccatacttgccacgaatttcttgagtttttat

SEQ ID NO: 28352 - DNA, 533 bp, Glycine max
  unsure (1)..(533): unsure at all n locations
nttgaccccccttgnannnaccgtttgantacgttagttatatccgtgacactatacaatactcacgcttcatatgactgagacgactgttatctaattgagtatgactttacanggtttcaaaagactatctctctgacaacattcgttccacacatgaggaggcacttcgcctgagcttcaagcttatggcccttctcatgtggtgctgcgctgaaaccaagagaagctgcaccctctttgaattatttttatcgtacgtaacatgaccatcggtgctcaatagatcaccggaagtgacatcccgtggggctctgtgcatgtgaatgattgacccaaggttgggagagaaaatcctgactgcactttgctatggcactgtatgtcgcatgaaatcacgccttctagtgtaaaggtcatgagtgagcgatcttcttacctccaccttaatatacgctgtgcactatataatggcgatccttataaggttcagtgtgttttaccggttgaactgacactacattcatttaaag

SEQ ID NO: 28353 - DNA, 359 bp, Glycine max
  unsure (1)..(359): unsure at all n locations
aagacccatttctggtgtgacatcgtggagatttnncnncccgcttcttcgaacantctcacccactcatttcgtggtttaatcgggtttattacgcgttcaaaagcatggcgaatacctgactgattccatgaacaattgtttttaatcatttcaactgaactgactaaaatctgtcgtgtcaaagaacaattatttccggacgaagataatgatatgaaagtgccgctctctctttttcctcctggagataaaaggaattaacgatagactcttatttcgttaagctggattctttcctaacggacatctgtttaattagcgaacctggctaaaaaagacattaaacataagtggat

SEQ ID NO: 28354 - DNA, 471 bp, Glycine max
tatcagcatgtcctgcaaatatattcagattgtgaacataaaaaattaagagtttacaagagaaatcactcaaaagtgaaggagtgcatccaacttcatcaaacacatataacccagctaaccgtgactgatcaaatctactttaaactagatttgcacatatttttccctcacggcagcatcaacatctttttccctcttaattttccggccccacgaagcctctcggtcctcgaacttcttcgagtcagccttcaagttagagttgtcagcagccaagtctatattagcatgaagggcttgatccctttccttggtcatgccttccagctctttcttcaacttcaacacttctcggtcagccgaggagttcgatagaatcatttgttgagcaatggcagtagacctcacttgaagttctcaatacattacccgcgcagatgatgcgttggcaccttgcagcatgtcttt

SEQ ID NO: 28355 - DNA, 306 bp, Glycine max
  unsure (1)..(306): unsure at all n locations
agcttaagctccttcaactgcacaaggcttttaatatttgaagagtatncttgtggaaacctcacccgacnaaagaccactgacaacttatctttctctttctggacaaagtatggcagggctggggcaagtaaaatttctttccatcaaaccttggatgcaactgtgatcgtatgcccatataagctaaatcttgacgggtattcaagccatccttcgtcttgccttgaatgttaaagagcgttccaatcacactgtcacaaacatttttctccacatccataacatcaatacaatgtctaacgt

SEQ ID NO: 28356 - DNA, 465 bp, Glycine max
  unsure (1)..(465): unsure at all n locations
tgtcaagctccccacgtagtttctgcatatcccattaccaagagattgttaggctcaagcatggcttanaacaggattaggctcctctcaaatgaggggaacacactttagagtttgatttcatcacaattaactattgcgaatgcacttcctcgctttaaaagagccatatcccttataaagacaaagcatcagagctttgctgggaaaggatagagggaacattacccttattaactcgatgacacttttcgaagcagagaaatgaaggtaacctccaagcatgtcaatgccctcaccacttttgctagggacaagattaccaccaaatagaagtagggcataatctgaaatgttcgtagagtctttaatatagatgctggtagttntcaccttttcactatacaccatgtagggaagagggaagagatagatcccagcattaacagaagcaggatggatgtc

SEQ ID NO: 28357 - DNA, 128 bp, Glycine max
  unsure (1)..(128): unsure at all n locations
agctttatctccttcaatggcacaccgctttttatatgcgaagagnatccttgtggaacctccacccgaagaagactctgacaaaaacatatcttcttcttttttgacaaaatatggccagctggggg

SEQ ID NO: 28358 - DNA, 390 bp, Glycine max
  unsure (1)..(390): unsure at all n locations
tcatgttcgactaattgcctctgatcctaacttgcgttcatgcttaatggacgaaaggctaactggtgtatgtggtgcctaatcacgtatatacaaccctaagttgattctcgcttagtaaattgaaatatggttggattaagtggttaactgttagggacgaattctccatgacccacgatgagagaatggctcttgaatcacatggaacatcccgtctcttatattaggaggtgcgtattccagattacttggtctggcctttaattcacanaacatacaacccccccccccaatcgatactgttactgcaagcatattatgaacatttggatatcattgctcgttgagaaacgacctangatcacttcctagatactgctatttcat

SEQ ID NO: 28359 - DNA, 436 bp, Glycine max
  unsure (1)..(436): unsure at all n locations
gtagcctttaggttgntcaccatgttgctcatgttgctccccctatctctaacagttacgaccattgtaccatggtaaaggtgtaatcttgatagattatgtgtgtattttgttgtagtctttttgtgtttctgttgacgaagtangacgactcacaccttatgtttgtttatttaggatcatatggagttggatccacttcttgagctggattgctaccttcgaggtatgatacacaatgtgattagatgtgtggatcacttccttgggtacctttgttgtacacgaacacctattgactcatgcttttgtgtagtatccacactagatngngtgttagagatgactgctctgagtttatgatctttccttttatatgtatttgatctaggtaggccacagcttcagtacttctgtcnttgtatgattaggactc

SEQ ID NO: 28360 - DNA, 301 bp, Glycine max
tatgcgcatatttccttacaaacgttctcttgcacaagacattctattaaccgaaaaaaatgcacccatatacaatctaggcagcttcgttacctatattatttacacgtacttccaaggtgtatttgttacttacatcacacaccttcttggctaaattcacatacatgcatactcaaagcattttggggtaccaaaaattgcacatgtgcacatcttggtatttctaatacctatacatacacaaacttcatgatgaatgttgactatctacacaataaggtgctacattctatgctct

SEQ ID NO: 28361 - DNA, 289 bp, Glycine max
agcttttagtacgtatgtagtaatttgattgttctaaaactataacaaataatttagtaaaaaataaacatgatttcaaaacacaaggatactatttttaacatccaactggccttactattatctttaataggcaaactatctatttacgcagtatgcatgcctaaaagtcactttattaactatgttcaagcttataatttgaattttttaaatctttatttatctctgcacgataaatttatgacaattgcctgcactacatgaaaattaaatccatcaaataaag

SEQ ID NO: 28362 - DNA, 333 bp, Glycine max
  unsure (1)..(333): unsure at all n locations
gacatggctngtttagttaaataataataagcatcactggctgcatgtgaatccgtttcgtaaaatgaagcgatacatcatcagtttagtctggaaatttgtcaatgcagagttagccagcctctgaaaatgtaatacaataatctgtatattatgattgatctcattatcaaaaaacatatatgatggatcttaaattatgaaactagagacaatgttacagtcctgtactaaagtaaatagctaggtagagaaatacccttgagagaggngcccacatattactgtgtgatatgccttcaatatgatcgcatgagacagagaaaaagagag

SEQ ID NO: 28363 - DNA, 441 bp, Glycine max
  unsure (1)..(441): unsure at all n locations
attgatcccttcgaggnaccngaggatctttgatagccttggagcaggcacgcaagcttctatgttattgtcagacacataatgtacatactaagatggtcctgagttttatatcttatttccccagcttacaggatggccctttatgaaagaagaaaccatttcagaagattacgctcctgttccatcacaggatattagtagcgcgctgtatcatgtgcaaaatacagcatcctttttcactaaagagacagcaacatcaatttgtttaattcacagtatcacctgagcctaattttgtaaaaaacagaagttgacgacaagttaacgacttggcgagtaaaaaatattatttttatcgggaaaaggatgtgccaaatcttgtcctagggaaaagaggccatacctgttaaaacatcctaattgctaaggaggacaagt

SEQ ID NO: 28364 - DNA, 458 bp, Glycine max
tagcatgctagagtcccataagtctgcaagcccaaatttttatattgtgtgcaaattattgaaacatatcttttctaaattgaacataatattttaattacaaatttaaaatgtatctttggccaaaatcaaacaacttcttaaactaaagagataatggatattttttaaataatctttttcttctagaaagatcaaattcatatctcttactatcaataggagtctttgcctaataagaaaaatgcaccacacacaaacaaaaaaagctcaacaagagctcagtatccatgtttagaaaaattagagaaaatagttgtttataaattggatttgtgtctaagttgagaaagagagtcttaaatcttaaatgtgtgtagctattcccaagagagtgattattagcatattggtaatcaatgagttgaagccttaaagggtatacatgggggagagag

SEQ ID NO: 28365 - DNA, 271 bp, Glycine max
  unsure (1)..(271): unsure at all n locations
ggaacctatccttggcgatgatagngtttttgtgcggtaatctacgctataactgccatgtgtcgtccttctttttaacaagcaacactagtgaagaatatggactatggctgggtcaaatggggttgcttttgagcatatcctcaacttgcctcttgaattcgtgcttctagaaatatggatacctatatggtctgacattcataggctgggagttcacgacaatatgaatagtgtgatccgtgtgtccaggaaaacgaagggaactatg

SEQ ID NO: 28366 - DNA, 473 bp, Glycine max
  unsure (1)..(473): unsure at all n locations
aaggttcagtcattagtgtcactcataatcaaggttttaattaaaagtataaagaagtattcagaactgcagtctcatacacaccagaagaggaaagtaaactccaaaatttgacaaattacaatttacattagccagaaattttcaagatatagattaagcactcaaaacttatctgaacctcatgacaactagcaatgtgactgataagaatcaacaacttgagctcttatgaccctaacattcatatcacacacataaatgccctcataaattgagcatccctactttctagaaggtattatagagaacaggacagctttaaagaaaataataggcagggaccttataagctgttgttagtgcatttcactgtaaactcaaaagtaaaagctaataagacttanggtgtgtcaagtccatatgtagttcttctatatccaactccatattgatatgacanagcatcaccc

SEQ ID NO: 28367 - DNA, 280 bp, Glycine max
gcaagcttctagagaaagctacatgaagctgtttcggtaaaaacgctgtccagccttcattaaccgttggatcttctcgaaatctggtctgcaacttcacaaaacacttttccatgatctgaccgttgggatctttgagaagatgtctggagtgttctagaagcctcttaatgaagcttctggaggaagcctcttaatgaagcttctagagaaaactacatgaagctgcctcggtagaaacgctttccagcctttggtaaccattggatcttctcgaaat

SEQ ID NO: 28368 - DNA, 422 bp, Glycine max
  unsure (1)..(422): unsure at all n locations
ttttagtagatgaagatgaatttgtggctacctcatggactcctctaaggacaatagcatgctttcttgcactgaattgttgggagttggaagccatcttctcaatcaaattcctagcttcagcaagggtcatatcaccaagatcttcaccattggtagtatcaatcatactcctctccatgttgctaagtccctcatagaaatattgaagaaggagttgcttagaaatctggtggtggggacaacttgcacacaatttcttgaatctttcccagtactcatacaagctttctccactaagttgcctgatgcctaaaatgtcttttctgatggcagtggtcctagatgcagggaagaatttctccaagaacaccctcttaaggtcatcccagctganaatggacctgngagcaaggtagtat

SEQ ID NO: 28369 - DNA, 209 bp, Glycine max
tgcaagcttgtctgtttcagaatcacaatgcgtttagggtggaaatgtctaccagtatacttgggcaaccaaataccagcccatgtccttagatgacattatcttgaacaaagacaacgcccttcagctcaaaacaaaggtgagatatgttcgcttttatttatcagtgtctattaagaaaagagcaacttcgcaacatcttttgggat

SEQ ID NO: 28370 - DNA, 447 bp, Glycine max
  unsure (1)..(447): unsure at all n locations
tagctagggtagcaacatccatttcttgccttcagtattttcatcatgtattgatgctntgattcttaaagaaattccataagtttactccttaaaaataaataaaaatctctagtatagtttaaccctctcacgaccctttgagtttcaacccaacttttattttgctaaattgggcttgtgatacggatatttcaagtgttcaacagacaatacctccatgttagtttaactctcctactttagggtgtgtgttttttctaattaattgttatcaatttatatataataggttaaaatatattntaatcatttattttttaattattttcgttttggtcttttatttcataaaatatttaatttgatcatgtatatattaaaattgaatcaatattcttcttctaatataatgatcatttntaattatgagacgtgattttgaat

SEQ ID NO: 28371 - DNA, 291 bp, Glycine max
  unsure (1)..(291): unsure at all n locations
agcttgatagtttcactaganatagnttttacaataattggctctataatttaaattcagagaccatgatttattctaaatcagaataggcccaagcttaagcctctagaatagtacaacaactcaagttttccttgacaatgcttttaaaaaaatcactttatcatttcggagcatatcactancagtagtaagagtcaccaagacaagggtaaagtatcacaattaaattttgcagtacctgcatagctcaactaaattttttcaaaatttaaatattcaataattaac

SEQ ID NO: 28372 - DNA, 467 bp, Glycine max
  unsure (1)..(467): unsure at all n locations
tgtcagcttcttctggcaatggttggaccagggtcatttttgaaaagncctttggtcgtgattcagattcttcagctgcattaactagatcactcaagcagtatctgacagaggatcaaattttcaggttttctaactaaaactgataatcttcaattcaactttaagattgtaaagtacattttataaaatgggaaatattatacaggattgaccactatcttgggaaagagcttgtggaaaatctttctgttctccgattctcaaatctcatctttgaaccattatggtcaaggcaatatataagaaatgtacagttgatattctcagaagattttggcactgaagggcgtggcgggtaacctttattccttaacagctttcacactttctgttcttataatggggattcttatacattttcatatctgtaccatgtgtaggtactctgaccattatggtatcat

SEQ ID NO: 28373 - DNA, 328 bp, Glycine max
  unsure (1)..(328): unsure at all n locations
agcttgacagcccttcanattatcatatatgatggggagactcgttgatgggtccttgccaactngacatttttgaaatgactttcagacttgcagttaaaaaatcaggggttctgtcaggtcttgagtgactatatgagaattcagcacgcaaacctacacaaatagttttgataaaagattaattgaagaaaataaaaggggaatagtggtaagtggcaactaatactactttaaataacctattgagtttaaatgagcatggcatgtaacatatacctgtngtgttttcagagtagtctaagttacttgtattaaatcaatcgca

SEQ ID NO: 28374 - DNA, 466 bp, Glycine max
  unsure (1)..(466): unsure at all n locations
tcttcatgttgctccccttatctctaacaagtataagatttaacaggttattccatgaacccgttgtgagctcatgataattctctattgatcaatttataaagtactttacatttggcatgtatgattaaattactttaaagatgaattttttgttgaggtgcatgtgagtgattatatggtcttttacacatacaagtgatagttgtttagaaaaatattttctaattttttttccaatatgcaatcttttcagctntataagtgactatatgattctttaaattttgcgtctttcanaataattntgagacgttcatggaactgttgtgatgctatgaaagttgtgttctgtggcgattgggaatgagtagttgagaacaccttgtcttgtatgaacaaaggtgccaaaaataaagaacccctcgctaaagacccaatttatgagacaatgcctctataaact

SEQ ID NO: 28375 - DNA, 353 bp, Glycine max
  unsure (1)..(353): unsure at all n locations
ttctaagtggattggtccttttgttgatactaatgtttcttgtgacatccttgaaatttttacgccgaatttttggaaacgatgtattttgaatgattatatatatatatatatatatatatatatatatatatagatatctatatatgtatatatatatatatatatatatatatatatatataagaattattcagcgtatatgcatatatgttctttgtagaaagaagaatagtgtgggccaaacacgccggttttgttttatatagaaagaaattcctagctgggaggttatgggtgtactctaaattacttgtcaaaaacctttttttgtgtgctataaaaattacaan

SEQ ID NO: 28376 - DNA, 413 bp, Glycine max
  unsure (1)..(413): unsure at all n locations
tgaagganaacttgatgtcttgctcaacctagtaactcatcttgtcataaattagaaatctacacatgttgcaagagtctgtggtctatgttcttctgcagatcaccatacagatctatgtccttccttgcagcaatctagagtcaatgagcaacctgaagcttatgctacaaacatttataatagacctcctcagtagcaaaaccaacaacaacagaataattatgatctttcaagcaacaaatacaatccaggttggaggaatcatccaaatctgagatggacaagtcctccataacaacaacaacagattgtcccttcttttcagaatgctgctggtccgagcaagccatatgttcctcctctaatgcagcaacattagcagcagtttgaacaaagataaccagcaactg

SEQ ID NO: 28377 - DNA, 271 bp, Glycine max
  unsure (1)..(271): unsure at all n locations
agcttcaatggctcaatgagcaaggggatttgatagtcaatcaacaagtaaagatacctttttctataagagactatngcgatgaagtttatgttatatactccctanggaagcaaggcacattttgntgggtagagtatggcaatatgacaagaaagcaatccacaatggtctcaccaatgaaataaccttcacccatggaagcaaaanagtaaaacttgttcccttgacaccttcaaaagtggttggggatcaagtacaaataaaactc

SEQ ID NO: 28378 - DNA, 329 bp, Glycine max
  unsure (1)..(329): unsure at all n locations
ntgacaaacaccgattccatagcgtggaacatcaatagtgtttcaaggccatcaaaggatggttattcctcaaacagagacaggggcagctgagggatgatgaatttttgcacttccttggaggaggcagagccatacaactaggatcggcaaacttgtgatctatccatcattatttcttttagttattctattattctgttatttcccttgtgatctgacattatctgcttccaaatattatgtccattgtgattgaactgcacatgcagttatctgtcgcattgtgagtaatctaccgcttttggcatatggtncgacttacttta

SEQ ID NO: 28379 - DNA, 208 bp, Glycine max
agcttataagaacaagatagccttaatcttttgcaaatatgcatgtgaattaggacgcatcaaccagaatcaagccaatgctattgtgcaagcgatcaatggggcaaaacacaccaaatgattataatgatggatggctcatattctcacaaaggtaaaatcatcactttcaaattgagctttcaaaactatcatgacatgtatagaa

SEQ ID NO: 28380 - DNA, 314 bp, Glycine max
tgacctctcatcataaaatatggaagactaaaggtgctctcatcaaaagatacaaataaaagatgttatatttacttggggtattttaactatgaatcaatgataacattcaatataatttaaagatatgatatttacttgtcgtaagtaatgttttatattctttttgctactcatgatcgaagttaagctagcatgagcacatcctttccatttatttgcatgtctagtgattactttaattaaattgattgacacgatatactgtcaagtaatctctattgtaaaaagtgatttgattaaaattacattga

SEQ ID NO: 28381 - DNA, 436 bp, Glycine max
  unsure (1)..(436): unsure at all n locations
tgagatgangaagtgttgaagggtgaatacttctgcttttattcgttgaccacagagtggtacctggagatatgtcgcgggggtcaggagaccttggggacgtcaggtggggtgctattgcccaaaaccaagcttgaccaatcccgacccaacccgggcatagttagtcagtgagaacctgtgatgtacctaagcaggcgagctcctggcagtcaacagataaaaggaacaaagaccacaaagcaaggaggcttgtgtggtggctggccagctgtgaatcttgtgtgatatatgggttatggcttctggtaatcgattaccaagggtgggtaatcgattacaaggcttaaaaatgaagacaggagggtacatctaatgttagtctctcatgcaaaacctttgggatttctcatgcaaaccctttgggatttctttc

SEQ ID NO: 28382 - DNA, 316 bp, Glycine max
ggaccttgaactacctggatttatgtgatgctaagttatcagagtctccagatattaggctataaagttcagaggcttgtgattgatgcatactaacattagtgtgccatttgatacaccttcatgcaacggtcgaccagattacatgtgatccatacaccattactccatatatgcatactagtattctatacatgaccatgcgatctgtctggatctgctcacaacatttatggtcgttgttgatgatctgctcaaccaaataatcatgagtgttataactgaccgccgcggtaaaactatggcagacttactt

SEQ ID NO: 28383 - DNA, 153 bp, Glycine max
attcatctagataaaaatttatgaagaagagactcacggtgctttatcttcaagagtaacttttatatagggttcgcctttgtacaagtgaaatcttaggccccattcttcctatgcattgtacctttctacaagttttccgcttagatatga

SEQ ID NO: 28384 - DNA, 441 bp, Glycine max
  unsure (1)..(441): unsure at all n locations
gtcctaataaaattattaattntaattatcgaacttgataaatatntatataattggatagattatttctttattaattaatttttaaaagaatctttcgaatgtttaattatattttaacactaatgtcggatatgtgggttttggttgtgacttcgcagagggacaaaaattacaactcacgtctggtgaaagacattaaggtactaatcttgtcatttaacagagagagaatggttgaaccatctttgcggagaaacttgcaggagtcttgagtgaattgaaatttgacttgtaatttgaaaacttaagaaagagagaatggttgaaccatcttcgcgattgtagtttgttcttgccagagatcttacagagatgatatgtaattcatcccaactacatncccgttgagtagttaaagctatacgtcatttcaatgct

SEQ ID NO: 28385 - DNA, 194 bp, Glycine max
aaacaaccaaggggaccataaatggcttattttatcacccaactaaaatagactgcttcctttactgaatttacactgtcaatcctcttacaaggatctaacctttgaactacacatgggatgactcgactatttgttttaacaacttataaggggtcctgatttaagcaatgatctaacaggattatatgtaa

SEQ ID NO: 28386 - DNA, 475 bp, Glycine max
  unsure (1)..(475): unsure at all n locations
agttctctatccaaaacaaaggggaaaaatcttgttataaatgtgtctatttaatcagatatttccatttattatatttcttttcatttctctacttgtatttcatataccccattgatgtctccagcacctttttttactgtctcaaatatctcagtttctctccacaactccttaaatttgggtacagtggtatttatgtccatttttttaaatcaagtttatttattaaaacccagcaccaccaacaatagccttatcaatggatgaagctttattccatggatgaagacttccatattcattttaatcaatggtccactaacttgacggaggagttgtcttatggggtgtttcctttttggctttagctaatgtgatcatgtaactttcagatgggttatgcaattttgccttgtacantttatcctatctgcagtacaactagtactgtattacacttaatatataatac

SEQ ID NO: 28387 - DNA, 266 bp, Glycine max
ctagggaatcgttctcattcttctgtcgtctttcttgctctgaaatctgaatcttattcttagacacgagttaaaaggtcagatttcaaatttcagatactcagtttcttgaatcttggatgataagttagcttgaggcaagatatctgttccatggtcatcacagtcgtatctaatagtatttaattataatttatgtccccaataaccaatattttacgtgatattatccattatctgatgcctataatgactaatatctgatc

SEQ ID NO: 28388 - DNA, 467 bp, Glycine max
ttatgcgggcatcgtataataacaccataacatgatgggtttggtttaatttcattttggaacacttgccgctatctttgctcttagatccttgcgcaagattttgcctgacggtgacttgggaattgcatcaatgaagaatactcggtttattcttttgtaaaacaccacctgcacaattccacaactcattacattccttattttgtggctaagaaaggtacagtacacatcataaacctgtaaaaaacgcatttatatctgaaagtgacccagacatttagaattaggtgggaagaagcggtgtgggtcagttataagaaaaaatgagaaattatattaatacggcatgaatgagattatttttaaaatgaatatatattagatcaagtgaaaattaatagcaaagtaattataacgtgttttatttatttattaagaaagtattaaataatagtgaatatatg

SEQ ID NO: 28389 - DNA, 436 bp, Glycine max
  unsure (1)..(436): unsure at all n locations
taacgcccatcgccacgagttccgtgacgtttcggaattataacaacaaaaaacacctttataagggggtgcctcaagaaacttcctgaggaagccacctactcgcctggtcgagctaggcggcaagcacctcctccaattcttgaaaaaaaatggttccagggcctccgtaatacttccgaagaattgtcagaaccctaaataagcatatttcacttaaaattggtgaaggggaagagaaaaaagaagaaaatcaagtctgacatgcttttgcaaagcttccaataacttttccataatttacgaaaatggggggtgcctcaggaaacttcctgaggaagcgacctgctcgcttgggcgagctgggcagcaagcacctcctcctttttcctataaatagggnggctgacttanaatgggttcctaacttctatca

SEQ ID NO: 28390 - DNA, 270 bp, Glycine max
ctctatttagcttaagctctacagcttttgcttgatcctcgaagacaaggacttactatggcagaagctttgtgggttaagctcgacctagaaagaaagtagaagaggagagcccactcagcttaagccacaagttttctgacaaactggaaagatcctttcatatattgatttgttaattaaatggctttcgttattctttgagtccagacatgcacaagaaatcgagttcaattatcatcatccttgtaggatacatacatttcttaa

SEQ ID NO: 28391 - DNA, 433 bp, Glycine max
  unsure (1)..(433): unsure at all n locations
acccatgaggtaacatgcattaagctagtgtctttaaaaaagcgcttactatgaggcaacccagctctttttcctttattttattaatcattgcatatagttaggtttcaacttgtttgtgattgctagagtaagtcatcaacatgttttgtatgataacatgggattgtttgagcttctttgaagttgtggatgaagaataacttagaaaatttttcagtcatcaactcgctcagcccgccctgtgcgctaagcgaatcattcttcatgcgctgagcaagccactactcgcgctaagcgcatcaaaccctacccattggctgaaggggcctcgctaagcgagagcattacgctaagctcanaaacctctttggaattgcaattattggaatnggtctaagcgagtcatctagccaagcacgcagcatagtct

SEQ ID NO: 28392 - DNA, 382 bp, Glycine max
  unsure (1)..(382): unsure at all n locations
tggattcaccacttagagatttgtggatcaagcttggctttgggtttatacccgtgtagtttgtggggctcaaccaggagccagcctccgttcgggtctcaaccaatggaaagttgagcttcaagcccaagctactntgcttaaagagaatgctccatanggtatgattgggcctgttgtgagccaactctcgcaggctgtgcatgantataaactatcctcagaataagcttgtaacatagggactaaagtttgagagcgttggacacccagtcctatggctgctgacggangagctaaagtggatgatgaaaggatgtcatctgttctagccctttttcttgatgccatctataactaaaaagaactaaaatttctttag

SEQ ID NO: 28393 - DNA, 458 bp, Glycine max
  unsure (1)..(458): unsure at all n locations
ntntattcacagaaggaaattcaataaataggcttcctattttaatggagaggggttaccactactggaaaacacaaatgcaaatcgtcattgaggcaattgacttaaacatttgggaagccatagaaataagaccttatgtacccactgtggtggctggaaatacaacaatagaaaagcctanggaaaattggagtgaggaagaaagaagacgagtacaatataacttcaaagccaaaaacataattacttcttggataaatactttaactcatgagtatgaattgtttaggatgaagacaaatganagtatataagatatgcagaanagattcacacatatagttaatcatcttgcatcattaggaagaatattcccaaacgaggatctcataaataaagtgttaagatgtctaagtagaaaatggcaaccaaaggtaacagccatcatagaatct

SEQ ID NO: 28394 - DNA, 332 bp, Glycine max
  unsure (1)..(332): unsure at all n locations
aggcgagttatgttgctttctacaaaagccaccgncttcttgaagaatattctggaacgcccaagtgggcctgaatgctatttgcccccccatttttactaaatacaccccctggtcttttttggtaatcttttntccgaacattacaaaatttacaaaattcgaacgatgcttgtttcttttcggaatggtccgtaatgaacgatgcttgtttctttccgaatgctacgtatcatcccctttttgcttccgaatgtacagaacttacagatgtgcactacacttcttttatttccactgcacgaacttacggttgtgtacatgcttctttg

SEQ ID NO: 28395 - DNA, 438 bp, Glycine max
  unsure (1)..(438): unsure at all n locations
tgccacccagctcgcccagtgtctagcagnggtgcttccttcataacaactttcttctggaggaatcatctggagggcccaagtgagcctggttgctatatgcacccccatttttactaagtacaccctctgccttttttggtgattcttttttcgtaaagttacggaaacttacaaatttcgtgacgatacttgttttctttccgaaatgatacggaaccttgcggattacataatcatccctttttttgacttacggaatgatacggaacctcactaattgtgcaacgatgcttccatttgatatttggtgtgtcacagaaccgtacggattgtgcataaatatgttactttgtttttctgcatgtcccggacttgcacaatttgcctaatgatgggtgctaagcaccttacgaggaccaaacacaagntgcatgt

SEQ ID NO: 28396 - DNA, 354 bp, Glycine max
  unsure (1)..(354): unsure at all n locations
tgtttatgatcgatgtgggtccgaatagggccaatttgatcatcctactangacgactgagaaaactggggcctattgaatagggtgagaaaaagggagaaacccatgctgagactgtcatttctataccggccagttcccaccatacccaacaatgtcattacttcggtaataacaaaccttcttcttacccaccacccaattttccacaaggccattccttaatcaaccacaaagccttgttaacgcacttccaatgacgaaaaccaccttagcccaaacaaaaaaccccaccaaaatgaatttgcaccaaaagctgtaggtcacccaaatcggtggaaattctaattgatc

SEQ ID NO: 28397 - DNA, 339 bp, Glycine max
  unsure (1)..(339): unsure at all n locations
ntntggagtagaaacatgttaccaactcattttatttcttataggaagtcatatctagtcaaggtctaagagaccatacaagtttcctaacgatttctaattatgtgggccattaagtctatcatatgctgacaatagctgagaagcccatgaatctcttcgggggcggagtaagtgtctgtcatcgccttggccttggctaacaatcggggaagttcttgactcccgttcaaggtaagagcaaaccgatccatccacatggttgcctcttggtgtaaagagtcgatcaccctgtctctagcctctttctccgcatatacttgagtgaaattctgatac

SEQ ID NO: 28398 - DNA, 265 bp, Glycine max
  unsure (1)..(265): unsure at all n locations
tctcgatatattatgtccncgaatcagacatctgggggtagagttatgaccatttgaatttctcgagagctaccgtagttcaatttcgagtatctcgatatactattttcccaaatcggatatgccttgcataagctatgacccattcaatgtctcgagatcttcggctgttcacattcaagcgtgtcgatatattatgtcctctaatcacacatccgagtgaaatagtatgagtagtcgattttctcgagagattccggtgttc

SEQ ID NO: 28399 - DNA, 408 bp, Glycine max
  unsure (1)..(408): unsure at all n locations
ntgagccaattcagacaacaataactttttactcggatgtcttattgagtcccgcaatatatcgagacgctcgaaattgaatgttgaacctctgagcaaactcaaacgacaataactttttactcggatgtctgattgagtcccgtcatatatcgagacgctcgaaattgaatgttgaacctcatagcgaattcaaaccacaataactttatactcggatgtctgattgagtcccgtaatatatcgagacgctcgaagttgaatgttgaagctctcagccatttcaaacgacaataactttttactcggatgtctgattgagtcccgtaatatatcgagacgctcgaaatcgaatgttgaagctctgaactaattcaaacgaacaataacttttactcggatgtctga

SEQ ID NO: 28400 - DNA, 337 bp, Glycine max
  unsure (1)..(337): unsure at all n locations
tctntatatggtgcatattatggataatcacaagatgttttgatatcgaatttaaagttcagtgcaaaataaatgcatcattatcaaaaaaaataaattaaaccaagttggtcaattgattgcatatgtgtatctgagtgaatactttttgaagagccagaggaaggaaatacaatgtcattatgaagtgtgtgtccatttgtagaggagacaaatccatcatcaataacaccatgtgaattgatctgctctcttgttaatccataaaggccacctaaattcaatgtacttactcaaatgcatattagaatgatttgggaaaanatttcttttggta

SEQ ID NO: 28401 - DNA, 274 bp, Glycine max
  unsure (1)..(274): unsure at all n locations
agcttaagggcgcatatagtactcangttgttcaggctagctaaactgtgagagtacgcgagggaaagattaaatttaccaacatacaaagacggtgcttataaaacccgttgttgggtaatccagttcaacaatggtgcctattaaacgcgtcattgtaattggaagatgacgtcattttcgataaaaatgttgaaataaagcgcatatttactaaaatgtcaccacctgttaaacaacgacgttttttggaccgccgttctttgaagcacgt

SEQ ID NO: 28402 - DNA, 350 bp, Glycine max
atgaggaagtgtagaagggtgaaacttcctgcttttattcgttgaccacagagtggtacctggtgatatgtcgcgggggtcaggagaccttggggacgtcaggtggggtgctattgcccaaaaccaagcttgaccaatcccgacccaacccgggcatagtcagtcagtgagaacctgtgatgtacctaagcaggcgagctcctggcagtcaacagataaaaggaacaagaccacaaagcaaggaggcttgtgtggtggctggccagctgtgaatcttgtgtgatatatgggttatggcctctggtaatcgattaccaagggtgggtaatcgattacaaggcttaaaaatg

SEQ ID NO: 28403 - DNA, 432 bp, Glycine max
  unsure (1)..(432): unsure at all n locations
atgaaaccttgaagnacccgggatctttgagacccttgcagcaccgcatgcaagctaaacattcaattaccatcgtcttgttatgtaacgagactcaatcctttttcccagtagtaagctaattgtcgactgactttgacccaaactttcatcattcaaacatccagtggcttcatatatttacgggactcaaccataaattcgagataaagatcaattgtcttagaagatgctcctaactcaacattcaattccaagcgtcttgatagattacatgactcagtccgacatccgagacaaaagttattgccctttgatttgctcagaactttacattcatctcaagcgttttatatattgcgggactaatcagaatccgataaaaagtattgccgtgaaatttctcagacattaaaatccatctgagcggcc

SEQ ID NO: 28404 - DNA, 226 bp, Glycine max
cgacaataccttgtgacacggatgtctgattgagtcacgctttatctcgagacgcttgaaattgaataccgaagctctgagcaggtacagacaacaataactttttactcggatgtcggattgagtcacgtaatatgtcgagacgctcgcaatagaataccgaagctctgatcagatccagacgacaatacctattgactcggatgtcggattgagtcacgtaata

SEQ ID NO: 28405 - DNA, 311 bp, Glycine max
tgcagccatctccctaagagtcctctcacgaagtagaggctgagccatgttctcagtataaaaattagtagcggaatgttcaaaatcagaatcaccctcaacagaatgctcagaatgctcacaatgcacagaacgaccaagatgcacactatgtctaactaatcattgaaaggttctatctatttcaggatcaaagggttggaaatcacctagatatagtcatgcactatatgcagcagataatgtgtttctcaacaagcacctaacaagggggtaaaactacaactatactcaagcgatatcaaaatgag

SEQ ID NO: 28406 - DNA, 423 bp, Glycine max
  unsure (1)..(423): unsure at all n locations
gtatcaaaattgagtggaactttgaagtgtatctcataagactttcattcatcaaagttacaacaagtgttacacatgcttctatttatagactaggtagcttccttgagaagctntcttgagaaaacttccttgagaagcttctttgagaaaacttccttgagaagctagagcttagctacacacacccctctcataactaagctcacctccttgagaagcttccttaagaagattcctaaagaagctagagcttagctacacatacctctctaatagctaagctcacctccttgagatgagaagctagaacttagctacacacccnctataatagctaagctcacccccatgacaaaaaacatgagaatacaaaaaaaaaaagtccttactacaaagactactcaaaatgccccgaaatac

SEQ ID NO: 28407 - DNA, 363 bp, Glycine max
  unsure (1)..(363): unsure at all n locations
tagcttcatcttcaattcaagaaggaagctataaagaagatgtgaatgaaatagataaggatgatgatttcaatttcttcgtaaagaggttcaataatttcttaagaaacaaaggaaaccaaagaagatcacatttgaaaccaaaggaaaaaggagaagattcatcctgtcttccagagtgttatgaatgtaatcaacgaggacatctgagagttgattgcccaagtttcaagaaaagaatagaaagatctgaaaagaaaaccttcaatgataagagagcaaagaaggcttacatcacttgngaagacaatggtatggattcatccgaagactcagaanatgaagttgtgaatctaagtctga

SEQ ID NO: 28408 - DNA, 481 bp, Glycine max
  unsure (1)..(481): unsure at all n locations
actcaagcttgtgagtgcttaattggaaacatatttgaggcatatctatccaatctagttnttaagcaactaacactcatcaacatatttcaatacctttttctttacattattttgctaaaaaaaccttgtgagaatcatagcaaatttcctccttgaaatagttaaagacctaataattataaggaaaatagttgaagtatatagaattgtcaccagcaaaatccacaatgcacccttaagaactgtgagtatatccacttcttatgatacaactactacttcatgagtttgattgtcttcacctccaccggcaagtcaaacaactccatctcttacattgccgacatgtacattngataaggatgcaattgcaataacaactgctcctttgactttacagtatcaactcanaanacagcaactcacttagttacaaggtctaaatctccacctcccatcaatacctagtacctacatc

SEQ ID NO: 28409 - DNA, 167 bp, Glycine max
  unsure (1)..(167): unsure at all n locations
aaatatgcatgggaattangacgcatcaaccagaatcaagccaaggctattgtgcaagcaatcactggggcaaaacacaccaaatgagtataatgaaggatggctcttattctcacacaggtaaaatcatcactttcaaattgagctttcaaaactatcatgacatg

SEQ ID NO: 28410 - DNA, 327 bp, Glycine max
tagaggtctttagtttgcaagaatcggttcaatagatgtttcagctccaacctcaagccttccgcacgagctatgggaagatatacgacctaactacggtagaagtctccgaggaagcaatttcataccttacttagtattatgatcagcccctaaggtgcttcacgtttggggacttctagctagtaccaactgtggaagaatatgaagagatcttgggatgtctgctgggaggaagaaagccatatcccttttcggggatctacccttccatgacaagaggagccaaggtgtcgtaccctaccctttgactggagggcaacgcga

SEQ ID NO: 28411 - DNA, 341 bp, Glycine max
  unsure (1)..(341): unsure at all n locations
agcttgtctgtcgcacatnnncaaatccttttccactaatgtgccattattttctcctatatcttaaccctttttacaccattttaaatactgagtagtcttaattgtcaaatttatgacgcaggtttaatatttgggcccattcagctaatttgatggttttaatctaattttaagaattaatgaagcattgcgcttcaatctagaattggacttgggcttgatctagaattggctcgaacttgaagaggcagactaattattttacaaaatagatctatctgatctatcttatctagaattattagattgactcattagatatattccactaagatatc

SEQ ID NO: 28412 - DNA, 370 bp, Glycine max
tatgaggagaagcataagattaagcaagagatcaccattctactcttcaagttgcaactgaaggagaaggaagaaagtcaaggaaatgaaagaagtcattgatgccgaggtagaggttgaggtcacggtcgaggataggttggaggtggcaatagtgtacgaggttcaaatttcatcaacaatagttacgagaaatgaaaaagctcaagagaatgtggaaaaggctatacaagcacaaggtatgataaatctcaaactcgatgttataaatgtcaaaagattggccactatgcttcaaaatgtagattcgccaagaatagagttgaggaggagactaactatgtggagcaaaaggatgagaagttcaaat

SEQ ID NO: 28413 - DNA, 393 bp, Glycine max
tgagatgaggaagtgttgaatggtgaaacttcctgcttttattgttgaccacagagtggtacctggagatatgtcgcgggggtcaggagaccttggggacgtcaggtggggtgctattgcccaaaaccaagcttgaccaatcccgacccaacccgggcatagtcggtcagtgagaacctgtgatgtacctaagcaggcgagctccttgcagtcaaccgataaaaggaaaacaaagaccacaaagcaaggaggcttgtggtggctgaccagctgctgaattgtgtgatatgtggagtatagtctctggtaatcgattaccaagggtgggtaatagattacaaggcttaaaaatgaagacaggaggctaagatggtctctggtaatcgattacca

SEQ ID NO: 28414 - DNA, 371 bp, Glycine max
  unsure (1)..(371): unsure at all n locations
atgtttatgcttaccacctctaaatattgtgaagcggtttgtaatgactcctctgcgggcttcacataaagcataaaggatgggcaattcaccaagatgtctttctcgtcagatacgatgaccagatgccctttcactacgaatttcaaattttggtggagtgatgagggaacaactcccactgagtggatccaccgacgccccaacagacaactggtggggagataatgtccattatttggaaagtaacttggcatgtgtgaaggcctatctggactgggaggttcacctctccctaaccctctcgcggtggtcggcaaagccaaaccaaccatgaacatcgtttatgtggaagcattgatggtattccn

SEQ ID NO: 28415 - DNA, 313 bp, Glycine max
aaagatatttatctgatagccaaaccaacttcactattcctagttagaaattccaatattctatattacctgctcattagctgtaggaggaaggccttcaacatacacccgcctaacatgtcatgtagcctgtaaattcagtacatcaaagataggccataatcagggaaagtcatgctaaacttaaaatgaaacttaaataagactgtagtcagtctcagcaagccttcatactcggagagactaaacttaaaatggtgtgttgacgaagatagcgtgtttctactctttttctattatgactctttttctt

SEQ ID NO: 28416 - DNA, 320 bp, Glycine max
ctacaattgagaaggctgtatattgcaagtgaaaaaaatttcattgcattgttcatagaatggaataaaagagggggaataagacatggggaaaaaaatgaaaacgagacaaaattggaggaagcactgtcttttccttcttcacccaacagcttataaattggagctctatgattgaattactaaaagcatggagtgcaagtgggctatgactctgaagagctcctatactaatttaaaagaagcttgggcggagccatcaccataaatattattccttaacaaacaagacacaataatcactcacattcatatacttc

SEQ ID NO: 28417 - DNA, 406 bp, Glycine max
  unsure (1)..(406): unsure at all n locations
tgtgactctttgcaatttctttaacagaaccagtcacttaaaaagttgtgacttttgaaanaatcttctgatacaagtcacttgaagatctgtgacttttggaaatatattttttgaaatcagtcacgggtaatcgattaccattaaggtgtgatcgattacacatcaacaaatgtgactcttcattttgaattttgaaaaccttaacattttaaaacactggtaatcgattactatcttctggtaatcgattaccagagagtaaaaatctttggtaatgattttgagaaaacttcttgtgctactcaatgttatggaaaacttttttagtacttatttcgattgagtcgtctcttgattctcgaatcttgagtcttgaatataatctcgttattttgaacttgat

SEQ ID NO: 28418 - DNA, 454 bp, Glycine max
tcgggctgcttaattgctccacgttgtttcatggaaagtcaaaagtctgcatcggggacagcagaggagcacacaccacagacccttgcaacaagtacagatttctggttcaaggccagctgggttaccaagttaaccaatgcatccagttttccttcaagcttcttaccttcagatgatgcagctgaatttgtagctacctcatgcactcctctaatgactatagcatcatttctggcgctaaactgctgggagttggaagccatctatctcaattaaatttctggcttcagcaggagtcatgtctccaaaggctgcaccactggtagcatctatcatacttctctccatattactgagtacttcataaaagtattggagaagaagctgctctaaaatctgatggtgagggcaactggcacatagtcttttaaatctctcccagtactcatac

SEQ ID NO: 28419 - DNA, 318 bp, Glycine max
cacattcttggtggtgaagctccttcttccatggcttattccctagtggatggtgtctcccctctcctcttctcctttgccttccgctgcatctccatggtggaaaatcaccatggaagaacctcattgaaggtcaaagatccagcctccatagaagctccacaagcaagcttccgtcaagaatcgtcttagaaatgctttcaaagacagttcttgtataaaaatcatcttagaaatgctttctaaaatggttcttgtataaaaaccttcttagaattcatgttttctaagatggctatttagaaagcatgcattcta

SEQ ID NO: 28420 - DNA, 350 bp, Glycine max
  unsure (1)..(350): unsure at all n locations
agctngccaacatgcatcaataatcttacaagactgcgatatctngacttgagttgttgcagcaatctctgcattctaccgaagcttcccccatcccttgaaactctacatgctgatgagtgtgaatcactggagactgtattgttcccttccacggcagttgaacaatttgaggaaaacaggaaacgagttgagttttggaattgcttaaagttggatgaattttctctgatggctatngagttaaatgcgcaaatcaatgtaatggaaattgcataccaacatttatcagcaccaatacttgatcatgtggaaaattacaatgattacaagggatctcatgattctta

SEQ ID NO: 28421 - DNA, 299 bp, Glycine max
  unsure (1)..(299): unsure at all n locations
agctagcctaatctacctgagattgagatatattgtttattaaacacacaaaatgaanatactaagtatttattacctatacttaatagaaaatacttataaccttacaaaataaccataaagtaggagagtttgatacaatttatacaagttttatacacaaaagttagtcgttttcactgactaacatcaagtgaacaaggttaatcataattttatcacttgttccacttactacataatggaaggattgcagattaaatgagtcaccacaggtctggaacgttacttgtggatct

SEQ ID NO: 28422 - DNA, 337 bp, Glycine max
  unsure (1)..(337): unsure at all n locations
cgtaagaagctngcgaatcaacatgatccgtaagtatactcttaaaacttacggatcaagttgatccgatagtcttttacggatcaagctaatccgcaagtagatttttaagacttaccgattaagttgatccataagtcttttacggatcaagttggtccgtaaatcttttactataacttgatccgcaagtttcttacggatcacagttctacacacgttgattttgaagacttacggatcaacttgatccgtaagtgatttgcgggcattgtaactgagtgtgtaaatacacaatgagtgtttgagccagagcaaacttattctatgggcgctg

SEQ ID NO: 28423 - DNA, 122 bp, Glycine max
gcagcttggcactggattaggatacaactatgttttttgagtatatgcacaccgatttatggggaccatctacaataaacttgaacttcatgatcaacgtgatgacgatgagctgccatctc

SEQ ID NO: 28424 - DNA, 405 bp, Glycine max
  unsure (1)..(405): unsure at all n locations
ttccctgaaattagaataaataattcgacatatttcttgtntgattgcgtttaagtttttctcagtctttagtatgtatttatagttgttccatgctttgaagttgtttttttcaatttacttcaataataatagcctacatgcatgattgcagagatgtagaacattgtcgtacctaactctcacatgcaccgagaaccccattaatgtgtggtgttgcacagtgttcactcacatgcaccgagaaccaaattaatatggttctcaataatccacgtgggctcgacacccgatgcagaacactgcagtcaacactcatgatgcaacgaacagtctgtcgcctttaatgtgtggttgtgcatactgttcactcacatgcactgaaaaccccattaatatggttct

SEQ ID NO: 28425 - DNA, 454 bp, Glycine max
  unsure (1)..(454): unsure at all n locations
caagctgtttaccccatgttgagtntgcttacaatatagctgttcatagcactactaattgttctccttttgaagttgtttatgtttttaacccactaacttctcttgatcttttgcctatgcctaatgtttctatttttaagcataaagaaggtcaagtaaaggcggtctatgtgaagaagcttcatgagagagtcaaagatcaaattgacaggaaaaataaaagctatgctaaacaagccaacaaagggagaaagaaggttgtcttcgaacctggagattgggtttgggtgcacatgagaaaagaaaggtttatggaacaaatgatatcaaagcttcaaccaaggggagatggaccattttaagtgcttgaaagaatcaatgacaatgcttacaaagttgagctacccagtgagtataatgttagttccaccttcaatgtctctgacttatc

SEQ ID NO: 28426 - DNA, 422 bp, Glycine max
ctcagcttctcaggaagttctctcaagacagcttctcaaggaagcaacctattctataaatagaagcatgtgtaacacttgttgtaactctgatgaatgagagtcttgtgagacacaactcaaagttcaacttctctccctttttcttccttcaattttgtgctccccctctctctttctctacctctttcttttcctccatcgaagcatcctctccaagcttcttatccaaggctcatcttggtggtgaagctccttcttccatggcttattccctagtggatggcgcctcctatcacctcttctcctttttcttacgctgcatctccatggtggaaaatcaccattaaaggacctcattgaagctcagagatccagcctccatagaagccccacaagcaagcttacatcaacttggaagt

SEQ ID NO: 28427 - DNA, 595 bp, Glycine max
  unsure (1)..(595): unsure at all n locations
gggcgactcgtctatctgtttatnntgtanatatcttaatgattacttnttnttttttcntnactnntgnacaacaccnaagagattgtggcactgagacccgccanctnnanagncgacagctgcaggcaagcnagatnatggaagacacatgagcagcggctatttctgaacacccaacgggcctcgaaaaaaggtgagaacggatgagtgagattgtggggtctaagctcctctaccgaccaccaaacaaaccttcgcccttctatgcgacacactaggagcaactgagcagcctcaagcatatgctgcagaaatatacaataaacctccgcaagcttagcaggccaatcaaccacagcagaacgattatgacctctctagtgacagagacagacccggaaggaggaatcaccctaatctcagatggtctatccctcaacaacaacaacaacaacaacctgctccgttccttcaaaatgctgctggccaaacaggacatacgtttcttctccaatgcacaacatctacaccatatgaacattgcacagagacaacaatgacnggaagcccttttcacacttcttaaacaaag

SEQ ID NO: 28428 - DNA, 405 bp, Glycine max
  unsure (1)..(405): unsure at all n locations
acaaaacctatctgagcattattatatctgacacttagtgagttcccatacatttccttttaccaatttgcattgatcattattgaggtatatgttagacacgtacattatcataatataataataatcaagaaaaacaatagacatcatatattgaaatacctcatgatcaaatttaaattgaacttacactagtttatgacttanaaatgtactggaattggtgaattttcaatattgtagtgggtacattgctcctgagtatgcaatgcatggttatntgacggacaaagcagatgtttatagttttggaattgttgcattggaaattgttagtgggatgagcaacaccattagccagcctacggaagaatgtttctctctcattgatagggtaaattatgc

SEQ ID NO: 28429 - DNA, 302 bp, Glycine max
gcttgctctggtatacaggatagagatcatttgtctcgaccgaatctggagcactagcgaacaagctcattgccagctcgcatttgagactccaacctctctatctcctctatggggcgatccagcatcttgttgtaacgcttcatctcctccacttgaggagccagagagtttaaggttcctatgttgctctcgagggtgggtctgaagtctcgaccttggtttatggtcgcaatagcccctttgcagaactcccccatcactgcttccacagcacctccactgaacagatctttcattac

SEQ ID NO: 28430 - DNA, 390 bp, Glycine max
  unsure (1)..(390): unsure at all n locations
taaatataatgtatntnttaatatataatatattacaatataaattagtaaaaataataactttgttttcaatttaaccaaccatagaaatatatagaacattctctcaaaaataaaaaatgtatagaacacaagtattttataattaacactcataatttttgcctttgcatctacctcatgaagtatgattgtgtaaaacaaatccaaatatataaataaatctatattcaattcaattcaattcaatccactctaaatccatttaaatggattggtttcatatccaaattcaatattttggattttgaattcaatccaattaattggatatagataccatatttgtaattttcaaaacaaagtcaattttctggacaatgatgattg

SEQ ID NO: 28431 - DNA, 313 bp, Glycine max
atttccgttgtccgaatatgacaaccaccgttttatgagcgctgagcaccatctgtgcttctaggccatcaaaggatggtcatttcttcatgagcgacgcattcgtctcatggacgacgagtataccgacattccatgttgagatagctcgacggcggtgggcatcactggttacccccatggccaagttcgacccaaacatagtcctcgagttttatgccaatgcttggcctacagaggagggcgtgcgagatatgcaatcctgtgtgaggggtaagaggatcccgttcgatgcgaatgctctcgatcagtt

SEQ ID NO: 28432 - DNA, 407 bp, Glycine max
tatacatgagtatgattttatgatcctatttctataatgttgagaaacatagacttcctcttcaatgtatccgtttagaaaagaactttcccatccatttggtacagatttaaatctataatgcaagcaaatgcaaccaacaatctcacaacttctaatctaactatcggagcataggtttcaccaaagtctatatcttgttgttggttataacccttgactactagcctcgctatgttactagttattaagccatgttcatctagcttattttttaaaacccattttgcacctataatgtttgtcttactaggcctaggtactagttcccaaaattcatttctcttagactaattaagttcatcatgcatagctataacccaatgttcataacaagtgcctattca

SEQ ID NO: 28433 - DNA, 590 bp, Glycine max
  unsure (1)..(590): unsure at all n locations
cattaagttcttaactnccttcttctacgtataattatcttaaatngcaacctnttanctcttaatnnnnnnncnncataggatgtgaacactcgtatanacgncgaccctntagagacaacctccacgcatgcgagctagtttaccccatgtagagttagcttacattttatctgctcatagcactactaattgctctccatttgaagtatgtgatgattctaacccactaacttcccttgatcttttgcctatgcctaatgtttctatttttaagcataaataatgtcaagtaaaggcggcctatggaaaaaactccttgaaaaagcacagaccaaatgccgcgaataataaaagctatgcttaaccaacccacaaaaggaagaagaaaggttgcttctcacctggagaatgggatttggggcgccaggaaaacaaaaaggtttttggaaacagaaatcataactttcacccaagggaaaaggaccacattaagcgccttagaaaactatgaccatggttcacaaggtggacctcccactggagttatgtgagtcccccttcaggctctgatttattatttgaaggcc

SEQ ID NO: 28434 - DNA, 412 bp, Glycine max
ggcattcggaattgcgaaagccccactccatcattatgtttagtacctgacatctcaaacaaacaaatcaaacgtaacaagacaattatagttgctgtttgaatacctcacccactcaagtgtatcacacaattatggcttttctctaatgaaacactcttgccttttaccactctaattccccttgagttcttaggcaattcaagagattatggccacaacaaagaacaattcaccaatatgtgtaaggtaaggctagacaaggaaaaggttaaccaagaaaaaggctaacaatgtttttaggcacaaatgaaggaaataaaattcagaatttatgaattcaagttacaatccttcatgcaaccaatatattaccttaaagagtttttttttcttaagttcttcaagcatg

SEQ ID NO: 28435 - DNA, 326 bp, Glycine max
agcttgaaggtaaactagatgccttggtttacctggtaacccaactggccttgaatcagaaatttgtacctatcgtaagattctgtggtttatgctcctctaccgaccaccatacaaacctttgcccttctatgcagcaatctggagcaattgagcagcctgaagcttatgctgcaaaaatttacaatagacctcctcaaccttagcagcaaaatcaaccacagcagaacaattatgacctctctagtaacagatacaatcccggatggaggaatcaccctaatctcagatggtctagccctcaacaacaacaacaacaacaacct

SEQ ID NO: 28436 - DNA, 406 bp, Glycine max
tctctcttttcttgtttaattattatattttgtttttaagccttgtattttgctatgtttttatgacatttgaacacttagtatttcttttaaatatttgtttagtatgactaaacatgatgattacttgctcttggttgtttatggttatgagttttaaacttaattattttgatgatatatgattagtggtatgtacttttatttggttattatgaatgactttctggattatatgacattctatgaagtattatctttctaagattgatgaatggttaagttatcttgtttgattgttttctattctcttgtatgattagtaatttatgtatggtttatatttgttacgcactttggctttttgttgatgccaaaggggaagagaaatagagattaaatcaag

SEQ ID NO: 28437 - DNA, 308 bp, Glycine max
  unsure (1)..(308): unsure at all n locations
ctgacgtntattacttttgcaagcagcttaatattcatttctcaaataggagaagaacatggatatctcctagagggggaactctctcgtatttcataacacacataacactatctattgtagtaattacagaatttatgttaatatgtaagaaaatatggaactttcgaaaatcaatacgatatttaaatgaacgaaaaacaatctaaaactaacttgtacatatacttctgtctacaaaaccaataagaaaatataatctatataacacgctacataaatgtgtactttatgtattntatcaccta

SEQ ID NO: 28438 - DNA, 479 bp, Glycine max
  unsure (1)..(479): unsure at all n locations
aganaccnnnnnnnnntgtgtgatttcgatgcntttgatncctttgantnccgcgcacttagaaactacgcgttagggtgtttgacgaatgttctattactcgcttgtctgattgatcccgtttgcatgttgactgtatcaagagagtgtgtaagcgatgatctcattctaacgacttgtaacttatagtcggatgtgatgagtgagtgctgatatatactgctatgctgtgtaccttatgtcgattgctttagagcacttattacgacaagaacaaatgtgattaaatgcttgagtgacaaaggaacaacactttagataaattctgatgaattgggaacacattgagttatattacttgggatgagtgtttgatttcaattaacgtgtgagatcctgcattggtcgatattctcaaacaagaatgtatatgtggcctataacattaacgacaatttctgctcactctgatgttgttg

SEQ ID NO: 28439 - DNA, 430 bp, Glycine max
  unsure (1)..(430): unsure at all n locations
ttatatcccaacggtcagatcatggacaattgtcttgtgaagttgcagaccaaattttaagaagatccaacggttaacgaaagctgacagcatttttaccgaggtagcttcatgtagcttcctcaagaagcttcattaagagtcttcacacaacagataatcaaacatcaaacataattactaataatatatatatatatatatatatatatatatatatatatatatatatatatatatatatatatatatatatatcagggtgttacaactctcccaccctcttaaaaatttcgtccttgagatataccttaatcaaacaaggatgggtgaggctttctcatctgactttctaattcccacgtggcatgttctcctgatgcaccttcccaaatcaccgtgacaacggaatcttttttctcttcgtgtn

SEQ ID NO: 28440 - DNA, 405 bp, Glycine max
  unsure (1)..(405): unsure at all n locations
ntaggtatgttntttttcaatgtttttaccatgcccttgtttaactacataacaatttgcttgtctcatgcaccaaattgtgtggttagtgattatttctttctatctctntaaaacttaatgttcttaaggaatgggattggagatacaaacatctttaaaggtttttctttgtcattnttaatattgcaattattaagcaagtacaaaggtgattcagttctcaagtttcagtggaacacccctcgtctaaatcctgaggaatcaaacacacattagtttaaattacttgactcgtgagttaatatcaatttacttttccatcctgtattgtgtgtttatttttaattattcatttatttgtggctttattacatgagaataaaatattgatcaaactgaatt

SEQ ID NO: 28441 - DNA, 435 bp, Glycine max
  unsure (1)..(435): unsure at all n locations
tcaccggactaacgaaacaatgtcccttntannnccccagccccnnnaagtagacactgacacgganaaaaaagccgagcagcanaccaaaacaaaggggacatgtggacaccgccaacccgccccggggcgaacagcaaaacaacccggacacaaagaaacccagcgcngaccgncacgagacaaaccacaaacacaccaagcaagaaaacggacgcgagaaccaaaaacaaaggacaccaaaagcaaaaaaaccagacaggccaaaacccaaacaacccgacaaagcccacgcgacaaaaccaaaaaaaaagacccccaacaggacaaagagcgcccgagaacaaagaccaggggaacccacagggcaaacagagaaccaaaccagccaacccggccccaaaaacccgaacaaggacggccaaaaccacgacg

SEQ ID NO: 28442 - DNA, 370 bp, Glycine max
atttgttggccttgccctcattcaaacttctatttttgctgccactatttcatttcgtagctagagataaaaacaagagccaattagaccacaaaagatccatttcttctggtattccacgcctgactatgaaaagagtaatgtatttgattatagagttttcatttaaactgaagtgaaaactggctagtagttaccatgtttaagctcactgaagtgaaccagggtgtatatcaatgtccatgactgtcaaatatgcatgcttacttgattcataacaatacctattgatttttccctctgtataatgacaataaatctaacaaacaagcaaacaagccttttcccactatgtgggaatggctacata

SEQ ID NO: 28443 - DNA, 375 bp, Glycine max
  unsure (1)..(375): unsure at all n locations
actcaaccactcaccactcaatctataattatgcaaccagngatttttgaagttgctatgactcaaccacattatagtcaaataactgatggggcaagggtaactattggtgttttgtcttcaacacaaacataaatcctattgngaactttacgcatgcttggatgggttccatcccaaattaacatggaaatgtctttccagcatattccttttattcaacaatcgatacgatttgttcaagtagatagactaggatcttcgtgaatatttaaattcgaacaattaaatcaaacgggagtcaatagagatgttcatttgtacttgaacgatgatcagattttggcaattccaactagaattctgaatctaaca

SEQ ID NO: 28444 - DNA, 502 bp, Glycine max
  unsure (1)..(502): unsure at all n locations
ctatttgagcatcgtatcccgncacgctcttagacaacctgcatgcatgcaagcttgctcttactgcactgcgtagcgggcattcaatattgactagccagcaacggacacttgaatctatctgaatacagagctcaaacgctgtaaccataagctacctgatgatgattaaagcatgctctcgcaggcagctttctgtgcttcactatacgaggaagctctggaatcgacactacaaattgaatgcacagagcacaacatcaatgcgcattttatgatgtcacacacacatgcatgcatagcctataatctgaatagggctgcatttataactctagagaatatgatgtcaagctgaagttaacttcctgagaccctactcaacgccactttgttttcaattccatgaccaaacgcttctatgctggtttatcatggagaaaaatcagatattcttgggacctattttttcttgtctccactcaaccaaggtcaatggccg

SEQ ID NO: 28445 - DNA, 361 bp, Glycine max
  unsure (1)..(361): unsure at all n locations
cattcattagtccaatacacactcaacagattttctttatccatctcataattccaatcattcatgctcaatatgatgcatgtacctaacctcaactctcatatgcaatgtggtaccatcctcaagaatatagcctaagcgtgtccacacgacactttcacttatgacaactaggcagttagtgtcgaggtcaccctatcgtgcacaagcaactcccctgcccacggcgatcggcctgagtcttaagggagttccaaactgagtgacatgccctctagtacaagtattcctcctcacgagaaactacaagnacttactgacaaagcttatactatgtgcatgtcatatgaagtatgaaaca

SEQ ID NO: 28446 - DNA, 352 bp, Glycine max
  unsure (1)..(352): unsure at all n locations
agctntatatgttcaaaatagattatcttattactttcctccttgngnttcttttttaatcttgcatctttntgtgtggaggaatgttggaactttccttttgtcttcatcacccatttgaacttttttgacataaatgtcacttcatcatttgtggatccctcaaaattgttatctaagccattagactcagctatctacattttcaaagctttagacgagctctttctttctcctcatctggtgttggtttctctatgtttaagagtagcgaaatctattttaggcagatgatcttgattctaatggtgaacttcatgaacttcatgaactctcacaaacatttaaaact

SEQ ID NO: 28447 - DNA, 313 bp, Glycine max
ctaagcttgtaaacgctacttcggtcctttcttgatactagagcatgttgtaaacgtagcttatcatctgcagttgctgaaaaattcaaaaattcacttagtcttttattattcactccttccaccacaccatggtccactcattcctaatccaaaacctttacttcttaccgttgttgaaaatcaacctgtgctggagcctctctccataccatcctccaaaactgattcctccactgatcctccgacccgcttggttttggtacagtggctcggtttggctccaaaagaaacaacttgggagaaatgggac

SEQ ID NO: 28448 - DNA, 227 bp, Glycine max
attatttcctaataactgtcgttcttggtgtgatacatacgagataatattccattagcagaatatatgatcagacattgctatactgttcatttaaaccacgttgaaattgcatcgctctatcttcgagttttctttttgcaatgatagcaagagtagaacaggtacatcgcacagtacaagaacaaataggatctggcctaaaattctctatttcatcccataca

SEQ ID NO: 28449 - DNA, 412 bp, Glycine max
tttgcagctggaatcatttatcctatctcctatagcttatgggtgagtcccgtccaggtagtcccgaagaagactagcctcacagtgatcagaaatgagaaggaggagctgattcctattcgggtgcagaacagttggagagtctgcattgactataggaggctgaaccaggttaccaaaaagaaccattttcccctgccattcattgaccagatgcttgaacgcctggcaggtaaatcccactactgtttccttgatggtttttctggttatatgcaaattactattgctcctgaggatcaggaaaagaccacattcacctgccccttcggcactttggcttataggaggatgcctttcggcctgtgcaatgcccctggtaccttccagcggtgcatgattatatatttca

SEQ ID NO: 28450 - DNA, 420 bp, Glycine max
actaagcttagggatttcaaattccgctagacagacaatatattattttttattgttcagaaatcataaattgtggctaataaagaaaatcaaagaagacaactaaaacacttgaatatcctcccatatcaaatccttctgagcagcagggacttccttccagttctcgtatgccacatcgaccttatcacgagcgacaatccccaaatatgttcttaatttcttcttgtggggaccgtcgaccttgtcggtcgtaggatcaacgtggaccactggtctctatgccccagatggtctagtggccaaggatcctacctgtgtggctttacgtgtccgcttcaaggtatatggagacgctgatgcgtctgcatgaggaggaggaagaagggaagcacttggatatccatgtgccttaaaaaa

SEQ ID NO: 28451 - DNA, 299 bp, Glycine max
ttaacctcattgtctctcacagtctctagatctgtgagtcaatccaatccttgggtccggactctcagccacttatgatagccgccgatgatcccattactgcttcccctaagctctctgggctttcttcacgccgtatcccatgccttgcgaactccttggagtaccctaacaatgtggtcactgaaacctcgtgcgatgaaaggcgtgatgctttcgtctgatggtactcctctcatgggacatccttcgcatgaagatagaatcctgattcttccttccttctagcgagggaacca

SEQ ID NO: 28452 - DNA, 144 bp, Glycine max
  unsure (1)..(144): unsure at all n locations
tcttaagtcacctgcngcatgcaagcttcttagtttcagatgatgcagatggttttgtatctacctcatgcactcctctaatgactatggcaacatttctggcgctaaactgctgggagttggaggccatctcttaattaattt

SEQ ID NO: 28453 - DNA, 393 bp, Glycine max
cgccttgaagttggactcggtccttcggttagagggtcattctatatgtaaatagtcccaaaaccagaaatggacgccttaagaggctcaacaattttcatagcagtcgggtgttcccccattatgttgttatggaaataaaagtggagctgggtgagtctttccacgggttttgtggatagagacataggacactcttttgtaaacacttcactatttgctggtaaggaacctgacatgataaccatgaaatgcaacgaaaaaaggagacacacaagtgaagccatatcggtacaatttttaggtatgttagccaacggttgcaaacagctatatatataggctaccagaagatataggtaccttgtggtggataactttattagctacttt

SEQ ID NO: 28454 - DNA, 198 bp, Glycine max
  unsure (1)..(198): unsure at all n locations
aagagtacaacattctgtcttatatgtaggtcaactaaagtataacttcatatgggtaacatttcaacttcttggaattgctttgccatccaattcttgtagatcgtacactctgttgtctatgcttgttgtgaccctgaatgggcctttctagatgggaccaagattntccgcttggggatattatctggcttcgcc

SEQ ID NO: 28455 - DNA, 391 bp, Glycine max
  unsure (1)..(391): unsure at all n locations
tgcaagaataatcgtagaatatttcagatactctatagtaaatngnccattntattttcccaagggaaggacaatttaagataaaccattagaacaaaaaggaggaaaaaaggcaagcgagaacatgtttaaatttctttggcgtaatactgactgaaatggtttataacaaaaagatacaagatggatagacacagaaaaccctaagttaagaaataggaggatacaatagtcccagtaaaataaaaacacacagacaaatatttattgttttgataaattataaaaagctatcttgcttttccacatattatcaacatgcttataaccaaaatacatttaggaattaggagaantcaaggttctcatctcttttttcccatggatcaaa

SEQ ID NO: 28456 - DNA, 128 bp, Glycine max
gggcataaagcgatcactctatgtctagcattgattttattaagatgtgcctacctttgagtactacttacaattatcctgtctcaagcgacttattcctagaactgatgcatataaaacctgcaatg

SEQ ID NO: 28457 - DNA, 400 bp, Glycine max
ggcttgtggggcttctatggatgctggatctttgagctttaatgaggtcctttaatggtgattttccaccatggagatgcagcggaagacaaaggagaataggtgagaggaggcgccatccactaaggaataagccatggaagaaagagcttcaccactgagatgagccttggataagaagcttggagaggatgcttcaatggaggaaaagaaagagggagagaaagagagataggggagcacgaaattgaaggaagaaaaagggagagaagttgaactttgagttgtgtctcacaaaactctcattcatcaaagttacaacaagtgttacacatgtttctatttatagactaggtagcttccttgagaaagcttcttgagaaaacttccttgagaagct

SEQ ID NO: 28458 - DNA, 400 bp, Glycine max
  unsure (1)..(400): unsure at all n locations
tgcctcanagaggtccaggaaggacaaggtagccgatataactacttccgctccggagtatgatagtcaccgctntaggagtgctgtacaccagcagcgcttcgaggccatcaagggatggtcgtttctccgggagcgacgcgtacagctcagggacgacgagtatactganttccaggaggaaatatggcgccggcggtgggcatcactggttactcccatggccaagtttgatccagaaatagtccttgagttttatgccaatggctggccaacagaggagggcgtgcgtgacatgagatcctgtgtaaggggtcagtggatcccgcttgatgccgacgctatcggccaactcctaggatatccgttggtgttggaagagggccaggaatgtgagtat

SEQ ID NO: 28459 - DNA, 368 bp, Glycine max
ttttggtgattgcgaaataatgtctatggtgagagacattgccctcgcacgtagctctctttctccctcacgcatagctctttttttcccgtgtaacttgttttgaacacatgactaatgtgaaggtatggaatgtgattttgtgattaaatccttaggacaagtgatgttgtgcaatgattgaaacttctttactttactattgtgtttaataaaataataaagaaattaatatatttgcagtttttgattagcagaagttaaaagaaaaagatctcaagtactttagaggaaaattgatgcaaaaattggaagtaaaaaccttgaagaaaaattggaaaaattagacagcccgcttaggatgcaag

SEQ ID NO: 28460 - DNA, 342 bp, Glycine max
attgcttgaattcgttcaaggtccttctccttattggtctcttatacttttgttggttaaaatgaatctttcataagtttaaaactaactctacgtgtaactttaccgctttttaagaactacatatgcctgagtaactcttcgcacttgaggatacgtaggagcaacggccatgctcttgtcgaccccaaaagataaaaaacataacacgggaagagtacataaatattgaagtcatgattttgcacacttgattaaaggcctcggtgcgtgtgacggacgcgtggggagctaatatcttccccgcatggaaacaactcccgaacctttattcgtaaaatt

SEQ ID NO: 28461 - DNA, 384 bp, Glycine max
agcttcaggttgctcattgactccagattgctgtttttaaggacaaagatctgtatggtgatctgtagaagaacatagaccacagactcttgcaacaggtgcagatttctgattcatggcaagctgagttactaggttgaccaatgcatcaagttctccctcaagctttttattttgactagatgaagatgaatctgtggccacctcatggactcctctaaggacaataacatcatttcttgcactgaattgttgggagtcggaagccatcttctcaatcaaattcctagcctcaacaggggtcatatcaccaagagctccaccattggtaccatcaatcatactcctctccatgttgctaagtccctcatagaaatatttaag

SEQ ID NO: 28462 - DNA, 419 bp, Glycine max
tctacttatgtggcagggcgggtttccttcactttcttgtttcctacgcgagctctgaccaccgttcttccttcccgcgatgcttcttttcatgtccgcctgagtgggcttatatcctaaaccatacttcccacgattcccttgggtttttatcagactagttatgccgccattgtctttgcctaaacccatcccgggttcataaccgttccccaacataactcgggccatcattaccgccgcctcggacagacaaggttgcccaaagagggagtccacggaggaaatgctgaccacctcaaaagactggaaagcggtttctaacgattcttctgcggcttccacataaggcatggaggatgggcagcttaccaagatatcttcctcgcctgacacgatgaccaagtgcccctccacta

SEQ ID NO: 28463 - DNA, 320 bp, Glycine max
gaagtaaccgccctgcaaaattggggcaaaatatgaatcgagtcacatcactgcttcgtctactgtcaaacatatttaggattgttgatgtccttgatacttccagcttcaccttgacaaagatgtcatggaccatgttgaaaatctaaattgagttaaccccatatccttgcgtaaaaatacgcaatacttcgactgacatcattcgcatgcatccatgcttatcattggctgcattgctcattgcattctttccttgtaaaataaatataattatattaaatacaatgaacttttcatatagaaaaggacacgcttta

SEQ ID NO: 28464 - DNA, 337 bp, Glycine max
  unsure (1)..(337): unsure at all n locations
agcttaataaggaggaagtggagaagttggattctactttggccatcgcaaagagggagaggaatgctgaaaaggaggagaggattggggttgagtagaaaacatataacgatgtttatgaaacttatgagtgtgggttcaatcactaaccaaacctaccataggtgcctttttcagtttgaggtcattgccttcctccggcgaatcctcctacaatggtgttgatgacacatcttagttgattaaggggtcgntccttcctcttcctagaccggctttgacttctttcactctcagtctgagactagtgactgcaatctctatctcttcttttgtc

SEQ ID NO: 28465 - DNA, 412 bp, Glycine max
ggtccttctattgttacattctccccacactgcaagttctgacttgaaaaaaaaaaattatatcatgcaaatgctccaaatgaatgtggcacgtttctttttcaattctcacaaagttatgttggatcatatctcccaaaaagaaaaagaaagaaaggaaaaagttaagttggatcatggtatgcataattgaatcaattgggcaaaaattgacaacacaacatgtgatcaataatgttttgttaaactatgaaaaagaaaggttttgttaaacggggcatagggagttctgctttcagaatctactactattttttctgatttcagaatcaaaaccataaaaggctacaaacaattacagctagttaaccaaacagctggcttcaattcctcatctcatacggacccatca

SEQ ID NO: 28466 - DNA, 419 bp, Glycine max
  unsure (1)..(419): unsure at all n locations
tttatatattgacanaganctgtatggtgatctgtataataatataaaccacagactctcgctacaggtgcagataactgattcatgtcttgctgagatacaaagttgaccaaggcatcaagttttccctcaatctcattatattgactcgaagaaagatgaatctcgggcctcctcatgtgctcctactatgtcaataacatcaattttcgcactgaattagtattagtcgtaagccaccatttctattaaacttctatctcctactgggggcatatcaccatcaactccaacattgcgtctcttaatcatactcctctacttttgtaagtcctcttaaaaatatataaatgggctcatctaatagttattacaggttcatgtcctatcatccgatattctaccaacacaaaaactcc

SEQ ID NO: 28467 - DNA, 364 bp, Glycine max
ggcctcaaagagatccaggaaggataaagcgtttcgatttaaccagttccgctcccgagtatgacagccaccgctttatgagcgctgaacaccagcagcgcttctaggccatcaagggatggtcatctctccgggagcgacgcgtccagctcatggacgatgagtataccgatttccacgaggagatagttcgccgacggtgggcatcactggttacccccatggccaagtttgacctagacatagtcctcgaattttatgccaatgcttggcctacggaggagggcgtgcgagatatgagatcctgagtgaggggccagtggatcccattcgatgcggatgctatcacccagttcctgcgata

SEQ ID NO: 28468 - DNA, 485 bp, Glycine max
cattttattacatctttgacaacgcgaccttaagtcaccgcggctgctactcattaatagaataggtactaattctattcccccttcgttcttaggaagacatacttagtccactataccctatgaattgtgttcgcctcttgatgtccttcccacagtatgatagaatgtagatttgtatagctgacatgactgtattaataacgttgattcttccctccataaacagagatctttgcctccatgttgcactcctaacatgatacctagttactaatgtgctgcctcacgatccatctcttataggacaccccatctggaatttcatgtttatacatggaattaccaactatagcaactctgaattagctgcttccttctccatttacagtttttcctccccatccaatgacttttaaagtgtccttttgatgtcaaattcttataatgtcctaaacatattgttcgtttaccatatctatccg

SEQ ID NO: 28469 - DNA, 420 bp, Glycine max
ggacacttgaaactcagctagtacatatagttgcaacctgaggtcctttatagacttattaaaaatatcagccaagtgctacgagatctatctttatgtgtttaggatgttcatggaagactaaattacatgcaacgtgaatagagcaactcgattgtcacatataagcttagtgtcttgagtgtttgcaaactttaattgctgtacaaggtgcctaagccatgtaatttctcatgcaacttctgttatggtatagcattcaactacagcgctggatctcgcagctatattttgcttattgcttctccatgagatcaaattccctacgagcagaacacaatagcctgaggtataactcctgtcgcatcagcactagactaacaaacaatattgacattgtcttcgccttcatatacaaat

SEQ ID NO: 28470 - DNA, 339 bp, Glycine max
  unsure (1)..(339): unsure at all n locations
cttgagaagctagagtttagctacacacacccatctaaaaactaagctcacctccttgagaagcttccttgagaagctagagcttagctacacacacccatctaaaaactaagctcacctccttgagaagctttcttgagaagctttcttgagaagctagagcttagctacacacccctataatagctaagctcacccccatgacaaaaaaaacatgaaaatacaaaaaaaatcctactacaaagactactcanaatgccctgaaatacaaggttaaaaccctatactactagaatggccaaattacaagggcccaaataagaaaacaacctattctac

SEQ ID NO: 28471 - DNA, 304 bp, Glycine max
  unsure (1)..(304): unsure at all n locations
gcttagtatgctaacttagtctaggtttatgtattatgttagagcctggncttacacattgttcatcctagagtctaattgtaagtacttctaattgggttcttaaagttatgaatagtatccaactgggtgcacattacaaccaacatatctataaatttagtgatgatgtggcaaatggagagctcgtgtgattactcataccatttggttctcgcggatccaaggaggtcaaaacagcccatccccctctctttaacataagagggaaacagatcatttggccacctgttaaacatggttg

SEQ ID NO: 28472 - DNA, 286 bp, Glycine max
ggagagctactttctctattggctctttcttgtaagtacttgatgtgcatactgcgcctatctatataatgaacgtttatgttctggtctgaaccttagaacttgagacgacatggcccgtttatcgcattatcatgagggatcgcggaacgggatcctagcttgcataatataagtcatagggcgaaaattgacaacgctactccagtacgatgaagtttaggacaactgctagatcaagatgttgctttactctcatcatgaggagttgtgtatcatttctcga

SEQ ID NO: 28473 - DNA, 72 bp, Glycine max
catgcaactctaacttatacaagaatgaactcttataccactcgtggacaagtggcctcagatatcttaaga

SEQ ID NO: 28474 - DNA, 408 bp, Glycine max
  unsure (1)..(408): unsure at all n locations
tatccttatgtcctgcctctggtcttcaccccccgtgtcaccccggaagagttaagccaagcccctacttttgaggggcaactcccaccttatgaagactatcccgggcaagacgatggggaaggagataccaattttggccccctgctccacctcaaagagccatccccgcatgaactaccccagccgaacatagtccgccatatctcggcctcacccacacccgtaaaagaatctgttcccttcgcggaagataagggaaagattgaggcgcttgaagagaggttaagagcagtcgaggtgcctggcaattacccattctncgaattagcggatttatgtctcgtgcccaacatcgtcatccctcccaagttcaaagtaccggactntgataagtacaaaggaacg

SEQ ID NO: 28475 - DNA, 376 bp, Glycine max
  unsure (1)..(376): unsure at all n locations
ctcagcttgtacaggcggtgttttacattggttntaagatctattcaatctctgcaactgtttgaatttggaatgcacttatatagctcccgcttttttgtagctgcaccacccatagttttatttgagttattgttgaagtgcagtctactattttgattctaagtgatttgagaaattgattaaccatagcttcatcgataggtttgatatggagttgtgagttaactccattcagcctaacccacttaagagaaagcccaggtgccttagatcaaaatcacacgaaggctacaatttgtttttatttggtggtatctgatactttcagaatcattggtctatgacgagttcctagactaatttactttttcca

SEQ ID NO: 28476 - DNA, 413 bp, Glycine max
agtcacctgccgcatgcaagcttccattgtagaaaggtatgttgctgaattattctattgaatttgttcacagtacatggaaacagttgaagctgtgggggtaccgaaaattcgtcatgaccggacacgaggaggtcaagggacacgaggcttcaatgttgttaccatgagtcgacaagatgtgtcacaagcgcatttgtatatcttgaataacacacaggaggtcgttccatacatacaaactcacaaacaatatatgacatctattaacccaaaattgaatatgatgaaattgttgcaagagcataatagaactttcatgaactggtttaaagaaacaattatgagtgatgacaatgctctcaaaacattaagaatgttggctattggtccgaatctaaatgtccctactt

SEQ ID NO: 28477 - DNA, 416 bp, Glycine max
  unsure (1)..(416): unsure at all n locations
tctaaactntgtacaagaatgaagctctgataccacttgttagacaagtggcctcagatatcttaagaagggggggttgaattaagatattccaaacttttctcctaattaaaaatctatcttactttttacttaaagttatgaattcccttaatgacaatcttcttaaatattaattcaaatgaagcaacttgaattatgaatataaagcaataataaataaaggagattaagggaagagaaaatgcaaactcagttttatactggttcggccacacccttgtgcctacgtccagtccccaagcaacccgcttgagagttccactaacttgtaaattccttttacaagttctaaacacacaaggacaacccttcctttgtgtttagagattctttacaacaagagactcacagtc

SEQ ID NO: 28478 - DNA, 357 bp, Glycine max
cccgaatagtcgaagagaagttcaagtccatagccatcaaagtctgaaaagagtatgatgaactaagggacgtcaatatggccaccgctgaagccttggaacgagaaaccaagaaggcccgaaaggaagaacacgtgcaagcaaagttttgaggggctttatagggcagcaatggtaagctcaagctccgaagaggtgaaaggaatcatcacgggtcaaaggcatgatcttgaaggacgagctaaaggcttaccttaggttgaaaagaaatttgtcccaacagttaagcgagactgaagggaatatgtgggccgtcatcgatgagtgcaaagagaagctaaatctagcggcgactca

SEQ ID NO: 28479 - DNA, 304 bp, Glycine max
  unsure (1)..(304): unsure at all n locations
tgtggactataccttcgaccgaacacggccgngtttctttctatttccggattcaaggtgggctgcagcaccggctccgcttccctaactgtactggaggcggttgcagtggctttatcctctatggttttctgaagttatacatgacctccgagatggaagccatttgatcttttaaggccgatagatctgacttcatctgttcctgcacaccctcttcattatccatttttctggatcgagtgttataaaagagcgtaggtgttaactttggtatgactgaattcctaaagaaattacaact

SEQ ID NO: 28480 - DNA, 232 bp, Glycine max
cttgactgattttattccttttctttgtggctacacatctaagacacctctagctcaccaagacacttgaaaaatgatgtaacggccttcttgcgacatgcgagtctgtgcctgtcacttattgggaaacgcgaaacgagaaccgcaaaaaatctatcgagtgtttcgcgagagatacccttacgtgcttaagaacccatttagatggattggattacttttttttttttga

SEQ ID NO: 28481 - DNA, 402 bp, Glycine max
  unsure (1)..(402): unsure at all n locations
cagcttacggatntggtcttcgtcggtgaaaggatctaagtgttcatgaaaagaggcttatatgatcatcctgctttgatgaatgcgaaaactggggcaaataaagaggatgagaatgagggagaaacccttgctatgactgtcattcctacacggtcaaatttcccatcagcccaacaatgtcattactcagccaataacagtccctctcacccaatcatccacaaaggtcatccctaaatcaaccacaaattctgtctaacgcacttccaatgatgaacaccacctttagcacaaaccataacaccaatcataaaggaattttgcagcaaaaagcctgtatgattcaccccatattactgtgtcatatgctaacttgctcccatatctactcgataattc

SEQ ID NO: 28482 - DNA, 208 bp, Glycine max
aattgcgcattgtctgctgaataacataaggtggggctgttaaactaccgatgctggctactgatatttctattccacccctgaataatacttggacgatgtctatttggaaatgttcgatcggagtcattcggtcatgcttctttttaagacctctatctgtcttctattcctggccgacgtcgggtatcattttattccatcaata

SEQ ID NO: 28483 - DNA, 386 bp, Glycine max
ctcagcttctcaagatttaagttcttcctaacactgtttattcttagtcccaagtcctataacaacttgcatttgcccatcgagtttgcgggtgacaagtggttgaaaataacaaattaatgcccaacttgctccacagagtcctccaaataaggcttaggaacttaaagtccctatcactaacaatgctccttggcaaaccatggagtctcacaatctccttgaaaaacaaatcagccacatgggaagcatcatcaatttttttacatggaataaaatgagccattttagagaacctatcaacaaccacagaaatggaatctctaccatagcttgtttttggcagccccataacaaaatccatggataaatcaatcctaggatac

SEQ ID NO: 28484 - DNA, 415 bp, Glycine max
  unsure (1)..(415): unsure at all n locations
ntatgatcaggagggagctaacaaaaattntcatgcatgtggaccttcttctaatagttcagacttgcagcagtgatgtgccattattttatcctatttcttaacccttttgcaccattttaattagtgattagccttaattgtcaaattaattatgcagttttatcatttgggcctactagattaattttgtgtttttaatttaatttcaggagaattctaagcaattgggcttgaatctagaattgggcttggacttgaagagagtagactattttattctacaaaaatttatcttatctagattttatcttatctagatattatttagatttgatctcatctagatattatttcatctagatcttatcttaacttatctagattttatcttatttatgggcttcggattaaa

SEQ ID NO: 28485 - DNA, 314 bp, Glycine max
tcagtttacatgtatgattctatgtagccatttattattgtttgcttgctttgtttgatatacgcatttatcctatagcaatacaaaattcaatgtatggttcctagatatttgtgaatagagacatgaaggaaattgtgtaatgcaaggatcggttggctacttaatactgatgaaatctctattataatgtagttatcactacttaacgtttagatatcattacacctgtttgcttatttcagaatggatctaattcagctaacgatgattccctgtacccacaaaggaagtcagaattttggttcttcact

SEQ ID NO: 28486 - DNA, 409 bp, Glycine max
  unsure (1)..(409): unsure at all n locations
tcagcagaataggaagacgcgctggtgcttcttcgcttttctttacgtatntccgcggacgnaacaaccatgtataactaattacgagtgtgatcttcttacatggaaaatatcaatctgcaaggactttcaccttcatcaaatcatatttttattcataaaaatatatttaattgcattgcttaatctatcgtgattgagatacccaaattgaccgtcatgttgacaaaaaactccttttgccaattgaagtgaaaaacctaattgtcatttcgctcgctatttatattatttcattaaggttgaatgtttatgacacatcatcaaaattaaattattttacagttactaaaattaaataaacttatctttatatttttatattaacaactaattgtatcaattataa

SEQ ID NO: 28487 - DNA, 345 bp, Glycine max
  unsure (1)..(345): unsure at all n locations
agcttaaacattaaatcccaggtttgaataactatttcaataaaattctaataactatatcatgaaacattntcaacatttaccagatgttgcagcaaaataacaatttaaagtgattgaagcaatagcaacaaatgcagtttgaatcctctaaggaatagaaataaaagaagggagaaacaaaagaaaattccatggtttggccatcactatgcaccatgtggataaaaaactaaaaaagtaatgaagggatgttaagatattaacatgccattttttatcaaatcatagggttgggaaaaataaccaggccaaacagtgagaaataaatataataatcagaaa

SEQ ID NO: 28488 - DNA, 421 bp, Glycine max
  unsure (1)..(421): unsure at all n locations
gctataggttctaatgtggttgtgcaaatgcttcgtacctgatcttgtatcaccaccaagtttcttttcacaatatttacatatagctttccatttttcctctattttctttcttttgaagtgggtccaagcaacggaagttaatcctcttttatttggacttctttcaacatcttcaacttcttctatatttggagaattttttgcttcttccatcagattgtgcatcattagcaacttgttgtgtttctaatggagcaatactattaacggatggatcaataggcatacccattttctgtacaacaaacaagtaacaaaatttacaaatatgagtcatgtaaaattgtaaatgcacaaatctgactattattgctagattaccaaattacaaatatggntacaaattttaaactcaatg

SEQ ID NO: 28489 - DNA, 215 bp, Glycine max
acctatataatggggaatatcactttcaacagacttaccaaacctcctcagcgtacacttgtgagaagatttatctgctgctacttcatatgctagaacggtgaaaacattttaaaatgatagatgtcaaatttcaggagcacactttgcgaacaaacattgtcaagtcactttcaacgtgtgtaagcgagtacactatactcgtgatcaaccac

SEQ ID NO: 28490 - DNA, 406 bp, Glycine max
  unsure (1)..(406): unsure at all n locations
ggggctcttgcctcactcaccgctcttttggtttcatttctagctatcttatacttatcccaagtttcagaatttctacacctagaccactccttgaaacactccttttttactctaactttgctctgaacattttcattccaccaccacgattctttacccctaggtccaaaacctctagattcacccaacgtctctttagccactntaataatctcttgggacatcttgttccacatatcatttgcacttccttgtgattgtccacaccaaccctcccatatcttttgttggaatattccttgtttctcacccttcaagtgccaccatttgatccttggtgctaccagaggacttcttctctttgccctatnctctaatcttacatccataaccaaaactctat

SEQ ID NO: 28491 - DNA, 410 bp, Glycine max
acccagctggccttgaatcagaaatctgtacctgtcgcaagggtttgcggtttgcgctcctctgctgaccaccatacagacctttgccataccatgcagcaacctggagcaattgagcagcctgaagcttatgctgcaaatagttacaatagacctcctcaacctcagcagcaaaatcaaccacagcagagcaattatgacctctccagcaacaaatacaaccctggatggaggaatcaccctaacctcagatggtccagccctcagcaacaacaacagcagcctgctccttccttccagaatgctactggtccaagcagaccatacattcctccaccaatccacaacagcaacaactccagatacagtcaacagttgaagtcctccacaaccttcctcgaagacatgtg

SEQ ID NO: 28492 - DNA, 401 bp, Glycine max
tgtaggccttggatcttcttcatcaatggagtcctttgtttcttgaagatcaatgacagtggaatgcagaaggaggaaaggtgattggagatgccacttcaaggagaagagagtcaagaacaagttcaccaccatatgaagccatggataagagcttgaaggttggagaagatgagtggagggagagggagagaaggggcacgaaatttatgcctcgaatgaggtctaaaatttgaagtgtaatttctcaaatgatcaaagtagaaataatgcacacaaaaggcctctatttatagcctaagtgtcacatgaaattggagggaaatttgaattttattcaaatttcacttgaatttaaattcgtggagctaaatttggagcctaaagttcactaactatga

SEQ ID NO: 28493 - DNA, 348 bp, Glycine max
  unsure (1)..(348): unsure at all n locations
agcttgcttgcggagctactatgaaggtcggatcttatagctngaatgaagcccnttaatggtgattttccaccatggagatgcaacgcacgacacacgagaataggtgagaggaggcgccatccactatggaataagccatggaagaatgagcttcaccaccaacatgagcctacgataagaagcttggagaggacgcttcaatggaggaaaagatagagggggagcatgaaattgaaggaagaaaaagggagagaagttgaactttgagttgtgtctcacaagactcttattcttcaaagttacaacatagctttacacatagcttctatttcatagactatgtag

SEQ ID NO: 28494 - DNA, 411 bp, Glycine max
  unsure (1)..(411): unsure at all n locations
gacccacctcatcgctatgatatcaccactcttacattatgannatttcaattttaaatgaaaagtctgttaatttgcttatgaaaaatgaaagtaattttttctcgatatacattcaccaaacaatgcgccattacataagtgaatacatatgtatatataggaatagtaactcagtacacatcattcacataatggaaagtaaattagttcatacatataattaaatttgtgatttacatctttaattcaacaaaagaattatggaaccagctatggaggagttgatttacaaaacacaactctctcccaaaataaccccaacgtcatcacgtcagctccacaaaagagtcttacttctcatactctactactgttattctgcttccatgaacaaaggttcgtgatcat

SEQ ID NO: 28495 - DNA, 412 bp, Glycine max
  unsure (1)..(412): unsure at all n locations
tgatatgggctggtcttgaaagaattatgtaacatatgatgctcttggattcgaaaggaaccccggtgcctatgttggatgtaccctactatcacaattgcctttgagcatctttcacgagcttctgatcgaatgagtctttttctcaaatgcgcaagtgcaaaccttgagacccttttttttacaatcatatgtctatgtgtgtattccattccagaatttaaactcaagcaaaattagtccttttttgatccacatgagctttattgggcttgtaacgcggctaggggttaagagggctatcaaataaaaggtcatagaggctcanacagttgttaatggttacaaagagtaagaaccttgagtgccttgctcgcactgttattcatttcaactctttggactgagatct

SEQ ID NO: 28496 - DNA, 594 bp, Glycine max
  unsure (1)..(594): unsure at all n locations
agtacgactctctacantatctgctgctgtggantgatantntcatnatanacactgaatnttnnttatgtaaatcttcatagcatgatgccatcgtcgaanccgcgcacctctatagacnacctgtctgcatgcaagtatgagatgaggaaatgtcgaagggtgattctttctgctaatattgtcgatcacagagtggtacctgcagatatcttctcggggtcatgagaccttcgggacgttctgcgaggtgctattgtccaaaaccaagcttgaccaatcccgatccaaccccggcatatgtcgtctgtgagaacatgtgacatacctaaactggcgagctcctgccagtccacacatancaggaaaacaagacccctgatcaatgaggcttgtggtggctggccacctgagaattttgtagaatatgagcgaatgtggactctcggaactcgacaccacaggtgaggtattgactacagtgcttaaaattgaataaaggggcgtataaggcctctggttatcgaaaccacaggggctatcgttaccctacttgtcaccaggttagcatctcagtaatctctggcaccatcg

SEQ ID NO: 28497 - DNA, 403 bp, Glycine max
  unsure (1)..(403): unsure at all n locations
ccctacgaacgttcactggcacaagtcattctattaactaagaanaatgcacccatatacaatcaaggtagcttcattacctagattatttacatgtacttccaaggtgtatttgttatttacatcacacacgcctccttggctaaatttacatacatgcatactcaaagcatttcggggtaccaaaaattgcacatgcgctcatcttggtatttctaatacctatacatatacaaacttcatgatgaatcttgactacctacgcaataaggtgctacatttcatgctcttttttttttttttttntgaggggaatattaaccatgtcctctcccttctcatggattagcatcttgcctaacttgaacttacttaagttagaattaggcgttgattacttatt

SEQ ID NO: 28498 - DNA, 490 bp, Glycine max
  unsure (1)..(490): unsure at all n locations
ccccagtgttgctctgcctgcattcgtaacttgactctcagcttgaggtctactgtgaggagcaaggcttttacctgttcttgnatctacaccgagtcgcattacacatatactgacactgtcagcttctcaatcgatagtctagtagtagaaatagacctgancagngacgggaacactacgtccgcgtgtgctagaatcatggcttatatatcggacataacgtgtgaacatagtctgaagatgcctcgtatcacgagggagacttcctatgcattctgcgcatcacagagtgcatcatggcgcacgttgcggtgtattaatggtacgcatctgttcacagatggatcactatgcgtgcgcatcttatggccaacagccctgatgccgaatatacaagtctgactcgtgtcacgtcgacacccgctgacgcgactattattgctcgatacgaatttacaaatatggtacaaattataactcattgacg

SEQ ID NO: 28499 - DNA, 379 bp, Glycine max
agctgttactctgtgtttgtgtgtaagtaattgtgttgagggctcgatggaacctggtatttattggagtgaagcatagataaagttacagattagattaatcgtagcttatagataaaagctagaagatagttgcaccttatagataatgtgtgaccttgaagattattaactacattgctaattgattaaggtctttaaatatattcaaataataataggctagagatattttgttggttagggagtccaactactaaggaccgagtgttcgtgcttctattacatggttggcatggagggctaacacgtgtctaatagtgtcatatagaatgccacgtgtattctatgggttctggacggtacaactaatatgcta

SEQ ID NO: 28500 - DNA, 407 bp, Glycine max
  unsure (1)..(407): unsure at all n locations
gtatttaataggggatgaagagaaggaggatatatattttaagaaggggaagaaggagggtgaaatgttngacaataaagataaaatgattttttaaaaaagtttaagtttgcaaggataagaggaatgataagggccaatagtaataccctgttattaaactctattattgctaaatggatgaaagcctgtgtccaacaatccgtataacagacttttttttagaggatccgtatagcattgatacatcttaagggcatatttccccatctgtaccagtacgatcttaactctccctctcgaaggttgtcaagacatttaaacgtatgtgtttataattaaaccaacaatatttatttttgttgattctcaacttagaatatacttctttctctctttcttcgtgc

SEQ ID NO: 28501 - DNA, 566 bp, Glycine max
  unsure (1)..(566): unsure at all n locations
tctccgtctcctactcatctcgacantgnnatcgttgnatcactcgtgatantggtngatacntntntcctacccaccccgagctcannnnnacaacgacgtttgagtcgatgcgcttgcgatanccgtgacactaccccaaacnnacgctatngacgcaaaacacgctcgatcgtgctgcattaaattctgtccagttatcaacaaagtatgctgctccctcataagaacattgcattctgatactaatccccagccaatcatcaatgtcttgcttgaagaaaagggactgatcattaacctttagcaacttccagatccaataattaattttaatagtctctggaggtaaactgacaatatcttttaatgtgaaagacgtgaaaataccaatgtactcattgcgattatcagtaaaagaatactttattaatgaatggtctctaaaacacattgtaagcgcatattattccacagtccctacattctcaaaatactctaagtcttctaaagccgcactcaattgcgtagctaatgaacggggcctagcctctctagggagcacg

SEQ ID NO: 28502 - DNA, 420 bp, Glycine max
acatattcttaactcgtctgtgttataatcctttgaatctgaacccggacttaagcgttatctgatacccgctgttggggaaccgtaatcggaataaacatcaaagagagttacaccaatgggccatgatcaatcatataagtcaacttgacaccaccccttaacctcaaaccttatggctcaggcttatgaattttttcttcactgatatggcgttcaaccttgtcattcctactcaatgtgatgatttacctcacacttgtactccatcttaccgacctatgcattcttataccaattacttgcactccaatgaagtgtgctctcctttctcaaatgaataccaacgtcatacaggctcgactcttgtattgtaaggtcactatagaatgtatttaaagacatctagcattgcctccg

SEQ ID NO: 28503 - DNA, 262 bp, Glycine max
atatgaatataaacaattcaaaaataggtgggattctttgaaaaaggaatgacaattatgggttaagcttatagggaaggacacaggtcttggctgggatggggagaatacaaccattgcagctagagatgaatggtggtaaaccaaaattcacgtatgtattattcaacgaaaatagagttttcgcgcaggccactctcttgattttatgtgagaatcttgacattgctagcctaaattgaacgctgagactattttttat

SEQ ID NO: 28504 - DNA, 390 bp, Glycine max
  unsure (1)..(390): unsure at all n locations
agctggtagggntaaagtctcatgattgtctcttgctcatgcaacaattgatagccgnggctatacgagacatcttgccaaacaaagtcaggttagcgataactcgcctgtgctntttattccatgctatatgtagcaaagtcattgatcctgtcaagtttgatgagttggaaaatgaggccgcaattatactgtgccagttggagatgtattttccccctgctttctttgacatcatgattcacttgattgtgcatctggtcagagaaatcaaatgttgtggtcctgtttatctacggtggatgtaccccggtgagcgagtcatgatgatcttaaaagggtatacaaagaatctatttcatccagaagcctctattggtgagagggaca

SEQ ID NO: 28505 - DNA, 411 bp, Glycine max
tgtcatcacaatgaactgtgaggctaataatttaaactataaacctattaaaacaccaaaatttcaaaaaatatttcaacatggggtttgctgattttgtacatataccttgggcaatggacatgtgttaaaatgcttaccagggacaatgcagtaatttaattacgttgaaggactaagttcataatgctggccacatgttgttatcaagtaaaaacaaataaaactggcataatctgtttactagggctatacctataaaatcctagacttgccagaatacatcaatcattgtttacatccttcctttttagttattctaatttatgttctcattgaagaataaagataagtttgcagattatatatgtcagaatatttgacattatcttatgtaaggctttaactaac

SEQ ID NO: 28506 - DNA, 613 bp, Glycine max
  unsure (1)..(613): unsure at all n locations
tcttcacacntcttgatttcatngnatncattcactctttactattantnnntnncgtatctactctccntncaacgcanccnnaatatttttgatgccatccatngncggagacgctnaagagnnanagtccacgcgngcgagcgccagtatgaaacatgcagcgctagagacggcttcatgtatggtaacgactacgcacagacttcatcgatgattattggatgccaatatcaagtggctcatatgacaataattaaatggtgtactatgtgggttattaaaggactcacctatacatacatgactcccacctttggatgatgataaggcgccgagaaaaacattcttatataaaagtcatatcttgctactgaaactaacaaaacatacttgaaacaaccccatgcccctagagatagccgaatggattaattaatattttagagtcgttcaccccatcaatgtgatggaacaccctagtgcgtatgtatatttacgctctaaaaattgactcctatgcatggaatgcgatatacagcgcctgtcgactaacagtgcgatcatcttgcgaacaatgacatgggaccagtcgacgcaaattcaacaacgt

SEQ ID NO: 28507 - DNA, 390 bp, Glycine max
  unsure (1)..(390): unsure at all n locations
ntaagccaattcatacgacaatatactgtttactnggatttctgattgagtcccgtaatataacgaaacgctcgaaatcgaatgtttaagctttaagccaattcatacgacaataactttttactcggatgtctgattgagtcccggaatataacgaaacgctcgaaattgaatgtttaagctttgagccaattctaacgataataactctttactcggatgttcgattgagtctccgtatatatcgacacgctcgaaattgaatgttgaatctctaagcctattcaaacaacaataacgttttactcggatgtccgattcattgacgtaatatatcgagactgttgaaattgattgttgaacctatgagtccaattaaacgacaataac

SEQ ID NO: 28508 - DNA, 360 bp, Glycine max
agcttcatccaatccgccagaggttggaatttttcgtctagtcttctctgaatgatggaagcattcttagagagaaaggcaaggagataacccggccatgctatgtcttctacaatgaggttggggtctatgacaggcacaccttataggtgaaggctatcaaggtggatgggagatggaggtgcttcatactgaacttcatcatctatatcagcactggactcagttctcttattctttataagatgtatagtctcagtgggatgaaggctttgttaaaactattgaatagttgaagactactgtctaactagttgaacatcagttggataatgatcattgacatcatcattggcaatg

SEQ ID NO: 28509 - DNA, 403 bp, Glycine max
cataagtgaaatcaggtgttgccatcttcctaagagttctctcatgaagtggaggttgagccatgttctcagtatgaaaattagtagtcgaatgctcaaaatcagaatattcaaaatcactagcaacagaatactcagaatgctcaaaatgctcacaatgctcgaaatgcacagaatgatcaggatgcacactatgcctaactaatctatgaaaggttctatctattttaggatcaaaggattgtaaatcacctggattgcccctagtcatgcactatgtgcagcaaataatgtgttctcaaacaagcaccaagggagggttaaaactacaactatagttaaacgatatccaaatgagctgaaattttggagcaacacccctaaatcatgaagatagcacaca

SEQ ID NO: 28510 - DNA, 420 bp, Glycine max
  unsure (1)..(420): unsure at all n locations
ctcacctattaggcttaaattctganatatacccccctccttacctctccctttgatgctntacatggagtacttgaaggaagtggaaggaaaaactgtgcatgattatcttgaggtaaagatgggtaaaatgacaaagccaataggtgtggaaggaccagtgatagtgggtgctggtccatcagggcttgctgcagcagcatgtcttaaacagaaaggcattccaagcctaatccttgaaagggatgattgcttggcttcaatgtggcagctcaagacttatgaccgactatgccttcatctacctaagcaattctgccaactccctctaatgcctttcccccaaaacttttcctcttatccaaccaaacaacaattcttggnctattttaaagcctatgctgaccattttgacataaa

SEQ ID NO: 28511 - DNA, 515 bp, Glycine max
  unsure (1)..(515): unsure at all n locations
tcgttactcctgtgtntnancaatctttntnnttnttnntntnnnccccaagacaccctatatttgcatgtgatcgcgtcttaagcacctgngctgagctngtttcacttggcttgatgagtgtttatacttancctctctctcatcctctatgtgaactttctagacatgaaggctactctattatttgcggatacatcatattcctgcatcttcacttctatagctatagacaaactcttcttcttctactcttctgaagattatctctccacatttaaaggcagcggaactctgctattgtacaagctacctatgttgaacgcggacttcatggactcttaagatgccaacatctcatccatgcacgattttcaaatctcttgcttctcggaacgtgtggcctacgtacacctaagacgctataatataatcgaagttattgtgcacatctcgttgataatgtcgactcatatcgaatatattgattgcactgtaattctatgtgagtgact

SEQ ID NO: 28512 - DNA, 416 bp, Glycine max
  unsure (1)..(416): unsure at all n locations
cttgtggagcttctatggaggctggatctatgagcttcaattatgtcctttaatggngattttccaccatggagatgcaacggaagacaaaggagaagaggtaagaggcggcgccatccactagggaataagccatggaagaaggagcttcaccaccaagatgagccttggataagaagcttggagaggatgcttcaatggaggaaaagaaagagggagagaaagagagaggggggagcacaaaattgaaggaagaaaaaaggagagaagttgaactttgagttgtgtctcacaagactctcattcatcaaagttacaacaagtgttacacatgcttctatntatagactaggtagcttccttgacaaactttcttgagataactgttggaccttgtggcctcaataataatctta

SEQ ID NO: 28513 - DNA, 569 bp, Glycine max
  unsure (1)..(569): unsure at all n locations
ctcgtacgacattctntataatataaaatgtatttagttntnttatcctncnttttttttanacgcacnaccccatatgtttgtgacatcctgtaacggcgcngattagagagaacngccggcatgcaagcntaagggatcattggacgacaaaagggttatattaagaccccagcgtagacagaaactcatactcgcctactaaacaccacccagctgacggcgnacatactttcacaaacataagatggcatcagaagctcatatggcggcacaacccgagaacggcataagaagacacggggagcttatctctaacaactcgcctcgaaatggaggaccaacccgctcaaagataaagggggaacacggcaatgcaagtgaaaaaagagccgatgagtgccgtgataaggggagacacgacactaacggataaaaaagtacatgtgcatgttatagatacaacagcacttagagcacgctactattaaaggttcnactggccaaccccttgaagccatatacaagccgacatatatagccaccctgaccagaaactacattggacg

SEQ ID NO: 28514 - DNA, 369 bp, Glycine max
  unsure (1)..(369): unsure at all n locations
tgctgctaagacatttcttacttaagttggttccttgttctttgtggttggcttgtaatctttaagtcattcctcttatgattatgttntgtgccatatgcnccatgcgttgtaaagttgatatttatcccgaaacaatacccttaagtcgatattgtctcgaagaggcaatgttggttaatcaagtgtaaagttgatatttactctggaatagttgcccttgagttgatatgtcttgaagaggcaatgtccgctaatcaagtgtaaagttgatatatacctcaaaatagttgcccataanacatgtggtagttgttctacccaagtgttttaggtctcttttactcttttcttcaatccttgtagaat

SEQ ID NO: 28515 - DNA, 546 bp, Glycine max
  unsure (1)..(546): unsure at all n locations
ttatcgtagctctctactacngtgtcctaaatctctantttctcttttttattctgtcacncaaatatatgtgacatgtagaccgcaccttaagagacgcggcagcagcttgatacctgtgacacttacttttattgaaaagaggaactcaaaccggcaacatttactctaagatcatggaccttacggatcctactcaggaatctctcactaggtgttgatactcgtggccttcctccattatttattacatatgaaataccaataggaacgacatagtcttatcgaccagagtcatggaatggtcttattatcacggggctttctggagaaataactgaccatctaacagaaactccttctgatatgaatcaagacgaggtcttctatgagaatcagctgttgaatagctcactatactcatgagaagcagagtgccttcacaagggtttcaacaaccttttatttggtcatatgacaaaaacatatgggattttccattccttaaccatctgtagggtggatgacaatgccccgtgcgggccc

SEQ ID NO: 28516 - DNA, 368 bp, Glycine max
cccttcttattcaatctaaagttgaaaattaacaatgttttctctataaaatttgttagaatgggtcggctatctctcatcttttctttgcagatgattgcttacttttcaccaatgcaaagtcttcccaggtgtcccttgtcagagaggttctttattctttctgcttagcttcaaggatgaagatcaatgtacacacatccaggtttcttccttcggagaatgttcctagagccaaggttcttaggtttggagggatgttggagtttcaacatactttcaatatttggcagtacttgggttttcctcttttgtcaggtaaagtaactaacccttgtttttcgtttattattgataaagatgatagt

SEQ ID NO: 28517 - DNA, 295 bp, Glycine max
cacatagaaatgagagcgatctaggtcctttatatcatattatcgttttaatcaatctatagtttttagaaattcttcacgagttctaataatagttataatatctacttaaacaacaattatgaaaaatctattttcatattttgtttcttcatgaaaatacatggacaaataggatcgattttatattcttcctttaggaaatactcactaagtgtatcatactacatgcgacttgattgatttagcctatatgaagtactcttcttgagaatatgtattatttggcaaatta

SEQ ID NO: 28518 - DNA, 424 bp, Glycine max
  unsure (1)..(424): unsure at all n locations
taatccagtaggggagttgaaatccaaaggcaagatgtactcatgagtgacgtgcttcaagctcctcaacaaggtggagtttgctgcaagccgctgcagctggtgaagaaaaggtccccaatgcgctggcctacaaataaacatccatccaccaactaaaaatgtgaacatcctaatgagagaaaacctaaaaacttaaattcctaagatagaagaacacgtaaggaaggaacaatatatgagtcttgtcctgtatactaaacgcagccaatgaatcatgagtaaccagacaagggaaattcagttatatgtttcaaagttatagcaaagcgaanaagatgaaaggtgtgggttngaatacatgtttcgctgaaccaatgcaaggatccgtggaagtgagttgtgcgtgaaaaagcgagaaata

SEQ ID NO: 28519 - DNA, 395 bp, Glycine max
tgcttatgctgaaaaggattacatatgctggtatgtataacacagtggctgcagttgatccattgcgagaattggttaagaacctgtttgatgtttaccaatagatggttgagtttccatgggatggggcaataattggcatacctaatgtgaaagacagctgtttcatcacacacgccgatgtagcagagacaattttaggcgacaaatgtttgaacatatccatatgttgaccctctttcatagttcctcttttccaaaatttgtaactactcttttacgcgaaagcggtttaccggaaagtgcaccggttcgccaagttaataattaaaatggaatgattcgagtttcgaacacaagaaacctttcatttagcagaggtgtgctcaataatc

SEQ ID NO: 28520 - DNA, 405 bp, Glycine max
  unsure (1)..(405): unsure at all n locations
tcatgatgaattaagattgattcaaagaagttttgatgttaacaaaggtgatgacaaaaagctcaaatgtcaagaacacatcatgataacaaagatgatgatctcaagaatcaaagaatgagttcaagatgtttaagattgaatcaagaatcaagattcaaggatcaagcttccaagaatcaagatcaagattcaagaatcaagagaagaatttatcaagataagtatgaaaaagtttttttaaaaactaagtagcacatggatttttctcacaacctgtttaccaaagagtttttactctctggtaatcgattaccagattggtgtaatcgattaccagtagtaaaatggatttgaaaaagttttcaactgaattacaancgttcaattgatttcaaaaagatg

SEQ ID NO: 28521 - DNA, 299 bp, Glycine max
gatctctaagcgaccgcagctgcagctgtccacgagtcgttggtcttctcttattagcgcgttcagctcgctaagccatatttacttactctagcttagcgaacctctataagctgtatcgttcaaatagcctttaaaacacagaagttgacctaaactaaggagagaagtcgaaaaacatagtcaagggagaagctcgagcgacagaaaccgagccaccatgagagtttatgttagagaaatgagattatggttccagatgtagaatgagacatcttcaacccttcttagccaattac

SEQ ID NO: 28522 - DNA, 405 bp, Glycine max
tctctccaagtagcatgtagacttcctacctatgctttgtcttgaaatatactgaagcacgcctttcatatttcaacataactgaaaatgatataaccttttaaagcacatcaattgacttttcattcttacctcttttttgcctctttaaaactgtcaaaactacagattgttacaataaacacatgtaaggtttttttgacaactattttccaaaacagcttttgccatagggtaattcatgttcagatccagatcgagtaatacaatatatataggagttcacacatgttggaattagttggtcaaatagaagggtaatagtaaaacaatccaaatctagctattgttgttatatgaattaacataagaagtttgtatctaaaaaactacctatttgaaggc

SEQ ID NO: 28523 - DNA, 417 bp, Glycine max
taagaaatctatatatggtttaaaacaagcctttcgttattggtgccttaagtttcatgggataatttcttcatttggttttgatgaaaaccccatggatcaatacatataccacagggtcagtgggagtaaaatatgttttcttgttttatatgtagatgatattttacttacagccaatgaccggggtttgctacatgaggtgaaataatttctttctaagaattttgacatgaaggatatgggtgatgcatcttatgtcattggcattaagattcataaagatagacttcaaggtattttatgtctatcacaggaagcctatattaataaaattatagagagatttcagatgacagattgttcaccaagtgtcgctctcattgtgaagggtgataggtttaatctgaatcaata

SEQ ID NO: 28524 - DNA, 382 bp, Glycine max
  unsure (1)..(382): unsure at all n locations
agctcaacacaaggcatgcgaagagggtggattttctanagcaattcccttatgttatcaaacataatatgggaaatggtaatattgcatccgatgctctttctcggcgccatgcattactttctatgctcgaaacaaaattgattggtcttgaatgttcgaaaagcatgtatgaaaatgatgaaactcttggagaaatttttaaaaattgcgaaaaactctcagaaaactggttctttatacatgaatgctttcttttaaaaaaaacaaactgtgcgtgcctaaatgttctactagaaatatgcttgtttgcgaagcacttgaaggaggtctaatggggcattttggtgttcacaagactctataaacatttcaagaacac

SEQ ID NO: 28525 - DNA, 407 bp, Glycine max
tgtaggattatggggtacccatcacatgtggtactattggcggtctggcgatggtgcacaacaagttttccacatccacaaagcgcgcataaacccaccatcccctgttgcccacctccaactgagctcacgtactcccacgtagcccatattctcttttctctcaacaccgggtccccatcaatcctcccaagctttcccaacatcaaagtaaaacgacattcaaacagcacaagctatcacagccaagcaaaacagagcataggcagaaaactctgccaaaacaccaaccaaatcacagcttttctcacttaaagactccaataacaattccttcgtcccgttcattaacacgtggatcgactcgaaagatttactggaaagtcttagtacataagcctacattt

SEQ ID NO: 28526 - DNA, 239 bp, Glycine max
caaccagagattttatatttgagtgcctcactaatatgctctacagatgattatgcatgaaattctaatctccatagcataagatgcatggatatgaattaggcattctttctttcttgtacatcttaagtcactggccaaaaagctatcccaatgtatattggtttaccatctgcaagcccattgagccaaacactcgatattttgtatgaacactaacctaggatatattctcccac

SEQ ID NO: 28527 - DNA, 118 bp, Glycine max
tccatggtggaaaagtaccattgaaggacccacacgcatcttaaaaataaactcaccttctagagaagccatccagagaagcattcttgagaagcgagagcttggcttcacaccccta

SEQ ID NO: 28528 - DNA, 413 bp, Glycine max
  unsure (1)..(413): unsure at all n locations
actacgcttaccttcacaaacacataaacacattactccattaattcatcacacggtactctatttgaaaatggatcttttactctgtgcctgcaaggactgctgacccttccacctgatagttcatcgcatcaaatagacaaaatatatcataagatataagtctcatagttcataaatagagagagccacacagtcaaaataagcaaactaaccatgaatgcaaaaacaaatattgaaataaataataccactattatgtgtagtgcagcttttcaacttttgtacctaactgaaggagactngtcaatcacttgagagcctgtagcagatgcaatactgtaattaatgaaacttcattgcgagaactgtggtaaacctatagtgacagacaattagtcattaatatacgc

SEQ ID NO: 28529 - DNA, 423 bp, Glycine max
ctgcggcatgcaagctagcatgtgaaatcgatatactctttattttgtacgcaacactccgaatagttcacactagaataagttggcatggtcaaaagagtcttctatgtctattatatctcgatacgagtcctcgaactatagagaatcaacattgctgggatcaagaaatcacgaacaaccatactatctatgcaattatggcgaaacaccatactactaacatacccagaattattaagggtcttataataagtatacagcgttcatatcagaagtaagaattcaatagttaatatggtggtattaaagaatcacaaactttagctacttcattcacgactgcacacaaaataaagtgagtgaagtagtcatgcgcttacacatttaagaaagacatactctatctcagacatatatatg

SEQ ID NO: 28530 - DNA, 405 bp, Glycine max
  unsure (1)..(405): unsure at all n locations
ntactatgtaagatactctagtctcatattacatatgttttaagattgagaacaaacttccattataccattagtgccttgaccaataatattggaggtgtgtttttttcattataccactattattaaaaaaatatgcaactacctcgttgtaattaaattataattcttatataaagaaatacttaaaaggtggaattagttaaaatgttcttttagaattaaatggatgtacaataattaaccatataatattttcaaaaacattaacttttttctttcatttctcttcattacaatttacataaactatcttatcacgcgctttgctttttcttctttccatttctgtttttgtttacaaatttatatagaaaaggtatataattcaaccgtgttttgact

SEQ ID NO: 28531 - DNA, 433 bp, Glycine max
acggacactatgaaactaagcttgattcttaagaatgtccttatttatattatacacattgttttgctcatcatttacaacttgctcttgttgcttctgctaaagtagttgatgtacattttttttttcaaaacttgaatatgattgtaaatgttatgtgttcttgtaaacgcaatgatgagttacaagtttcttatgtaactaaaattgctcatttggttgcaaatgtggatattgagactagaaggagagctaatcaaattggcacactatagagacctagagatagtagatgaagttcttatttctattcaatttgtagtcttttacgcatgtataactatttcagttcttgaagatttagctgttaaaggatctacttttgctcaataaggtgatgctactatgcctcgaaagaattgatttcatttga

SEQ ID NO: 28532 - DNA, 408 bp, Glycine max
  unsure (1)..(408): unsure at all n locations
ttgaagcgacccgagtgacacctaactgttatgttatgtttgcatggcattgtaacttgaaatgaatattnttacaacaatttcattattttcaacatgacattcacaaagatactgatcttatatagtaaattcaatgttactgatcttttcttgtattgttctatgtcttatagacgatactggctgagttaataggtcctgtatgatatgatttgataataagagttataaataaataaaaatatcaaataagtgtttataatatagtatttttatataattgctttttattctttgagaaattgattttaaactttatatttaataatcaacttctgccccttaaacttaagtctctaaattaattgttgacatgcataatgtgagcatgatgtcatgagcttt

SEQ ID NO: 28533 - DNA, 411 bp, Glycine max
  unsure (1)..(411): unsure at all n locations
actaagctacacagaatcggatgtatattctgtgagcatattttactactctaactggaagaacccctttggtgctagttagagatatgaaatgtgcattggaaaaggaaaattttaaagcaatcttggacttttcatctggtgaatggccgctntttcaaaccgaacagctggcatatttagcattgaggtgttgtgaaaagacttggttgaaccggccagaccttgtgtcagaaatctggagtgttcttgaaccattcaaagctacttgcattgacacgtcatcacatttgatttctaagaagcttcgtcgtgttccttcccattntgtgtgccccattgtccaggtgaagatcttaatttttcacattcattctttttaaaaaaactggtctttattgtatggaaaat

SEQ ID NO: 28534 - DNA, 358 bp, Glycine max
tgcattcatgccatgtgccatggagatcagcaacactctgttgctttatatgctcttaatctgaatcatatcattatgttggggctcacagaaaatattacgaagatgttatcaactattaatagcaatgtgttagtaatcaatgtatggctttattaggaccgatatattctaaataatcaccattccaaaattttaatgatgtttcttgagatagagaattatctggcctgttatgtgtgagcaaggactgtgataagatgcttatttttaagttgacatattttgtggctgataagtacggttgcattcgtgtgattagtgcaacagaaatgagggaacttaaacaaatcttaac

SEQ ID NO: 28535 - DNA, 272 bp, Glycine max
ctctggttttatcttggtatttccacactcattcgaagaggactagtaatgaatatgaccggttgaaactctgttctacactgatggaacaaggttatgacacaaacgatcggtcaaaacttattctaacagtgattaaaccagattcaacacatatgaccggtttaaattcatcttaacagtgattaagtgagaatacggcacaattaatcgggcgaactcactttaaaaagataagatattcatggagaagaatgagacgaaacatgtaa

SEQ ID NO: 28536 - DNA, 248 bp, Glycine max
ctcacacccgacgcaaaaccatgctcactcttgatgagaaacaatcttgagaagacaagaacttagctgcacacacccatctaaaaactaaacacagctgcttgagaagctttcttgagaagcgatggttgaaagctagagcttagctacacacctctatgatagctaagctcacgcccatgacaaaacactcatgataatacaaaaaaaatcctactacagatgctactcatgatgccgtgaaatac

SEQ ID NO: 28537 - DNA, 443 bp, Glycine max
  unsure (1)..(443): unsure at all n locations
agcttgngcctctggagatacctcaaggcactctcttgggacaggtgaaatctgaaataatgcttgatggcaattgtcactgttggtggtcttaaataaagaatgaataaattacactagttaattctaaggttttgtgaaattactttttatttttacttttttaacattaacattaaccttctttatagactgctcttgggtttgtaaaaaggaactatagccaccaaattttgcacctgaaaacaaagactgctctttcatttcttagtacaaggttcaacttttattattcttgtcatcttctaattttgtataagattagtagattctaacctacccagatgaaaaaatataaatgcacattgacatagcatcaacactctaagaagcatgtagaagcttaacttgcatgaatgccattttgcacaagaaaaacaaac

SEQ ID NO: 28538 - DNA, 417 bp, Glycine max
  unsure (1)..(417): unsure at all n locations
ctcagcttttatccaggctcatcttggtggtgaagctctnttttccatggcttattccttaatggatggcgcctcctctcacctcttctcctttgtcttccgctgcatctccatggtgaaaaatcaccattgaaggacctcattgaagctcaaagatccagcctccatagaagctccacaagcaagcttccatcaaaatggctcgaagcggcttcctacaccaatgtcacgaggagtgtagtggtcagattcatcaagagggaactgatttgtcggtacggactccctaggaagatcattaccgacaatggtaccaatctgaataacaagatgatgtaggaaatgtgcgcggatttcaaaatccagcatcacaattccacgccctatcgaccaaagatgaacagagctgtggaagca

SEQ ID NO: 28539 - DNA, 391 bp, Glycine max
agcttccttaagaagattcctaaagaagctatagtctatctacacatacctctctaatagctaagctcaccttcttgagatgagaagctagaacttagcttcacaccccctataatagttaagctcaccctcatgacaaaacaacatgaaaatacaaaagaaagtccttactacaaagactacttcaaatgccccgaagaacatggctaaaaccctatactactagaatggccaaaatacaaggcccaaacgaaggaagaacctattctaatatttacaaagagtagtggactcatacttagcccatgggctcgaaatctaccctaaggcttatgagaaccctatggcctacccttggatctctatcccaaactactaggaggcttctacc

SEQ ID NO: 28540 - DNA, 407 bp, Glycine max
tatccaaacggatcctaatagtctcctaatcatcatatctttgaagttaaaatatattagcattctttgtaaaaaaaaaaaaaaactgacattataatgtaataattttttttaccctatcatgttaatcatgaattattatatataataatattattgactttttaataatcattttaatatatatatatatatatatatatatataatgatttctaattaattaataatataaaaaaaattatactgaaattatattacaattaaactctaaaaatatgcaagatggtacttgtgtcatattgaattccactacttattaattatagtcttatgtaattttgttaagttatgtattcactaaataaatgtatatagtaaaggtacctttgctacgattatatgcc

SEQ ID NO: 28541 - DNA, 417 bp, Glycine max
  unsure (1)..(417): unsure at all n locations
ggcattgggtcatgatcggatttagcaaaaattgctcttgtttaattcggattcaaaatattaagttgaagtcctacattttgagttgggccaaccaacctagctagctaaacccattttgccacctcttatttgaccaaactattttagacgtggtaacaaatagtaagtcggcatggcaatgtatgatttattacctcatgatttatatataaatagataaactaaaatggttacgttttatgtgaatgttttttcttatttttcaatagaatcttctccatctgagtatcctcagcatagtctcgtttggtgtcaattctttaacacaagtgaacataacgaatataataaactcttgtagactntgataaaatcaatgtattggtttgggatggttatcaactaattagacat

SEQ ID NO: 28542 - DNA, 343 bp, Glycine max
  unsure (1)..(343): unsure at all n locations
atccttaagcaccgcggctgcaactagacaattanaatctttgtccttttgtttattcttatatcttgcgtaccttctctatgttcaggttatgcttcagtttacgcttcttgcatttgggggcactacatctcttaagtgtagggaggggttttcattgcgcacagtttgtaccaccccatgacttgtattattgtggtgcttgagtattcatgtgtcaatgtaattggtttcattctatgatgtgttttatttaattcaagagatttgttttaaagagccccataaaaaatgtgtgttttggacttgctactagctgatcggtgttttccttgggtttttg

SEQ ID NO: 28543 - DNA, 420 bp, Glycine max
  unsure (1)..(420): unsure at all n locations
tgtaatcgattaaaccgatacaagacataactctacatgcttaaaataacttgtgtaatcaatttttataaggttgtaatcaattaaaatggagagttttgccttctgaagaaattttctaactttagaaattntctccttactcacacatgaagatgcatgatgcatatatgatatgatagagactaatatgcaatatacaatacaacaatcaatacaaatgccactcaagagagtttggcatgtaaaagacaaaacatcttcaagctgttcttcaagcttcaaggctaagtctccatgttgctccccctatctctaatagtttctttgaggaaatcatgatttctatgctntctcgttgttagtttgagcctttcttaatatctcttgtgatttggataccattattgggattttttg

SEQ ID NO: 28544 - DNA, 164 bp, Glycine max
ctttttgatgatgacaacttctgacctcaagaaacacacacacactttacctctaagcgatcactcttatcaatgctccccctctgttgaagaagggacgcttcatctgaaattaaaccgattacatatgggcgtccttgaacaatccctacttctcttcccct

SEQ ID NO: 28545 - DNA, 279 bp, Glycine max
ctggtgtatattttagtgcaccgacattatggtaaatcttagtctccttatgtgactaattattgtatagaaatcatttcccacatctagtatagttccccaatctatggttatcttggagtaaatcttgttgtatgggtagagctgtctctagaacatttgcactggattgaatgaagaaatctatgcattatcaagtgagagaaatgctaagttgtgaattgcaaaaagtagcagttgggctattcacatattcacccctgagtgcagattcatcgc

SEQ ID NO: 28546 - DNA, 406 bp, Glycine max
  unsure (1)..(406): unsure at all n locations
gggatgtttcttgtaggggtatcctcatgttaaaacttctactcatgcccttaaaatcattgaagacatgtgctccaacccctacaacaacttatgggataggagaatcatgaagaggggcatcaaccaagtggagaaggataaatcccaaactgagttggaaaaacatatgcatgctttgagattaatgattgagacactcctaagagcctaagctcaagtcctcatcactacatctaaaatagcaataaacaccctataatggggggttgaataatgtgtatatcaaagatataaactgtngcaatataaaggtggatatagatagcaatatatgtgtgtgtgtgtggcaagtcgtccactaaagatacaacttatatttaatgaagatcaatatagtcgtcta

SEQ ID NO: 28547 - DNA, 401 bp, Glycine max
  unsure (1)..(401): unsure at all n locations
ctaagctgaagctaaggaaatgctngtataagttttggctnttatatgcccaactcccttgagtggcatttatattggttattatcttggatgttgcatcttagtacatttgatatctgtattgcatcatgcatcatcatggctagtggtaagaaaagtttctaagttagaaaaatttctttagaggaaaaaactctatttttattgattacaacctcatcataatcaattacaacaagctatctcataatcgattacactgttgtttgagacaatgacggatgtttttaggattctctactctaatcgattaccaagtggattaatcaattacttctctctcgtttagttgttcggaagtgaacaagaacactttaatcgattacttagagcatctaatc

SEQ ID NO: 28548 - DNA, 412 bp, Glycine max
  unsure (1)..(412): unsure at all n locations
tcacctcttctcctttatcttctgtttcatctccatggtggaatatcaccactgaaggacctcattgaagctcaaagatccatcctccatagaagcttcacaagcaagcttccatcaagtggtatcagagcacaagagcttcaagtaagtgctccttaaacctccattaacctccattggtgtttcttcatttttctccatgtatttcctcacatgtcttgtgtttaatgttgttaacatgattctttagaatttccactgattaaacttgctatggaagctagatttgattttctatggttcaaatttcttgttcttattcttgaaccatgaattgtgttgagtntaggttcctttgaagtttgtggctgaaacctaaaccgtaaaattattacaaaaacattaatgtaga

SEQ ID NO: 28549 - DNA, 431 bp, Glycine max
  unsure (1)..(431): unsure at all n locations
tggttatgaataatnaacncaacccccctcatgaataattctgaggccacacgaaccaacatgcatcaaatgagaaaaaagatctgtagagccaccaataacatgccaaggcaaggaaacagacgaagaaagagacccgagcacagaccaagaagccttccgtctgggctcccgggacaaccatacaaaccaggaagacaccaaaatcaattacactcacacgcaacttacaccttaagcaaacccaccgaagaaatgagaatacgacaagcaccataatccttccaaagcattacacacccttcgacctggccactatgccaatgacaaagcaataatcagaacccaaaacgntctctagtcaccacactaaaatgaaacggaccacggttcaaacggaaacaaaacattcgagaagcgaccctggacag

SEQ ID NO: 28550 - DNA, 419 bp, Glycine max
  unsure (1)..(419): unsure at all n locations
tgccaatgctctattggctaatgagtcggtccatcctctcgaattccaatcgaatcatgagtcatcacataaataactccagcttcacacagtgcagaaatccatatggcaactctcacgtagtcagtgaagacaaagggcatttagattttgctgaaacaaatttcttgtagcatctgcagggctttttggagtgtatgtatgaaagctgaaatttaattagaagggtagtcaataatccagaaaaaatgatggaagtcaagttttatttatcttaaaactttgaaggctatacatgcatgaagcaaaaagatggatgatgagtaaagatgcaatgtacttaatatgaattntaattgtaattaggaaagttaatgaatataacaaaccatggaaatgaatcaccatcattcagtaaa

SEQ ID NO: 28551 - DNA, 320 bp, Glycine max
  unsure (1)..(320): unsure at all n locations
agctagtctcagcgtatatgcgagacagagacttacttattcgccatcgncagcaagtaccaagaagaactaaatctagccacagcccatgagcacaaagtggtggacgagtatgcccgagtgttcgctgaaaaataggctagaggaagggtgatcaactcgttacatcaagaggcaacagtgtggatggaccgatttgctcttactttgaacgggagtcaagaacttccccgattgctagccaatgcttatgcaatggtggacacctacttcgccctcgaagagatgcacagacttctcggatattggcctcatatgat

SEQ ID NO: 28552 - DNA, 425 bp, Glycine max
tgaggtggattgcaatggagaaggtgttggttttgctgaggctttcatggccagagttctagtgtattattccccctctcataatacaggtcacagattaattaattccttcaacttttggaatttctagttcatgaaccgaaaatcctatgaccacagtttataaaaaagaagaaaaaaacacgtctaattataattattatattcaattataatttatttatttattaaatatgatcataattatgaaaatatttaaattatgacctactgggtttctgttaatataacagagtaggcatcaagtatttaatccaagttttatgggctggtgggtcaacgcacaaagcttgtgttataggaagcttatggtgtatttaatccaagtcagaaaataaaaaatattaatttattttcaacagtat

SEQ ID NO: 28553 - DNA, 597 bp, Glycine max
  unsure (1)..(597): unsure at all n locations
gtgtgacattcactctcatcacaatgtgattatttctcttanttntnattcatgttnngcnnntcagntnnctctctncagtgatttgtgaccatcgtagtaccgccgacgctctagagaaaacacgcgcgcacgcaagctntatatgaatcacacgcggatgagggattttattaaactgattcgtgatcgttaagataacaaacgttattacgtatattaatacacatcntacgcaatacatcctcataaacatcgatctgttaatagacttaactattagctgtaccttatacctctttatgcaaagtaacacattgaacttctaagaagacgcatccatttaagattttaaaggatctataacacattgagtataataatgataaggctaaactgggataatatctcttcctataagctaaatcgtgcacatttgggttgtttatacgtaattcaatagacatattccttgacatgacacagctgcagcatagattaaataatggggaaaaaccctacacagagtggacttacgatgttttttcaaaataaaaatagaatcgacccagatcgttttttattggggaaactatc

SEQ ID NO: 28554 - DNA, 410 bp, Glycine max
  unsure (1)..(410): unsure at all n locations
atactcagcttatgatgaatcanagttgattcagaggtgttntgatgataactatgatgataacaaaagatgatgacaaaggtgatgacaaaaagctcaaagatcaatcaaagaacaactcaagtgaatcaagaacaattcaagagttcaagaaaagaatcaagaagaattcaagactcaagaagaaagcctagaatcaagaatcaagattcaaggttcaagatctcaagaatcaagatcaagattcaagactcaagattcaagaatgaagaanagactcaatcaagataagtattaaaaagtttttcaaaactttgaacagcacatgatttttctcaaaacatgtttaccaaagagtttttactctctggtaatcgattaccagattggtgtaatcgattaccagtagc

SEQ ID NO: 28555 - DNA, 592 bp, Glycine max
  unsure (1)..(592): unsure at all n locations
tccatcactctcattntncactttgtngctatccatnntgtggtttatcatacatntngagaaccgngaanngnnnacagtgattgcccgcatagncngccccgcgatcctatagagtccacccgcangcangcacacntagtgcataggagcaatacgcttcatctttacggngacggctggaaactgctcatctgcttgaatcgtgccttagtatatacacacacaacatggctaggctatctgtgagtgagaacctgactctctcttctcatgcacacgctctctctctctctgcctctgctatatatatatatatccacacatatccttcacctacatacagaacatccatatatcattataccgccccacgagagccatacactctcacccacagcagataattctccctccctcaaacatctcgtccgctcaccgatcttttgaacacaacccaactcctcatctgacgcaccatattccgcgattcttccgacaccaacactgcgccatgtccgacgcactcccatccacacacggcctcacgctgcgaccacaccacatgcctagctgcgtgcttcccaccccg

SEQ ID NO: 28556 - DNA, 553 bp, Glycine max
  unsure (1)..(553): unsure at all n locations
ccctctcagctcacctccggctccccanatgntcctgtctcataacannttattcttctgcgccnnnnaaacanaannnnaactggtttgaaccttgcantttgagaccntcgaanancagcgacactatagnaaactcaagcccatagnaancgagaacataggtctctttgatacaatgattgtatttatttcagaatctctactttaatcgattatcacgtgatataatcaatgtacttctctgtcaaaagagtttcaaaagtgagcaagaatactccaatcgaatacatcaggaatctaatcgattacatggttcttgaaagttttcaattcttgggatgaacaccttaatcgattgatgaaatggtaacataatcaattacttcttcgaaacaaacgattacatcgtatatttaatggattacagggggttataactagtttctctataaatagccaccttgagttgctactgctaacagggctaacaacctttcttctgatgagctagattaagagngatattagtaaagaacgaagagaggaatag

SEQ ID NO: 28557 - DNA, 446 bp, Glycine max
ttaagcaccgcagctgcagctctcatccacagcattccatctgtgttcttattagtaaatctgatgcacttgccacaattactaatgattccaaattatcatgattcctcactagttcagatatcaattttacaatccgctgattgattctccacaacttctgacctagattgtcatctttggcaatccatggctgcaattccttctcggcctgacaagcaacaagtcatgggatgaaaaatgaaatattttaaaaaaatctacaaaatggaagctgatttggaacacaggttagatgagctcttctgcataagatatttaaactttctatacattaaaagctatgtctcatgtgggaatataatatggtaattcaaaaattctgtagcctcgcgcgataattcctaacaattcttgactaacaaaacacgtggcctacccatatt

SEQ ID NO: 28558 - DNA, 414 bp, Glycine max
cttcttgaagaaccctgttctgcatcgaagcattctcagttttcaatgaagaaggatgatacatgtttcttccttcaacaagagaccgctcattacaatgaaaaagttgaagttgagttgcatccattacccggaaaccaattgtcttctggcgtgtcccatgatgttctgagattcttgtctaactcaacaagagtcttggcttccactaaagggttgattctttgtaatcacgccacgagccacacaccaattgaactcttcatttgtaacccatcaacaaaaacttggttacccattcccaccccgaaggaagttcataaaagatatgatgctgctgatcccacaatgctgttgctagaatcttcctacgatggttgtgatgatgattacatggtatttcaccttgaactt

SEQ ID NO: 28559 - DNA, 305 bp, Glycine max
  unsure (1)..(305): unsure at all n locations
agcttgtagaatggctagacatgatacatgttatggcttnggttggttcaaggataaaatggatgccccacattatttccatgacacatatgctaaaaatgatgatttggaaactttatgcaaaactggtcatgcatgcgcctatgcggacgctcaaatgcaaactttatggtcatgtgaagcttaggctcacgatatcatttctctattttaaaataaccccaagattccacaatattgttttttattgatatgtgcattcctccaagtacacttttgggcgtccggtgaaaatttcacagcat

SEQ ID NO: 28560 - DNA, 416 bp, Glycine max
tgtttacacgcggagatatacgtcatcttccgtactcacaagatctgtcatactcacatttgagtcacgctgaccggcggaaatacccgagtggttagccgtataaacattcttcttgctatctgtaagacgaaaagcctgatagcatgcgaagactgacatcgtcttctgcgcccttcgtcaatcgcggccgacaagcccattgacacgcggagatttacgtcatcttcggcgctcacaagatctgtcatactgacatttgagtcacgctgacgggcggagatacccgagtggttatccgtataaacattcttttttgctgtctggtagacgaaaagcctgatagcatgcgaagactgacatcgtcttctgcgcacttcgtcaatcgcggccgacaagcccgttgacacgcggag

SEQ ID NO: 28561 - DNA, 402 bp, Glycine max
agcttcaagggaaagagagagaccaatcacgagcttattgtatggtcttaaaagacgagttagctgcttgcttatagtccaagagaagcttgtcttaacgtttatgctaaacagagaccaacatgttagccattgtcagcaagtaccaagaagaactaaatttagccacggcccacgagcataaagtggtggacaagtatgcccaagtgtacatggaaaacgaggctagaggaagggtgatcgacgcgttacatcaagaggctactatgtggatggaccgatttgctcttactttgaacgggagtcgagaacttcctcgattgctagccaaggcctaagcaatggcggacacctactccgcccctcgaggagatccacggacttctcatctattgtcaacat

SEQ ID NO: 28562 - DNA, 313 bp, Glycine max
  unsure (1)..(313): unsure at all n locations
gcttgcttgatcttaatggagaatgaatatataaaaagctccgtgagagagggagagaaaaggcttctgaanttctgctttggctgagtgacgagagagaaaagctttttggttttaaataaaaagggtttttcctttatccattattttattcaagctctgccacatgtccctatttgattggagcaaaaagggcccactttctctttntgactgtgacccatacttagtcacaaaagtgagaaaaatctgacctttgaaacgctacaatcctgcctcggtttgcgtgccgtttctctgattccattttctc

SEQ ID NO: 28563 - DNA, 379 bp, Glycine max
gcttgagatgaggaagtgttgaagggtgaaactttctgcttttattgttgaccacagagtggtacctggagatatgtcacgggggtcgggagaccttggggacgtcaggtggggtgctattgcccaaaaccaagcttgaccaatcccgacccaacccgggcatagtcggtcagtgagaacctgtgatgtacctaagcaggcgagctcctggcagtcaacagataaaaggaacaaagaccacaaagcaaggaggcttgtggtggctggccagctgtgaaacttggctgatatgtgagatatggtctctggtaatcgattaccaagggtggttaatcgattacaaggcttaataataaagacaggaggctaagatggtctc

SEQ ID NO: 28564 - DNA, 551 bp, Glycine max
  unsure (1)..(551): unsure at all n locations
ntgtactgtcaatttataataatatatttgataatatcctttcncgccncnnnnnttagtgtgctcatggacgaccggaccttaagcaccgcggctgcaactnggngtaaccagagtgactctttttattgttaaccangcggatccgctgaaggctacactatttatacagaggacgcttctcattacatagagacaaatgcggcacacttgatttattctgactaacacaacaccagatatcactcatgttgtgcaacatttaagtcagtttgttgatgaacctacctcaacttatcaacaagctgctctctggattctctgatatatcaaaggagtgccctgctgccagggatctttactttctgctgatagcatcattcatccgaaaggatctagcgattcagacttggctcgtggtattgtcacaccacaccgcaaagatatagtatataaatagcgccggttgtatggtgtcacaatgaactttacggtcatgcctactttctgcgaattttgtttctctgtagctaacaacgactacggtgctc

SEQ ID NO: 28565 - DNA, 343 bp, Glycine max
  unsure (1)..(343): unsure at all n locations
agaatattgagtgaaatctacataggtttagaataatgatgcaacctgcagaggcttaagaagaatactaagaaagtctaaagaggcttaaggagaaaaaatatattgtattttatgcttgtgttagtggaaatcctacagttgtagggactggatgtaacattgttgcccaagatttatgtggtgaaccaatatagtttgtgtgtgttgtcttccttttggttatgcttcttatacatgtgtacgctntatattcattatatttacattgaagattagttaacagttttacactttaacaaagttttttataacattttaacttcaaaaaaacacatcattt

SEQ ID NO: 28566 - DNA, 294 bp, Glycine max
  unsure (1)..(294): unsure at all n locations
agctcgtanaatggctagacatgatacatgttatggnnttggttggttcaaggataaaagggatgccccacattatttccatgacacaaatgcaaaaatgatgatttggaaactctatgcaaaactggtcatgcatgcacctatgtggacactcaagtgtcaaattcttatggttatgtgatgctaggggtcaggatttatcatcttttatttaaatcaacccaacgtatccaaaatatgttctttatcaatatgtgcattcatccgagtccattttggcgactcgggaaaatt

SEQ ID NO: 28567 - DNA, 365 bp, Glycine max
ggccgcccagctcgcccaggcgatgctatgttgcttcctttcataagaacagccttctggaggaatctattggagggcccaagtgggcatgattgctaattgcacccccatttttactagatgcacaccccttctatttttttggtaattcttcttccgtaacgttacgaaacttcacgactttcgtaacgatacttattttccttccgcaagggtatgaatccttacagattatgtatttactctcttttatctttctaagaagttactgaaacttactgattgcgcataaacaccttctttttacttttgccacattacggaattatatggatcgctcaagcctgcattctttagatttctga

SEQ ID NO: 28568 - DNA, 303 bp, Glycine max
tgtgatattattttttaccaaaacaattcaaagttcaagtctaataattcactgtcttgaatattcgtaaaatggaaaatattgtcatttcctcagacaattacttctataacttggactgattgtcgttttatttaaaattaattagtcaaccgtaagataacgatagttttgaagttgactctggttgtttagggatgatgatacatgatgtattaaagactctctagtttccatgcttaatggtgaattggagacgtaaacgttgacagcaacaactctcgtggggtccaatactttctc

SEQ ID NO: 28569 - DNA, 226 bp, Glycine max
gcattctgagagatgcttctgagcctgacgctgagagagatgttcaacatcttccccccagaagtttctgtggctgatggcataagaatgtccaacatcctccgctccaatgctgaagccctccctcacccagtgaagaggaatcaacggaagaagaggatcaagccgcataggagacccctgcaccaatggcaccagaacctgctccaggagacctcattgacct

SEQ ID NO: 28570 - DNA, 380 bp, Glycine max
aggtcaatggtatatggtggcaacccgttgtttgagcttattatgaagacgccgtgcaaagttacccacctattcatctgctgtgaccttgttaaaaaaaataaaaattgtgaagaacagcttctctgccaattaaagtgtgttgtttggagaaaaacaagattaaacaaagttgaaatcaacaaagtgagattcacatttctacactttagttttaaatttttatctcactttaattttttttttcatttctttccactaacagacccttaaaaaattgaaaaaataatgtggacaatttagtcaactcactaacactattataagcaagtgggttttaaattttgaaaagcattacgcaataaaaaaaattaaatgtt

SEQ ID NO: 28571 - DNA, 408 bp, Glycine max
  unsure (1)..(408): unsure at all n locations
cgctaacacatgtcgatcaattctgctcttatgaatgtgacctaagcgcttatgccataatgctcctgagtttgtattatcaattctacgcttagtaccatgcaataggattcaccataggaagctacagtatcaagtaaatatagattatcattaaccaagagtgaaccagttccaacaatatctgaattataagacaacctagaaacacattggtttcaaatgaccacaaataacccaatttgccaaataagagactganaccaaattccgtctaaatgacggtacaacataagtgtctttcatatccaaataaaaactagtacatagaaataatctaaagtgctctatagcttccgcgttcaccgatataccatctncaacatagatccatctttcagaatcaat

SEQ ID NO: 28572 - DNA, 368 bp, Glycine max
ttttctgaaatttttcactggtaatcgattacaggtttttggtaattgattacagttatattttgaagagtcatgacttttcaatttgaatttgaagagtttcattgctggtaattgattacaccttttaaattcaaatttcaaaacccttctaaaagctgttttttcaaaattgtcttctggtaatcgattacacttcctggtaatcgattaccagtgccttgatatgttggaaacaatgtgttttgaggcaaaaattgatcttgagtgaatcttgaagcaaccttgtattaatcttgaagcaatgcttaacctttgaatgtttaacatcatcaaaatcatgtattcatacattcacatttatgctt

SEQ ID NO: 28573 - DNA, 446 bp, Glycine max
ctctgagtcacctgcggcatgcaagcttctacttatgtggcagggcgggcttccttcaccttcttgtctccaacgtgaactatgaccattgttcttccttcccgcgatgcttcttttcatgtccgcctgagtgtgcttatatcctaaaccatacttcccacgatatccttgggtatttatcaagctagttatgccgccgttgtatgttcctaaacccatcccgggttcataaccgttccccaacataactcgggccatcattaccgctgcatcggacagacaaggcttgccaaagagggagtccacggatgatatgctgaccacctcataagactggatagcagtttctgacgattcttctgcggcttccacataaagcatggaggatggtcagcttaccaagatatcttcctcgcctgacacgatgaccaagtgcccctccacta

SEQ ID NO: 28574 - DNA, 365 bp, Glycine max
tgagatgaggaagtgttgaagggtgaaacttcctgcttttattgttgaccacagagtggtacctggagatatgtcgcgggggtcaggagaccttggggacgtcaggtggggtgctattgcccaaaaccaagcttgaccaatcccgacccaacccgggcatagtcggtcagtgagaacatgtgacgtacctaagcaggcgagctcctggcagtcaacagataaaaggaaaacaagaccacagagcaaggaggcttgtggtggctggccagctgtgaattttgtgtaatatgtggattgtggcctctggtaatcgattaccaagggtgggtaatcgattacaaggcttaaaattgaagacagggggc

SEQ ID NO: 28575 - DNA, 378 bp, Glycine max
  unsure (1)..(378): unsure at all n locations
tgcctcanagaggtccaggaaggacaaggcggccgattgttctagttccgctccggagtacgacagtcaccgctttaggagcgctgtacaccagcagcgcttcgaagccatcaagggatggtcgtttctccgggagcgacgcgtccagctcagggacgacgagtatactgattttcaggaggaaataaggcgccggcggtgggcaccactggttactcctatggccaagtttgatccagaaatagtccttgagttttatgccaatgcttggccaacagaggagggcgtgcgtgacatgaggtcctgngttaggggtcagtggatcccgttcgatgtcgacgctatcagccagctcctgngatatccgatggtgttgga

SEQ ID NO: 28576 - DNA, 240 bp, Glycine max
ggagaaacaagcacgactttactctaatttatggatactatataatgaaactcatatttacggtgaaaatcttttatctgaataactcatcccgctttatttcacctcaaaacagaccaaaaattataaatactgcatccttgatttcttttttagtaggaatataattaccttaatttttagataaaaaataattctcttctttacgattggagaatcctcctctttttttattctccc

SEQ ID NO: 28577 - DNA, 298 bp, Glycine max
  unsure (1)..(298): unsure at all n locations
atgtttactctacaacagtttagctagagagcattatattaacctatctctattgntggaggtgttgatgcatgttatgagacaactggcatgaataccgtataaaagttcacttgatctctcgatatgaaataggacacaatcactatgcttgttataaacaaatgtcgtcagcatttaaagagatatgaaattggagcacaattgctatgcttcttataaacagagtgtcttgatattctacaaataaaatctgaaattngattccacggagtaatctttacatgcttcagattat

SEQ ID NO: 28578 - DNA, 154 bp, Glycine max
tattttatatggtggcaacccgtagtttgagcttataatgaagtggcctttcattgctattgtggagaattagagatttctctaaaaactcttcccatataaaaaatatatagacaataattaagggttcttgtaattgatggagctgatgctt

SEQ ID NO: 28579 - DNA, 453 bp, Glycine max
  unsure (1)..(453): unsure at all n locations
atctctgagtcacctgcggcatgcaagcttgaacatatgacatatatgctccagctttgtatgtattgntaaatatgacatataatctattgtatataggggaagatagaaactgtatatcagatccgcatggatctgattgtgattcttattatgtatctggtagtactgtctctagatatatataaatccatcatgtgtgttcttatacacagtctctctaaatcttatagctatatcataattgaaacacttaatagaagtgccagaataacatgtggtgcatggaggtcacctagggctagtggctgccttggatggtggctgcacaacaagatgactggattcttgactcttgatcatgcncactggacatacgcatctaaacataccaacttgtggccagaggataagactaagaaatgtgatactactgatatgatgtatatttac

SEQ ID NO: 28580 - DNA, 358 bp, Glycine max
tgagatgaggaagtgttgaagggtgaaacttcctacttttattgttgaccacagagtggtacctggagatatgtcgcgggggtcaagagaccttggggacgtcaggtggggtgctattgcccaaaaccaagcttgaccaatcccgacccaacccgggcatagtcggtcagtgagaacctgtgatgtacctaagcaggcgagctcctggcagtcaacagataaaaggaacaaagaccacaaagcaagggggcttgtggtggctggccagctgtgaactttgattgatatgtgggttatggcctctagtaatcgattaccaagggtgggtaatcgattacaaggctaaaaaatgaagaca

SEQ ID NO: 28581 - DNA, 368 bp, Glycine max
  unsure (1)..(368): unsure at all n locations
cactataagtttactatatatttaaggcaggtgtatactattattaataatntaatataatagaaatcttctctactatctcttccataaggtcctgatacctgtcactaactattttcacccacctagtgcatggtaaaagggccaatgcagtatcaaacatatntatatatacatacgtacaggtagcattaagattctaataaggaaaaccatatgaattgatnaactggtttggcttcgaattaatcaagaccaatgcattttcgttttaacattgatactaatatagttaaagtgtaatgcttcgtgaccagaaaatagccaattngaaacaccgccggtatcaacaaataatttcaagactc

SEQ ID NO: 28582 - DNA, 361 bp, Glycine max
tagtgcatagtgacttttcgaaaaacatgatagtgcaacgttttgaagtgtcttataagggtatgcactattccattagagaggtggtctaaagcatgtttttgaagacaaaaatccactatgggagctcttcctattgcatttcttccattttctttgtttcatcttcttgttttgagtctcttataaccatgagaggttaacttacccattgttgggggcttagatatcaaaaactatgtgatgtaatgatctttgctatccatttaatgttatttcagtattattgctttctttctatgtttattgttttgtttatggtttgaccacccatttacatgtatcttataaaatttcaatc

SEQ ID NO: 28583 - DNA, 401 bp, Glycine max
  unsure (1)..(401): unsure at all n locations
tgcagctggattcctttagtagggaatctatccttcctaagatggagccaaacccagtcacccttattaagaactagctctnttcttcctctattgcctttagttaaatacaccttgtttggttctctatntggttcttaaccctctcatgcaacttctttacaaactctgacctagattccncttctttatgtataaaagaagtgtctagtgggaggggaatgaggtctaacgagttaggggattgaacccatagacatcctcaaaaggggactgcttggtggttctatgaacccncctgttgtaggcaaattctacatgaggaagatactcatcccaagacttatggtngcctttcagatgaacccttaaaagggtggataaagacctattcactacct

SEQ ID NO: 28584 - DNA, 378 bp, Glycine max
tcagaaccacttcagaatagagcatttgtcattccacgaccacctggtcctacaagatctgttagcatggacttctccaaggcacccctggaatcagcttcatctgttgatccttttcagtttccagcagcaccatctgcagctccgacagtggatttgtttcaatcatctgtttcatctgcagctccatctttcaatgagaatcaacttactcaaacatctcaacttgcatctattgatttttttgccgatttttcagagcagccttctactgtaacctcagatgggaaggcactgggattatctgtccctaaaaacaaaggatgggcaacttttgatatgcctcagagcacctcctctgctgcacaagtggaaatt

SEQ ID NO: 28585 - DNA, 298 bp, Glycine max
ccatggcatgaagcactatctgtggcctcacacgatacgctttgccaattggcaaaaacccatataatatgatctccagcttccggtcttgtactatcactaacatataatcaagtccgaagctataaattgtaatggactaatgtcattttcataaaaaagataccatgtcaatgaacaacatattgcatctaatttattttcgcttatggctgaaccggtgtttgaaaacgaaaatactatggcctgcctatggcgacaatacgaccgactatacggcactaaacaccgaggatta

SEQ ID NO: 28586 - DNA, 245 bp, Glycine max
  unsure (1)..(245): unsure at all n locations
cataacacaccagatgattgtgatgatggatggctcacatcctcacgaatgtaaactcatcactntcaaattaacctttcataactatcacgacatgtagaggagaatcaaggacttcaagtcacataatgtcaaatactgttattttcataacaattacccatttcttgaacatatgctatatatcaaataaaaacatgcatatgtcgtcatgcacacaatattgacccacattattatactaa

SEQ ID NO: 28587 - DNA, 363 bp, Glycine max
ttgagccaaaatcctgactcaccataaaccttgacccaaggtgagaatgtcaatccttaccctcggaagcaaagaaaaaaggagagaaagaaaatttccaatcaaaggaaaaaaggagaggaaaggaaattcccaatcaaagagtgggagaaagcaaaaagaaaagaaagaaaattcccaatcaaagaatgggagaaagaaaaagagaaggagaagaaggaaggaaagctcctgatcaaggatcgaaagaaaacagaagaaatgtgcagaggggatctctggaccagacaatatctaaacaaatacagaattgtcaccaaatgaacaaaagaaagaaaaggaaaccataacctaaaagtggtc

SEQ ID NO: 28588 - DNA, 412 bp, Glycine max
  unsure (1)..(412): unsure at all n locations
atgagctattntatcttaggtttcacttagttattntccagctcattagaagagaactntcatagtaaatgacctgctgaaacgtaatttctgtatgattaaccgatgttatagcacaaacgatcgagtggattttattttaacggtgattaaacgagaatacaacacatacaatcggttgaaattcattttaacattgattaagtgagattacggcttaaacaatcggtcgaaactcgcttaatacanagaaaaagatcgccgatcgtatgagaatgaaaatgaagacatgcaaagcaaggatggacccttaatggtgcatagaatgaattctaagcttcanaataaaacactaagccatcgaagattgaagaacgatgaagaatagtcacaaagttgatcggaaacatta

SEQ ID NO: 28589 - DNA, 377 bp, Glycine max
ttatatagactttagagtttcaatctgttaagagatcccaactagttgttgtctaataatagctttggcgcttgacacgagaccgctactatgcacagagagagagtgtgggggtcacaaacactttctgcagcatatcttcagataagtatagtttgttagtatcacctagtgctcagaactgactttcatcgtatgaattaaaggaaacattaacaacataagacaaaaggaattaagaatgtcaaaacaagacaatttaaatcttcccttttgtgcgctatgacaagttcttactctgtggacattactttcttttgattgtttttagttcttgaggattaagcaactgttccattacttttgtattgtgagcc

SEQ ID NO: 28590 - DNA, 325 bp, Glycine max
  unsure (1)..(325): unsure at all n locations
gtaataatacaataaacctgtaattgattgttacaaagagttataaccactcgagaaaatntctaacttcagaacctttcttcgtactcttacatgataatgcaagatacgcatatgagatgatgacgataaagatgcaacgcaaaatacaacaatcaatacatatgccactctagagagttgagcatggtaaagacagaacttcttcaagctttcaagcctaagtcttcatgttggtcctctatctctaacacttataacactaagcaggctttcttttggctcctttcaatgttatgacttgcatctcatgataggaacttat

SEQ ID NO: 28591 - DNA, 378 bp, Glycine max
ttagcaactctatgcacaaccccatacttctggtgcaaggatgacaatgacctgttacaaaagtggctctcctagtcactgataatggctctaggcacaccaaacttgcaaaaaatgttcgatctcacaaaatccacaacaactttagaatcattagttatggtggccttagcttcaacccacctagaaacataatcaacaacaagcaagatatatgaaaaaccatgagaaataggaaaaagacctataaaatcaacactcgaaaccagcgaggctgacagttgctccaaaatagctttgtcgaccctctccatcatggtcaatagatccttgtcaaaatacttgaacttggtggggtcagactgctattagaacgag

SEQ ID NO: 28592 - DNA, 352 bp, Glycine max
  unsure (1)..(352): unsure at all n locations
cttcctgcttttattcgttgaccacagagtggtacctgtagatatgtcgcggtggtcaagagaccttgtggatgtcaggtggngtgctattgcccaaaaccatgcttgaccaatcccgacccaacccgggcatattcagtcaatgagaacctgtgatgtacctaaacaggcgagctcctgtcagtcaacagataaaatgatataagaccacaaagcaatgaggcttgtgtggtggctggccagctgtgaatcttgtgtgatatatgggntatggcctctggtaatcgaataccaagggtgggtaatcgattacaaggcttaataatgaagacaggaggctaagatggtctct

SEQ ID NO: 28593 - DNA, 366 bp, Glycine max
tgtatgagtactgggaaagattcaagaaattgtgtgcaagctgtcctcaccaccagatttctaagcaactccttcttcaatatttatgtgtgggacttagcaacatggagaggagtatgattgatgctgccagtggtggagcccttggagacatgacccctgctgaagccagaaatttaattgagaagatggcttccaactcctagcaatttattgccacaagtgatgctattgtcattagaggagtgcatgaagtagccacaaattcatcctcatcgggcgaaactaagaagctcgaaggtaaactagatgccttggttaacctggtgacccaactgaccatgaataaaaaatctgcacctgcca

SEQ ID NO: 28594 - DNA, 362 bp, Glycine max
  unsure (1)..(362): unsure at all n locations
gtgtgtgagatctatgaccctcatagtctcgtgttgtgtntagtgtacggttagatnttgcatcaactctggcataggccatatattataacctttgttcaagtaccttgctcctgtcagcttcctacatgtagatatacatttcaatttttccattgcgcttaagaaacaactgcaacatttgcagctgatatttctatcttctctttgcatttttcttacttgaaagacattaacaaaagccagttttttattattttcacancgttgtagtttggtatttggacattttgatgcattaattaattatattatattaacatacaattagaacatgcgagatgaaatctattaacaatttc

SEQ ID NO: 28595 - DNA, 366 bp, Glycine max
tcttagtttcagatgatgcagttgagtttgtagctacctcatgcactcctctaatgactatagcatcatttttggcgctaaactgctgggagttggaagccatcttctcaattaaatttctggcttcggcaggagtcatgtctccaagggctccaccactggcagcatctatcatacttctctccatattactgagtccttcataaaaatattggagaagaagctgctccgaaatctgattgtgagggcaactggcacatatttttttaaatctctcccagtactcatacaggctctctccactgagttgtctaatacctgagatatccttcctgatggctgtggtcctagaagcagggaaatttt

SEQ ID NO: 28596 - DNA, 573 bp, Glycine max
  unsure (1)..(573): unsure at all n locations
tanccatgacgatatngctgaatactgacannanagnnannnganccatgaagngtgnttatgttcaggtaatgatttgtactatttatatacanngacaaaccttccacagcagcgcctntgtctccaatggcgacggagaaccgtctttatgtttgacagaagcctctatcagcatacaaacaccagagctgccgtcgttatccagttgttgtacacggcagcggtggagatagactgttcatcatagttcactagcacaaagcccacctctccttgtactactcattctacctcatctatgtatgcttctctatgttttcgtttacatggttggccatgagaacttgtgtgctgcgtgtgctttggaggtgtgttctcgctagtacgaaattgaaatgatgatactgtttctaaatgtttatattactagtatgaattcaagtttgtctaatattaaataataaatattggtgaagcgtgtcacgactgtacagcaaaattcactggaaatcatagtaaacacaaatttcataagcgagatgcgtatccattcgaaatgatatatccacg

SEQ ID NO: 28597 - DNA, 390 bp, Glycine max
taagctcgcatttggaattgcgaaagccccactctatcattatgattagtacctgacatctcaaacaaacaaatcaaacgtaacaagacaattatagttgctgtttgaatacctcacccactcaagtgtatcacacaattatggcttttctctaatgaaacactcttgccttttaccactctaattccccttgagttcttaggcaattcaagagattatggccacaacaaagaacaattcaccaatatgtgtaaggtaaggctagacaaggaaaaggttaaccaagaaaaaggctaacaatgtttttaggcacaaatgaaggaaataaaattcagaatttatgaattcaagtaacaatccttcatgcaaccaatatattaccttaaagag

SEQ ID NO: 28598 - DNA, 374 bp, Glycine max
cttcctattttcagctgatgaagattattttatggctactacatgcactcctctaatgacaatagcatcatttctggcactcaattgcttggacatagagacagtgtgggggacacaaacactggctgcagcaaaggtcatgtctccaagggctccaccactggcagcatctatcatgcttctctccatgttactgagtccttcataaaaatattggagaacaagctactccgaaatccgatggtgagggcaaccggcacatagctttctgaatctctcccagtattcatataggctctccccactgagttgcctaatgcctaaaatatcctttctgacggctgcggtcctggaagcaacgaaaattttttcta

SEQ ID NO: 28599 - DNA, 421 bp, Glycine max
  unsure (1)..(421): unsure at all n locations
cagaataaacctccatatggattgtggtcgcacccgaacatggatgcaatttaaagtagttcatgataggctacatttagatattcaaggacatcaagctatggttacttcttcatcatggtctgacttggactcttctaatgttatgttagccatcatacataagttagcttcttcgctatcctcatccgacaatgtgtcgtctatgtcttcccaagtactcataagctcattcttatctttagattngataaataataacgagagagattattaatggattagggctcattaataaattctcattcctgaattaattattgctattatataatattcttaatataataaataattcatctaaatattatatataagatataaccatattctgataaaagtatatatatcataaataatt

SEQ ID NO: 28600 - DNA, 380 bp, Glycine max
taactccaataaaaatgatgagtctaagtgatatttataccaggcgcaattattgttttgtggaaccagaaaattttgaagaagcaattaagaaagatgcttgggggaaggcaatgcaagaggaaatagatgcacttgaaaagaacaagacatgagaaactggttgagaagccaaaagacaaagaagttattggagtgaaatgggtctacaaggtgaagcataatccagatggtttcagtccaaaagaacaaagaaaaacttgttgcaaagggctattctcaacagcccagtgttgattatgaaaaaggttgttgcaaacttgttgtccacatttgtaagagaatgtaatattttataataaatcatcaattaagtccat

SEQ ID NO: 28601 - DNA, 407 bp, Glycine max
  unsure (1)..(407): unsure at all n locations
ctagtaccgctccggagtacgacagtcaccgctttatgagtgctgtacaccagcagcgcttcgaggccatcaagggatggtcgtttcttcgggagcgacgcgtccagctcagggacgacgagtatactgatttccaggaggaaattgggcgccggcggtggacatcactggttactcccatggccaagttcgatccagaaatagtccttgagtttatgccaatgcttggaataattgtttccgtgaagaanatctaagtcgaggcgcttccgatacgtttccgtaacgttttccgtgaagaatttagcaaggtntcaaccgttcttcgacgttcttcattcgttctttcatcgtcttcgatcttcaacgggtaagtacctacgaacaagcttttcgatcattctatg

SEQ ID NO: 28602 - DNA, 361 bp, Glycine max
gactagggatttatctaccacctcttaaccaggaggctgtgtcataaatacagattcctcaaaaaacccattaagaaaagcattgttgacatcaagctgaaataactcccatccttgagaaagagcaagagtgagaacaacatgaattgtgacaggcttgaccactggagaaaatgtctcatgaaagtcaaaaccatgaacctgatgaaaacccttagcaaccagcttggctttgaacttgttgatagaaccatcagcattttcttttactccgaaaacccctttcacccaatagcttgtctattagaaggtaggggaactaagtcccaagttctgtttttcagtaaagcgtcatactcct

SEQ ID NO: 28603 - DNA, 456 bp, Glycine max
  unsure (1)..(456): unsure at all n locations
cttcactacatcaagaatcaccttgttgagtcttctctgnggctgtcttactgggttagctccatcctctanatatattcgatgcatacatgtggatgggctaataccangaatgtccgccagggtccagcctatagccttcttattcttcttgagaacagacaacaacttctcctcttgctcatcagcgagggaggcagatataatcactggaaaacttntgctatcatccaagtaagcgtatttcaaatttgatggcagaggcttcaattctggtgtggtcggctggatagtggtagaaggagatggtttctcaccctgtacctcatatagaaagtcagaggtatgtgtacttccctaaatatggttagtcctatctgactctatnaaatcaatctcaagaggtaaaacaccaccaccagacatgcaatcaatatcacttctagaatcactctc

SEQ ID NO: 28604 - DNA, 366 bp, Glycine max
tgtaggattatggggtacccattacatgtggtactaaggggcggtcgggcgatggtgcaaaacgattctccacatccacaaatcacgtataacccaccatcccctgttgcccacctccaactgagctcacatactcccacgtagcccttatcctcgttcctctcaacgtcgggtccccatcaatcctcccaagcttcaaaaatatccaagtaattcaacattcaatcatcacaaactaacacagccaagaaaacagggcaaaggcagaaaactctgcccaaaacacaacccaacatcacagctttccacattcaattacccagtaacattctctttgttccagttagttaaccgttggatcgactc

SEQ ID NO: 28605 - DNA, 291 bp, Glycine max
  unsure (1)..(291): unsure at all n locations
gcgtctccatatattactgtctctaatcctacatcgtagtaaaaagttattgtcgttagaatgtgctcagagcttctgttctgaatattgagagtctcgatatactacggaacacaatcggacatctcagtaaaaagttattgtcgtttgaatttgctcagagcttctgttcttaattacgagagtctcgatatattacgnggattcattcggacatccaagtaagaagttattgccgtttgaatatgctcaaagcattcgttgtcaattacgagcgtctagatatattac

SEQ ID NO: 28606 - DNA, 354 bp, Glycine max
  unsure (1)..(354): unsure at all n locations
tggactccatttctctagagtatttaactattataaaccactttcgactccttctctgcacagctcttctgctcttgggtcattgagccacatgagaagcaccatgtcaccgccaatgtattttggtttaactcttcacctccatcccacataagtacttcatcaagtctatcaaacgccattaggttcctcagtctacctatccaagctttggttagccatgccttcttattcattgatagtgttagttggatagacgagcgagaggtcatacttgatgcctgcgcatacttcaatgtccaccgtttcaccacatgcatactgtctgctgcaaccacattcngatatgatctg

SEQ ID NO: 28607 - DNA, 213 bp, Glycine max
  unsure (1)..(213): unsure at all n locations
tgatgttgtcaataatcgaccctattacatcaaagacttggacacatgaatgagaaatgaatgaagcttatggcggcanatggtaagctatcaagcctgaagcatgttgatgtttgtatttgtgaacattngtatcttaggacagcaaannaagggtagcttctcaagggcatggaagactcctaaagttgaaaagctagaattggtacacac

SEQ ID NO: 28608 - DNA, 379 bp, Glycine max
taaaactcaagctttgcaagctacgattttttttgttctatccatggcacaagtcttcacataggccattgcctccctcacccaatattatgaccagcctttgaggtgctacacatttggggacttccaactatcacccatggtggaagaattcgaagagatcctaggatgccctctagggggaaggaaaccatacctcttctcaggattctatccgtctttagctagaatttataagatagaccaaatctcgacgcaggaattagaccacagaaagcaagtcgaaaatggggtggttggagtaccgagaaaatgtttggaggcaaaagcaagactcttggcaggtagaggcgaatgggcctcgttcatagacatcctt

SEQ ID NO: 28609 - DNA, 326 bp, Glycine max
  unsure (1)..(326): unsure at all n locations
agctngctgctagagctgacccatcaactgtcctaactctttagagctggtggccctatgttcttgaccttgactngatagaacctccttttaagagaatgcatttgacttgatcccacgtattactaaagtgaacaaaaatcggtgcgaattaatactctgacatctatcatgggtggaatggatgaatgcatgaagaaatgcatataacattgatgcaatttatgaatacaggagaccgagaanatgtcttcttcttagatacaatgtcttgtggtagcaaagtgcccgacgtatgtacttaagaaagtggcacataccctccg

SEQ ID NO: 28610 - DNA, 272 bp, Glycine max
ctgatcctacaggtttagtttcctcaaattttgatttagaagagtacaggagaatgggccgcccgtcagtcaaattaatcaaaacctctttataaagtgaccagattagtagattgagtattcttagtactcattgattatgaaggtaatataatgattacagtcatgatcaacactaatccaattcacttctcatgagttacaaaggcaaattcagtcaacaataaatccataacctcaaatgaataggtaaatccaaaagtaaattcatg

SEQ ID NO: 28611 - DNA, 306 bp, Glycine max
  unsure (1)..(306): unsure at all n locations
aacgctttgctagctggctagcatgaaggaatcctgtttctcttggggcgcgctntatncaccatgggttagggaactgcctatcatcaagtcatatttatactgacattgattaaatgagaatttccattatatatcacttaacataacaaccatctttttcagcaaaaaaaatcaaatacgcatgctttagattcttgttctcatcccctcgataatgataccacgaaacaattttctcatgaccagagaagactaccactcaattgcgatttaacactccgcacaaaagcatgacacgcccct

SEQ ID NO: 28612 - DNA, 380 bp, Glycine max
tcatcagatgttgcatttcggtatcagtttctcttattgaagaacgatatacacttcttgcattgtaaatttgcttgatcatggtgcaactgttggcattgtgctccttcaacgttagcaagatattttttggtttcatcatcgactttgtcatatcagcaataattttgttttcatccttagtcaatcacccagcgtatggatgttcaactaaggacttggccaattcatgattatgaatcccacagatcaacttcaccatccaactttccccttcatgcactggtttcccacgaagcctgaagggacaaccacatttcctactcccagtgtcttttctaacaaattctttattcatacacttgtacagaccactcctt

SEQ ID NO: 28613 - DNA, 345 bp, Glycine max
  unsure (1)..(345): unsure at all n locations
ccgctcctgagtatgacagtcaccgctttatgagcgctgtacaccatcagcgcttcgaggccatcaagggatggtcgtntctccgggagcgacgtgtccagctcaaggatgacgagtatactgatttccaggaggagatagggcgccggcggtggacatcactggttaccctcatggccaagttcgatccagaaatagtccttgagtttatgccaatgcttgaccaacagaggagggcgtgcgtgacattaggtcctgtgtaaagggtcattggatcccgtntgatgccgacactatcggccagctcctgagatatccgttggtgttggaagagggccatgagtg

SEQ ID NO: 28614 - DNA, 369 bp, Glycine max
tgtgtccattggatgaaaagaaaaagtctttatttatagggtgaccaatcaccaaacctggaatcctgctgtcttctcaaaagtagtaatcttatgcacaaacccaaaggctgaaaagacctacataagtgtacaataactttcagaatgatatttaacaacatgaatcttactaattgaacaggaaatgaacaatgtctggtgtcatctatggtataatgtagagaacagggagcattaacaaatatacaatttcaaagataattcagtatacaaaaaattggaagcaggcttaaaggggggtaaaaggagatagtttaactgagtgaattcaattagataattttccttaactgaataactgctaaa

SEQ ID NO: 28615 - DNA, 355 bp, Glycine max
aaaaatcggtaatgattctcgttgacagcaattgaagacagcagaggtgataataattattttataaaagattaaattcgaataatattcgaataagttaactaatcacgtgtgctgaatcagtgaatatgaaaaatgaacccataatagacaaaagactcacaactgaaggattgagatagctgattcatagtatagagatgtggagggggaaatgataacaatactagatatacacttatattttcctgaaagtagggggtgcatgtctacccactctatccaatatagatatgctatgatagagtaacttatatattaggggaaaagaattatatattattattataataat

SEQ ID NO: 28616 - DNA, 372 bp, Glycine max
tcgccaagtatccccattgaaaaacctttattcttattctttcaaagttagtgagaaggctaaacgaaaaattagggaacttagaaaaactaaatccttaattgaaggcgtaggtgacaatcatagtgaattactaaataagattggttgtttacttaaggtcattccagatactccccaaacctcgaaaaatacttccaaaatggtaacaagaagtacctccaaattaattaatgttattaatgaagatagtggccaaaactcagataatgatcagtatcagaaaagaatataaatccaattaattccaaacactggaaaacaccctccaaattatattatcaacgtccgactgcccctgatcttttatta

SEQ ID NO: 28617 - DNA, 172 bp, Glycine max
caccgctgaatcatgtctgcgatcggtttctacctgcttagtcagttgtcatcaatcgttcttcatcttcacccgttagttcttgtttaaggattgaatctgaattatgaccctaaggctcctctatattgtatggcatcttatctcttcttcatcatcggtaccgttttct

SEQ ID NO: 28618 - DNA, 370 bp, Glycine max
tgtttgttagaaagaccgaacatttattctctattgttgtcattttatctaccttgcattttatagcttttagtataatagtttagtttaaattctgtttgaaattatcatttgtacatgttctctcaacaatgcttcgattctaaacttaattcagtctaacattagttccctatgtttgatactcggattcatccattttaattttaaatacttgacaatctggtgcgttttctggtaaacccccattgaaatttcctcgagacataaatgcacaaaaagtaactacaatggggggcgaccagtatagttcatagatagaatttgtgtgctaaaatgtcttttgggttggacctaaatcaggagggaa

SEQ ID NO: 28619 - DNA, 439 bp, Glycine max
  unsure (1)..(439): unsure at all n locations
tgacaaagatgattgaaaanagcccacagaatgatttcatgattaagtcaacaagttcaagatcaagttttatttcaggtttcgtgagaagaaataaagaagattcaagaatcaggagatagttgatttccagattcaagagaagatgaattcaagctgcgagagaagaaatcaagaagacttcgcaagggaagtattgtaaagatttttcataatacacacatagcacagttntgttttcataagagttttctcaaaatttctaagtaccagagttttactctctgnaatcgattaccagttcctgtatcgataccagtgcaatgtggtgtcaaatctttaattgattgcacttccattgattcaaatgggtatcgatacaaatattggtacgattaccgtgatttgacgttgaatcaaatcattgcaagagcatatc

SEQ ID NO: 28620 - DNA, 376 bp, Glycine max
tcctcggggccatttcctgcgattgcaaacatttggaaagttagttttaccaagaaatgctactcttaaaacaaaatggcgtacaacctcctccaataaacacaaatatcaatgtaaatttagagcaaactcatgcacatacttccttacgagtattcactcgcacaagatattcttctaactaagaaaaatgcacccatgcacaatcaaagcaccttcgttacccagatcatttatatgtacttccaaggtgtatttgctacctacatcacatgaacttccttggctaaatttacatgcacgcatactcaaagcatcttggctaccaaaaattgcagacatgcacattctggtatttctaatacctatgcatata

SEQ ID NO: 28621 - DNA, 302 bp, Glycine max
  unsure (1)..(302): unsure at all n locations
taaatctgaattctatcattctattttatatttaaaaatgaagaataaagtgatttcaactgatgtttaaagaaataagaagctcgtcaagttttgagttttctctctctttagagtgtatgctattctgctgtttgcatttctcacctcttgaactcttctgcttcatatattnatttaatgctcactgtattatcttttctcgtgcaaatgcaccggatattgtatctagtatggtcataactcataaaccacatcatatttgaaagcataagatatggttgctgaatacagcatgttaa

SEQ ID NO: 28622 - DNA, 363 bp, Glycine max
tattaacacgatttgtagagagtgtattattattggggatgataagaattaattagtgtgtgtttggtataaaaaaaaatagagagaaaagaagtttaaagttcgggggtctcattgtgtcttattttttcatctaagtaaggagtaataggaggtgtgtgaagcatttctaagagtgtaatctcataatttttgctatgtcattacgataggcttggtgtagccacaaaaggttctcaatatagagttttatggatcaacttaatagtatttggtcgaaaaagatcgggaataaagaaaaaaatgatgataatattttaataaacacaactcctaaaaaaatatgtgaaaaaacttcatcac

SEQ ID NO: 28623 - DNA, 445 bp, Glycine max
  unsure (1)..(445): unsure at all n locations
ctgcagctaacnagacatgctgttctgcatatgaaggttatatgcagggcattctnnttggattatgatggaacagtattgccttccgttgttaaaactccgagtcctgatatcattgatgttctaaatattctttgcagtgaccctaagaacactgtgtttatagtaactggcaggggacaaccacgctgagtgaatggtatgatcagtgtgagactcttggtatagcagctgagcatggttattatctaaagtgagatattcctctcctcaattctgctgataatgataatgcacatcctctatttatattttacaagaatgagaaggaagggaaccatatgagggagaaggaatagatatgtaggttttcatacatcgacgatgcatatatttgcatcatatgtagtggattagttatctatacattctattggtaagttct

SEQ ID NO: 28624 - DNA, 364 bp, Glycine max
  unsure (1)..(364): unsure at all n locations
tgtatcgtgatctttaatttttttggattttttttttnggntatttggaattgagaagtaattaatatgtattttggtatttattctaataaattatatattggtgcatatattaacgaaagttggatctaataggaagattagtgcctcataatatggcaaactaatattcgattttctattgacaaagatgttccatttagtgtctaatagtttctatagaggattgtctttcaaagtgaaaaaaaaaacatgtatattaacacatctttattttactttttttttatctgtaataatcaaactgagatacaagagtttttataacaattcacctatattgttaaatcaaatgagcaagact

SEQ ID NO: 28625 - DNA, 377 bp, Glycine max
tgttgaatctaaaatcaaagatttttattctaaacccaaccgtccattttgcatcatacttctactactcaactttcatccccaccccttcccaagttacaatccctaaaccagccaccccctaacttcccatacctacaatgaaatcaacctaaatgcaagaccataaaacactaagtttattctacaactgcgatgaaaagtatgtgcttggccataggtgtagtgcgaagcattttctcctgttgttggtcgaggatgatgctgattctaaaaccattgacccagcaactcctaacccaccccccttgatgaccagtcagaacctatacatttccatttttccccataagcctttactggatccccttcccctc

SEQ ID NO: 28626 - DNA, 350 bp, Glycine max
ttctagctggcccagggttgtatttgtccaaaggtgacccttctgtcgctctataaagcacagacaaggacgaaagacattgctgtttatgagatgaagacattgtctgctttgacagcgtaaatggctgaagacattgtcgtctttcgaaatataaatgaaggcattgtcatctttcgaaagcataaatgactgaagacattgttgtcttcgaaatgtatatgaaggcattgttgccttttgaaatcataaatggctgaagacattgtcatcttcaaaatgtaaatgaaggcattgtcaccttttggagcataaatgattgaagacattggcgtcttcgaaatgtaaat

SEQ ID NO: 28627 - DNA, 371 bp, Glycine max
  unsure (1)..(371): unsure at all n locations
catattanaaaccaatttgctacaaagtatctataacagaatccaatctatgtgaatagaacaacatatattggtgtgaaagaacagatacatactgcctcactgcctagtatcttatctattacatcccaagcctataattagatgacgaagggtgtgttcgttatattattaacaagactcacatgctagttgaatcatagtaacacgaatggtgtagagaaacttactgagatattgcctagtctcagcttagtcagatatcaatcatattagttaggctaacttagggttcgaaacatgacaacanatacagaccactgaacaatgtgatttcatcattaacagacaataaatacataccttcgatg

SEQ ID NO: 28628 - DNA, 365 bp, Glycine max
gaaactcagcttgggaatacaattatgttccttttttgaggagtgtccaaaaattctctgtttccttattttaccaaagtaaatattatttgtttctatgtatttctaacagctgtgtaccaagtaattacaggatgtaattactaggttcaatccctataatcaagggattttgattttatattgatgattgaattttatcatataaattgacaaggttgagccaacctctcaaacattttagaatcaatttcagttttatttttatagttcagaaacacccatttgcatatgcatataagccagtgaaatttgaaaaagtatgtagcaccaatgtaatgcacagacagatctcaatagttacc

SEQ ID NO: 28629 - DNA, 439 bp, Glycine max
  unsure (1)..(439): unsure at all n locations
agcttncatcactaaccctcaggagactaaggagatagatctcatgttatagaattgttggagaagggctgngtccaagagagcctaagcccatgtgctatgccgatgtagttggtgctccaaaaggatggtacgtggagaatgtgtacagattgcatggccatcaacaacatcacgataaagtataggcaccccattcctagactagatgatttgctngatgagttgcatggtgccaatatctnttcataatatgatcttataagtggctatcaccaaatcaggatgaaatagggtgattgttagtgtttagctctactgagctttaagagattggctaagattntgttaatacataagcacttagacaatgaatgaaagctggagttgctgcacatgatgtccaacgttatgtcaaggaataagatctggctgcaca

SEQ ID NO: 28630 - DNA, 377 bp, Glycine max
tgtgcaaatcaaatcactcccgcattttatctcttcatgcattgtatgttggtctcgtcctttgtcacgggaagccgggaggtccatatcaccttcttaattgtacacatggggcactgcacccccaaatgcacatgtaagaagagataattttccgggctctcgtgtccgtaaaatgcattcatatcatgcatcgcataagcatctcttcacaacatcataatggacatatcctgcatttgtccgttatcatattccagcctcacattttgcatgagtcatggcatcatcatgcatatgcgttcaacaaactttttgatctgcaaaattgcataccatttgttttcatgtttgctcatccttgcgttttcctctac

SEQ ID NO: 28631 - DNA, 371 bp, Glycine max
  unsure (1)..(371): unsure at all n locations
gtggtggtcagcagaggagcataaaccacagagtctagcgacaggtgcagatttttgattcatggtcagttgggttaccaggttaaccaaggcatctagtttgccatgcatagcataagtatgccctagccattcatctctatgagatgttgtcgaagtattgacaatcaagatttctattccttgattatggtgtgaaccaacacatgctttaaggaaaggttatcaagcaaggcaagatggaagaaccagcatgcaaagttgggcagaagaggatcgatgacatcgttctttgctactgcaaccatgatgagctaataattacannatattaagactatgacgtcatgtttattncaattcacttgaca

SEQ ID NO: 28632 - DNA, 378 bp, Glycine max
tgaaggtgcgtacccaccatttttcattttagtttatctggtaatgtgtctactatcattgttatcatttctttctccatcattgagggtgctacctaggctgccaagtctctccacctttgggtgtatactttgaaagatttcatgcccctttttgcacatggtatgtaattgcattctatcccgaaccatattaaaattggactgacactgcctaacgaacgcaaccattagtgatgcaagttccattggagcttgtaggcctaggatcttcttcatcaatggattcctttgcttcttggaagatgaatggcagtggaatggagaaaggaagagagagaggagacgccacttcaaggagaagatgagtctagaaga

SEQ ID NO: 28633 - DNA, 75 bp, Glycine max
taccaagctttagcatattcaacgacatactctttactgggtggtgatagactcacaactatcgaacgctgaaat

SEQ ID NO: 28634 - DNA, 266 bp, Glycine max
  unsure (1)..(266): unsure at all n locations
tcggtcttcaatttcgagcgtctcgacttattnctgttctcaatcagacatccgagtaaaaagttattgtcatttgaatttgctcagagctaaggcattcaagtccgagggtctcgatatattacaggactcaatcagacattcgagtaaaaaacttattgccgcttgaatttgctcagagctttggtattcaatttcgaacttctggatatattacgggtctcaatcagacatccgagtaaaaaagttattgctgtttgaatttg

SEQ ID NO: 28635 - DNA, 267 bp, Glycine max
  unsure (1)..(267): unsure at all n locations
agcgacactatagatactaagctgcacccagctcgcccaggcaagcaaggtggtttcagttggcctggttgctatttgcacccccatttttactaaatacacccatgccttttttttggtgattttttttcgtaaagttacggaaacttacaaatttcgtaacgatacttgttttctttccgtaatgttatggaaccttgcggattacataatcatccnttttttgacttaccgaatgttacagaacctcactaattgtgcaaccat

SEQ ID NO: 28636 - DNA, 271 bp, Glycine max
  unsure (1)..(271): unsure at all n locations
tacactacttcatacagacaattatatatagtatttggtgtgcagagcagcatagcatttagttcaatnggtgtntaatgtctaaatataactgagccgaatgacattgtgtgatccatgaagctgatcttatctagtangataaggcttctgttggtagtggtgatggcgattaatatctaaatctgagtgatatgatgatatccaatgttccttgactgttatcaaatatctttngcagtatataagtcatcatgctgttgtgacagtt

SEQ ID NO: 28637 - DNA, 291 bp, Glycine max
  unsure (1)..(291): unsure at all n locations
aaagattatggccaaaagccccagagaatggtttccagaatgggtccaccattccaaaatccagaaaaggttggtttccagaatccagaaaagaatgatttcaggtcccagagaagaaatcaggagacttcacagggaaggtttgaaagattttcaaaaacaacagccattttgttttcaaagagtttctcaaattttctagttactagagttttattctctggtnatcgataccagtttctgtatcgataccagtggcaagtttgattcaaaagttcaactgaattgcat

SEQ ID NO: 28638 - DNA, 532 bp, Glycine max
  unsure (1)..(532): unsure at all n locations
ttantcctgcgacgtgancntcagtcacagagtcatgcgaggcntgcgatgctgaatgcgtaatagtgtaagtgcttattatatgttctttatgggaccgatctcgatggagcgatccacaaccacacaagcatcgagctagaatgcggaagatctaaatgtgatgttcagtgtacctatgaattattttgcatgatggacaatatttacctagacttagtatgtaagagatagtgttaagtactgcataagccacgcncaaacacttaccttgtgaaataaccatagacatcaagtcgtaagtagatggcatagtgcttaagcttccttgacaattggcttattacatggataacttgatggatagaacccttgccacatgctatagagaaagatactatacgcgatctagaaagtgattcgtgataatcggagaagtcaaggatgagtggcatcgccatggataataaattataaaacagtcggtcaacaagtgtcaggtacaagaaatatttgnctggagtaaatctag

SEQ ID NO: 28639 - DNA, 375 bp, Glycine max
tgaagccattgtctccacaccgtatctatttatgaagttccctaccttgataggagagactgtgactgtcaaattagatcaaaagcaagcacgacaatgctacacaaaaagcttaaaggtggcaccttatcctcccaccaaggagcctaccaaacctcaccccacaacgaatggtaccactcaagtcatgagcatggacgaaggatctccagtccaagccttgactatcttccaagtaagcctggatgatgaattcgatgtagatccgcgtgatgacacttttgacagagtcccaaagcctattgaaagcttgtcaagctacagcttaaatccaatcttgagcaatctatgcaactcagtagggacctcaccaac

SEQ ID NO: 28640 - DNA, 152 bp, Glycine max
agctttaacagtagattgtggatctggacaatcacaccatcagtcacaaggccgcatgccaaagtacagacatttaggtggataccaactgaatcagtcacatcagttaaacttaagccaactgacaatattctgggtttcttcaacaatga

SEQ ID NO: 28641 - DNA, 257 bp, Glycine max
tattgaatgtgatcaatatattcattgataataacttaaaaatgaagatgttgtacatgatatattttgcagtcattcagatgcgatgaaattaaccaatgtctgtaatttgatatttctcatatatagtacctacaaaacaaatagatacaaattgtctttacttgacattgttagtgtgacacctgctggaatagcattttcagctgcatttgcctatttggatgataacgtataaacaatgttgtttaggctct

SEQ ID NO: 28642 - DNA, 73 bp, Glycine max
gcttgagtggtaaccaacatttttcaatgagatcaccggaacggtatactatattgtgacatcttttccccgc

SEQ ID NO: 28643 - DNA, 338 bp, Glycine max
actcggatgtctgattgattcccgccatatatcgagacgctcgaaattgaatgttgaagctctgagccaattcaagcgacaatatctctttactcggatgtctgattgagttctgtgatataacgagacgctcgacattgattgttgaacctctgagcaaagtcaaacgacaataacttctttctcggatgtttgattgagtcctgtcatatatcgagacgctctagattgaatgttgaaactctgagacaattcaaacgacaataactctttactcggatgtctgattgagtcctgtcatatatcgagacgctcagaattgaatgttgaagctctga

SEQ ID NO: 28644 - DNA, 117 bp, Glycine max
  unsure (1)..(117): unsure at all n locations
gacactaagatactaagcttgccagagctcggcttagcgagagnacatgnnttctgatctgcaaaactcgctaagtagccctactcgcgcgctaagccaagctttgtgagttaaaac

SEQ ID NO: 28645 - DNA, 130 bp, Glycine max
  unsure (1)..(130): unsure at all n locations
aaaacaacacccccgcgagcccanccgagccgagacacggacaaaacgcagacggaacaacccaggacaaagaaacgcccaagcacagagaccgaccgcccaaaagagcaacccgcccagaacaagaaaa

SEQ ID NO: 28646 - DNA, 226 bp, Glycine max
  unsure (1)..(226): unsure at all n locations
gctgaaagcaaccagtgcactcagcataatcangttatacacatgtcctaaaatttggggatgagtactaaagtatgcanatgatgtataataggagcttttatcgtagatagactgtgatgatacttagtagtggctagaaaataataaaagaagccatcatacttaagatatatgtcattagaggagtgaggatatggaacagtagaagacagagaataaggtg

SEQ ID NO: 28647 - DNA, 275 bp, Glycine max
ttaggagaaaccattaaaactaaggtagttcctaaacaaaaatcaattgaggaagcttcgccgagtgtccccattgaaaaacctttattcaaacctttcaaagttagtgataaggctaaacgaaaaattaaggaacttagaaaaactaaatccttaattgaaggcgtaggtgacaatcatagcgaattactaaacaagattagtaggttgcttaaggtcattccaaatactctccaagcttcggaaaatacttcccacatggtaacaagacgcac

SEQ ID NO: 28648 - DNA, 326 bp, Glycine max
  unsure (1)..(326): unsure at all n locations
taatgtgtctactatcnattgtcatcgtntgtttgtcattgaggtgccacttgagctgacaggtctctccacctttgggcgtattctatgaaagatctgtgcccctttgtacacgttctattgttgcatcctatcccgaaccatatcanaattgtactgatactgcctaatgaaggcaaccattangtccttccaagagtggactcgagaatgttccatgttagtgtaccaggtaacagctaccccagtaagattntcttggaaggaatgtatcagcagttcctcatctttttcgcatgcncncatcttccgataatacatcttta

SEQ ID NO: 28649 - DNA, 377 bp, Glycine max
tatgttaagaatcagattttttggaatgatatcctatttaatttccttcaaccatttctgtcaagttggacagacacaactacctactggaagccctattttgttgctgactagagggagtaaatttgatgatggcttcaatctcgggacaatgaattgtcttaggcaattatgactgacggttccaacaagagcaatcttgcttatgaagaatgataaaccgatgatcaacaactttggttgttgtttaacaccatgactgaaactcaaatcacaagtttcacaacattcacaagggatcattgtagattgaggaatatatgatcaagatgaaaaccttgacacaagcttaaattctcaagatcccaatctcaact

SEQ ID NO: 28650 - DNA, 316 bp, Glycine max
  unsure (1)..(316): unsure at all n locations
ggagtctangagcttacctctacctcgtgggaccttcaatttcaggtaaaggtgaacttctcctcacttgatatctgtgggtggtgggttcttgagagctataatgggtagttctactaggttattgctctacggtagctgtttgtgaacgaaattgttgtaattatgctaaacttgacatgtttaatgtaagcaaaatttcccatgttgatttagggttcaataatgatagtttgagatatacgtgtgcttaanatgtagatagaanactggtagagaggatggtgagaagtagcttagagttgaatgtgagaat

SEQ ID NO: 28651 - DNA, 370 bp, Glycine max
tggggcattgaggaagggttttggaagatttgatgagaaaggaatggttgttttccaaggctacacgaaaaataagacttgaaacactcaagtgtttctactctcaggaaaagaagcttttctcacacaccaaaagacatattgtagatcgtaacgatcaggtcgtagaaatctgtcctatgaacctccagaccaaatttcgagaagatctaacaattaacgattgcagaagggcgcttttaccaaggtagcttcaggtagcttccttgagaagcttttctcgagaggcttccttgataagcttcctcgtgaggcttctttgagaagctagagttttaactacccacacccttataataactaaattcac

SEQ ID NO: 28652 - DNA, 370 bp, Glycine max
  unsure (1)..(370): unsure at all n locations
gtctaatcgagtccattatatatcgagacgctcgaaactgaatgttgaaactctgagctgattcaaacgacaataactntatactcggatgtccgattgagtgacgtaatatatcgggtcgctcgtaattgaatgttgaacctctgagccaattcaaacgacaataactctttatctcggatgtctgagtgagttccgaaatatatcgagatggtcgaaattgaatgtcgaacctctgaggcaattcaaacgacaataactatttactcggatgtctgattgagtcccgtaatatatcgagacgctcaaaaatgaatgtagaacctctgagccaagtcaaacgacaataactctgtactcggatgtctga

SEQ ID NO: 28653 - DNA, 371 bp, Glycine max
taaacattcaatttcgagcgtctcgatatattacaggactcttatcagacatccgagtaaaaagatattgtcgtttgaattggctcacaggctcaacattcaattttgagcgtctcaatatattacgagactcaatcagacatccgagtaaaaagttattgtcgtttgaattggctcagaactttaacattaaatttcgagcgtctcgatatattacgggactcaatcagacatccgagtaaaaagatattgtcttttgaattggctcagaggttcaacattcaatttcgagcgtctcaatatattatgggactcaatcagacatccgagtaaaaagttattgtcgcttgaattggctcataggttgaaca

SEQ ID NO: 28654 - DNA, 315 bp, Glycine max
  unsure (1)..(315): unsure at all n locations
ntttatttatagtagatgaagatgaatttttggctttctcatggactcctctaaggacaatatcatgctatcttgcactgaattgacgggagttggaagccatcttctcaatcaaattcctagcttgaccaagggtcatatcaccaacatcttgaccattggtagtatcaatcatactcctgtacatgttgctaagtccctcatacaaatattgaagacggagttgcttacaaatctggtggtggggacaacttgcacacaatttcttgaatctttgccaatactcatacagactttctccactaagttgcctga

SEQ ID NO: 28655 - DNA, 337 bp, Glycine max
  unsure (1)..(337): unsure at all n locations
gctcatgcatatgcatacacatgcatatttggtatcttgtgagtaggggcaggatcgtttaagaaatagtcaaataccgagccgaatccaaagacagagatgaatcgaggtaagcggtaacgcggccacgaattgctgcgccatgtcatttcctgctntcaagtacttatggacgggcacgagtggaggctatgcccatgatcaatggatcgtcttcacacgtccagctccggacaagcgagaagcgctactgggaggcagccttgtatcctttaaattcctacttattaatngntcngtgttctctaaggtgatggtcggatgcctaatttaccct

SEQ ID NO: 28656 - DNA, 378 bp, Glycine max
gcttcaccttctggtcctcctcatagatgatgcatgtttttcatgctctattttcatctcccactccaagtaggcctccggatcattctttcctttaaatggaggaatgttgagtttaataccatcaattcggttttgtctaggaacaccatcattccctcttctcctcctttcttcttcattatgatctctattctccatttgatccaacctctcatggagcgcatcatctcgttgtttcattaacctctccaaatgttgcatcaaagcttgcatttggaattgcgaaagccccactccatcattaggattagtacctgacatctcaaacaaacaaatcaaacgtaacaagacaattatagttgttgtttgaatacc

SEQ ID NO: 28657 - DNA, 210 bp, Glycine max
  unsure (1)..(210): unsure at all n locations
gataatatcgaatatctggattcatncgcttatatcactataatgctgacgaccagcgttaatgcaccataacttgctaaaaaatacacccgcactgcaccatacagtctgtgaattcttacatctgcgacatgacatacatctgatgtacctgatgtatgattgcactgcgctgtattattgtctggaaacggcgacagtccgtgtacg

SEQ ID NO: 28658 - DNA, 118 bp, Glycine max
gcgtctagatatatacactactcaaccggacattcgacttagaagtatatgtcgtctgacgttgctacgagcttcgcgtttcaattacgagcgtctatatgtattacgggactcaatc

SEQ ID NO: 28659 - DNA, 368 bp, Glycine max
tttactcggatgtccgattgagttctgttatatatcgagatgctccaaattgaaaatagtagctcctagcaaattcaaaccataataactttttactcggatgtccgattgtgtcccgtagtatatcgtgatgctcgaaattgaaaacataaggtctgagcaaattcaaacgacaataactttttactcagatgtccgattgagtcccgtaatatatcgagatgctccaaattgaaaatagaagctcctagcgaattcaaaacataataactttttactcggatgtccgattgagtcccgcagtatatctagacgcttgaaattgaaatagaagctctgagcacaatcaaacgacattaacttttttc

SEQ ID NO: 28660 - DNA, 450 bp, Glycine max
  unsure (1)..(450): unsure at all n locations
gcgatctctgagtcacctgcggcatgcaagccttgcggatntggtcttcgccggtgaaaggatcaaagtgagcctagatagaggtaaatctgaccattcctgcttgatgaatgtgaaaactagggcaaatgaagaggatgagaatgaatgagaaacccatgttgcgactgtcattcctacatggccaaacttcccaccagcccaacaatgtcattactcagccaataacaacccttctccttacctaccacccagttatccacaaaggtcatccctaaatcaaacacaaaacccacctaccacaacaccaatgctaaacaccacctttatcacgaaccataacaccaaccaaggaaggagatttgcagcatataaaacttatagaattcaccccaattctggtgtcctatgctaacttgctcccttatctactngataatgcaatggtag

SEQ ID NO: 28661 - DNA, 365 bp, Glycine max
ttaggagaaaccattaaaactattatagttcctaaacaaaaatcaattgaggaagcttcgccaagtgtccccattgaaaaacctttattcaaacctgtcaaagtcagtgataaggctaaacgaaaaattagggaacttagaaaaactaaatccataattgaaggcgtaggtgacaatcatagcgaattactaaacaagattggtagtttgcttaaggtcattccagacactccccaagcctcggaaaatacttccaaaatggtaacaagaagtacctccaaattaattaattttattaatgaagatagtgaccaaaactcagataacacaactaagataggatcagtgtcagaaaagaatataaa

SEQ ID NO: 28662 - DNA, 450 bp, Glycine max
  unsure (1)..(450): unsure at all n locations
ttctctacaattgcatcacctctcaatgagctggtgaagaagaatgtggcatttacctgtggtgaaaaacaagagcaagtctttgctttgctcaaagaatagcttactaaagcacctgttctagctcttcctgactattctaaaacttttgagctagaatgtgatgcctctggagtgggagttggagctgtattgttacaaggtgggcaccctattgcttattttagtgaaaaacttcatagtgccaccctcaactaccccacctatgataaagagctntatgccttaataagagccctccatacttgngaacattaccttgtttccaaggaattngtcattcatagtgatcatcaatcacttaagtacattagagggcaaagcaagttaaacaagaggcatgcaaaatgtgtagagtacctatagcaatttccatatgntatcaaatac

SEQ ID NO: 28663 - DNA, 365 bp, Glycine max
taaaccttatggtagaagatttattgctttgtattttgcatttttgtttagctttattgtatttaagtttagggtttacaatgtaaggtttagttaagttttaaatccccttaggggcaatgcctgaaaaaagggtgaaaacccctaagtaacttctggaaatagcgatgaacgcgttaagcgcgcttgctgcgtttagccagttcatcgcaactgttaaatttttgtatttccagatgatcgcgctaaacctgaccgtgttgtgctacgtgttcatccttctgatgagtttcaatgatgagcttgctaagcacgtttgtgcgctaagcgagactagtgttttagacacttagtatttttttttt

SEQ ID NO: 28664 - DNA, 175 bp, Glycine max
  unsure (1)..(175): unsure at all n locations
aaataacaatttagtgcccaacttgctccacanagtcctccaaaaatggcttatgaacctagagtccctatcactaacaatgctccttggctaaccatggagtctcacaatctccttgaaaacatatcagccacatgggaagcatcatcaactcttttacatggaataaaatgag

SEQ ID NO: 28665 - DNA, 365 bp, Glycine max
  unsure (1)..(365): unsure at all n locations
ctaagcttttcgattcattccatgtacccgttgtggtctttattgngntncgggcatttttattctcgtttcatttactttttatacccccctttgacgtgcttaagccattttatttaagtcatttctcgcttaacctaaaaataaaataaatttccaccgatcgtttgaattgtattatccgttaacttcggataaaatgaattccgaccgttcggtcgtgccgtaaccacgttggaaatcaaaaaagaggtaaaataataatataataatcaaaaaacgtcttttagtaaaataaagcggaaaatcaatcggacgttttctctttgggatttctcattcttaatttaattgactaataacta

SEQ ID NO: 28666 - DNA, 422 bp, Glycine max
  unsure (1)..(422): unsure at all n locations
ttaagtcacctgctgctgcaagcttatggtactcttcatcttatctggatgcacttcatcaatagctctattaattcacatattctctgtaaatcatatataccctggacagagaacaatgtggtgtctaatgatggctgtgattcatagttggagatctcaatagagactgttttcaataagagttcacaatgttgcagagagtactttatactcttccaacatttctaattngccacctttatcttatacaagaggtgtaatgtgcaccgtacagctaggaattagagtcacttataactgatataagtaagtagtcaacactgctgtaactgcataactgtcattgctagtgtgttcctatatacaaagttctataacaaagcatagttaatcctgtaacctttactgtgttatctcat

SEQ ID NO: 28667 - DNA, 365 bp, Glycine max
  unsure (1)..(365): unsure at all n locations
taatccaattaaattntatatggggaggtgagcatttgcttatttcaccccattgtcacatcatatagtcacactttgtacatgtccttcatgctttatatgcctcatgacacctaagcacacttagtggagaattttggaattgatcttggattagtcggctgaaccataactaaaattcactaatcataattagtgaaattttgactccaaagtttggttccacaaattcaagtaaaatttgaattgaaattcaaatttccctccaatttttgtgacacttaggctataaatagaggtcatgtgtgtgcatttttttgaactttgatcatttgaatattgaactttagatttcagagctcttt

SEQ ID NO: 28668 - DNA, 276 bp, Glycine max
  unsure (1)..(276): unsure at all n locations
ctgcagctgaaggatgatgggacccggtgtgagagaattatgatatgggctacgtgggagtacgtgagctcagttggaggtgggcaacaggggatggtgggtttatgcgcgcattgtggatgtggaaaacttgttgtgcaccatcgcccgaccgccacctagtaccacatgtgatgggtaccccataatcctacaagctngagatgaaggaagtgtgaagggtgaaacttccttgctttatttgtgaccacagagtggtacctggagatatgtcgc

SEQ ID NO: 28669 - DNA, 358 bp, Glycine max
tcttatccaaggctcatcttggtggtgtttctccttcttccatggcttattcccaagtggatggcgtcgcttcttacctcttctcctttgtcttccgctgcatctccatggtggaaaatcaccattaaaggacctcattgaagctcaaagatccagcctccagagaagctccacaagcaagcttccatcaagtggtatcagagcacaagagcttcaagtaggtgctccttaaatctccattaaattttttgctttaccttctcttccattgtggtttcttcatttttctcatgtatctactcacatgtcttgtgctaaatgttgttaacatgattctttagagtttccaccgattaaa

SEQ ID NO: 28670 - DNA, 381 bp, Glycine max
  unsure (1)..(381): unsure at all n locations
tttgggctgacatgtctttaatggtatgtaggtagcgcaagcacaagtagaagaggctagctacatgcggaagcgactngatgatgaagattctacatataaagcctcaatgtcaacgacttcacttactgatgtgaatacaatatcagaagcagcatctaagaatcatctgctgcaattgcagctgatgttgagataagctaacagcttctacgtcatctcagttaatcatgacttctgttctctcaacatctgcagcggaagaagcataaagtgcttgtctaacttctgagtccatgtcataacctgagaagtcaatacctatatcagatccaaatgttgttgtgtcttacaacaggtaattgccacancaatcattca

SEQ ID NO: 28671 - DNA, 372 bp, Glycine max
  unsure (1)..(372): unsure at all n locations
tttttaatgaaggcggngtgaaaatatttattatacctaatgatttttgggtacaagttgtacattcaaaatacaaatacagtaatgatgtactacctattattgataagcatcgacccgaaactaatttgtggaagaggatcatgaagtgttgggataagttattgtcaaatatgacctggagagtgagtaatggtagaacaataaaattttggaaagataactgagtcctaaatcatggtaagctagatcaatatttgagtggacaaaccaatcatgggagaacattttggtatatttttatgtcaatgctaaaggagtttgggatttggagtgaattgttgttgatttaccagtgaatgttgttgaaag

SEQ ID NO: 28672 - DNA, 423 bp, Glycine max
  unsure (1)..(423): unsure at all n locations
ctgcanaggcatnacattggaaagttagttntaccagtgtgacattactcttaaagcanaaatggcatataacctcctcccataaatacaaacatcaatgtaaatttagagcaagcttatgcgcatatttccttacaaacgttctcttgcacaagacattctattaaccgaaaaaaatgcacccatatacaatcaaggcagcttcgttacctagattatntacacgtacnttcaaggtgtatttgttacttacatcacacacatctccttggctaaattcacatacatgcatactcaaagcattgtgggggaccaaanattgcacatgtgcacatcttggtatttctaatacctatacatacacaaacctcatgatgaatcttgactatctacacaataaggtgctacattttcatgctcttt

SEQ ID NO: 28673 - DNA, 375 bp, Glycine max
tgccgccacggagttttccgactatgctcttgtgtggtggaacaagctacaaaaggagagagcaagaaatgaagagccaatggttgatacatggacggagatgaaaaagatcatgaggaagcggtatgtgccggctagttactcaagggacttgaaattcaagctccaaaaactaacccaaggcaacaagggggttgaggagtatttcaaggaaatggatgtgctcatgattcaagcaaatattgaagaagatgaggaggtaactatggctcgatttcttaatggtttgactaatgatatctgtgatagctgcaggagtttgttgaaatggatgatttgcttcacaaagcaatccaagtggagcaacaattaaaa

SEQ ID NO: 28674 - DNA, 414 bp, Glycine max
  unsure (1)..(414): unsure at all n locations
aatggtgattntccaccatggagatgcagcggaagacaaaggaaaatatgtgagaggaggcgccatccattaaggaataagccatggaagaaggagcttcaccaccaagatgagccttggataagaagcttggagaagatgcttcaatggaggaaaagaaagagggagagaaagagagaggcgggagcacganattgaatgaatataagaggtatagaagtggaactttgaagtatgtctcacaagactctcattcatcaaagttacaacaagtgttacacatgcttctatttatagactangtagcttccttgagaagctntcttgagaanacttccttgagaagcttctttgagagaacttccttgagaagctagagcttatctacacacacccctctcataactaagctca

SEQ ID NO: 28675 - DNA, 375 bp, Glycine max
tgagaggattgatggggacccggcgttgttagatactaggatatgggctacgtgggagtacgtgagctcagttggaggtgggcaacaggggatggtgggtttatgcgcgcattgtggatgaggaaagcttgttgtgcaccatcgcccgaccgccacctagtaccacatgtgatgggtaccccataatcctacaagcttgagatgaggaagtgttgaagggtgaaacttcctgcttttattgttgaccacagagtggtacctggagatatgtcgcgggggtcaggagaccttggggacgtcaggtggggtgctattgcccaaaaccaagcttgaccaatcccgacccaacccgggcatagtcggtcagtgagaact

SEQ ID NO: 28676 - DNA, 378 bp, Glycine max
  unsure (1)..(378): unsure at all n locations
actaagcttgatgattacattctccccctttctatagcaattcttaaatcctcttgacatcatcaaaatcttcatgaattacattctccccctttttgatgaatacaaccacctggagggtaagggccaccaccaagaaaaaatatctatttgcatataagttactcccccttgggtttgcaatgattgcttatatgaaacagttgaagatttcatatttttcatatataaacctatggtctcataaaaaatagataatttttcttactatnttatcttttatctttctctccccctttgtcaacatcaaaaacaaatcatgaatagagaggagaaagatgttaccactttgtgcaatgtatgagaatcaagtgatac

SEQ ID NO: 28677 - DNA, 414 bp, Glycine max
  unsure (1)..(414): unsure at all n locations
agcttatacacanagaatgaattatactcgtctngcatgtgtaatggagttacttgacttcaacatgcaacacanattaatggattgtaccataaccaaaaggtatgatcaaaatagtattccttaagaaatatagcttgatacaggtcatcaaactataatgcattagcattgctacaaacaaggaatcgcatacatccaatatgatgtatataacgtacataggttcctaccacaagcatataacgtacatagaagaaataagaatcaatctgtcattaatggtgtattactgaattacaagctntaacaactacattcatgactacacacanaaggaggaagataagtagttatacgtntaanatagaataanataaaaataaataacatgtntganacatcatgcaatta

SEQ ID NO: 28678 - DNA, 367 bp, Glycine max
ttgaatgctctattcaatggagttgtactttaatatcttcagactaatcaacacttgcacagtggccaaagatgcatgggagatcctgaaaaccactcatgaaggaacctccaaagttaagatgtccagattgcaactcttggctacaaaattcgaaaatctgaagatgaaggaggaagagtgtattcatgacttccacatgaacattcttgaaattgccaatgcttgcactgccttgggagagaggataacagatgaaaagctggtgagaaagatcctcagatccttgcctaagagatttgacatgaaagtcactgcaatagaggaggcccaagacatttgcaacatgagagtggatgaactcatt

SEQ ID NO: 28679 - DNA, 348 bp, Glycine max
taaactcaactaacagaagtgagaattggatacttactgaagtgtgagttcattgataatttacatcgacgagcttcttactcaaatgttggagatgctggttttttaccatatactcgactgtattctgcttaatataagttctatgaacattgtcaggtgttattacaaggattaagccatatatagttaagtgcaagttctaaggccagagtattatgttgaaacaataattggtttcctaggactgcctttaaatagagtagtaccctatacctaggctagagatgaaattgtcagaaagtgtgcacagattggctgatcgaagtcactgatcaatgtactata

SEQ ID NO: 28680 - DNA, 367 bp, Glycine max
tgagaccaaggcaccacaaaatttatgtatccttaacccctcaatttaatggattcttaaggtttgagaagtgaaattgagaatgacgtaaatttggagcaaactatcacctaacacaagtctataacatcaatttaaacttgctccaactggatttacacctaaaattccaccgaattaaaatatgactcctcaacacccaaattttaccctataaatggctctttgttcactttgggcatttgtttttctctcttacacaacccaagctttctcataagtcctaaatgacatttcaaactaggattaactcactctaacctccaaataccactaaatctagatttggccttccaactctcatagt

SEQ ID NO: 28681 - DNA, 401 bp, Glycine max
  unsure (1)..(401): unsure at all n locations
agctggcttctacagcgagccttatngagataccanacgtctctcttgctcgcttagcacagcggtccgctaagcgagaggatcngaaaactgcttaagtgagtgtaacaacagttacactcacatttgccagattctgcaaacttcttctctgcactctctctctccaataatatacacatgttgcatttgtgcgttttcttcgcattgtctacttccaatcttatagcattacccatccaagttagntccttgattctttttctctatttcatgtcttaactntagggtagaacacttcaactgtagctctagaattttaggggttttatgttctgttagatatagtgtaagattanggctatgtaagcttgtatactgaattgagtatggcgcacaca

SEQ ID NO: 28682 - DNA, 328 bp, Glycine max
tctagcacactacagacatcttctcacatatcccaacggtcagatcatggacaagtgtcttgtgaagttacaaaccaaatttcgagaagatccaacggttaaagaaagctgggaatcatttttaccgaggcagctccatgtagttttctctaaaagcttcattaagaggcttctagcacactccaaacatcttctcaaagatcccaacggttagatcatggaaaagtgtcttgtgaagtgtaagaccaaattttgagaagatccaacggttaatgaaggctgggcagcgtttttacccaggcagctgcatctagctttctctaaaagc

SEQ ID NO: 28683 - DNA, 414 bp, Glycine max
  unsure (1)..(414): unsure at all n locations
agcttaatggagggaaaganagagagagaggtgggagcatgataatgaaggaganatagagggagagaagttgaactttgaagtgtgtctcataagacactcattcatcatagttacaacaagtgttacacatgcttctatttatagcctatgtagcttctttgagaagttttcttgagaatcttctttgagaaacttacttgagaagttagagcttagctacacacacccctttaataactaagttcacctctttgagaagctntcttgagaagaatcctaaagaagttagagcttagctacacacacccctctaatagctaagttcgcctccttgagatgagaagctatagcttagctacacacactctctataatagctaagctcaccccatgccaaaatacatgataata

SEQ ID NO: 28684 - DNA, 373 bp, Glycine max
tgtaggattatggggtacccatcacatgttgttctatgtggcgatcgggcgatggtgcacaacaagttttccacatccacaaagcgcgcataaacccaccatcccctgttgcccacctccatatgagctcacgtactcccacgtagcccatatcctcgtttctctcaacaccgggtccccatcaatcctcccaagcttccacaacatccaagcaaaacgacattcaaaccgcacaagctatcacagccaagcaaaacagagcataggcagaaaactctgccaaaacaccaaccaaatcacagcttttctcacttaaagaccccagtaacaattccttcgttccggttcattaaccgctggatcgactcgaaaa

SEQ ID NO: 28685 - DNA, 305 bp, Glycine max
  unsure (1)..(305): unsure at all n locations
atcgatgtgggtatgataataggcannattagtcatcctgcttggacgaatgagaaaactgtggcaaatgaagagggtgagaaagagggagaaacccatgctgtgactgccattcctatacggccaagtttcccaccaaacccaacaatgtcattactcaatcaataacaaacctnctccttacccaccacccagttatccacataggccatccctatatcaaccacaaagcctgtctaccgcactttcaatgacgaagaccacctttagcacannaccaaaaaaacaccaaccaagaaatgaat

SEQ ID NO: 28686 - DNA, 181 bp, Glycine max
tctacttatgtggcagggcgggctttcttcaccttcttgtctccaacgcgaactttgaccattgttcttccttcccgcgatgcttcttttcatgtctgcctgagtgggcttatagcctaaaccatacttcccacgattaccttgggtatttatcagtctagttatgccgccgctgtttttt

SEQ ID NO: 28687 - DNA, 379 bp, Glycine max
agctgggtgtggttgaccaacactccatataattggctctggcacgtgatcaaagcagaaaacctcaaggccctattggacttctctgagtccactgggtgtctaggaggcactatccttgcaatctgatacatagcatctaagatcagataggcaacatgcatactcacctaagttaggatgacgtggaccagctgacacttcggcagggggaggtctgaattatggtcgctggtgaggatgttgctgagcaacaacatcatccaaatctgcgtgagggtggtcatgttggtgcgtatgatctgcacccgtctccccgctagactctgggcaaagtcctgccccggaacgcacagcaactggcagatagcctcctcat

SEQ ID NO: 28688 - DNA, 364 bp, Glycine max
tgcttctataattgcatcatggaggtcgtcccgcccttaggttggaaacctctcaaactggagcgcaatgacaaaactactgattcatatgaacatttagatgcattcgtcaccgaagccaatctctacaccaatgatgatgtgattctatgtcaagtctttccaacgtcccttaaaggggcaacattgacgtggtatggaggactccctccccggtccattgacaacttaaacaccattattaaatgccttagttccaagtacgcgacaagctagtcacactgcctgatatttgcagccctagctagtgcacaccaggaagacaacaagtcacttaaaaaattcatggataggtttgtcaaat

SEQ ID NO: 28689 - DNA, 294 bp, Glycine max
attcacattatatatatatatgtatatatatatatgtatatgtatatgtatatatatatgtatacgtacgacagatagaataggtaatatatattgatgcgtaatgctcatgcactattataatattcatgtactttagaaaatattaaagagctgcttgcatatgactaatgaaaaaccaacgcttccttttttgagattccttaagacaatgctcctaaaggagaaaaaaaagaagatatagctgaatagcgtccttttagaagcctggatactggtatataccacttgaac

SEQ ID NO: 28690 - DNA, 358 bp, Glycine max
  unsure (1)..(358): unsure at all n locations
tgctctganccggctnccttattcgattgttctatcattgggnntagtttcctattcaagtttcactattcttgaaagatggccagcacaatcaagatcgagaagttcacaaggaagaacaatttcaatcagtggcaaatcaagatgcgagctctgttgaaggaacagggcatctgggcaccactctccagcagatcctccaacctagaagcatcctttctggagcaacaagaagaaaaggctcactcgctgattcttctgtctctctcagatgaagttctctacgaggtggctgaagaacaaactgttgttgggttgtggctgaagctggagaaactctacatgacgaagtccatct

SEQ ID NO: 28691 - DNA, 214 bp, Glycine max
  unsure (1)..(214): unsure at all n locations
ctcttcttttcttctcttctgaagatatctcttcaacttaaaggcagcggaattctcttttgtagatgctacctattntgaagggtgacttcatggactcttaagatgtccaacaactcatcccatgcaagatttttcanatcttttgcttcttgggaaggntgtggtcttatgtaacaccctgagatgttattaattataaatncgatgttga

SEQ ID NO: 28692 - DNA, 372 bp, Glycine max
tgcttgtggagcttctatggaggctggatctttgagcttcaatgaggtcctttaatggtgattttccaccatggagatgcaacggaagacaaaggagaagaggtaagaggcggcgccatccactagggaataagccatggaagaaggagcttcaccaccaagatgagccttggataagaagcttggagaggatgcttcaatggaggaaaagaaagagggagagaaagagagaggggggagcacaaaattgaaggaagaaaaaaggagagaagttgaactttgagttgtgtctcacaagactctcattcatcaaagttacaacaagtgttacacatgcttctatttatagactaggtagcttccttgacaaac

SEQ ID NO: 28693 - DNA, 377 bp, Glycine max
  unsure (1)..(377): unsure at all n locations
ctgcagcttatgctgctaatcgctcaggttgctcatggaatgcanatgtctgtatggtggtcagcagaggagcacataccacatacccttgcaacaggtacagatttctgattcaaggacagctgggttaccaagttaaccaatgcatccagtttgccttcaagcttcttagtctcagatgatgtagctgagtntgtagctacctcatgcactcctctaatgactatggcatcatttctggcgcttaactgctgagagttggaagccatcttctcaattaaatntctagcttcagcaggagtcatgtctccaagggctccaccactagcagcatctatcatacttctctccatattactgagtccttcantaaaata

SEQ ID NO: 28694 - DNA, 371 bp, Glycine max
tgtattgccgctcagatcttgactagttataactttctgaataaaatgagtttatcccatattttactccaaaagtcagtgcgaatcaaatcactcctgcattttatctctagcatgcatttacctactcctcacattttgttttttaagaagtacaccataactaaatgcgccccaaggcatccctatcgcaccagatccaaatctagaacgatgggtgatcaagaggagacacaggaacagatgaaagccgacatgtcagctttgaaagaacaaatggcttccatgatggaggtcatgttaggaatgagacaactcatggagaaaaacgtggccaccgctgtcgctgttagttcggctgccgaagcaaa

SEQ ID NO: 28695 - DNA, 369 bp, Glycine max
  unsure (1)..(369): unsure at all n locations
catcatatggcagagttgtgattacccaactgatactttgatagggagtcaatctcttgctactggaaatcaactgtcctctacttgaacctctaatccactgacgcactgcatagatattggggtcggntttcatatcactagtcattgtgttatgcaagagaatatgatgttgacgtggtggccggagagtgctatcggcaatttgctttaagacataattaatttctatctctatcatgtattgtataagtaattcacatggaagaagaacatatatttataatgtatgccttgtatgcctataaattgtataccgacaattaatatataaatttctatattgtaattgtcaataactcataatat

SEQ ID NO: 28696 - DNA, 380 bp, Glycine max
  unsure (1)..(380): unsure at all n locations
agaaactaagctgacttcttgcacagcccccaactattttgttttatcnngnnnagcaaagataacattattaaccaatgttatgaataaattaattggaaacttttttttggcaaaatttgcagatattctacactgtagataatccaacgaaaaattggagaggaggtgcaggttacatatcaaaggatgtggttgtgaaaggcttacccagtcctagtgatgatactctaatacttgtgagttttgctttgtcaagtaaaacctacatatactacatagtattaacggaactcctctaatattgtcctactgatgtatttaagcaatttgaacctttggggaaattaaaagatgatttttatttttcttttgagaac

SEQ ID NO: 28697 - DNA, 308 bp, Glycine max
  unsure (1)..(308): unsure at all n locations
gtgttgaagggtgaaacttcctgcttttattgttgaccacagagtggtacctggagatatgtncgcggggtcaggagaccttgtggacgtcaggtggggtgctattgcccaaaaccaagcttgaccaatcccgacccaacctgngcatagtctgtcagtgagaacctgtgatgtacctaagcaggcaagctcctggcagtcaacagataaaaggaaaacaagaccacaaagcaaggaggcttgtggtggctggccagctgtgaatttgtgtgatatgtggagtatggcctctggtaatcgattaccaa

SEQ ID NO: 28698 - DNA, 359 bp, Glycine max
ttccgcagttgaacaccctagctagctattttccaccaatttgaatcagcaatgggtcactctttctgtaacgtcaaagttctatctgcttttgtcgccgacggattcttgctttaacagggtaatattagctagctacctaactcactttacaatgttgtgaatcccgtcaagaaaaccctaattcgctcgcagtcacacaagaggccaatccaattcatagttcggtaagttccatctttgatttgccattgttcattgagtctctgcattttgcttaatccaccatattgttgtttagatctgagaatatttcgtcttatttgattgtatgaatgacaaagatgggtgaagatgtg

SEQ ID NO: 28699 - DNA, 358 bp, Glycine max
  unsure (1)..(358): unsure at all n locations
cttaagttattgaggtcacttatccaacacaagatgctagtatatggctcctgtgcttntatgcccaatgatatgacctaatagtaatagttggccgactctattataaaagttcctttcacagcacgtatttgactataatacccttgtacctattcttcttaatggtaaaccttgtcattaactcaatggatcctcttgtaagcattctttctccagcaaattngaagagcggatcatcgtggggctaaagtattgattcaggtatgtctatctgcctaaatgtactccanaataagatatccaccgagcctccttaatgaatgagggtgtccataccaagtagtgttgataatct

SEQ ID NO: 28700 - DNA, 331 bp, Glycine max
  unsure (1)..(331): unsure at all n locations
aaatctaagctggatcacattggggcaaggttttttttatttggctgcaaacaagtctgacatagttctgctatccacgatgaaatctatgatgtctggatgagtgggaaccactctcngacatgctcacatctattgctgaggcagatgtggttttcaccaacacagcatcagagaatccattgatcttgacggaggatgtaaaggaccttcctcctgccaccaatgaagttggtggccgccgcctgtacaccaagatttctgttcctagaaatgtcggatcatgtctctcacaccttgagtctgtgagagggtacattgttgatgacct

SEQ ID NO: 28701 - DNA, 349 bp, Glycine max
  unsure (1)..(349): unsure at all n locations
gcttatgctgcanatatgtacaatagaccttctcttctatcagcagaatcaaccacagcagagcaattatgaccgttccagcaacagatacaaccctggatggaggaatcaccctaacctcatatggtccagccctcatcaacaacaacaacagcctgctcctttcttccaatatgctgctggcccatattgaccatacattcctccaccaatccaacatcatcatctactccagatacaaccaacagatgatgcccctccacaaccttccctcgaagaacttgtgaggcgaatgactatgcagaacatgcagnntcagcaagagaccagagcctccattcagagctta

SEQ ID NO: 28702 - DNA, 365 bp, Glycine max
  unsure (1)..(365): unsure at all n locations
tctacttatgtggcagggcgggttttcttcactttcttgtctcaaccgcgagctttgaccaccgctcttccttcccgcgatgcttctctttatatctgcctgagtgggcttatagcctaaaccatacttcccacgatttcctttggcatttatcaggctagttatgtcgccgttgtctttgcctaaacccattccgggttcgtaaccgttccccaacataactcgggccatcattactgctgcatcggacaggcaaggctgcccagagaaggagtccacggaggaaatgcttaccacctcaaaagactggaaagcggnttctaatgactcctctgcggcttccacataaggcatagacgatgggc

SEQ ID NO: 28703 - DNA, 332 bp, Glycine max
  unsure (1)..(332): unsure at all n locations
tctgactcaccatattctcttgacttagngtgagtatgtcaattcttaccctcggaagcaaataaagaggggagagggaaaatttccaatcaaagaggatgcaaaaaaggagagaatgaaaatctccaatcaaaggataaaaagagaggatagggaattcccaatcaaagagtgggagaaagcaaatagaatagaaagaatatctccaatcaaagaatgggagatagataanagagaaggagaagaaggaaagaaagctcctgatcaatgatcgaaagaaaacagaagatatgtgcagagaggtctctggaccagacaatatctgaacaaat

SEQ ID NO: 28704 - DNA, 367 bp, Glycine max
tcatgaataatagcctcaacaaacttcttattcccagaaggaaattcaataaataggcctcctttttttttaatggagagggttaccacttctggaaaaccctaatgcaaatcttcaatgaggcaatatacttaaatatttgggaagccatacaaataggaacttatgtacccaccatggtggctggaaatacaacaacagaaaatcctatggaaattgaagtgaggaagaaagaagacaagtacaatataacttaaaatctattcatggaagaatctattcatgtttcatttgatgagtctaatgctattcctcgaagaaaggatattttaaatgatattgcagaatctttataacaaatgcatat

SEQ ID NO: 28705 - DNA, 327 bp, Glycine max
  unsure (1)..(327): unsure at all n locations
agcttctagatatattatgcgccggaatcagacttccgtttcataagttatggccatatgaatntctcgagagcattcgntgctcaatttcgagcgtctcgatatagtctgcgcgtttatcggacttccgtgtgacaagttatgaccatctgagattctcgagggcttccgatcttcaatttcaagcttttcgatatattatgcgcctgaatcagactttctgtacacaagttatgaccatatgaatatctcgagagccttcgttgttcaatttcgagcgtctcgatataatatgcgcctgaatcggacttncgtgtgatagagtat

SEQ ID NO: 28706 - DNA, 369 bp, Glycine max
tctcgatatattatgtgcccgaatcggtctttcgtttgaaaaattattaccatttgaatttctcgagagctttggctgttcagtttccagtgtctcgatatattatgcgcctgaatcggacttttgtgtgacaagttatgaacatttgaatttctcgagacctttcggttttcaattaagatcgtctcgatatgtgatgcgccagaatcggacttccgtgtgacaagttatgaccattggaatttatcgagaccttccgatcttcaatttcgagggtctcgatatattatgtgcctgaatcggactttcgtgtgacaagttatgaacattggaatttctcgagaccatacgttgtcaatttcgagcgtc

SEQ ID NO: 28707 - DNA, 316 bp, Glycine max
  unsure (1)..(316): unsure at all n locations
tgagaataacaattggntgaccacaacagcgctggtggcggcaactgacaatggtctttcaaataaacctggtgtacatgaacaaacattatatcatgcgctgaccgtgccaaacgaaccagcgaagtcattgcataattggtacactaactatgttcaatgtacctgaacaaaatgatattcaaacacgtgaccgacacatatgatgcggtggccagaatagtcaggtggtggttgacttctaagagggagaaatgtcatgctctgctggtgggacaacgatacaaggagtacgttataccgtgaagcaatcaca

SEQ ID NO: 28708 - DNA, 368 bp, Glycine max
  unsure (1)..(368): unsure at all n locations
ttaaaatgggccattggtatcttattttttctttggggaataatgccctctttttgctcaagccaaatctaaataaagtcatcttattcaaaaagaattggaccccctctggttggcttcccgtcctaaaggaaatattccaaaattcaagtttaatggttcattccacattcataaagggaaaatcgaataattccactaaattattggcattcatcatacttgtaaccttagtaaatattaagggtttccttattgagagggcatgttactaatgctaattttgctcaatatttggagagagtgaataatangcttgtttgttggaaagtaagatgttgagcanagttggaagagtacccctaaat

SEQ ID NO: 28709 - DNA, 564 bp, Glycine max
  unsure (1)..(564): unsure at all n locations
atgattggggcnatattnccgttctctagacgtcgactgcaggcatgcaagctcgaagaggatgctctaatggaggaaaagaaagagagattggtggagcacgactatgaaggaataaaagagggagagaagtggaactctgaagtgtatctcataagactttcattcatcaaaagtacaacaagtgttacacatgcttctanttataaactanggagctttcttgagaagctgtcttatagaaactttcttgtgatacttctttggtacactatctctgtaacattagcntaactacacacagccatctaaatactaagctcacttccttgagacgatttcttataaactagatcctacttcacactcctctctatgtcctgtcctcgctctacatgtcaaatctagacttacttactctctctcatatttttgtgacctcttgcacttcttgtgagtcatatcatctgttccatactctttacgtctgaaactctgcaactctctctgattacgcgcgaccagttcatcttaatgatcctttatttccatacatcctctccg

SEQ ID NO: 28710 - DNA, 377 bp, Glycine max
tcacttattcttgaaattttcatctcttttttttagcagcttatgattactggtactatatatagttttctatggttgttgctttccttcctgcaatcaaaatctctcgaacacattcctccaaatttgggacaaatttgtcttaaaccataatgctctcctataacctaaggaaaggtcaacggagattataatttcaatcaagcttagggatcaaagactcattcaatcatattcaagcttgaaatgggtgcaagggtttaatcattcatgaacaaggtaaggttgtttggctaagtgtctaaatcagatcaatcatggccttcatcatttccaaatcatgcattcatttagtattcagagattcatgcaaaaat

SEQ ID NO: 28711 - DNA, 253 bp, Glycine max
  unsure (1)..(253): unsure at all n locations
cattcttataactaagaaaaatgcacccatatacaatcaaggcaccttcgttacctagattatttatatgtacttccaagtggatttgtaactactctatgccttgcttgctaatttacatacatgcgtactcaaagcattnggggtacccaaaattgcacatgtgcacattccggtatttctaatacttatgcatatacaaactttgtgatgaatcttggctatctacacaataaggtgatacatntcatgc

SEQ ID NO: 28712 - DNA, 304 bp, Glycine max
ttgagccaaaatcttgactcaccgtaaaccttgacccagggtgagaatgtcaatccttaccctcggaagcaaaaaaaagaagagaaggaaaatttccaatcaaaggaaaaaagagaggaaaggaaattcccaatcaaagagtgggagaaagcaaaaagaaaagaaagaaaattcctaatcaaagaatgggagaaagaaaaaaagagagaaggagaagaaggaaagaaagctcctgatcaaggatcgaaagaaaacagaaaaaatgtgcagagaggtctttggaccaaacaatatctgaacaata

SEQ ID NO: 28713 - DNA, 229 bp, Glycine max
  unsure (1)..(229): unsure at all n locations
tcacctgagctgcagcttagtgattggtgctatctatatttacattgagtgtcctcactaatatgttctacagttgattntgcatgaatntctaatcntcatagcataagatgcatggatatgatgtaagcattctttctttcttgtacatcttaagtcactggccacaaagctatcccaatgtatattggtgtaccattngcaagcgctttgagccaaacacttgata

SEQ ID NO: 28714 - DNA, 270 bp, Glycine max
tctccagggttatttccctatgggagggggcctcccttttccttttctctttggccttccgttgcatctccttgggggaaaatcccattggaaggacctatttaaccctcaaaaatccaccttttataaaactccacaagcaaacttcatcagggcttggctaccattgcattatcagaagatatggagcaagttacctatgacccagaattgcgtgaatctacagcttcttgctagaaattcctccctagtggggttgggttatttaag

SEQ ID NO: 28715 - DNA, 402 bp, Glycine max
  unsure (1)..(402): unsure at all n locations
gcagctgaacaatgtagacacatcttcttcaacctttgtgattcttgtcttcatntcattgaagcgcatatccacttgcaattccaaagtgtcaaacctctcaccaacaaagggttgaagaccatcannacctgtccataatcttcgaaagaagagatgnaatcttctcctcatgtccttcttcaccaacatttctagcacnccttcttcacccaagagccatcatgctccttttatataaccaaaggatgctatgactgaagcgcctatanggaatgatctctctgatggaacataaggttcagaatcaagagggatgttgaagtgttgaaggataaggggaacaagataaggataaggcaaaggggcattcaatcgcaatgccttatgcatgcgatatct

SEQ ID NO: 28716 - DNA, 337 bp, Glycine max
  unsure (1)..(337): unsure at all n locations
tgttaacaaggccgcacaaataaaatgtttacacttgggaataaaattcaataatccaatccaaaaaaatccattatccaatgccttgtgcngngatacaaactacaaagtccttagaatccagaagaagaaaaaactccttagaaagatttatcggtgaaattgtgaatattatattgtttttttcagtggagacggcgatcccaactttctttttgntttggggccaactgttgatggcttctttttatttttcaagactattttttaggacatattgttagttgcttataatcaatcgatacaagtaataatgatttataatttttaacaagtt

SEQ ID NO: 28717 - DNA, 300 bp, Glycine max
  unsure (1)..(300): unsure at all n locations
gcatcaacaagaatcaagccaaggctattgtgcaagcaatcaatgttgcaaaacacaccacatgattatgatgatggatggcttaaattctcacaaaggtaaactcatcactnntcaaatgagctntcaaaactatcatgacatgtagagaagactcaaggatttcaagtcacaaaatgtctagaactttaatttcaaaacaattacccatttcttgaacatatcctataactcatagaaaaacatgcaaagtcgtacatgcacacaatattgacccagaatattaaactaacaatctga

SEQ ID NO: 28718 - DNA, 380 bp, Glycine max
  unsure (1)..(380): unsure at all n locations
taggattatggggtacctatcccagttttactaggaggcggncgggcgatggtgcacaacaaagtcttcacattcacaatgggcgcataaacccaccattccctgtgtggccccttcaactgagctcacggactcccatgtggcccatatatccgtgttttctaaacaggggacccatatatactctccagagttttcaaaattccaacgaaacaaaattttcatataaaaaacgttctcaggcccgcgcaacaaagagaaggcggacgactcttctgaaaaacccacccaataacacagtttttttcttttagaacacccgaaacacaatctcctttctgcggatcaaacgccggagagtctcctaaaatatctattan

SEQ ID NO: 28719 - DNA, 164 bp, Glycine max
  unsure (1)..(164): unsure at all n locations
gcttagatcatcacttacccaagcaatcacactgtatgctcttgtcatccagctntgntctnttctgatcaggtacatggacatgagttaggcacccanatacccttaaagaatctactttaggtttgatccactccacatctcttctggagtttatctttcct

SEQ ID NO: 28720 - DNA, 258 bp, Glycine max
tcttgactcaaaaaatggctctttgcaacttatatgctgcttttgctctttatggccttgcagataatgaatgaggtatgatataattgagaattcaaatgaaatgaagatcttctgtcttaattgcttaaaaatttgttacattgagacttaattaactattctttgtttttggaccatttattttattttgacccttaggataatgcgttcgacttgcttaaaaatttgttaccttgagacttaattagctattct

SEQ ID NO: 28721 - DNA, 166 bp, Glycine max
ttatcttttagatctttaagtgcagattttcatgtataatgatagatctcatccagcgcaagttgttgcagcccagatacgcacactgctatataaacatgaaagctgcacgagttttccaccaagtccgggattgaagagttattttgtgagttttgggacttga

SEQ ID NO: 28722 - DNA, 102 bp, Glycine max
cttcgactgagctcacgtactaccacgtggcccatatcctcgagtctctcatgaccgggatgccatctgtcctcccatgcttccaacatctagctgacaaca

SEQ ID NO: 28723 - DNA, 143 bp, Glycine max
atgtaatgcaatacaacatcttgaaacagaggcccgttataggagcgcccttagagtacatttcatatattgaccggtatctatccactagcttagtttacgttacaatacagtaaactctcattctcaattcatttatcatg

SEQ ID NO: 28724 - DNA, 162 bp, Glycine max
tgaattggagttttgtaggtctgaagaataagttgcaaacatactaactaagccattgaagtctatcaagttcaaggaattgagaaacaagttaggagtgacatccttgacaaatctgaattaaggagggatgttgatgtatattgtaattcagttagttag

SEQ ID NO: 28725 - DNA, 330 bp, Glycine max
agcttgcccagagaaggagtccattgtgaaatgcttaccacctcaaaagactggaaagcgggttttaatgactcctctgcggcttccacataaagcataaaggatgggcagctcaccaagatgtcttctttgcctgatacgatgaccagatgcccttccactacgaatttcaacttttggtggagtgtaaaaggaacaacccccactgagtggatccacgggcgccccaacaaacagctgtagggggggttaatatccattatttggaaggtgacttgactggtgtgaaggcctatttgtactgggagatcgatctctcccctaaactct

SEQ ID NO: 28726 - DNA, 328 bp, Glycine max
agcttgtaggattatggggtacccatcacattgtggtactaggtggcggccggccaatgggcgccaccaggttttcaaaatccccaaggcccccttaacccaccctcccctgttggccacctccaactgagctcgcgtactcccacgtagcccatatgctcgtttttctcaacaccgggtccccatcaatcctcccaagcttccacaacatccaagcgaaacaacattcaaacagcacaagctatcacagccaagcaaaacagagcaaaggcagaaaactctgctcaacacatcaaccaaaatcacagcttttctcacttaaagacca

SEQ ID NO: 28727 - DNA, 422 bp, Glycine max
agcttcctcgtggcttctttgagaagctttctcaagaggcttctttgagaagctagatccttatctatccacacccctctattaactaaattaacttccttaaaaataattacggatgaaaataacgcaacaaatattcaaacatcaaacataattactaatagtatatagatatatatatatcagggtgttacaactctcccacccttttagaaatttcgtcctcgaaatttaccttactcaaacaaggatgggtgagcttctcacatctgactttctaattcccatgtggcatcttctcctgatgcacctccccagatcaccttgaccaacagaatctctttccctcttaggtgttttgtttgcctatcctcgatcctcaaatgcaatgtttcatatgtcaaattctccttcacttgtac

SEQ ID NO: 28728 - DNA, 422 bp, Glycine max
agcttgtcgcgccatcaccgctccggcttatacccattccgggctcttacccatcccttaatataactcgggccaccattaaggaggcaccagataaaagtggttgcactggaagagactccacgggcaactcactagtatatattattcgcctgacactataaccaactacccctccaccacaaacttcaatttctggtacaatgttgatgggaccaccccaacagaatggatccaaggtcgacctaacaagaaactgtaggcagggtttatgtccatcacttggaaagttatctggcacctgtgtggcccaattgggagattgatctctcctctcatgtcacgatggctaccatcaaaagcccttaccaccatggagcttggcctcatatatgatgcatcaaatggcaatttatccaatg

SEQ ID NO: 28729 - DNA, 414 bp, Glycine max
agcttctatctttccatgacttttttgtcattcctgtaaaaagcaatcttctcccgctgatcttcatcaaagattctacacatgttggtcaactgtgcaaagttatgaataccgtgataatttaccatcatctttacttctggtcgaaggccattgacaaatttcacgcatttggacctctccccagcttccccctgataatgaggaaaataccttacaaggttctcaaacctcgccgcacactctgccaccgtcatactttcatgtttcagctcaagaaactccatctccttcctattcttcacatcttctggaaaatacttctccacaaaagtttgtctgaaagtctcccattggacaacaacaccacctgctccctctaaacgtgggcgagtgttctcccaccagtactcc

SEQ ID NO: 28730 - DNA, 332 bp, Glycine max
agacctatgcattcattgcatgtcttaggcggatatattgaaaatattttatttttaaatagattaccttgtcctcgcaacttaaaagtacttatatatttttatttatttaaattttatatgtttatgagaatttaaatattttaatgtatagtttaaaattttacttaagttgtaaaaaaatacatgtttaataaagatgatcgatgattgtcaattattgtaacatcctatttgtcgtaaaataaattaaaaataattatgttgaaaaataaatatttggtagaagaataatgagacttttgtaatcaaataaataagaataaacattt

SEQ ID NO: 28731 - DNA, 238 bp, Glycine max
cggtggcatgctgctgatagtgacgacccttttatgaacatgctactaatatggataaatggatcgaattataaacacgattgagaaagaaaactacaattgatcccgcattccatgaataaattaataaggagaacgaacattgggagaaggttttgataaggactacaaactttaataacgtttatttcttaaaacaatttaacctttcgtggaaccaatgaaaaatattcctcaa

SEQ ID NO: 28732 - DNA, 266 bp, Glycine max
agcttagagatttgaatccctttctcttgtttttatacatgcttgaatcttagttttgccttccaaaaaaaaagatgtttgaattttgctataatattacatagcagtcttgtacaaatttgttgaataatatgaagatttcatatttaaaatgatgttcatgctatttgaaaccctgcaattgcatatattagaaacttataagcagaaaggtatgatatgaatagcgttggaatttattttaaaaatattgagataaatttatg

SEQ ID NO: 28733 - DNA, 144 bp, Glycine max
gcctgagtgggaatatagcctaaaccatacttcccacgatttcctttggcatttatcaggctagttatgccgcccgtgtctttgcctaaacccattccgggttcagaaccggtccccaacataactagggccatcattactgct

SEQ ID NO: 28734 - DNA, 409 bp, Glycine max
agctttgagccaattcaaacgacttatactttttactcggatatctgattgagtcccgtaatataatgagaccctcgaaattgaatgttgaagctcttagattcaaacgtcaataagtatttactccgatgtctgattttgtcccgtcatatatcgagacactcgaaattgaatgttgaagctctgatccaattcagacgacaataactttttactccgatgtctgattgagtcccgtaatatatcgagacgatcgaaattgaatgttgaatctctgaccaaattctaacgacaacatctttttactcggatgactgattgggtctcgtaacatatcgagacgctcgaaattgaatgttgaacctccgggccaattcaaacgacaataacattttactcggatgtctga

SEQ ID NO: 28735 - DNA, 418 bp, Glycine max
agctttgtacgttgacgtaggtgttattgaacaaatataacacatcccaaaacatgaggtggtaaataaaccctgtaaggaaggatacaatgaccagacaatacatctagaggccttctaaagttaagcacactagaaggggttcaattaatcaaataaactgcagatctcacagcctcaccccataaatgagatgggacattatcatctatcaaaagtgatcttgtcacctctaatatatgtctatttttcctctcagtcactccatttttttgtggtgaataaagacatgtggtttgatgcaagattccattagagatcataaactctattaattcagtcttaaaatattccccctcattatctgatctaatgaccttagtatatgtgttaaaatatatagctatcatctgatgaa

SEQ ID NO: 28736 - DNA, 414 bp, Glycine max
agcttcctttacaacaatttaatttttgatgaaagataaagcaatacaagtattggggatgtctcctccacctctagaaacctcacaaactctcaaaatctcattcaaagttctacaggatggcttcctcttcaagctcagttctctctcagtctatccacagcaaaaaactctaaaaaaactcaactacccctcagaaatcgtgatttcaacttaaataggaaatcctatcagtgggcacgcgcttagcggaagatgagctcgcttagcgcgagttagtgacttctggcttagcgcctatcatacttgttcaacctagaggtgaagacggtgcgcttagtgagttgcgctcgctcagtgcctctatacagctcatccttcttccgaaattgtccccgcgcttagccatcaaat

SEQ ID NO: 28737 - DNA, 352 bp, Glycine max
  unsure (1)..(352): unsure at all n locations
tcaacatcagaccacttccagggtgatggaacttcttcacatggacttgatggggcctatgcaagttgaaagccttggaggaaagaggtatgcctatgtggttgtggatgatttctccagatttacctgngtcaactttatcagagaaaaatcagacacctttgaagtatttaaggagttgagtctaagacttcaaagagaaaaagactgtgtgatcaagagaatcaggagtgaccatggcagagagtttgagaacagcaagtttactgaatactgcacatctgaaggcatcactcatgagttctctgcagccattacaccacaacaaaatggcatagttgaaaggaaaaac

SEQ ID NO: 28738 - DNA, 391 bp, Glycine max
  unsure (1)..(391): unsure at all n locations
agcttntanaatttatatcaaattatctatgangattaaagaatctatccatgttgctttagatgagactaaccctataaggccaagaaaggaaacacttgatgatattataggttcattagaagacatgcacattgatgagaaagggctcaaaggcgcaggaaatggaaatgaagaagactgtcaaattgatgaaaataaaacaaatatagatcttccaagagagtggagaacttcaagacatcatcctcttgataatatcattggtgacatctcaaaaggggtaacaactcgacactctctcaaagatgcatgcaataatatggcttttgtttccttaattgaacctaaaaatttaaatgaaatcataattgatgaacattggattatt

SEQ ID NO: 28739 - DNA, 313 bp, Glycine max
tgagggtgtaacagatgcctggggtaacctggttacccatctgtccttgaatcagaagtctgtacctgtcgcaagactctgtggtttatgctcctctgccaaccaccacacaaacctttgcccttctatgcaacaatctgaagcaattgaatagcctgaagcttatgctgcaaacatctacaatagacctcctcaacctcagcagccaaatcagccacaacagaacaattatgacctctcccgccacaagaacaatcccgggtggaggaatcatcccaaccttaaatggtcgaatccttccaacagcaacaac

SEQ ID NO: 28740 - DNA, 413 bp, Glycine max
agcttggagaggatgctttttgtttgaaaagaaagagggagagaaagagagaggggggagcacgaaattgaaggaagaaaaagggagagaagttgaactttgagttgtgtctcacaagactctcattcatcaaagttacaacaagtgttacacatgcttctatttatagactaggtagcttccttgagaagctttcttgagaaaacttccttgagaagcttctttgagaaaacttccttgagaagctagagcttagctacacacacccctctcataactaagctcacctccttgagaagcttccttaagaagattcctaaagaagctagagcttagctacacatacctctctaatagctaagctcacctccttgagatgagaagctagaacttagctactcaccccctataat

SEQ ID NO: 28741 - DNA, 180 bp, Glycine max
cgggacggagccgacgccgagagaagacggggtttaatctggcggggggaccccccccctaaggaccaaagggagacgcatagcaccctccccgtgcgatccgccccagcccctctcccacgaaagacctggggcaaaccccaccaccccaccctgaacatgggaaaaccgcaagaaaaa

SEQ ID NO: 28742 - DNA, 427 bp, Glycine max
agctttttggagtagaaacatgggaccttctcattttatttcaaaaaagttgtatctagtcaaggtctgagagaccatacaagtttcctagcgatttctaattatgtgggccattaagtctatcatatgctgacaatagcggagaagcccatgaatttcttcgggggcggagtaggtgtctgccatcgccttggccttggctaacaatcggggaagttcatgactcccgttcaaggtaagagcaaaccgatccatccacatggttgcctcttggtgtaaagagtcgatcacccttcctctagcctctttttccgcgtatacttgggcatactcgtccacgatcctatgctcgtgagccgtggctagacctaactcttcttggtacttggcgatgatagctagcatgttggtctccatctcgcataaa

SEQ ID NO: 28743 - DNA, 257 bp, Glycine max
agcttagccacacagttggcaagtgtattttctgcttcctgtgtggatgcctcagcatacacacgaacaacatcttcagtgccagatggtcgcacaaagcatcgaccttgggggtccttagctgtaaatgcagaagaggaaagagtatcaagctgcgatattagtaaactgaagttctgcactttaatctttcacactaaaaggctttcatggatggatgaaactgacaaatatctcgcagtcagtgatattttgcc

SEQ ID NO: 28744 - DNA, 200 bp, Glycine max
tgtcggtgaactaagagctctctgatattttctagtttatgggtgacgacattgataagacagttacaaaaaagacgtgtgtgagttgagcaaaggtcactactagctcaacaattttatggaaggatctttgactatatcggttatggcggactccgcaattgctataatggtaaatgtgaaaaatgatgccgccccca

SEQ ID NO: 28745 - DNA, 405 bp, Glycine max
agcttgagggaaaacttgatgccttggtcttcctagtaactcagcttgccatgaataggaaatctgctcctgttgcaagagtctgtggtctatgttcttctgtagatcaccataaagatctttgtccttctttgcagcaatttggagtcaatgagcaacctgaagcttatgctgcaaacatttataatagaccccctcagcagcaaaaccaacaacagtagaataattatgatctttcaagcaacagatacaatctaggttagagaaatcatccaaatctgagatgggcaagtcctccacaacaacaatagcatgtccctcttttccagaatgttgctggtccaagcaagccatatgttcctcctccaatacagcagcagtcacaacaaagacaacaagcaactg

SEQ ID NO: 28746 - DNA, 419 bp, Glycine max
agcttgcatattttagggggacttttatctatcttaatccaggttctttgcgtgataagttacaatggctatcaccgaacgtagaacgcttaatcagattctcaagcaaggcattagtgtcctatttataaaaacttggatccagaatctgttccctgatagattgttatctggagactgcatcaatgacccacattactactatgatggatccaaaataaccattactcacacatccttcccacgtacgacgaacagctcacaaaccaagaagcgggtaactaacctagttgctaccattagatactattgatgccatgcgataaaccactcaccaatataatgttgctaaaaaagcaaccaccaccttaaaccagtcttaatgatattttcataagcccttccaaacatatattctc

SEQ ID NO: 28747 - DNA, 316 bp, Glycine max
ggacctatgaaactaagcttgttatgagcgagcgtggagctctaatttttttaatagctcgcgggcccgaactgaagggacaatggacacgagatgtgctaccaccttgtcttccaagtctcatgttttgcccagatacaacgagggttgcgcatgcttccatccatatacttggtatgttccttgtcaaactatcgtgagaaaaccccttagagacgcttcattgataaaaactcccttagaagttacagctttgatacacacacccctctcataaatagggctaacatcttgagaagcttgcttatgaagattc

SEQ ID NO: 28748 - DNA, 422 bp, Glycine max
agcttatcgttagtttaatggttttattttacatcttataaaattttggtttaccctgattttataagatctttaaagttatatatttttcctaatgtttggcaaagaacattatccaacttttgagattgagtaaggttatgtgaaaaagtaaactgtcatcgtgtctcatacagccttttatatcttatctcggtttatcatcttatccagccttttgtatattaatttaaatttaaatatgaattatttttaaatcaactaaaatactatactattttttgttgttagacttctcaaccttcatttatatgtgtaacaacctatattgaattaaggattaggatttttgttcatctggatatgatgatattgaatccattcttgtcctcgagataaaatatctagaattgatagttgtg

SEQ ID NO: 28749 - DNA, 284 bp, Glycine max
tactcagcttttatgttgtgtcagggcttgattgctatattataatgttatagcaaccacatgttttctttcctattttaattctgtgttagtgttttatgttttttatttcaaagtttttgcatttaacactttgattgacagcttttgtttctctctgttgtaggtgaatcattagagtttgctacatccgtgctatatagctacatcacaggtttgcactaaatgacctaattctggtgtgctaaaagtgaagttaccatattctcttgatatcttttttt

SEQ ID NO: 28750 - DNA, 413 bp, Glycine max
agcttataagaacaaaattgccttattcatttccaaatatgcatgtgaattaggaagcatcaataagaatcaagccaaggttattgtgcaagcaatcaatggggcaaaacacaccaaatgattatgatgatggatggctcaaattctcacaaaggtaaactcatcactttccaattgagctttcaaaactatcatgacatgtagaggagaatcaaagatttcaagtcacaaaatgtcaaaaacttttattttcaaaacaattacccatttcttgaacatattctataattcaaaaaaaaacatgccaagtcctacatgcacacagaattgacccaaaatattaaactagaaatccgacgaaactaacaacaattacaaattaccacaactaacaaattaaaaaaccgacaaac

SEQ ID NO: 28751 - DNA, 430 bp, Glycine max
  unsure (1)..(430): unsure at all n locations
ganattatccgtctctagcatgtagcgatacaatacccactcctgctggtaaactatgtgccataatgaagctcggataccactctgttgcaccagtggactcacatatccttagaaaggagggtgtgggtatactacagtgccaaacaccccacacacctttgcccatctatgccacactctaaagcaattgagaaaccccacactgacgctgctgacatatactaaaaaccttctcaacctcagcatcctaatctacctcaacagtacatatatgacctctccagcaacaagtacaatccctcatggatgaatcatcccaaccttagatgggtgaatacttacaaccactactacaacgcgtcaacaacaaccttattgtagaatgttgttggccaatctcaccatcatacttccccaatcacaacan

SEQ ID NO: 28752 - DNA, 280 bp, Glycine max
agctttttatcattaaggactagtttgagtcccatctttgaacctcatctcatgtcataaagtcagaaatgcacaaattgaatcataaagacttttattggcttgtaatgaagctgggctacaaaaatattggtttttctaagattcaaaggcttaaattctaagagagcacaaatcctagacttaaccaggatgtcacaatactcccaccctttaaagaattttgtccccgaaattaactactctatgaacaaacttgggtacaattctttcaccctat

SEQ ID NO: 28753 - DNA, 194 bp, Glycine max
atgaactatgaggctcgtgatatgtgttgtttatgggtgtttactttgatgagacggttacaaagaatgatgcatgtgattcgagcaaagaacactactaacacttcatttttgtggatggatatttgactatagcgcctgtggcggacttcacggagtctcttacagaaaatgagattaaagttgtggccccc

SEQ ID NO: 28754 - DNA, 417 bp, Glycine max
agcttgctttcgcggaagttaaatatttgagaaaagctttttcgcggaagagaagacagaatgcttccgaaagaggaaaaaagctttttatgtttttaaatgaagggcaaaattgacctttcaataaattgctgggtgcacctagcatacccctcttcattatcaaaagatgaaggacaagcttccgttgttgctggctctggcccgttattattaactagcccatccctttccagcctcttgattatttgcgtctcctacatcaagcaggctcgtaactattactgatgcacccccttctttaaaaaattacatccccacatgccgagcccaagagattgtagttataattgggcccaatacgaacaacttctttccttttatcaaccacggccctcatatatatatatattaaaa

SEQ ID NO: 28755 - DNA, 481 bp, Glycine max
  unsure (1)..(481): unsure at all n locations
ccccccaccccctactctgatagatgatttaggtgacgtcccatactgagccgttcctcctctccccccccaacgcgcccccttgttgcgctcgtttaaccgcgacacnannagaaaatcactctctgggaggatgcccgagcgggcgagaagatatattgttaaatatacgcacgggggagcgcgatattgggggtacaacaaagcacaaaacttgcacttacagttgtgcttcccaagtctcccattcatcaaagacacagcgagtgtaacacccagcccctctctacataccgggtgaccttcttcagaaactctcctgagaaaacctacccgacaagcctctatgacaaagccaccctgagaagcccgaactgatacacccaccccccccccatatgtgggcaaacctcgaagaaaagccccttaagcagatcctcaaaagaccgaaacgctcccacccgagccagataacacaacn

SEQ ID NO: 28756 - DNA, 371 bp, Glycine max
agcttcaagcaatgggatttttattacactttttccaaagatttttcataactcattggtatatactactattgttaaaatatatctattatataatgtctatcggtgtatccacatatataaccagaacacaatcacggagtcattatcccatcccaaaataatgtctactcaaaagccaaccattcaggctattggccattacaatttcaaaatgggtgaatcctttgaaggagtggagatcaattccaaaaacatgcaagattacccgtcacaagagacatcatattacaagcgttgcgtatagacatacaccatggaataaaactcaaaaaaatccaacaaattagggatgtggtttatagataccc

SEQ ID NO: 28757 - DNA, 355 bp, Glycine max
  unsure (1)..(355): unsure at all n locations
tgntgngtgtgtatgataatgtccctaatgtattcctctatgattgtttgcatgacaccaacaatagcaatgttgttgttcccttgtcatggaaacgaagactccacatctgcattggggtggctcgtgtactacatacactacatctattttggaaccaacatacctatcatactccatacagtgaaatcaagcaacattcttttggccctgaatttggtgcctagtggcagattttgagttttgcaagaagtccccaagggattcaatgccaaaaccaccaagagttgagttgagggagaacttaataacttttgggtggtgtaactgattctgaatcctaactttggtcctg

SEQ ID NO: 28758 - DNA, 399 bp, Glycine max
agctttacaacagatttttttattttcccactaacctagaattaaaataacttaatgccattaacctagggaattaaaaaaaacttaatggctgagtgtaactgaaattgtggcaaccaaaagtcacccccaacagccaacaagtcagccaccatttggtctcccaaaaggctgatgcctaggttgccaattgtgatgagaatcatgaaactcgccaaatacaggctaaaggcccaagtggagaaggacgaaggcctaagtggagaaggacaaagcccccgagtggagaaggatgaaggcccaagtggagaaggatgaaggcctaagtggagaaggatgaaggcccacaggcagagacactatcaagacaattaattgttgttgaaggcccaaactaat

SEQ ID NO: 28759 - DNA, 368 bp, Glycine max
tttgagcaattcaaatggtcataacttttccttcggggtcagattcaggcgcataatatatcgagacgcaagaaattgaacaacggaagctctcgagaaattcaaatgctcataacttttaacacggaagtccgattcaggcgcataatatatcgagactcacgaaattgaataacggatgctctcgagaaattcaaatggtaataacctttcactcggatgtcagattcaggtgcataatatatcgagacgctcaaaatttaacaatggaagctatcgagcaattcaaatggtcataacttttcacttggaggtccgattctggcgcataatatatctagacgcacaaaatttaactacggaagcta

SEQ ID NO: 28760 - DNA, 279 bp, Glycine max
gaaaaaggctgcccctcctaaagtatggaaaggttgaagaaacccatccccaatggagaatgagtgggaaaaaacacatttttgcttatagggaaaaaagaacacgcccacctcttggtttccagcctgaaagaaagcttattgttatgagaaactgcgcataatagaaggatcttgctaatacttccttagaattattttgtacttaggcatattctttgatgaaaatcgcatgcgaggtttcccgataataatatgggaggaaggcatcgttttatt

SEQ ID NO: 28761 - DNA, 401 bp, Glycine max
agctttgccaatttagttttcgttttcgaaaggatcgaagtgggtctgagaagaggcaaatttgattatcctgctttgatgaataagaagcttggggcaaatggagagaataagaaggagggagaaacccatgttgtggctgccgttcctacatggccaaatttcccattagccccacaatattaatactcggccaatatcagtccttctcattacccaccaccctaccagccaagaacgcccaatcatccacaaaggtcatccctaaatcggccacaaaatccacccaatgcacattactgtaaacaacagtcacaatgctaataatatggataaatttgatgtccttgtctctcattctctcacaattacatctttgcttatttaactttcactggaat

SEQ ID NO: 28762 - DNA, 350 bp, Glycine max
tattcgcaaaacaagattttttttttttcgttcatatgagatggaaaggtaaacaataaaaggaagacatacgaaatttatcttttctcacccttatattacatgaattacattcagtccttgacaaaaaaattcactcactagataggacaaagatttaattctcactttccaaatatttttttcactagggtctttggattaacaatattaattgctgctggattcatttttcacactatattaattaggattagctaattatcccgaatcaaagaagatgaaagagaagaatcttacgctatttctatggtgtttgagaattaatgaagtacaggataacttacaga

SEQ ID NO: 28763 - DNA, 316 bp, Glycine max
ccggagctcaatacccgcgcagcagcttgcattttttcctttttacagaccaccgggttaaaaaaccatttaactcccctttcgcaacaaacctgggccttggttaatatatagagggaaaccctgttggggtcgcctaattggcaaatccatactccccatattaatctggccaatcaatcctttttccccccccctccagctaaaacctatttccccaaaggtatcctaaatgtcttaatcccaattcattcccttataacatcccacgttattcgacaaattctaccttgttatattccaaaaaatttttttc

SEQ ID NO: 28764 - DNA, 530 bp, Glycine max
  unsure (1)..(530): unsure at all n locations
tctccatcgactatctcacatactccaangtcgtcanatatatatcatgtagaaaaataactactgcctgaaacatcatctcancacataatagatcgctaattttatcatctttaaacctccaaatccccgagaaaatagaaacttcagcccagccgtcagagagggtatatacttatttggttttaagcacacgcaaaccttacccaataaacgaataacttccgaatttcacccttcctcaaccctctatatatacatgaaattcatacactgcctctgaaaacaaaactctcttactaacattggaaaaaaatttatgaatttacactccccaaatattttttaccacaagctctccttggaaaaataatcccacactgctcgctggattctcttctttcaaactattatcatatgggagtcaccaatatttcccccactccttacaacaaaaaagaaacacactcttacccctatatctattgggctttgaaaattacatgaagatcccgcaccactctaaaacn

SEQ ID NO: 28765 - DNA, 127 bp, Glycine max
gttttattttaaaaaaccaagaagagattgtgtttgcgactaaccgcattcccaacgataaaatcgccatgttgtacttgaaaatatgatccacgagaatgattttgcatctatgttagccacgaca

SEQ ID NO: 28766 - DNA, 421 bp, Glycine max
tgaaaggtgaccttagactcgtgacaccaggacctataatcccgctaaaaaggtaagtagactttttgttttttaccaacaaaccaaaaattcgcctttgtttagaacacccggcgcaaaaaatcggtttttccttttcaatagtgcattatacacacctactttctttaccctaacaacaaattttcttacatttaatttacccctcttagttttcctaaaatgctttatacttatacctgacatagctaagttgcccccccctttttctcttactttggaaatagaaaactccagacaatttttttctcttttggtcaacaggaacccgtcacaaaaataaatacttctcgacctgtccccttggaaaaatgcctcggaaacacccttctgtaggaaaaacatacattttcgatccccc

SEQ ID NO: 28767 - DNA, 227 bp, Glycine max
agctttaaggtaagggggagggtgttttttcttcacgattttggctgcaaggcgaactttgaacattgctcctccattccactgagcgtaattttgtgttggggcgactggacttttaatcaaagccatacttaccaccattttgttgggtccttagaacgtcatttaggctcccggggcatttccctctacccataccggaggaataaccactccccgaaatggct

SEQ ID NO: 28768 - DNA, 398 bp, Glycine max
  unsure (1)..(398): unsure at all n locations
tatactaacgcttagttccaaagacaaaatgagtatacttcgcactgctcttggtcnaacagaaaaacgcgttctaatgaccggggacttgacacctgcctaataataaccatacatctcctcacaaaagtttattataaccgcatatgattatacacctgtaactattgatactaagaatgccgataaaaggaattattgtcttttaaaaataaatgttcgacatgttattatgaaaaattcctacatttggaacccataatcataatatttgatcccccccaatctgggattttcaacctccttaggaaggagaaaacttgaaactgcattattacagtcttatttaagaaaacaccggttaactttcaacatttttgttgggtgggagcctttag

SEQ ID NO: 28769 - DNA, 319 bp, Glycine max
agcttatagttatggggcggggtgttctttcttcacgttcttgggtgcgacgcaaacttagaccatggctcttcctttctatgaggcgaatcttcatgatcggctgactgggcttttgacctaagacatacttagcaccattttgttggctcttaataacgctatctgtgccgccggggcatttccctatgcccattccggaggaataacagctccccgtcatgactcattccattattgccttatgtacttcgacatatcaaggctgaccgaagagggagatcacggaagaagtgctgacctgctcacaagactggac

SEQ ID NO: 28770 - DNA, 425 bp, Glycine max
agcttaacaatcagtgtcatacttttgtttataacaaagcaggtataaatatgcaatactagactcaaaatatgcaacaaacactagacctaaatcagtgtcacagaaattggaagaaaatattttatccaagcacagacttcaagccttattccatgtattggggggaagttatggctggccatatgggtagaggtgtcatagaagagcaggtatggaggaagggaccttggactgctgaagaggacaggttgcttgttgagtatgtcaggttgcatggtgaaagcagatggaactctgttgctaggcttgcaagtaagaaacaccaaacttttttcactgttttgtttcttaatatatatgattggattttcacatttataagtgacaatatagcaaaaaaacaactgaaattgttttcaact

SEQ ID NO: 28771 - DNA, 370 bp, Glycine max
tcgttactactaactggtttcttacaatgagataatttattcttttttaaaagaaagatgcctccatttcgcttgctttaaagataaatgctttttatttgaaacattttaacttcaatcaaacattgaccataataattaagaagtaattatctattattattattattattatgattataaactaaagcatgaattgtaaaatcgtcacaaaagtttctctttcacatcttatcttaagcattaattaacattaacaaattaaaggtaaacaatctttgcttcttcttttataactcttggattgtttagaactcttgtttatacagataatatggaatagaatttggaaatattatttgttaccaaa

SEQ ID NO: 28772 - DNA, 415 bp, Glycine max
agcttagccctagaggggatggttcttttcatgttttggagaggatcaataacaatgcctataggttggacctcccagaagagtatggagtcagcaccacttttaacatttctgatttaactccttttgcaggtggagctgatattgaggaggaggaactaacagatttgaggtcaaatcctcttcaaggggaaggggatgatgcaatcctccctaggaagggaccaatcactagaaccatgagcaagaggctccaagaagattgggctagagctgctgaagaaggccctagggttctcatgaaccttagggtagatttctgagcccatgggccaaggttgggtccaattatctttgtacatattagactaagatgtcattatatttggtccttgtatatagggctccatattgt

SEQ ID NO: 28773 - DNA, 291 bp, Glycine max
tatcaggacctatgaatctaagcttttcaagaggcaacctatattctattttatgtcttttagcttaggtagtctaggttgcaatttatgtttggtaaaaaaaaaaactgttggaacaattagtaaaaatagcgcaagaacaacaaaagaaacttatgtgtaacccctacataaattatgcatgtggcgtgcataatcattagcattttgaaaactatgcacccgtgcatatccaacacacgcccctctccaaaaaaagaggtgtgtgtaggaaaaatagaaggaatggaa

SEQ ID NO: 28774 - DNA, 421 bp, Glycine max
agctttttgactcttgattctttgtctcttgcttaactcttgattctttggcatcatcaaaataatcttggaagtcattgcttccacacaacggaggtgacagaggtgtcgttggtctgccaacaccatcgccatcgctttggtcatcactttggtcatcgctttggtgattgatgtgatcaaagaactgttgatcctcatcgtcactaaaatcatccatgttttcctcatgaaatcatataatgaaatctttattagcgatgggatgttcatttcggtttgatgtttgtgtttgtagttgttgtgagagtgatgtaaaaggggatgaaggatggttttgtttgtcaaaggaggtttgttggacataaaaaaaatcatttttggataatagctgtgtgtatgaagtataaacgtcaaagga

SEQ ID NO: 28775 - DNA, 71 bp, Glycine max
atctattttaaatccaagcccataaataaaatataaatctagataagataagataagataagatttagatg

SEQ ID NO: 28776 - DNA, 421 bp, Glycine max
  unsure (1)..(421): unsure at all n locations
agcttgcctaaagaaaagaatacttgagttcgatattattgtantcaaagagcacatgtatatatgtcattaccttattctttattatgttaagaggcttattaagaagaagagaaagggcctttgagaccgaaaccaggccgcgagcactctgggattccaatacaaaatgacggacccaaagaaacgcctcgacgggattactactataggcaccatatttacgcaaccttagtaatcaattaatagtttgagggggagaggtccaagtgatattattattattatttgagttaatgaaacaggtcagcgagatctttggctgctaatgatactccaccatttggtacatactcgagagctgctaaaagtgtcccttcagccattgtaatgaacgacgatttatcttctgatgatgatg

SEQ ID NO: 28777 - DNA, 377 bp, Glycine max
aactaattgataacccgatgaagagcatttttggggccgttctcttcttacaggttcccatagacactttataactgatgttgccatgattacatttggcatacatatcaatcaaggcagtttccacaatgacctcagactcgagcttttgccttattgcccatgcatgcaggcacttgccatatttgaaataaaccaaactgccacatgctgatagaaaagaagctatgcttaccgaatcaggtttaactccttcacactgactcctacgaaaagcatcagatcacttctatcatccccattcaaaattatccattaatcaaagtagtccatgtaaccacatctttctcatccatcctcttcgctagcaaccatgc

SEQ ID NO: 28778 - DNA, 417 bp, Glycine max
agctttctctaccgtaattttattttatcggccagtgtttttaaaaagaattgcgcaatgtcggcagaaaaatatcagtcggggctatataacgaccgatgtcaggtatttttgtttcaattcaatccctgaataatttttggatattgtccaataggaaatgttcgatcggcgtcatcaggtgatgctttttattttagacctgctggatcggtcatctttcctggccgacatcgactatcatttttttttatcagtgtcggtgaataatgttttttggccgaggtgggctgatgtttttcgagccgagtaaatgagaacacgccactgtcggccgaaacacagcttcggttgagctcgcacgaaaaaacaaagccgacctacattgtaagttttgtaggcgacaccgaacaacaa

SEQ ID NO: 28779 - DNA, 141 bp, Glycine max
aaaataacagtgtcggacggccatggtttttcgagcgaacttccccaaagaggggtttcggccctgcttggcatgcccccatgctctccgccaagataactatagcgcatatggatataaaactgtaaacattgatcaccg

SEQ ID NO: 28780 - DNA, 418 bp, Glycine max
agcttctagccaaatggacttattttgaattaattcctttgatagcccttttgagccttgtttccctttccttgttttgaagctcactacaagccttaaatgaaaaaaccatgatatcaccatatccttaaggaattttggagctttggaattgttttgggaataagtgtgggggttttttgtttcattggataacttgttttgttggctatgcttcatgatgtattttgggccatacttgatgtacattgtatattggttaaatgttggacatgctgaatgaaatgttgtttctcaaaggctatagagcaaaaaaaaaaaatattcgaaaaaagaaaaagaaaagcaataaagttgagtgaataagattttaaagggcacaagaatgatgaaactcttggttctactctttatgttt

SEQ ID NO: 28781 - DNA, 367 bp, Glycine max
taccgcagcaaggcgcgcttagctcaatctccacgacacagaacaaaggcttagcacagcagctgcacttagccttattcaaaggactgactaacaaaagcctagtggcgcttatcctgacaggttaggcttagcgctgaacaaaaatttcaaaaaatcttaatgtctaaacactaagcccgctgagtgcccagacgcgcttagtgagttcatcattttcgttcatcagcagggatgaacgcgcttagcgtgacatggtccgcttagcgcgatcatctggaaatccaaaattttaacagttgtgatgaacaggctaagcgcagcaagcgcacttagcgcgttcatcgcgatttccaaacagaaacac

SEQ ID NO: 28782 - DNA, 418 bp, Glycine max
agctttcgcctcccgatttttcttttatgagccccgcaagggcgccgacatcctcgtggaggcgctggagcggcagggcgtgacggacgtcttcgcctaccccggaggcgcctccatggagatccaccaggcgctcactcgctcatcctccatccgcaacgtcctccctcgccacgaacagggcggcgtcttcgccgccgagggctacgcccgctcttccggcctccccggcgtctgcatcgccacctccggccccggcgccaccaacctcgtctccggcctcgccgacgccttgcttgacagcgtccccctcgtcgccatcaccggccaggtcccccgccgcatgatcggcacagacgccttccaagaaacccccatcgtcgaggtaacacgttccatcactaagcataactatctc

SEQ ID NO: 28783 - DNA, 321 bp, Glycine max
tgttactctgtgtttgtgtgtttggaattgtgttgatggttcgatggaacctggtatttataggagtgaagcatagataaagttagagataagataaattgtagcttatagataaaagttagaagatagttgtaccttatagataatgtgtgaccttgaagataattaactacatgctaatagataaaggtattcaaatatattcaaatattaataggttagagataatctgttggttagggagtccaactactaaggaccgagtgttcgtgcttctattacagggttggcatggagggctaaccactgtctaaaagtgtc

SEQ ID NO: 28784 - DNA, 420 bp, Glycine max
agctagttgtgattttaattttgtttcctatacgacaaactcaaagggactaaaaaattgaaaaaagtttgcgatcttaacgagattaagatggaaaaaatgtgattttttagggatcaaaaacgaatacaacgacatgcttataccaaaattcaaaaataaagagatataaagactcaaaataaacaaaattcttaccgaaattagagttaaaacaagtacaaatttttcgaatcttaattcatagttatgcctttcataaatataaatatatataactgtaattttagtagattaaattatttcaagcgcagattaatgtaatattcgaaataccaaaattgtaaaacaaaagattctttattaaaagataaaatacgtgtctatcagaagaaaattattgcctttgatttttcctcg

SEQ ID NO: 28785 - DNA, 296 bp, Glycine max
tgcaaaatatagagaaaagaagacaagggatttgatcaagtaagatgcattaaagatgaaaaagggaaagttttggttacatataaggatatcaaagagagatgggagaattacttttacatgcttttcaatgatggtcaagattcaagtactaatatggaggggttagaaatccaagaggaggaatgaaattggtattgttatggcataatttgcattggtgaggttaaaaaaaagtcttaaaaaaatggaaagggtaaagttgttggtccaaatggtatccatattgaagtttg

SEQ ID NO: 28786 - DNA, 414 bp, Glycine max
agcttccattgttcaatttcgaggttctcgatatattatgcgtttgaatgagacctccgagtgaaaagttatgaccatttgaattgctcaagagcttccattgttcaatttcgagcgtctcgatatattatgcgcctcaatcggacctccgagtcaaaagttatgaccatttgaatttctcgagagcttccgttgttcaatttcgagcgtctcgatatattatgcgcctcaatcggacctccaaaataaaagttatgaccatttgaattgctcaagagcttccattgctcaatatcgagcgtctcgatatattatgcgcctgaatcggacctccgagtgaaaagttatgactatttgaattgcttaagagcttccattgttcaatttcgagcgtctcgatatattatgcgcctg

SEQ ID NO: 28787 - DNA, 308 bp, Glycine max
tttgagcaattcaaatggtcataacttttcacttttaggtccgattcaggcgcataatatatcgagacgctcgaaattgaacaatggaagctcttgagcaattcaaatggtcataactttttactcagatgtcctattcaggcacataatatatcgagacgctcaaaattgaacaacagaagctctcgagaaattcaaatggtcataacttttaactcggaggtctgattgaggcgcattatatatcaagacgctcgaaattgaacaatggaagctcttgagcaattcaaatggtcataacttttcac

SEQ ID NO: 28788 - DNA, 377 bp, Glycine max
agcttcaatgtttgtatgttgtgatataatatttgaagcagctgcaagcacagttgcagatgataaatagaatcaacatgtcatcgatgatgctgccattgaccatgcagcaacagcttcaaatgtcgatgatgtctccaatgggcatgggattagggatgggtatggggatgggtatgggaatggggatggatatgaactccatgaaccgtgctgacatccctggcatccctccagacctacacccttctgccttaatgcccatggcagcctcaagggatggcgcggccgcagatgctgtcggggaccgacttcaagggactccggccatcgtgaggcctgcccccttgtcgacattttttgcctgccaatgacac

SEQ ID NO: 28789 - DNA, 290 bp, Glycine max
  unsure (1)..(290): unsure at all n locations
tgttatccaacgctcatcttggttgtgaagcttcttcttccatggcttattccgaaatggatggtgcctcctctcacctcttgtcctttgtcatccgctgcacctccatggtggaaaatcaccattaaaggacctcattgaagctcaaagattcaacctccatagaagccccacaagcaagcttccatcaactggtatcagagcaaccgattttcnttcatgaccacggatgaacccccttagcgagacatggtccgcttaacgcgatcatctggaaatccaaaatttta

SEQ ID NO: 28790 - DNA, 368 bp, Glycine max
  unsure (1)..(368): unsure at all n locations
agcttgcgnctttttttttcattttaacgacgcagagcacgtagccagaaagtaaaacattcacactaggctgagttgtcgacgaattctaatctagcgagtaacgaaatcaacgatttgtcggcaaccaagtacaaattaacattgagtgggaacaaaccacaattagcaccttgatttcgagtctgagaggctgaacatgcaagtaacaagagagaaaattaaagccaacaaacaaatacgagccagaccaaggtttcacagcggatcacgttgaaactgaaatagcaagagctagataagccaattgcgaggctcgcattgcaagccagatgctgcaaaacattcgaaattgcaacagcaaaggg

SEQ ID NO: 28791 - DNA, 266 bp, Glycine max
tctacggttctgcatccagagagatgaatgaattttgatctatgagtacatgcctaacaagagcttaaacttctacctatttgtttggcttttggcttatcttctgtcaaaggaaaaatgtctacatgtagcatatttacagggccaccttactttgaaacagattcacctagaaagaatttgctagagtgagaaaaacagttgaacatcattggaggaattgctcaataacttctataccttccaagtattcaagactaaaagtg

SEQ ID NO: 28792 - DNA, 422 bp, Glycine max
agcttgaaggcttatagcccactatcttttcaaagtagaacactggtaatgtgtctactatcattgttatcatctccttctccatcattgggggcgccacttgagctgccagatccctccacctttgggcgtattctttgaaagattcgtgtccctttttgcacatattttgtagttgtattctatccggaaccatatcagaattgtattgttacttcctaacgaaggcaaccattaggcccttccaagaatggactcgggaagattccagattagtgtaccaggtgaaggctgccccagtgagactttcctggaagaaatgcatgatcagcgtttcatcttttgcgatgcccccattttcctgtagtacacctttcgatgattcttggggaaatttgtctgatgcaatcatacctcgcaaa

SEQ ID NO: 28793 - DNA, 324 bp, Glycine max
tgacattcctatcatatcttaacatttttatcatatcctaaacgtattttgttatatctactcatatcttatacccactgattatgggattaagatataataatattatggcttaacagggtctatataaagcatgttaggttaagagggtaaaggcagaatacacttgatgctctggttaggcaacctttaagcctaattgaggaaaccctattctgaaacaattccaactctgcacttaacttggagaattagactacttcttgactatagaagccgggtatctaaatatggttattatcccaagcctattatttctgatac

SEQ ID NO: 28794 - DNA, 425 bp, Glycine max
agcttccaagaataaagatcaagtattcttactcaagattcaagaatcaagagaagacttaatcaagattcaagattcaagaatcaagagaagacttaatcaagataagtatgaaaaggttttttcaaaaactgagtagcacatggatttttctcaaaacatgtttaccaaagagatttttactctctggtaatcgattaccaaattgttgtaatcgattaccagcagcaaaatgaatttgaaaaagttttcaaatgaatttacaatgttccaattgatttcaaaaaagctgtaatcgattacaatgttttggtaatcgattaccagtgcctttgaacgttgattcaaagatgttttgatgataacaaaggtgatgacaaaaagctcaaaggtcaatcaaagaatgagttcaagatgttcaagat

SEQ ID NO: 28795 - DNA, 325 bp, Glycine max
tccatcaagtggtaatcagagcacaagagctttttgttgtgctccttaaacctccattaattttttttctttaccttctcttccattgatgcttcttcatttttctccatgtatctcctcacatgtcttgttctaaatgtcgctaacatgattctttagagtttccaccgattaaacttgctatagaaactagatttgattctctatggttcaaatatgttgttcttgttcgtgaaccatgaattacgttgagtttatgttcctttgcgtattgtcgtgctattttttgaggctgaaacctaaaccatgagattcttacagaaat

SEQ ID NO: 28796 - DNA, 421 bp, Glycine max
agcttgcttctacaggcctcactttttttattgcatgaggtttcagtagccccaacgcagaggtgctgcaaggagtccgcaaggcatgggaaatggtgcaaaagaaagacaaagaacttaggggaagtagcaacggggccgtcgacagctaccataggtggttgaaagcctatgcacaaggtctgagttggcttctgaagctgagagctgctaaggaggaggaggccgaaacaccggaagaaagcgaagaggtgcaagccctaaaaacggagcttgagaaagcccaagcagtcaaggaaaagttcaagtcaacagtcgtcaggatccgaaaggagaacgacaaactgagagacgtcaacatagccaccactaaggccttggagcaagagaccaaaatggcctgcaaggaagaacacggccg

SEQ ID NO: 28797 - DNA, 311 bp, Glycine max
tgagcttggttcaaccccgtaatccaaggaatggtaatttttattgccaatacttcaacaacatctcataaggatgaatgactcgggcatactttaagcttatgcaccgaaaatgtaatttgagatgcccgaaaaaacaccattttctaattaaccatgcgttaagtaccatgttcaattattttgtattggtgttgggtgtttttttttaaaaatggggttatgatcccaacatggttggctcatggtgccttacacatgccacttaaaatgtagtgtgaattttcacgcctcccccttttttgttttgt

SEQ ID NO: 28798 - DNA, 292 bp, Glycine max
ttggaacgattttaatatttgactcggaagaccgattgagtgacatgtggtagtgacatgctccaatttaaacaccgcagcttctagcaaatttgtaacgagaataactggtcggtatgatgtccgagtgaatcccgctctatatcgagacgctcgaaatatataaccaaagcccgagctacacttgaaaactatagatttgtactcagatgtgcgattgagtgccgggcactccgagactgttgaagatataaccgaacctcagtaaaagacttaaggacaataacttttc

SEQ ID NO: 28799 - DNA, 352 bp, Glycine max
taaatatcgagcgcactcgatatataacgagactattaggacttccgagtgaaatgttattgtcgttcgactttgctacgagcttaggttttaaaattcgagcgtcacgatatattacgggactcaatcagacttccgagtgaaatgttattgtcgttcgaatttgctacgagcttcggttttaaaattcgagcgtctcgatatattacgggactcaatcggacttccgagtgaaatgttattgtcgttcgactttgctacgagcttcggttttaaaattcgagcgccacgatatattacgggactcaatcagacttccgagtgaaatgttattgtcggtcagaattgctac

SEQ ID NO: 28800 - DNA, 415 bp, Glycine max
agcttgcatcctgagactttctttttgatatatacacatgttgcttatgagtacatggctaatggttcattggataaatggatattcaacaagaacaaagaggaatttcagggggattgggatacaaggtataacatagcacttggaatagcaaaaggactcgcttatctacatgaagattgtgactcaaacattattcattgtgacattaaaccagaaaacgtgctcctagatgataatttcagggttaaggtttctaattttggtttggctaagctcatgaaacgtgaacaaagacatgttttcacaacacttagacgcactatagggtatcttgcacctgagtggatcacaaactgtgccatatcagagaaaaatgatgttgatagctatggtatggtgttgctagagatca

SEQ ID NO: 28801 - DNA, 308 bp, Glycine max
taagcctatagaaggcaagcatatggccttcttgatccacacgcgacaatatcagaaacgagtgaagaacacttttgacaagaaggtacgcccgtgccggttcatcgaatgggactcggcgctgaagaaagtctcccaagctttgaaagatatcagaagaaagtgtgccccaaactatgatgggcctttcattgtaaaaagggctttctcccgaggggccctggtgctcgccaacatggattactaggagctaccttttcccgtgaacttcgacgttgtcaatcgatactacgcttaacatctggggc

SEQ ID NO: 28802 - DNA, 398 bp, Glycine max
agcttgcaacagcacggttttttttcatctttatatccgagagaatatgataatatttcgaaaaacgttaccttgaaaataataaatgaattatcctttaaaataaatgatttgtttttctgaaaacgaacatgtatattgcgtccacagataccctggtcacatgactgattttctatttcttgtaaaagagcatcttctgggagaactctattttctacatcaaaaagtttacgaattagaagacatttgcgatttcaaagattcaaaagctcacttattgaatgttatcgattacaaagtttacgaattagaagacctaagtctatgaacgatgagacctagatgtgttgttgattacaaatgttatatcttagcgcaatgaggtcatacaaaaa

SEQ ID NO: 28803 - DNA, 417 bp, Glycine max
agcttttcgattcattctatgtttctgtagtggtccacattgtgtttcgtgcatttttattctcgttttgcttactttttatacccccctgttgacgtgcttaagccattttacttaagtcatttctcgcttaacttaaaaataaaataaatttccaccaaacgtttgaattgtattatccattaacttcggttaaaataaattccgaccgttcggtcgtgccgtaaccacgttggaaatcaaaaagaggtaaaaaataatataataatcaaaaaatatctttttagtaaaataaagcggaaaatcaatcggacgttttctctttgggatttctcattcttaatcgaattgattaataactaaaggtgaaactaaggctaaaatcaactcgcctagtcaagctcgtccacaaaaata

SEQ ID NO: 28804 - DNA, 334 bp, Glycine max
tgttacatatgttctcaacaccaaaacgtttgttgtatctagtaagcatgtctgcaagttggtcaccggagttgacaaagtcaatgatgatttctcctgagagcaccttttctctcacaaagtgacaggcaatttctatttggttagtctgctcatggaagatcggatttgatgcaaccgggagagcaacttgattgtcgcataatatcttgagtgtctccaattttagctggtggagaatttgcctagccatgtaaccttggatgcaatagctgccatagcatgacacttagctttaacactggatatagcaaatggattctgcttgttactc

SEQ ID NO: 28805 - DNA, 419 bp, Glycine max
  unsure (1)..(419): unsure at all n locations
agcttgaaaaagggactcgattatctgagttatcaatcaancaattcccctcttttattgctacagaaaaaaaaaattgaaattgcgaggttggacgcgtgcgtgggttgtataaagaaagaaaggtggattcagagggaagggaaatattatgaaaaagggttttaagaaaaaaaaaactataaaaacagaaattgtggataaaaaccaaaaacggtataacaaagtagtatacataaataaataaataaataagaaaaccaaaaattcccctctaaaaaacaaggataatatgataattttaaacaaaaacaattaaacttatatatctgattttttttactggaatatctccgatttaaatcatggggagttatcttataaataataatttaagtgacttttatctaatctaaaaa

SEQ ID NO: 28806 - DNA, 368 bp, Glycine max
tccttatcactactttataaatgttggggtttttttgattttcttgacagaaagaaaaaaaaatattatagagaaagagaaaagaagtatcattgtacaactatgcaatccaataaagcatccatcaaaatagagaaagttaaacagagcctaagaggctaaacaaatgcaacatatatataaaattcaaaaaatgttgaaccatgtggagaacattggagagaagccatgaacattatgctatctcccaaaacagaacagtccttgcagataattccttctgctcaccccactagagaaccacataatatggggacaaattctaggaatccttatcattacaaaaatcataagttgcattggaagag

SEQ ID NO: 28807 - DNA, 418 bp, Glycine max
agcttttgtcatcccctatataatttcatttttaagggccaacggcttgaaatggtattttccgtttttattggttaaatgtagatttctaaaaggcctaaaatcaacatgtagttttactacctctttcaaaaataaagagatcattaatggtccaatgccttaatgtcttctctcttttcaaaagaatcaaaagattatttaatggtccaacgccttaaatgacctttcattcaataaaaacatatcttgcaaaaaaggataaaaaataacttaaccaaatactttgttctcaaagaactacgtaggtttgatttcctcatcacaattaaggaatacgtaggagcaagggaaacaccctcgtcgaccgcaaaaagataaaaatataaaaagtacaaaaagaaataaagacgtaaaa

SEQ ID NO: 28808 - DNA, 324 bp, Glycine max
  unsure (1)..(324): unsure at all n locations
nttcgattcattctatgtacccgtggtggtccactttgtgtttcgtgtatttttattctcgtttcatttactttttatacccccttttgacgtgcttaagccattttatttaagtcatttctcgcttaacctaaaaataagataaatttccaccgatcgtttgaattgtattatccgctaacttctctcccttataggtcccttagataggggcacggagcaaacacgctgcgtgccatttttcacactgccatgcataaatatcatatacccatttgcttatgttcagagaatattgtcatgctattgcgccttttgcatatg

SEQ ID NO: 28809 - DNA, 414 bp, Glycine max
agctttccgcattatttacggaatgatcttagagttgaccatagcagaggtgtccatagaagccattgcagcacttacccaatactacgaccagcccttgagatgcttcacattcggggacttccaattagtaccaaccattgaagaatttgaggaaattctaggatgtcctctcgggggaaggaaaccatatctttcctacgggtgtctcccctctttgagcagaattgcaactgtggtcaaggattcacccagaggtttggaccgcataaaacagactcggaacggcgtagcgggcctgccacagaagtacctataagacaaggcgaggggtatggccaatcaaagagactgggtcccgtatatggatgagttagctttgctaatttttggggtcatcctctttccaaacgt

SEQ ID NO: 28810 - DNA, 117 bp, Glycine max
atgaccacctttctggtttgtaaacaaaatcttaaggctttttggcattatgaaaaacctgtgatttacggttacgaaagctggtatcgttctcactggaatatggcgctcaacatc

SEQ ID NO: 28811 - DNA, 398 bp, Glycine max
  unsure (1)..(398): unsure at all n locations
agcttgtaaaatttcaatcccttttctgttnnctctccattccccagtttgtgctcaaaatctctttttcttgagagcttacatgatgaaactatccaaagacatcttggttccttagttcatttcttgatttcattggtaaacaataattccttcttctcttatttttcttaagctcaattcctatttttcttgcatgagctcttgaatgaatttggtggtaaaacctagcttgaagttgttttgatgttggcttaaggtctactaccctgttagagatcacaagtggaggaagttcacttagaaattcactaagttcctctttgcttcatccttcttcaaaaggttgaaaacctaaggtcctatttatgtaagagaaacttttaatgtgaaaatta

SEQ ID NO: 28812 - DNA, 361 bp, Glycine max
  unsure (1)..(361): unsure at all n locations
tagcaagatgagcgcaaatataatgttttatttatacaatgncagatccaagtccatataaacagcctcaatttcaagaggttcaatttaaacttacaggctaaacaaattaaacttgttaaattactaagaggagttgagaaaaaagatcaccagtcaagtcgaagaagtccatcacagacaaacaagcatgttatgaccaaaacatatgcaatacagattcttcacataaaatagtataaatagcacatatttttcaagggaaaattacaatcagcctcttagactttacccttttgcaaaatggcatcacccaacgttaaatttgtcccaatctattaacttaaaaaatattacaata

SEQ ID NO: 28813 - DNA, 426 bp, Glycine max
agctttaaaaaagttactttggatttttataaaaaacccaaaataatcttttgtaagagctaattgaaggagcttctggttttaaggagaagggaagcccaaaaaggtttaatcaattaacttataccttcaaccaagcttactacgatgatatattctcataccttgtggcaatatgctcttgtaacctagttgtttatgtgtttcacgaggaatgcctggagtgccccatttttctccctcttgatggatgtatgccccatttatcataaagttaccttcccaagaaaaaaagaaatgttgaagtctgccttaaaaccaatcttttcctcaagccatctacgtatataagcttcatgttcttttagtgaagacaaaggagatccagttgataccataagttcagtggtaggaagcacactttct

SEQ ID NO: 28814 - DNA, 225 bp, Glycine max
cgaaaccgcgggacccgggctccgggaggggcaggaaaaaaatgtggggccccgggacaaccccccccccccgggacaaacggggccccagaaaggaccgtgacccccggagggttgggacccacagggggggggggggggccccagacccccgcacacaccaggggggacggggggccgcggccccaaaggaaaaatggccccgccccagggaaacacgggtag

SEQ ID NO: 28815 - DNA, 423 bp, Glycine max
  unsure (1)..(423): unsure at all n locations
agcttagggtgagtggtagnttctttattatcagtgcttaattgttaatttcctagcctctcactcttttttcctcatgtattgttggcaaagatgtgattcatattttactaaaatcaattcccaagattcataatatggtcagaggtgactttggctccttgcatggttttgatttccaggataagaaatcccgctaggatatagatcaacggagaaattttcaaagttttaccaatcctttgccttacaagaactcttccttggatttgaatgcatactttattggggaagcatttgcttataataacactaaaaatcatagaaggggtactaagcatggttttgatgggatgagatatgactctgcttctaactctagtgatcactatgaagagaataaccttgtggttaagcagacag

SEQ ID NO: 28816 - DNA, 416 bp, Glycine max
  unsure (1)..(416): unsure at all n locations
agcttgggtgatgttgcgcgtactgatgtttactttgaggngcttgctggggtttgacccacgcgggtgttgaagagacggcatgggcatctccttccttcctttttgcccctgttgccccgattcttttggcattcacgtctgtggaggaaacgtaatcaaactttcctcttttcaatccaacctcgattctttccccggcaaacaccagatccgcaaagctggacggcatgtaacccactagcttctcatagtagaacactggcagagtgtctaccatcatggtgatcatctctctctcaaccatgggaggagctacttgtgccgacaaatccctgcatcgctgcacatattctttaaaggtttcaccctctttcttgaacatattctgcagttgagtaccgtcaggagccata

SEQ ID NO: 28817 - DNA, 365 bp, Glycine max
tgacatgaggaagtgttgaagggtgaaacttcttgcttttattgttgaccacagagtggtacctggagatatgtcgcgggggtcaggagaccttggggacgtcacgtggggtgctattgcccaaaaccaagcttgaccaatcccgacccaacccgggcatagtcggtcagtgagaacatgtgacgtacctaagcaggcgagctcctggcagtcaacagataaaaggaaaacaagaccacagagcaaggaggcttgtggtggctggccagctgtgaattttgtgtaatatgtggattgtggcctctggtaatcgattaccaagggtgggtaatcgattacaaggcttaaaattgaagacagggggc

SEQ ID NO: 28818 - DNA, 420 bp, Glycine max
agcttggggttgcatttgggcgcttattttaattccctacgctgtccctatatatatataaaccagccccacaatcctaattttacaaaatcacattcatacgtcattggggcatttcaccgagcacttggtgggcgcatgtttagacataaattgcaagagaatgggggcaatgtggcatgccccattgcttcagaatacaccataggcctaaggccttctcacacaaatccttaactcaacaaatcaagcataaaaagcaacccaaaactgccccacaagcatgagcatgttctcacaatttagagcaccaaaatgaacaaaatgcaccaacgaaaagcaaaaaactcaaggattgaatacttacttgttggagtgagtagaaacaacgaaaatgaaagcaaaacgcaaccaaaaatg

SEQ ID NO: 28819 - DNA, 359 bp, Glycine max
tttgagaaaacttccttgagaagctagagcttattacacacacccctctaataactaagctcacctccttgagaagcttccttgagaagattcctaaagaagctagagcttcgctacacacacctctttaatagctatgttcacctccttgagatgagaagctagagcttagctacacaccccttataatagctaagatcatccccattccaaaaatacatgaaaatacaaaaaaagtccttactataaagactactcaaaatgccctaaaatacaaggctaaaaccctatactactagaatggccaaaatacaaggcccaaaagaaggaaaaacctattctaatatttacaaagaaga

SEQ ID NO: 28820 - DNA, 207 bp, Glycine max
acggcttgaaatggcattttccagtcccacagaataaatgaaacttattggcaggccgataatcgacgtgttgtaacgctaccttcccctaatacctcagcattcatttggctccatgctccactgagtgctgtttgctccgtaggaaatacagattaggtaacggaacaacgcctgatacatgctagctgccccttatgacaaaga

SEQ ID NO: 28821 - DNA, 372 bp, Glycine max
  unsure (1)..(372): unsure at all n locations
attgagcaacacctatgtacggcttttttggtcttcatagggnnnaacgaaccgcgatttgttggttcgagcacaacgtcacggctctggaaccctcgggagactaaaaatctactatgtggttaactaaaccctcgaattattgctatttccatgtcactcgtccttttcacatgatgcgaaccggcacaaatatatgcgcggaaagcacccttatcgcgattttccattgtaggagcgaaatggatcacaactggggggggggggcggaggacctttcgtgcagttcaagagtattgaactgctattggcctttcgatatgggccaaaggggttatgcctcgacccttttatgagaaatatttggaggac

SEQ ID NO: 28822 - DNA, 418 bp, Glycine max
agctttagtacctgccgtttattttttatacaactaggataaatgcttacaaccctgcttattcttcagtctaatactaactgttacgaaaaagtgatacatttgatggcttcctcttcattgcgctcaattcaaaatcctcataagtctataaaattggctgctagatcttgtgaacaccataacctgcatcctctgatttcaaactgtcattccaattctcaaattctgatccaccaaacattacttgcttgatccccacaaaactatcacaaacaaaaaccaaaaataaataaatcatggaattgaaacaaaatatccaaggggtaaaattaaaagataactaaaactttttatctaaatctcaacatgctctctctcacttcagagagagattgacaaggaacaatcaaaaaga

SEQ ID NO: 28823 - DNA, 419 bp, Glycine max
  unsure (1)..(419): unsure at all n locations
agcttagtgtctngagtgtttccttactttaattgntggagaagttgcctaagccatgtaatttcgcatgcaacttctgtcatggtatagtattcaacttcagcgctggatctcgcaactatattttgcttcttgcttctccatgagatcaaattccctccaagcagaacacaatagcctgaggtagaactcctgtccaatcagcactagagtaacaaacaattttgacattgtcttcgtcttcatatagaaatccgtggcctggtgcgttcttgatatatctgagaatgcgcatgacaacattccaatggctatcacaaggggcattgagcaattgacttaacactctgcaaaagtgatgtctggtctggtgacactgaggtaactgagtctgccaacaagtttgtgatatcttcttg

SEQ ID NO: 28824 - DNA, 393 bp, Glycine max
  unsure (1)..(393): unsure at all n locations
ttgggcttttcctgcgcatcttatgtggagggcaaagaaggcctccttctgggggggccagagccatcagtgagataccactctggaagagctagaattctaaccttgtgccaggacctacgggccgagggacagtctcaggtagacagtttctatggggcgtaggcctcccaaaaggtaacggaggcgtgcaaaggtttcctcgggccagacggagattggccctcgagtgcaaaggcagaagggagcttgactgcaagacccacccgtcgagcagggacgaaagtcggccttagtgatccgacggtgccgagtggaagggccgtcgctcaacggataaaagttactctagggataacaggctgatcttccccaagagctcacatcgacggn

SEQ ID NO: 28825 - DNA, 355 bp, Glycine max
tttgcccaattcgctgttgatctcgataatgcttctcaaaatcaattagcaagaggtcaacgattgcgcgagttgcttaaacaatcccaatcagctcctcttaccggggaagaacagataataactatttatactggaacgaatggttatcttgattcattagaaattggacaggtaaggaaatttcttgttgagttacgtgcttacttaaacacgaataaacctcaattcaaagaaatcatatcttctaccaagacattcactggggaagcagaagtccttttgaaggaagctattcaagaacagatggaactctgtttactacaggaacaagtcgaaaaaaattgattaatca

SEQ ID NO: 28826 - DNA, 397 bp, Glycine max
agcttgaaggtgtgtaacttacttttttttcataaaagggttgtggttgggggcgaaattgaggcctctccaaagagttttgcaagggtataccaccaactgcttgcccttcagtggcatatccaaggcaaggctcgaagtaagctggattgtggtgggaaatttcatgtgtctcccccatggtttgagagacatgtgcatggtcagtttgaggttgttggctttcaattattgacatcctcattgggagtgtatgccacattgggtggcgtatagttgggaagcaaggcatatatggtgggaaggcatgcttaactttttttttttgcgctaaatgagggctgcccatacctcccaactctttgccttccagacctaccatatctgaggttggatg

SEQ ID NO: 28827 - DNA, 345 bp, Glycine max
  unsure (1)..(345): unsure at all n locations
ttaaaatttgaattaaaacgttcaataactgctgttaatttattacaatatatgtgtgatcgattacacagtgcacattttgaattcaaattttaatagctcttgtaaatcatttttggccactggtaatcgattacatcctctgtgtatcgattaccagagagtaaatctcttgaaaaacactttttaacatgcattacttggccaaaccttttgctatatcaattaggaatttgcttctaatgtactacagatcatcttaatggttgcgtcttgtattctagaatcattgtcttgaatttaaacttgaanagcgcatttgcgtcaaatcatcatgatcataat

SEQ ID NO: 28828 - DNA, 418 bp, Glycine max
agcttgccgatgtacctggatattctattaggctcagcctattttcattttctttatctggggaggccaagagatggttgcattcattcaagggcaacagtttaaagacctgcatcttcattccatcagtttcctgatgaatctttgagtgaggcattagaaagattccgtagcttgctgcggaaaactcccactcatggtttttcagagcctatacagctgaacatcttcattgatgggttacggccgcaatcaaagcagttactcgacgtttatgcaagaggaaaaattaagttgaagaaacctaaagaagccatggacttaattgaaaatgtggctgccagtgaccatgcaattttgcatgatagagttcatattcctaccaagaagagtttattagagctttcatcacaagatg

SEQ ID NO: 28829 - DNA, 378 bp, Glycine max
  unsure (1)..(378): unsure at all n locations
tattgaaatcaaacaagatgataaattatcctcacattatataataaataaatcatgagtcatcaaaacataaatcatttgtctaagtcacttgcatctagaagtcctaattttcttctaatggtgtagaaagaatctttggttagtggttttgtgaagatgtctgcaagttggtttttagtatctacaagttttaaaaatacagtcacctttttcctaagactaagtgctaattgactaccaacacttaccaagatgaggttttgttaacatagaaggttctatcatantaaaaataatttattaggaatacaatataataatgtttgaaagcataaaatttttttgatcaatcaatcaagtaattcaaacatatca

SEQ ID NO: 28830 - DNA, 409 bp, Glycine max
agcttgagatgatgatgtgttgtttggtgaaacttcctgcttttattgttgaccacagagtggtacctggagatatgtcgcgggggtcaggagaccttggggacgtcaggtggggtgctattgcccaaaaccaagcttgaccaatcccgacccaacccgggcatagtcggtcagtgagaacatgtgacgtacctaagcaggcgagctcctggcagtcaacagataaaaggaaaacaagaccacagagcaaggaggcttgtggtggctggccagctgtgaattttgtgtaatatgtggattgtggcctctggtaatcgattaccaagggtgggtaatcgattacaaggcttaaaattgaagacagggggctaagatggtctctggtaatcgattaccaaggggtgtaatc

SEQ ID NO: 28831 - DNA, 411 bp, Glycine max
agctttgcttctacacctgtatctatggaataggcgatcaaaggacttagtccactggctgccacaaggccttcaatctctgaagcaagcctcccgaacttagccatctgccttccatgggaagatagcttcagctcaggatgttcctacaaacaataatatcgatcatgtaaaaaaattattaagtagttaactacgttctttttgttttttttttaaattacatacctctccatttcagactctcaaatcaatgtgattttcaaaatctttgagaactgatgtgtcatggggtccgcctgaaaaaccatcaacattagtaacgacttcttcaacaggtgcttctagctgcttttcattcaattcctctacggccataggagggtcctcaacaacacgctcttgctgtca

SEQ ID NO: 28832 - DNA, 331 bp, Glycine max
  unsure (1)..(331): unsure at all n locations
tgccattgtatacacagaagacgaatgtgattttaacctttntggaaggaaggagaagaacgaaaccaaggaagaagaagcttgcggggaagttgctgggtgcacgggagaagaaagaaaccaccgaagaaaacgttttttgaaacggaagaagaagaaaatgtttttttttttataaatatattaacttttattttttaaatgaaggacattttaggaagttcattcaattgctgggtgcaccaacaattttgctgggtgcacctagtaacagcaaaaaatcatatgcccaaatactatgcgggttacatggactgttcacgggcccata

SEQ ID NO: 28833 - DNA, 302 bp, Glycine max
aaacatctgccttccatgggaaaaaaatcctcaccctacgaaggttcttccaacacatacatcccccactgggaaaaatttttctacacgtaccctcccctccttttggttgttttttaataacataccctctccttttcaaattctaaatatatgggaacatttcatacttttaaaacccgaatgtctagtgggtccccctccaaaaaccctttacatatcgctactcctaccatttgactagatgcccttataccgtgttttccatttcaataccctcaccggtgcctgagggggggtct

SEQ ID NO: 28834 - DNA, 479 bp, Glycine max
  unsure (1)..(479): unsure at all n locations
acacagacaccgcctcatcaactccaacaaaaaaacggcacaaccacccaccacaccgnacaaaaattgtgctctgagcgtcaaacccggaccacaaaaccagccgccctgtaacccagaagactaatgtacaatattaacncctctcggaagggaagggagaagaaaccgaaacccacacgacgaagaaacctcgcggggaaggacgctgggggcaccgcaaaagaaagaaaccaccggaaaaaaccgtttttgaaacggaagaaaaaaaaaacgtctctttctttaacaaaaaacaaacccttaattctcaaaagaaagacactttaaggaaggtccaacaacttgctgggtgcaccaacaaaaatgccggggtgcacctagaaacagaaaaaaacatatgccccaaaactatgacgggtacacggaccgctcacgggcccatatccaaatgtctggacaaagatacaataccctcg

SEQ ID NO: 28835 - DNA, 252 bp, Glycine max
  unsure (1)..(252): unsure at all n locations
agctatgtgngnaccgtatattcattaggctcagcctattttcattttctttatctggggaggccaatatatggttgcattcattcaagggcaacagtttaaagacctgcatcttcattccatcagtttcctgatgaatctttgagtgaggcattagaaagattccgtaacttgctgcggaaaacttccactcatgggttttcagagcctatacagctgaacatcttcattgatgggttacggccgccatca

SEQ ID NO: 28836 - DNA, 296 bp, Glycine max
  unsure (1)..(296): unsure at all n locations
tattgaaatcaagcaagatgataatttatcctctcattatataanaaagaaatcatgagtcatcaaaacataaatcatttgtctaagtcacttgcatctaaaagtcctaattttcttctaatggtgtaaaaagaatctttgggtagtgggtttgtgaaaagtctgcaagttggttttagtttctcaaagttttaaaaatacagtcacctttttccttagaactaagtgcttattggctaccacccttacccaaatgaggtttgttacataaacggtctttcatttaaaatattttt

SEQ ID NO: 28837 - DNA, 351 bp, Glycine max
gcgggggaacgctagctccgatagaaaagttatgaccatttggattgcccaatagctgtcatagaacaatttccagcgtttggaaatgatatgcgccttgatcggacctccgagggaaaagttttgaccacttgaattgctctagagccttcgttgatcaatttcgagcggcttgagatattatgcgcctgaattggacctcctaattaaagctttgaccatttgcaatgctcatgagcgttgatagtccaatcacccgcattttataagtgtatgcacctgaattggatccccgagtgagaagtttggaccattggaattgaagaaaaggaatcactgcttgatcttcga

SEQ ID NO: 28838 - DNA, 186 bp, Glycine max
gcttttgagcaggtcaaatggtcataacttttccgttggatgcaccacacacgcgcattacatatttagacgctcgaaattgaacaatggaagctcttgaccacttcaaaggggcaacacttttcactgacagttcctattcatgcatgtaagtatatgaagacacctcaaatggaacacccgaag

SEQ ID NO: 28839 - DNA, 314 bp, Glycine max
gagtgattcaagaacaccctggctgtatcaaaggactttcacaacctttgtgtgttgccctcgctggaaagagtgattctttccttcctttcatcttcacccttgttctttcaaaccacaattccagaaaatccacctctgcccagaattatctcggggccataactcccgttttacgcactcaaattaagtgattcttgagcctaaattgaatttcaaaacgagaactttgacctcgttttggaatcacctcatttggagccctgtagcttcagttattgccatttctatatttctgtccagccaccacttaa

SEQ ID NO: 28840 - DNA, 226 bp, Glycine max
ttgcctcacaagttctctcagggaaggttgcgcaggggtctcaactgctggttgttttcggggctgttgtcgttgctggattggcggaggaatgtatggtctgcttgggccatcacccatttggaaggaacgaccctgctactcgtgttgctgtcgagggctataccatctgagattagggtgattcctccccccaacgctgcttctattgctggagaggtgataa

SEQ ID NO: 28841 - DNA, 422 bp, Glycine max
agcttctatataagctgaaccattttatcaataaacacaagttgagttttattcagaaaattagagtttatctcttttatcttagtgagagtgattctcctaaattcttgagtgattcaagaacaccctggctgtatcaaaggactttcacaacctttgtgtgttgccctcgctggaaagagtgattctttccttcctttcatcttcacccttgttctttcaaaccacaattccagaaaatccacctctgcccagaattatctcgtggccataactcccgttttacgcactcaaattaagtgattcttgagcctaaattgaatttcaaaacgagaactttgacctcgttttggaatcacctcatttggagccctgtagcttcagttattgccatttctatatttctgtccagccaccactta

SEQ ID NO: 28842 - DNA, 362 bp, Glycine max
ctggacttcctgtgttttgggaacctctccttcctcaggtgtacccaaacccaatcacctggttcaagcatgactttctttctgcttttggtggcttgccttgcatagctcgcatttttcttttcaatttgggccttcacttgctcatgcaacttcttcacatactcagctttagcctgggcatccttatgcttaaacatagcaatgttaggcataggcaacaaatcaagaggagtcaaaggattaaatccatacactatctcaaatggtgaacaattagttgtgctatggacagcccgattataagcaaactcaacatgaggcaaacaggcttcccaagatttaagatttttctttaaaac

SEQ ID NO: 28843 - DNA, 424 bp, Glycine max
agcttcaagaattatggcctcatttaactacttgtttctcgagggaaattctataaacagacctcccatctttaatggactgggttaccactactagaaaacccgcatgcaaatctttatagaggcaatagatttaaatatttgggaagccatagaacaaggaccttatgttccctctataatagccggaagtgcaacaatagaaaaacctagagcagattggactgaggaagaaagaagattagtacaatataatttaaaggccaaaaatattattacatctgccttaggaatagatgaatactttagggtttcaaattgtaaaagtgctaaggatatgtgggatacactacaagtaacacatgaaggcacaacagatgttaaaagatctaggataaacactttaattcgtgaatatgaactt

SEQ ID NO: 28844 - DNA, 413 bp, Glycine max
agctttgaatggaggctctggtcttttgcagaaactgcatgttctgcatagtcatttgcctcacaagttcttcgagggaaggttgtggaggggtctcaactgttggttgtttttggggctgttgttgttgttggattggtggaggaatgtatggtctgcttgggccagcagcattttggaaggaaggagcaggctactgttgttgctgttgagggctagaccatctgagattagggtgattcctccatccaaggttgtatctattgctggagaggtgataattgttttgctgaggttggttttgctgttgaggttgaggaggtctattgtaaatgtttgcagcataagcttcaggcttctcaattgctccaggttgctgcatggaagggcaaaggtctgtatggcggtcagca

SEQ ID NO: 28845 - DNA, 364 bp, Glycine max
ttgctacaacctttttctccccctttggcaacatctaaaagccaaagaacccggaaatcaacacagttatgacaatggagtagcaagatataagcatcagagtattaaatacaataagccaaactcacaaacaagaaataatcaaaccagaatccaaataactgaaaatgtcaacaaccacaaaacatcgaagactgaaatttaaaatccacaagataaataagcaaagtacttagcttaataatgtaaattctaagaaactaaaagccaaaatacacggcttataaaagataaataatcagaatctaaaagctaagacaacggaggaggtggtggaagatcgaaactctgacgaatgtattcg

SEQ ID NO: 28846 - DNA, 423 bp, Glycine max
agcttatagagtggatgttatatgttcttcaaaaagaatatcacccttgacaagatgtttttaaacaagtaaggaatcatcttgctatgaataagttaattgtcttgttatgaatcctctatccctcccaagtataaaagaaaattaaaagcgcatagattgaatcataattgtaacctgcaaaatcaaattgcataatgcagtaaaatatatcaaacttgtatttgacatgctaaccattggaatgcatagttcttaattatattaatgtctcataaattcattttaatttaatccttaggttgagaaaccacattcactcaaggcttaaccttactagttattaggattggtcctttggtattaagtttaactatagtgagtagtggtccaaattaatagggaaaaaaagaagaagagaga

SEQ ID NO: 28847 - DNA, 365 bp, Glycine max
tcagttgaacatttcaaaacaacaaaatttctgaacttgggttgcacctttatcttaaaagcaagttcataacccaatagcttatcaagtgcttggggtgaaacatttaaatcaacatcaccatccttgtgcaaagagaataattgtatcacacaaacaaaaaataacatatcaaagataaagagttacttttgaatccaaaaacgtacttcaattttaagcttattaactgcattagctgattgaccaattaattcactgcattcacggtcccaaagcaggaattttgtgttttcatctccgtggttgatcatcacctcaagcctataccttctaccatacgtaccaacagtgtcaaaatgatg

SEQ ID NO: 28848 - DNA, 354 bp, Glycine max
cgctggcccagagtatgttttcacggaggaactgctgaccatcctcaatgactggagagggcattatatcgatgcttctgctgctggcacatcaggcataagagctgggccttcattccatcagtttcctgatgaatctttgagggaggcattccaaagatttccgaacttgctgttgaagagtaccgctcatggctcttctcaccctgtacggatgcacatctcattgatgggtacctgcgcaatcaagcggttacttccacttttgcaagagaaaaatcaagtttgagaacccttaagaagccgtggacttaattgaaaatgtggctgcccgcgaccatgcaattttgcatg

SEQ ID NO: 28849 - DNA, 258 bp, Glycine max
tgtgcctcttcacgtctggaatatgaatgtattttatagatccaaagacccttaggtgctttgctgatggcttcctcccgttccaagcttcaattggagtcttgtcttttacagacttagttggacatcagttgagtatgtaaacagcagtgtaaactgctttagcccagaatgtgttatgtacttgagcatcgatctacccatctccataactgagcaattctttctctctgacactccattttgttgaggaggata

SEQ ID NO: 28850 - DNA, 419 bp, Glycine max
agctacaataacgacattcattactacacacaaaataagggagttaatgtgtcatgcgtttacacatcaagaaagacacactcatcctagatatatatatggtccaaaaggttcttgcaacactaatccacgcatcaaaggagaaatcagctaactaagaacatacacataggatgatagaggctcgttcgcacattatcaatcaatatcaagactacttgcatcacccaatggcttgccataatgtccaaccgcacttggcaaataatagagatggtcaggctcataactcatgactcaatagtgaatttatggtatagcagacattaaggatgcgtggcacatactagcattattattaagtcgtacttaatcatgtaggagataatacaaataaaaattcaagcatgctcaacaaa

SEQ ID NO: 28851 - DNA, 213 bp, Glycine max
tttttttggtgttgatgaagccaaacttggattttcattggggtgcatttggaaagtcttgggagtcgagacttttcttaaaaaaacccaagtttttcttaacacctaaagaaggatcaatccttcgtatcaccatcctcatcattaagtaaagacctttcttaatatcaatcattcctatcatcatcattcttttgataacccagtgtaatt

SEQ ID NO: 28852 - DNA, 418 bp, Glycine max
agcttgtcaatgtttgaaatttcttctttggtgttgaagaagtaattattaagggtttagtgaagttggaatgttctaactagcttgttgtgcaattgtttccttgccctaacaaagtaatgtttgaatgtatgcgtttaggaacccattaagataatgttttcttgtttatgctccctagtgttctctgtcttttcttctttggcgttgaagaagttagtattaagggtttagtgaagttggaatgttctaacttggtgtggaattgttgacttgccctaagaatcaatttgacttgcgcttagcttgttggaaacttcaatcagtagatagattcaaatctctagtttgaagtatttcttcagcctgttgcatgtgttacttggagtacaaaaagtacaactattgacatgaactt

SEQ ID NO: 28853 - DNA, 259 bp, Glycine max
cttggtcaaaacaaatgtctaatcactcccatccattcaaatctttcaattggtcattcaaaacattctcaaacacttcatttatgcaaaacaatccacagcatatgaatttcaatcaattcactgttcaaacaagctttttggtacaaaccaacaacttcaagtgcctcaaatttaatcactgaaattttaatgactaaacaaaaatcattaaataactgcaaataaactaaaatgctccagatgcccaaatttaaat

SEQ ID NO: 28854 - DNA, 419 bp, Glycine max
agcttgctcggggccattcctgttaaggcaaacatttggaaagttagttttaccagtgggacattactcttaaagcagaaatggcatataacctcctcccataaatacaaacatcaatgtaaatttagagcaagcttatgcgcatatttccttacaaacgttctcttgcacaagacattctattaaccgaaaaaaatgcacccatatacaatcaaggcagcttcgatacctagattatttacacgtacttccaaggtgtatttgttacttacatcacacacatctccttggctaaattcacatacatgcatactcaaagcattttgggggaccaaaaattgcacatgtgcacatcttggtatttctaatacctatacatacacaaacctcatgatgaatcttgactatctacacaataa

SEQ ID NO: 28855 - DNA, 344 bp, Glycine max
  unsure (1)..(344): unsure at all n locations
taacaaaaggcatgtgaagcgggtggaatttctagagcaattcccttatgttatcaaacataaaaagggaaaaggtaatattgtagccgatgctctttctcggcgtcatgcattactttctatgcttgaaacaaaattgattggtcttgaatgtttgaaaagcatgtatgaaaatgatgaaacttttggagaaatttttaaaaattgtgaaaaattttcagaaaatggtttctttagacatgaaggctttcttttcaaagaaaacaaattgtgtgtgcctaaatgttctactagaaatntgcttgtttgggaagcacatgaaggaggtttaatggggcattttg

SEQ ID NO: 28856 - DNA, 332 bp, Glycine max
agctaggagcagatttattttactttaactttatacacggctggccgggtgagtcccgaactatatcgggacgctcctgcttggaaaaagaaactcgtatagatatgaaacgacatatcccttccactggaatgcacacagagtgccgcatagattgaatggtagctgaacctgcaaacagaagcgcgtaccgcagcaaactatatcaaccttgtatctgcatgctgaccgaggaccgcattattcttatctctaaaaagtcacaccgttctttgaaataaatgcttaggtgaaaatccatacttgcgtgaggcgtagcctcacgaaatata

SEQ ID NO: 28857 - DNA, 306 bp, Glycine max
tataccaaattcaaacgacaataactttatttttgatgtccgattgagtcccgtaatatatcgagacgctaaaaattggaaacggaagctcgtagacaattcaaacgacaataacattttactcgaatgtcctacagagtccacgaatatattgagacgctccaaattgaaaacagatgctcgtaccaaattcaaacgacaataactctttactcggatgtctgatagagtcccttaatatatagagatgctccaaattgaaaacagaggctcgtggcaaatttaatagacaataactttctactc

SEQ ID NO: 28858 - DNA, 408 bp, Glycine max
agcttctttacattgcctcaaatgttcaaaaaattctatgaaattgacggtgttcgcgactaaccggattcccaacgataaaatcgtcatgtagtacttgaaaatatgatccacgagaatgattttgcatctatggtagccacgacgaaagtttcgcatatgactcatcccaatcgccatattcaattgcaatggctttctgtttcgccaaccaagctttttgtacgacaccttgtacgcaaattaactgttaatcctctcttgaatcaaataaatttttattgatggatcttatctgatcatgcctttcaataacataacaaaattgaaatgacaattaacaaagaatgaacataatttgaacataaaatacgtacctactgcacaagtggcaattaaatctgaatc

SEQ ID NO: 28859 - DNA, 263 bp, Glycine max
tagcaaacataaaataaaatccatctgatatgtaacacatgagatacaaaaaaaataccaattgataaagaacacagggcaaaaagaaagcgtagttacactttacagataatgcaatttaatacatacttattttctttaccctaacaacaaattttcttacaatttaaattaacccacaataagtattcagttaaaagcttaaaactcagatcagacaatgttaaattgccacaccctttttcttaccttggaatgaaaat

SEQ ID NO: 28860 - DNA, 409 bp, Glycine max
agcttattgatttgtcattaactgaaccctgaactttaaatgattatctcctaataccttgtttagattctaggagagcatatgggtcaagacaaatttactctaaatttgggggagaaaagttgatacgaatgagaagaaaaaggttatagcgtcagcacacacaacaaataatttgtatgttaaaaaaaagaaaaaaataggttgtgctgttataataagggcaaaagcaaattaagaaaagggaatactgagaaggctatttgtacaaaacaagaaaagatcattgggattagtctaagacttgtgctctcttagaatctaaacctttgaatcctagaaaagaccgtgaatttttgtagccaagcctcactacaagcctgagaaagatcttctgattatgttgata

SEQ ID NO: 28861 - DNA, 399 bp, Glycine max
agcttgttatattatgattacatttaacaagctacaatatcatctaagtagtcaccagaataggccttgtacggtttggataatttacacaagatccttaaaaacacacacaagttaataaaggaaataagaaggaaacttgccattgtattttacaaatgaatgaatatctctacgaccagtatctctaaataaccttatgcttatttgaattaccctttcgagcccgtgaaaacatattcattgtccatttgagagaagcaacacacttttaaagttttcaaagggtaacacaaacatgctatttgtcaaagaaacctccaagctgagattgaatgcattggggtcccttttcatcccactataagacacttgccatttgtttttctatagtgcata

SEQ ID NO: 28862 - DNA, 321 bp, Glycine max
  unsure (1)..(321): unsure at all n locations
tgtaaaagcggaagaaaagaatatttttagtgttcgaaatgaagatgaaagccaacaaaacaagaaatgaattgagagtctcagattataaaactaaccggttgaagaccaaagaacacacgaagaacggacgaagaacgacgaaaaatattcatggaattactcacggaaacgtcttgaacgcgttacagaagcacctcagcttagattttcttcatgaaatcactttttttcactcaaaacaactgaaatacacaacataggggttagggaccccttttactcagcctctntgcccttatttatagccaaaatggggag

SEQ ID NO: 28863 - DNA, 554 bp, Glycine max
  unsure (1)..(554): unsure at all n locations
aggcagtgcatgaaccatcgatgagccatatagatcctcaagctaaagtatgcccgagtcattcatccctatgagagtgttgtgaagtattgtcgatcagaatagtcnttcctgggatcatagggtcgaaccaagctcatgcttatacgagaaggttcatcagctcaagttgaaatgtggaagttaccgtcttgctaaatcggggccaaagatgaatcgcgtcacatcactgcttcatctactgcgcaacatatttatgagtatagatgtacttgttactgtcagttttacctcgacagagatgtcatggaccatagtggaaatactaatagattcaacaccatatcttgcgccaaaattcgcaatacttcatatgtacatcattcgcacgcatccctgctagtcactggatgcattgctcgatgcatcactttcttggaaattaaatatctgaaccgaatcattgttataaaaaaaaatggacacgctctatgtatctcttaactaactcgtgctagaggcttagctatgggctaagttcaagatataccaan

SEQ ID NO: 28864 - DNA, 291 bp, Glycine max
  unsure (1)..(291): unsure at all n locations
gatgttggatgaggggttggttcgcaagagcttanatccttgtgctntgttggtgcctaaaataggtattattaggcaccaaatccctatgataggtggtataatgaatgtgttgagtggtgcaacaatcttttgtcaaatcactcatgcacccaacatcttcatgaattgtgtacatanggactcattangtagatttgttcttaatttttgtttcaatgcaaacctaggtgctcatgtgggacaccataggtttgtcgtaatttttggaggaataatcaacatgaaaat

SEQ ID NO: 28865 - DNA, 544 bp, Glycine max
  unsure (1)..(544): unsure at all n locations
aggacgacntttgacccatcatgagtgcattctattatgcgcactcttagatcgaatactaggtgataccacatggtgtgatgatagcgaacgtcttcacanccttctctaatgtcaattcatgactatcaaagaatgacttccagatgatcaagatgtacgctagtgagctctcaacactccaatgttcgtgaggaatattgcttgccataatctggaggtccagattcgcggttcaaacttcctagaatcgagatcactattcccgactccagattcgagaatcaagagaagacttcatcgagatcagtgtgataaagagtttcacaaactgagtagcacatggatgtttctcacacaatgtgcaccaacgagttgttactctcttggtatcgattaccacagnggtgtgatcagataccaactatcaaaatggttttttggacgctttcactgcaatacaatgctccctgtttcaagccctgcctcttttcatgttctggtttgttgacagtgtcttgaccttccaattccttaatgtaan

SEQ ID NO: 28866 - DNA, 422 bp, Glycine max
tccttgagtcacctgcggcatgcaagcttctcaaagaagccacgaggaagcttctggaggaagcctcttaattaatcttctagagaaagctacatgaagctgccttggtaaaaatgatgcccagcgttcgttaaccgttggatcttctcgaaatatggtttgcaacttcacaagacaagtttccatgatctgaccgttgggatctttgagcagatgtttggagtatgctggaagctttcgttctcgagagcatctcttatttaagcatttcacctttgctttcgtgtagcttaggaaaaacgtgatttgttcttgtttctttcttccacatccatttctaaagttccaagtactttctccatcacccacatccaccattagcgaccacaaaccatcattgttctccattgaaaacccacact

SEQ ID NO: 28867 - DNA, 379 bp, Glycine max
  unsure (1)..(379): unsure at all n locations
acatgccaaactcacatgtatccctcgatagacctngtatttttaaataaagaggaagaagaccaccaagatttcttcttcatgtacgatcttataaaccaagatctgcacataaggattctattcaacgacttcacaatacgggtgcttcagactctaaatgtggccctctcctaatttcatccaaatgtttgggctactattcaagcattctgagccctttgtctgtatacacatgttaaggccacttcgggtctttttcttctctacttatgttgntggccaaagaagaacgcatgatgggttttattggtttggataccgctcaaaccttgttatacacctctacaacatcttataagaatctaagaccagctat

SEQ ID NO: 28868 - DNA, 423 bp, Glycine max
  unsure (1)..(423): unsure at all n locations
agctnnttggttntagtatcattatattgcaagaatttcttaatggtttcccattcgaatntttgaactgtgctaacaactatctttgggatgacgttaactaattgaactcaatgcttgattcatcatagaaagacacttgggttgtcacgagtaatggtgagaataggtcacgtcaggatttaaaaggtttgagtcttgtctacaattaatttttgaggcctgagtctcgtctataatctatcacagacttttattttggctcggtctggccggcctgtatagaagcctaacctggcctggtatcctatttaaaagcctatctaaaagtcttcttgacattaaatccttaatattcctagttctttttaccaaaaaataaaataacacatcttctatgataggcctaacatgttcattacc

SEQ ID NO: 28869 - DNA, 321 bp, Glycine max
  unsure (1)..(321): unsure at all n locations
gctcgagatctntccaagcattcggtgctgaataatgacagantaatgtcttcaaatngctttacttcatgccctaaaatgaattaggacaccttgcttggtgtaattaagctacacaatttgtgataattaaatttaatggattgaagctcgtttgtgaaggacgacgaacctcaacaagaaggctatattgacatctacatatgagaaattgtggaagaattaattgaagtctaaaatcgtacgagctaatgagtttagagtaatctcttcttcattttgcttgcaagaatacacaatatatgataagaaagaacttac

SEQ ID NO: 28870 - DNA, 594 bp, Glycine max
  unsure (1)..(594): unsure at all n locations
ccactacattctctncatctctcactcttatcancgttatgtaataatatagtttatactcntnnnnnnnnaagagcttagatgantcgatgcgatccgtgaaccccccaantaccagcaggcatgcctgctttacaacaactaaaggcgaggaagtgcagtttacattgtctagtccaacttctcatgcctaacttagtctcttaacaaatgagaccttgctactatatgctatgctactccatgagagggtggatgcctcgcaccgatgaatggcatatttgatgtccaccaccaactttaccttacttttactctatacttgctattctgtaatcaagcctctacgcatactgcttgacatgaaattggtgaggctgtattatactctgctttacaatagaagagtgctacaacaagctctgttgcggctgagcacgagattgggctcctccatagaatagatatagcaggtcgcctttacataaacacttgtcccacacaatctgaatgaagtgtccaacaaattagttgacatattctctcctttgaaaacgatccaaaggcattgccttggcacttcagagaatgccg

SEQ ID NO: 28871 - DNA, 266 bp, Glycine max
  unsure (1)..(266): unsure at all n locations
tgacaaatccattcatgtggagggggttaacaccatctatgtgtcttcacctaacctattgtcagatcatgaatccatgtttatggctttgaatcttgatcttctatgggttgtgcttgtgcatataattgcattattactacaaaatttgtgttactaactaccaaatatattaagttagctcgtatgagtagataggcccaaacacggacaaattcaaatggggacgtctgttggccccctngcacacatgttctcacttcttt

SEQ ID NO: 28872 - DNA, 379 bp, Glycine max
  unsure (1)..(379): unsure at all n locations
tatgatgcagtgaggcttgtatatataaatgttgattntgtatagagtgtatttgaaatttgattgatttgtttgcacatcctatgtataacactataaaatgggataaatacattggtcttcaaatttcacctcaataaacaaagctgatgcttcacgtggatactgaattttgaaccacctctacaactactttctgcaagaaacaactcagattaataaacattacagagaacaattgtatgacttatgtaaatgaatctatcaaaatcaaatatataaatacaaaattacattagatgatgttaattaattctccttcatgatgatcattaccattagcatgaacgtcgtcaacttcttcttctncaacaacatt

SEQ ID NO: 28873 - DNA, 466 bp, Glycine max
  unsure (1)..(466): unsure at all n locations
cggagttcaccttagggagatcaaatnggacaacaatgaacatgcctatatttaattggtttacatatgatcactttattgctagccaaaatagagaagattaatatgcacaggtatataaattaatatataggtagttcttttgtcaagacaaagatgtctgcactttccacaaatctaaaagcatctctgtatattctttttgggccaaagcttattaggttgtgttagttattatataaatgttatagttaaaagtaaaagttgaagaaagaaaggaatcagatgtataataaggcctntgttccctcttntttttttgtttctttttgtctccttttccctagaggttcctacatatntgtccatatacaactttntttaggctcattttgattccttaagtgaagcatattaattcaaaaggttacaaatgaactatatatattacagattttggttgtag

SEQ ID NO: 28874 - DNA, 337 bp, Glycine max
  unsure (1)..(337): unsure at all n locations
aatagaacactagtaatatgtctactatcattggtattatttctttcttcatcattgagggaaacacttgggctgccagatccctccacctttgggcgtattctttgaaagatctgtgccccctttntgcacatgttctgtagttgcatcctatccgaagccattatactgacactgcctaacgaaggcaaccattatgtccttccaagaatggactcangaaggttccaagttagtgtaccaggtaatagctaccccagtaagactttcttggaaggaatgtatcagcaattcctcatcttttgcatatgcccncatcttccgacaatacatcttt

SEQ ID NO: 28875 - DNA, 111 bp, Glycine max
tctctgagaggacttccttgagaagctagagcttagttacacacacctctctcatatactaagctcacctccttgagaagcttccttaagaagattcctaaagaagctaga

SEQ ID NO: 28876 - DNA, 445 bp, Glycine max
  unsure (1)..(445): unsure at all n locations
agcttctaaattaaatgtggagaggaagttacaagagataattcagtacattattgttgattctcctccattaattaatggcatggggtactattaggcatgcaaattggtcccacatgcactaaccacctgagaaaaacaatgaccctgatatcgatgttgttgatgacgaagagcctctattttggtttggtctttgttgctggaaataatcagggggtgacacgtactgtcaccttccccgacgacgacgaagattgagctccagattcaggtaaggaccctgctaaattcatatatataaattctgtttactacatgacattttctataatcactaagtttataatattgcaatctattaaactttattttgaattaaaatcctgcattttatataccaattaatatgcaaaattatcacaaacanaaatagagaatgacg

SEQ ID NO: 28877 - DNA, 413 bp, Glycine max
  unsure (1)..(413): unsure at all n locations
ctaacaagttgngttcctaagctggggatagcattgtcattgggcatctantttgactntcctatgccgtctctacatacataaaccagcctcaccatcccaattttgcaaaatcatattcatatatcattggggcatttcaccaagcacttggtgggcgcacgtttggacataaattgcaagagaatgggggcaatgtggcatgccccattgcttcagaatacaacataggcctgaggccttctcattcaaatcctcaattcaagaaaacaagcataaaaacaaaccaaaactgccccacaaatacaagcacattctcacnaattggaacaccaaaagatgaagaaaatataccaatgggaagctaaaaacatcaaggattgaatacttactttgtggagtgaattataaca

SEQ ID NO: 28878 - DNA, 322 bp, Glycine max
  unsure (1)..(322): unsure at all n locations
atgtttctcttcatagagcttggccaacgaaattgttctgaggagtcatgtagagattaattgattttaatttaattaagactatatcgangtgnctgttaccttgatttatatcattgcataattttgatttcttttcttccaatacaaaatggaaggttgagaacggattatttaaaacattgtcagttaggttgcaagtaatctcaattatattattttcataggaaaagacatagagacatgggacnattttgaggcttagtcaacgattagcagctatatcatgaaagagtcttatgctttcttaaaaataacaact

SEQ ID NO: 28879 - DNA, 399 bp, Glycine max
  unsure (1)..(399): unsure at all n locations
tacccncactattacccacaaccacctaccaaacttatcaatgttaataaaatgacatcggcagaaatgcagttgagaagagaaaggggcctatgctttacttgtgatgacaagttttcccctagccatcgttgtcctaataagcaatattttgttccacagtgggaagaagaggatgaacctgcattacaaccagatccaccagacgaggttgagacagctggtgaccctagtttgcaagatcatcatttgtcttataatgctttaaaaggctcatcaagtcttggaacaatgaagtttcaaggatcaataaatggattgngagtgcagattctactagataatggaagttcagataatttcctccagcctagactatctcaatgcctgaagttacct

SEQ ID NO: 28880 - DNA, 425 bp, Glycine max
  unsure (1)..(425): unsure at all n locations
agctntacaagagaggacaatacaactaagtgtctatagaactcttccatccgaattgtcttcagcatttccagcagacttgagggaatccaaagttggtgcatctgaagctcacatcatggcgaacgagcaaccacagagggttactcttgaggactactccaactctaccgtgccgcaatttttcataagcattgtgcagccgaaagttcaagcacacaacatgtcctatccatattccttgatctagcttattcaaggaaatctattccatggtctgcccaatgaanacccttatgcacaccttgcaacatacatagaaatctgcaatacagtgaagattgcacgggtgccggaagatgcaataaggcttaacttgtttcattctctctggttggtgaagctaagagatggttgcattcttt

SEQ ID NO: 28881 - DNA, 214 bp, Glycine max
  unsure (1)..(214): unsure at all n locations
tgtgnctgctgtgctcctagcttcaaatagagtgtgtgctccttgcttcaaattgggagcttactgactgtttccttacttcgttcaagtgtgtgcctatacccacttactgctagtaagtgtttttaaagtaaataaaatttatatatattcgttataaatattatcaagttaagttagttagtattaacaaatattgtaagttaggttatat

SEQ ID NO: 28882 - DNA, 334 bp, Glycine max
gactattcgaagttgagctaatatcaacgtagatccataagtatagttcacttattggacaatcttatacgaaattaaatatattagctgtaaatgaactacacctccagacagagagataaaaaaaataatataaaaaggtacaagtgaacaactagaatatataaagcttcaaactcgagactaacaaacagaaagaccagttatagatagatacaagaaactcggtagccaataaatggttacatctttttctagtaattagagcagctcctactatgcctcatgtgaaaagaataaattaattaattatgtacgaattataactctacat

SEQ ID NO: 28883 - DNA, 439 bp, Glycine max
  unsure (1)..(439): unsure at all n locations
cgaaggataagtagagtagcaatgaacatgtnattcanctgtacatgtacataaccaggtcgatatctacttgcaatntgattatataactatgaacttgttaagtcggggttccgaacacgaagaaatgaatgttaagtaaatggtttattttctctccttgcgtgcgtatcttttgcaccttctggtttttacaccgtccggttagatgatctcaaatntaagaaaaaaaaaagacttaattagcaagttggttcctaaattatttaaaatgcatcattttggtccncaaattttagaacactccaattaggtccttcaattcttagaaaagattattaagaacctaaaacaaaattcacttaattatcaggtcataaaacatattttgaccttttatttattaattantttagtagaaatcatagtatcttacaca

SEQ ID NO: 28884 - DNA, 299 bp, Glycine max
tttgttccatatattttctgcattaacgtatttattctctaaaaaaaaccccagataacaataactacacattgattcatattaaaagtgaatagtggtgccagtagaattaatcttgaattaacatggctctatagaattgattgtatctaaacataagatcgtcagatataatatgactattggtaggaaattccttaccaaaactgattttgtgggcaatactaatgtgacttgagacaggagtacacattgaactaatagcttgactaataatacgactcaagttagtgttgatt

SEQ ID NO: 28885 - DNA, 335 bp, Glycine max
  unsure (1)..(335): unsure at all n locations
tctatgtgattgaaaagataatttatactactcttctcatgtcgtggacaactaaaatntaaactatattatagaaaatactgctcaagccattctaatcaagtaattttgaatctcaccattactatcacccatgtcaaagagaaggagaatcagacatcgttatgcataacacaacaaaacattaaaagaaaacatgctttcttaagccaaccaatgtaaaaatgtattcatatttcgtgaactttttcaaaattatgagacacatatcaccatatattaaaacatggtggaacaatctgaccacatgcacatcacataccacacattattta

SEQ ID NO: 28886 - DNA, 351 bp, Glycine max
  unsure (1)..(351): unsure at all n locations
acaaggcagcctaatgaactagttccgctccggagtatgacagtcaccgctttaggagcgctgtacaccagcagcgcttcgaggccatcaagggatggtcgtttctccgggagcgacgcgtccagctcagggacgacgagtatactgatttccaggaggaaatagggcgccggcggtgggcatcactggttactcccatggnncaagttgatccagaaatagtccttgagttntatgccaatgcttggccaacagaggagggcgtgcgtgacatgagatcctgtgtaaggggtcagtggatcccgtttgatgccgacgctatcggccaactcctaagatatccgttggtgt

SEQ ID NO: 28887 - DNA, 284 bp, Glycine max
gctgcgcacgagctcagatctcgtgagtatgtatagaagatgactcattgcaatctattacatgtattggtgatcgattacaggcccaataagccttctggtaatctattacaggatgtcgcaatggattacatgctgcctgttcatgtgtaatcgattacactggatggtaatctattgccaaaacctattctacgctcgtttcgaagagaatatctatggatatgctcaaatacatcctatatgtttaatatacactactgatacactcagatcgatcatac

SEQ ID NO: 28888 - DNA, 363 bp, Glycine max
  unsure (1)..(363): unsure at all n locations
agctntcatctagccaagattatacaaaggtattacaagagaacctaacggtttctaattatgtgggccatcagatctatcatgtgttggcagtaattgattagcccatgaatctcctcgggggcctacacacttcggccatggcttttgctttggctaatagacgcgggaggtcttgacttccattcaaggtccaggcgaacctatccatccatatagtcgcttcttgatgcaatgcatcgatcaccctccctcttgcttctttntcggcgtacactagtgcaaaatcctccactagctnttgttcatgggccatagactggttcaattcttccttgtattgccctatgatagctagcatgc

SEQ ID NO: 28889 - DNA, 370 bp, Glycine max
  unsure (1)..(370): unsure at all n locations
tcattccagtccactcaaaccatagttgtctcattaaattattcgcaaacactcatctcatacaaaacaatccactgcatatcattctcaatcacttcaatgacgaaacaagctntttgtataagcaatcaactcaaagtactaaaatgtttaaagactggaattaaagcaactgaaatacaaagcaaacttaaaagaaactaaataactggttaactaaaatgttcatgctttgcagaaattaaactaaacacaatgtaaataaccgaacagaantttaacattctgctcatactgtggctaatcttcattaagatccaatgctggagctgttgatgaatcctgaataggctgctctggcttcatgaat

SEQ ID NO: 28890 - DNA, 363 bp, Glycine max
  unsure (1)..(363): unsure at all n locations
tgcggcatgcnagcttgttctgcttcttcttatttatatgataaggttgtccanaatgcaagatctcaaaaaagaattataccagatcccagcccagcatccaatgaggatatgaggacactgatcactgattattatatttccacagaagacccatcgaaattgattccaacagaatgcaaaatccctcgtctggctgcatttacaaataaaactcccttcgcggactgtgattcagtcaatttgactattacatcactttgcgtatgagtgtgagactacactaagctgctcatcacttgatgagcaaaccttacgttttccttcctagtgtataacaactactatatgagttctctactt

SEQ ID NO: 28891 - DNA, 512 bp, Glycine max
  unsure (1)..(512): unsure at all n locations
cggggnatgatgcccttgatgacgccctgtaccctctcaagctcccnccacatacgccagctggcgtcccctacttgtagacacttgttttcttatccgggtgcctttgtttacttaggacaatataaatcagagtcttatgcatcgccaatgccctggactaccaaaccttaaatggtctgttaacctacaacagtgtacattcttaggacagtctattggcgtttacgacataaccctgctcttagagagccacgagtatctacatgttcttccaggatgccagttgcattttgatattataatactcgttgatcgattcaaactataattacttgtgattggaacctatccgaaacatttaatacgttcccatttatcccaagatgttgttgcacccatttcagaaactaaatcacctatatatttttgcacacctgtaacggaactaaatcacctatattcaccactattgtcattaaggcctatggttactctagactcacacttcn

SEQ ID NO: 28892 - DNA, 467 bp, Glycine max
  unsure (1)..(467): unsure at all n locations
ctgcagcttggttttaactgtgttgaataatgtcgtgtgatccatgtagtcgatctcacttagtggcataacctctcanaaacaaattcaatccctgtttctaagctgttggtatatcatcttagcaatacttatctattgattttcagaaactattgctgtgtgcacaacttcacactntagtgtttggagttcttttttaatcttatgaataaaatttgaaaattttccatggtttacttttaaaatgtagttcatagatggcatgtgcgctcaccttctatcttgacaatatatccccatcaagttaggcttgactgattatagaggggatactaatgcagctgaaaaatgttattaaatagcttaatgcgaccttgattgctangtatcattatctcgagtatagatagtctcacaagatgttaatacaagattttcatttttaaattaatcttctctatata

SEQ ID NO: 28893 - DNA, 482 bp, Glycine max
  unsure (1)..(482): unsure at all n locations
tagtgtagttaggaggtagccttccctcgaagtaaggctagttatcttcttcctctccctcgtgacctctgctcataacacactgagggatcaaaatgtcacaaaaatgattatcaacatgactattaaacagatgagaccaaaatgtcagaaagttttcattggactaatatcccaaattgtgtttcatttaaggggtaaaatataattaattttcatcttttccctttttttatggtttcacttattaactataaagactaaaagggataagtttggaaactatagagactaaatgagtaattaaacctttnttattgttacaagcataacattacaattaataaacattntaaaaaataggaaagcaagcttaagttagaacaaacataataataagcataatatngattaaaaaacataatttatttgttgctccagaaattctaatgtgacaatatntccaaaatatgatattcaac

SEQ ID NO: 28894 - DNA, 466 bp, Glycine max
agctaaagtatgcccgagtcattcatccctatgagatgttgttgaagtattggcgattagaattgccattctttggattatagggttgaaccaagctcatgcttttacaaaaaggttcatcaagtcatgttgaaatatggaagtaaccgtcttgcaaaattagggcaaaagatgaatcgagtcacatcactgcttcgtctactgccaaacatatttaggattgttgatgtccttgttacttccagtttcaccttgacaaagatatcatggaccatgttgaaaatctaaattgattcaaccccatatcctgtgtaaaaattcgcaatacttcaactgtacatcattcacgtacatccatgcttttcattggttgcattgctcattgcattctttccttgaacaataaaataaaataaaataaaatgaacttaatcattgttatcaaaaagatgaggacatgctttac

SEQ ID NO: 28895 - DNA, 397 bp, Glycine max
  unsure (1)..(397): unsure at all n locations
agctcattgttgctgtcccacanagctccacgtaaattgtcttggccatgctcttccttgcaagccctcttggtttcttgttcaagggctcttgcggtagctgcattttcttctcgtaactcggcacactctttccggacgtttgtagcgactaacttgaattnttctttggccagtcttgcttttcctaagttatgttttagagctcgaacttcttcatcctcttccggagctttgaagttctcctcattgataattttcaacttggagagccaatctaaccctcgtgtacgaactttcagccattcatgataaccaccgatgataccattatggatgcccctaagtcctttatctttccttaatcttgaaactttgcgcgccaaaatctctcaca

SEQ ID NO: 28896 - DNA, 372 bp, Glycine max
  unsure (1)..(372): unsure at all n locations
ggccgcccagcttgcccaggcgagcaaggttgcttcctccagaagctcaaccttctggagggcccaagtgggcctggttgctatctacacccccattnttactaaatacaccccctggcctttttttggtgattctttttccgtaacgttacggaattttacgaatttcgtgacgatacttattttccttccgcaaggttacgaatccttatggattatgtatttactcttttttagctttcgaagaagttacggaaacccacggattgcgcanaaacacctctttntgacttccaccacattacggaatttcacggatcgcgcacacctgcttccttttgatttctgagacgtctcaggacttcatttact

SEQ ID NO: 28897 - DNA, 342 bp, Glycine max
atgacatggaaaatgaatcaataatgaaaaacgatgctttatttgtgatatagaacgaaaatgccgagaaatgaatatccctacagccaacagagctcacttccctaagagaatagaaatttctctgccactaaaccgaatatgattctctctgaatacactcgccctacacacttcccatataacagaaacactcacacaatatgctcacccctttctctctctgccacctcatcagtcataccctgactctacttatctctgctgacatattctctctaatacatgggcttatgctgctgatgagcaatatgacccattgtgcccatgtttgactatcac

SEQ ID NO: 28898 - DNA, 417 bp, Glycine max
  unsure (1)..(417): unsure at all n locations
ctaagcttatatgcaggacgcattgagtggtccctctatcataagaagctttctattttctcaaatccgctatgatcaacaccccagttctggcccttcccatattccatgaaccatatgtcgtcgagacagatgcttcacgcactgccatgggggctgngctctcttagcaagggcacccattagcgttcttcagcaagaacttcaaccctcgcctgcttaatgcgtcaacctatgtgagggaactccatgctatcacatncgcagtgcgcaaaaggaggcaatatctcctcggcagctcttcacgatccataccgatcacaagagtcttcgcgagcgtatgactcaggtgattcaaacgccagaacagcactatcaccctttcaaatagctagggcttgatacacaattcaatac

SEQ ID NO: 28899 - DNA, 401 bp, Glycine max
  unsure (1)..(401): unsure at all n locations
agcttctcaatgaagctacctagtctataaatagaagcatgtgtaacacttgttgtaactntgatgaatgagagtcttgtgagacatacttcaaagttccacttctctccctcttttattccttcaatttcgggctcccccctctctctttctctccctctttcttttcctccattgaagcatccttccaagcttcttatccaaggctcatcttggtggtgaagctccttcttccatggcttattccctagtggatggcgcctcttctcacctcttctcctttgtcttccgctgcatctccatggtggaaaatcaccattaaaggacctcattgaagctcanagatccagcctccatagaagcnccacaagcgaagcttcatcaagtggtaatcagagcac

SEQ ID NO: 28900 - DNA, 436 bp, Glycine max
  unsure (1)..(436): unsure at all n locations
ngctaacccatggaagctcctaatatctcccactcttttttgggtgtgccattcttggatggccttgattntctcggggtccacttggaccccatttctactaattacaaaccctaagaaaactatattatcaacacaaaaggtacacttctctatatttgcatagagggtgtntttcctaaggactgaaagaagttgcctaagatgtcctaagtgattatctaggctcctactgtgctctaaaatatcatcaaaataaaaaactacaaatctacctatgaaatcccttaagacatgatgcataagcctcataaaggtgcttggtgcattagtaagcccaaaaggcataactacttctctatgcaaatatagagaagtgtaccttntgtgtagataactacttttcacactactnttcaatngaaacttcataact

SEQ ID NO: 28901 - DNA, 381 bp, Glycine max
  unsure (1)..(381): unsure at all n locations
agctngtgctcaattataaagtcgagacatgtataatatatctctacacagcgtatgcgattcattttcttttctcatttggaaacaagatcattcttgacagttataccattcagaaattctatttatcatatacctttacagttaacactctaggcagatcatatggtcagtatcaaactttgcaagacagattctggaatctactagtaagagactaacagactgtatagcataagcaaatcatgctatgaaagatcaatatgagacaaaggggcctggtgatcattttccttgttagaaaatgtggctgtctatattaatgtaacattgaggaataagacttatcacctctatagagtactcatgtgtccaaacata

SEQ ID NO: 28902 - DNA, 308 bp, Glycine max
  unsure (1)..(308): unsure at all n locations
ggggttggccttggatgtggggtaaaggcctttatagagagcgaatcttgcttcactntattcccncttcaaattcgatactttgctctgtacccataacgaggttaggtttggatttgcaagagacaacctctctttatatctctcattcctctctctttctttcaaaccagcacattgtgtgctctctgtctatctatctctatctctcttcttactttttctcttgggcttcatattctcttatagttcttacaacgtctcaagtggttgtaccatctgcgctttactattctgcttgggattca

SEQ ID NO: 28903 - DNA, 441 bp, Glycine max
  unsure (1)..(441): unsure at all n locations
agctntaatataaagaattatataaatataatttctcttatcatatgtattaattataaatcttcatattatttaatatatattatgctccatattatatgacacgttaaaaagttatataagtcaatagaaatatcttattgtgcggggaaatttgaacaaaataacattgtttttacttaaaaattgtcaaaatccttttctcttgtcttattttttttcttctatatctgtattgtggaaagtattatgaaaattgtacgcaaaaattaaagattataaaacttaaacttccaatacccgaaaaaaaagtctcgaacttccatcatattcataggaaaaaaaactagtaatatattctagcattaaaaaaaggaaaaatgaagccaaaaagaggaaagaatgtatatatattctagatcactttctatatgggatcca

SEQ ID NO: 28904 - DNA, 397 bp, Glycine max
  unsure (1)..(397): unsure at all n locations
taatcctatcagcaatgggcttaagcaggctnttggtaagctttctctttgaaataaggacagctaggtaatcaaaaggggtcacactagccttgaaaccaagaaggttagcaatctgatccaccctcctgatgggaacaccaccatgataaaattgagatttgtctttgttgataacttggccaaaagtcttaccataatcctctaaaagagagataagagctnttatanttnnttatcgtcctttacaaaaaaatgaagatgccatccacatacatgacatggctcggggtgatgaaatgctttgggatcttcataggtngtagctttccaaaattaacaagaatggagatactgctgctaaggatgttacgagcaaaaccagaaacagttacag

SEQ ID NO: 28905 - DNA, 396 bp, Glycine max
  unsure (1)..(396): unsure at all n locations
agctggtntgatcaatatcaagaaagttttcttatgtatttattattctgataatagttcatagcttagaagttattatattatatatataacttataaactcgtagcgtttttctttttcttccatttttacattagtagtgtgataaactctattttttaataattctgtgcattatcctttctaactgttttaatacacatccctactattattgaattttcataacatattcgatctttacaaatataaagagtttaaggttaatacaaaatctaaaactatagttgcctaagagtattnttttttatctactaacaaatagaatttatactaaaatttatataatgggcgaagcatatgccttgagtccatgctattatatctatattatt

SEQ ID NO: 28906 - DNA, 375 bp, Glycine max
  unsure (1)..(375): unsure at all n locations
ngccgccacagagntttctgactatgctcttgtgtggtgtaacatgtctcaaaaggagagagcaagaaatgaagagccaatggttgatacatgggcggagatgaaaaggatcatgatgaagcggtatgtgccagctagttactcaagggacttgaaattcaagctccaaaaactaacccaaggcaacaaaggggttgaggagtatttcaaggaaatggatgtgctcatgattcaagcaaagattgaagaagatgaggaggtaactagctcggtttcttaatggtttgactaatgatatccgtgatattgttgagttacaggagtntgttgaaatggatgatntgcttcacaaagcaatccaagtagagcaacaat

SEQ ID NO: 28907 - DNA, 466 bp, Glycine max
  unsure (1)..(466): unsure at all n locations
agcttcatatgtttatgttttctggccattcacaccttattattactatgcagntaccgatcgtccagaaacagcanaagaagctaccaagttcttcattattctgaaacaatattccgtcaatgccgtgtgtgatattcttgtttaacaagctcttgtcttggttnttctttaataaaaaaggaaagtcttttgaactcttggaaactgaaaagcatattatcacatctccaaacactatgacttcaatcaaattgataaaataaatatttgattttgatttagttttttagttaattntaaaatctttccgtttntaatttataaatcaattctttttttagtcttaataatttttatactttttcgtattatatatgcattccagtgttagtcttatattatatcttcaaatatcttcaattatgtttaaaataaaatatgtgttcgtattatctctcataat

SEQ ID NO: 28908 - DNA, 453 bp, Glycine max
  unsure (1)..(453): unsure at all n locations
taaaaggtggaggaagaaatttatagtgcaagaagtattgtcttatntaattcttcggcattaaaaattttctttcctctaatgttgagaaatttagagaagaggagaggagatttaacatattttaagtgtaatgactaaaatacttatatttgtattttaaaattttaaattataaggataaaaaaataaaaattaaattttaaaatttntttctttcattgcaaacaaaacaaaaaataggtggttttcctcccctgcattaaaatccctctatcaaacatgatgtctaatcaaattatgttatttttaattattaatcaaataattacgaatgaatcaaatctcttttttaataccttctaatntntttaatagtatcataattnttcggatgaatcaanggaaatnntaaatttggaaattagttnttcttaattataatataaatat

SEQ ID NO: 28909 - DNA, 448 bp, Glycine max
  unsure (1)..(448): unsure at all n locations
tacccatcacatgtggtactatgtggcggtcgggcgatggtgcacaacaagtttttccacatccacaatgcgcgcataaacccaccatcccctgttgcccacctccagctgagctcacgtactcccacgtagcccatatcctcgtttctctcaacaccgggtccccatcaatcctcccaagcttncacaacatnncaagcaaacaacattcacacagcacaagctatcacagccaagcaaaacagagcaaaggcagaaaactctgccaaaacaccaaccaaaaatcacagcttttcccactcaaagaccccagtaacaatntccttcgatccaattcgttaaccgttggatcgaactccaaaatttactggaagtctatagtgcataagcctacattttgaccgttgggatctactagcanacatccagaactcattctacattactc

SEQ ID NO: 28910 - DNA, 366 bp, Glycine max
  unsure (1)..(366): unsure at all n locations
agaaccattcaacctaacagtgaggagcaaatgaaataatttctgtgtctattattatagatgcctgataacatttgttctttgttttccagagtttcttttattaacttattaatcactgtagggagtatttgtaatgtgggaaacaaatacttaatactcaaataccatatatcacgtggagaggtgtaagtagtcaggatattatgttctggagttggaacacagttaagtagatggagtattctcctcataacaagcaggcctgcaaataatttaccatgttccaaaccataagcttgntgtatacacatctttaactcgttcttgggtgaggatantttaaatgagaaaatacatatgcaa

SEQ ID NO: 28911 - DNA, 488 bp, Glycine max
  unsure (1)..(488): unsure at all n locations
agcttaaatataattataacagagaagagagactgattatcaataactaacttaactaactaatcataatggactaattaagctaaactaactatggtaataattctaactaaaactggttgtaatactccccctcaagttaggtacatagatgtctagaaggcctaacttggacaaaaaaaagagaatttacagtgaggcaataccttagtgaagatgtagcaagttgttgatgagtagataagtgtaccagcttgataaaaccagagtgcacatattgccttatgaaatgacaattagtatctatgtgcttagacctatcatttgaagttggattntcagtcaatgcaatagctgatttaaattntatcanaaataaaattaaaataaanatgtatttaagccttacaatttccaacaagttttgaactaaatatganagctatcctanattcattacttcctatattctattataagtgtcatat

SEQ ID NO: 28912 - DNA, 402 bp, Glycine max
  unsure (1)..(402): unsure at all n locations
aagctgcaccgatgaaacacagggaccaccgagggggttccaaggagccgcatgaaggcgtgttcgangtccttgcctctnggatcctcgtccagctcgtgcacggttgggttcacacccatgccgcagaagagcctctggatggcgtggcacatgcagcacgtgctcacgctgaatatcaccaccgcgctctccgacgccagcctttctatgcgctccagcgggtcccccactaccgccgccgccgcgttccgaggggccggcacgtagctcccccaccacgccgccgccgctgcttggtaatgcattctcagaagaattntatgtgatgaaagaatgacacgcaaaatgtatgataatgagagtgagaatgtagtgggtttggcttggtttgtttgtgtg

SEQ ID NO: 28913 - DNA, 203 bp, Glycine max
  unsure (1)..(203): unsure at all n locations
agcttatatatatcgatacgctcgaaattaaacatcgtanactctcacgaaattcaaatagtcataactnttcacacggatgtccgattcgggcgcataatatgtcgagaggctcgtaattaaacaacgcaagctcttgagagattagactggtataacttttcacaccgaagctctcgtgaaagtcaaatggacataacttt

SEQ ID NO: 28914 - DNA, 533 bp, Glycine max
  unsure (1)..(533): unsure at all n locations
aggcacgatggggaatggaagcagtgagctggcgacgtgattactactctagctagaatcggacctccgngagaggacatatgagcgaaaggatatggccatttctatcgctggagaatttctagcgtctaaacatgagcggctccctatattgtacatctggtgaagacatctgagcgaaaggatatgaccataggaatctctcgagaacttccagcgtatcattttgtgcgaatccagaaatggagctccctgagacgacatccgagcgattagttatgaccatagctattcttgtagagcttccgatgtttaattatgagcatctcctcatttgaacagcccgagtcggacatacgagcgtaaagatttgacaatatgatttgttgaagagttccgagcgtaagtacgagctgggcttatattatacgcccggataagacgtccgagcaatagatatatcagatgcatcttgagagcttcgacgtcaaattagagctccgcaatataacacccgggaaagttcgggatag

SEQ ID NO: 28915 - DNA, 390 bp, Glycine max
  unsure (1)..(390): unsure at all n locations
agcctttagtctctggactnntttgatattcggtctttatttcttaaacaaaagtttgattggtcaaagtttctcaacttttttgaaatttagtttttaatctttaaacaaaagtttgactggccaaggtctctcaattttttttcattaaggtttacagtctctaaacttttgaaaaactcaattnttaattcctaaaatcatattaaataaataaaataatgggttcaaacttttgtttagggattgaaaattgaaattaataaaagtttaaggaccttgaccgatcaaacaaaagtttaaggactaaaaatcttaacggaaaaaatttaagggactntgatcaatcaaactnttgtttagggactaaaaaatgaattaaaaaaagtt

SEQ ID NO: 28916 - DNA, 441 bp, Glycine max
  unsure (1)..(441): unsure at all n locations
tatgtacccgtggtgggtccacattggtttcatgtatttttattctctttntcatttactttttatacccccttttgacgtgcttaagccatntatttaagtcatttctcgcttaatctaaaaataaaataaatttccaccgatcatttgaattgtatcatccgctaatttcggttaaaatgaattccgaccgttcggtcgtgccgtaaccccgttggaaatcaaaaaaagaggtgaaattataatataataataaaaaaaataccttctagtaaagtaaagcgtaaaatcaatcggacgttttctctntgggagttctcattcttaattgaatcgactaataactaaagtgaaactaaggctaaaatcaaacttgcctagtcaagctcgttcacaaaaataggttntttttgaaaggttcttactaagtaaaaatgatca

SEQ ID NO: 28917 - DNA, 141 bp, Glycine max
  unsure (1)..(141): unsure at all n locations
gcttaacattcaattcgagcgtgtcgatatgatattggactcattcagacaancgagtataaagttatggtcgcttgtataggctcatagcctctactttcaatctgcagcgtctcgatatgttacaggactcagtcggac

SEQ ID NO: 28918 - DNA, 384 bp, Glycine max
  unsure (1)..(384): unsure at all n locations
agcttgtagcaatatcaaacgagaataactttatacacggatgtccgaatgagtctcgtaatatatcgatacgctccaaattgaanacataagcccgtagacaattcaaaggacaataactttttactcggatgtccgatagagtctcgtaatataatgggacctccaaattgaaaatggaagctcctatcaaattcaaacgacaataactntntgctcggatgtccgattgagtcccgtaatatatcgagatgctcgaaattgaggacacaagctctgaacaatattgaacgacaataaatttattctcggatgttctattgagtcccgtaatatatcgtgctactccagattgaaaatggaagctcgtaggaaattcaaacg

SEQ ID NO: 28919 - DNA, 337 bp, Glycine max
  unsure (1)..(337): unsure at all n locations
tccatttcaacttggagcgtctcgatatattactggtgtcaactgtacatccgtgtataaagttatgggcgtctcaatntgctcagagcttctgttctaaaatttgagcgtctctaaatattacgggactcaataagacatctgagtaaaaagttattgtagtttgaatntgctacgagctctcgttttcaacttggagcgtctcgatatataacgggactcaatcggacatccgtgtataaagttattgtcgtttgaatatgctacgagcttcagttttcaatttggagagtctcgatatattactggactcaatcagacatccgagtaaaaagtt

SEQ ID NO: 28920 - DNA, 302 bp, Glycine max
  unsure (1)..(302): unsure at all n locations
agcttctatataagctgaaccatgttatcaataaagacttgttgagtcntattcagaaaattagagtctatctcttttatcttagtgagagtgattctcctaaattcttgagtgattcaagaacaccttggctgtatcaaaggactttcacaacctgtgtgtgttgccctcgctggaaagagtgattctttccttcctgtcatctgcaccctttgttctttcaaaccacatattcataaaattcacctcttgccataattatctcgtggccatgactcccagtntacgcactcaaattaagt

SEQ ID NO: 28921 - DNA, 163 bp, Glycine max
  unsure (1)..(163): unsure at all n locations
ctaagcttaacattcaatttcgagcgttccgatatattactggactcaatctttcatccttgttaaaagntattgtcgcttgaatttgctcagagattcngtcttcaatttacagagtttcgatatattacgggactccatggaacataccagtcaaaactta

SEQ ID NO: 28922 - DNA, 401 bp, Glycine max
  unsure (1)..(401): unsure at all n locations
agcttccacacttgtagttgtatctaaatgcatntgttggaatgagggctccccaatctccactagaatcagcgcatctatgtcgtaggccaattgaaatggagtctntttggtttaaattgtggcgtactacaagccccccataaaacttctagtaactccttggcccatcttcctttacacatagattgagtatcttttgagctctactaagatacctnatttgctacctaacctgctcgttggtttaaagatgttctattgatgtgaccaggttgatgcccaatgactacataaaattgtgtaaacctttatttgtaaactaaaggccattgtccgttatcattgtttatggaatgcctaaccttcttactacattcattcatataatactctgaatg

SEQ ID NO: 28923 - DNA, 418 bp, Glycine max
  unsure (1)..(418): unsure at all n locations
cttgatgatatggtcttcaccgacgaaaggatcatagtgagtctaattagaggcaaatctgatcatcatactttgataaatgccaaanaaactagggcaaatgaagagggtgagaatgagggagaagcccatgttgtgactgccattcctatacagccaagtttctcaccaacccaacaatgtcgttactcagccaataaccaaccttctccttacccaccgcccagttatccacaaaggccatccctaaaacaaccacaaagtttgtctaccgcacttccagtgacgaacatcacctttagcacaatccaaaaacaccaaccaagaaaatgaatttgcagcgagaaagcctgtagaattcaccccaattccggtgtcctatgcttgacttgctccatatctactngataattcaatg

SEQ ID NO: 28924 - DNA, 429 bp, Glycine max
  unsure (1)..(429): unsure at all n locations
agcttgaagaaaagactatatgaggtatcttccttgtgtatagcaatatctctaagggctactgtgtctacaacttgcaagctaagaaactcgtcatcagtcgagatgttgaagttgatgagtacgcttcttggaattgggatgaagaaaaagtggagaagaacgttcttatacccgctcaactacctcaagaagaagctgaggaagaagacccaggtgaaccacacaacaaaaagatcaagatctatcatcaccagagtctactccaagacgagtaagatctttggtgaacatatatgaaacttgtaacttggccatacttgaacctggaagctntgaagaagcgtcacagcatgaagtatgggtcaaggcaatggaagaagagatatagatgatcgagaacaacaacacatgggagttagtaaatcg

SEQ ID NO: 28925 - DNA, 402 bp, Glycine max
tgacttgagtcatcaaaagattataaatatacgtccatggcatgtttttgaatatgagatcaatcatctatctttcaatcttctctcaacatcattcaatatctttcaactctttctacaaaattttctgattctttttctcttcatgtttctaaaaagttttgttcaaaactctctcttccaagataagttctttgttcaaaaacttgtgctattcatctatttcattctcttctcccttttccaaaagaacgaaggactaaacgcctgaattcttttgtgtctctcttctcccttacaaaagattcaaaggattaaccgcctaagaattttttgattcttccctttcccttagcaaaagattcaaaggactaactgtctgagatatcttctgtttcccct

SEQ ID NO: 28926 - DNA, 346 bp, Glycine max
agcttataagaacaaaagtgcctcaatcatttccaaatatgcatgtgaattacgatgcatcaacaagaatcaagcctatgctattgcgcaagcaatctatggggcagaacacacccaatgattatgatgatggatggctcacaattctcacaaaggtaaaatcatcactttcaaaatgagctctcaaaactatcatgacatgtagagaaaaatcaatgatttcaagtcacacaatgtcaagacttttattttcaaaacacttacccatttcttgaacatatcctataattcaaagataaacatgcacagtcgctcgtgcacacaaaatgacccaaaatattaaact

SEQ ID NO: 28927 - DNA, 166 bp, Glycine max
  unsure (1)..(166): unsure at all n locations
nntgtntattgaaatacaagaaggcatgatgagttagagcatgttgtttaggttttcccttaggccagcacttggtttgggctgcgccatgttttccttgtgcctagaaagcatgataatgtcgttaaaacatctgaataaagacatttttaactactggtaatcg

SEQ ID NO: 28928 - DNA, 414 bp, Glycine max
  unsure (1)..(414): unsure at all n locations
agctngaagaacacnaaaaactnntttaatcaatgaattacacaaaggatgaagcagagggtaagatgataaaagttntgaagtagacgaagagcaatgcttgcatcaatcagaaggactgaagattgttgaagatgagaatcgactcaatcactgcatccaacagtggatgcaagggtggttggtgctacaggggtggctggtgatggttcattatggcaaacgatgaatctacaaggatggcctgagctacagtaaagaagaggaaggatggttggggttgcaactataaagaggaggatggataagggtactcgttgtaaaaacgtaaaacgttattgagaaaaccatcttttttatnttganattgatgtaaagtgtttgaaattgagtaaaaccatttaacccaatttt

SEQ ID NO: 28929 - DNA, 444 bp, Glycine max
  unsure (1)..(444): unsure at all n locations
tactcagcttcacttntcgttgataaccttgatgactcatatgcattcaatctcatttcctccagctccaagagttgtaactntctttnttcccctgatatagcctcatcaaaattcagaaatttcaaagcccggtatgccttaagctctatttccaccggtaagtggcaggcttttccataaacaatttggaacagagacaggcctataggggtcttgaagacagttctgtaggcccatagtgcatcatccagtttgcttgaccagtccttccaagtggaagccacagttttctccaatattttcttcaattccctggtggaaacttcagctnnggccatttttttgtgggtgataaggtgaggccactntgtgtgtggcatgatagtggcctagcacctttngcagttatgctgggcaaaaataagaagccgcatcacttat

SEQ ID NO: 28930 - DNA, 527 bp, Glycine max
  unsure (1)..(527): unsure at all n locations
actcttccctattantctctacttcataccctaatagttnnntttaaagagtgatgtgatcatgacacggatctaattactgagctgcaacttgacaacaagacaacttgtagccgttcatacagggggccatacatcatgcgagaatagtgatcaaatatgtatctacgtctcggctaattctagctctataatctgcggttcgaaaagaatcctttcaatttggacagactcataggccaatgaattgcaagatagaaaactatttaatctatataggcaacaatatttattttatataaatacatatcattatatgcaaaatcacaattaggtcatttgtctaacctacaggtcagcggcaaatattgataattcttaggctgctcgctattagaaatttgcgagatcgttcaataacttttatgctttggcattcaagagctcgatattacgtcatacttttaatttaactctattactgaaatgattaactcctacttattatgctttcccctaacattatc

SEQ ID NO: 28931 - DNA, 74 bp, Glycine max
tgtacctcctgctagatgatttacgactcacctctcgctgtatattaaccaatttaatccttgtgcttaaacat

SEQ ID NO: 28932 - DNA, 486 bp, Glycine max
  unsure (1)..(486): unsure at all n locations
agcttgcanaccctangtatctctgcanaagctgctcctcttgctgcctccagagctcttttcccgaaataggcactgtggctgctgtggaattctgtgccctggccttctctgcaaagtgtaccctaattctgcacaagacaggctttaaataggttctaaattcgcaacgttacgcttagcgccaccctcacgcttagcgcgggtaagtggaaatgggcttaacatcaatctcgtgcttagcctggttgaatgcacctgctatgcttagcacactgatctcgcgcttagcacgctgctatgatgctgatgccttaccagattnttctgtcatgctaagcgcactgaagctgcgcttagcgatggaagcacgcttagcccactgatgaactaagctcaactgtcacttttggcacttcatgacttagcatctttttcacttgaaagtgcacatanttcatcattaaatccaatggacatattcta

SEQ ID NO: 28933 - DNA, 390 bp, Glycine max
  unsure (1)..(390): unsure at all n locations
taatttatcagtgggacactactctttatgcaaaaatggcatataagctgctcccataaatacaaacatcaatgtaaatctagagcaagcttatgcgcatatttccttacgaacgttctcttgctcaagacattctatgtactaagaaaaatgcacccatatacaatcaaggcagcttcgttacctagattattatacgtacttccaaggggtatttgttacttacatcacacacatctccttggctaaatngacatacatgcatactcaaagcattttggggtaccaaaaattgcacatgtgcacatcttggtatntctaatacctatacatacacaaacttcatgatgaatcttgactatctacacaataatgtgctacattccatgc

SEQ ID NO: 28934 - DNA, 448 bp, Glycine max
  unsure (1)..(448): unsure at all n locations
ggtgtgttggttcatgtttatggtggtgtcttgtatcggttgtgcggcaagcggactttgtggctgatntangggtgacctttgtggatgattgggtgttcttggatgataaagtggtggttaatgagaggggctgatattggctgagtattaacatagttgagctggtgggaaatttggccatgtaggaatgacggtcacaacatgggttcctcccttgttcttattctctccattagccccaggcttcttatttatcaaagcaggataatcaaatgtgcctcttctatacccacttcgatcctttcgctggcaaagactatatcggcaagcttaaaggtgtgtaacccaacatcttctcatattagaacaccggtaacgtgtccactatcattattatcatctgcttcttcgtattgggggtgctacttgagctgctgatcccttc

SEQ ID NO: 28935 - DNA, 594 bp, Glycine max
  unsure (1)..(594): unsure at all n locations
cccttaactcnccctctaccaccttactacttaataaatattagttgtcattttnnaaaacaaatgatcgtgaaccgtacctnaagncactgcagctgcaagcttgagagcctacgaagaatgaagactggatgcttctanaataaatngcgccgaatcatcgattgatctatactctgtcaaaataacttctaactttcatcttctctctcccttattccacccgaacacctatctctttgctttcttcaatccattatacggtacttgtctttttgaacgatttactacgcctcaagctaaactttgatggacacgaacagtaacgcctgcctctaatcatttcttattcatccttctttaaacgaaagaatatgtcccacacctctttccttaattttntacgatgaatatataagactagtatgcttattgtggttataccttcactttgcctgtcatttataaatcttacttgctgcatatacttaccaatggatcatggaacagaatctttatttgcttacatgccatttacatactggactgtacatatgtgacctatgttctatatgttaagcacagtacacaccn

SEQ ID NO: 28936 - DNA, 231 bp, Glycine max
ctctaacacaacaattatgcagaaatcatgtgtaacccttgctggatcagtggcatatggtagcaaaatataggttttctatgtagtcttctgatcaaagtatatatgaaactatttctggagcagcttatatgctgtgagtcacagattttatgagacattatttaacactcacttgtgttgagtggttcctgactcataaatgataacgttccatgttgtgctcaatta

SEQ ID NO: 28937 - DNA, 484 bp, Glycine max
  unsure (1)..(484): unsure at all n locations
aagcttaaggaatngtaccataattttntaggtttccaaaacattagacttaaattgtattttaaacctcttattntagtcaatgcaatttctttttttatcccttattctaattacatgcataatgcatggttctcctagtttttcaattgttaaaattaggtccatgatctaatgtattttttgacatggtagtggcttgtctgacttgcgacatgatacaaagcaatggcatgagttcacctgttatagccactgtttgtctgtcattgtangattgngaaatttgtgaatatgattaggatttgaacaaggattntgttcttgagatccaaattaaatgatcattaccaaagctntatagtttatggcaatgagactatggtgccggagcaaagtggatgggagcgtaatggatagtggtgaaagagctgacattagtggtgttatccggataagagaaatgttaacaatatctaacata

SEQ ID NO: 28938 - DNA, 397 bp, Glycine max
  unsure (1)..(397): unsure at all n locations
gaagaatagctctcanacttgtctccttgcaaaggaacttcctgttgggggtgatcaanggcataagaaaatcccttgggtcaaatgggaagtaatatgtctccctaaggaggatgggggtcttggggtcaaagatatctccaaattcaatacagctttgatgggtagatgggtatgggctctatcttctaatcataatcagctgtgggccaaaattttattgtcaaaatacgggggatggtctgatcttagtagtgggagggataaatcttggcattctcaatggtggagggaccttcgaaagatatatcaacaacctgagctcagtattattcaccagcaaatggtatggaaggtgggaggaggggaaaaaataaattctggacagatattggtt

SEQ ID NO: 28939 - DNA, 360 bp, Glycine max
  unsure (1)..(360): unsure at all n locations
gcttactgaaaactgatatagttatttgatttcctaactcttgcatgtgctactctaacataagaagcactttcttatgatcacgagaattagttattttaattcctgctcatattcatttttataaaatgttaaatgtagtaaattattttgttgcaatacatgcacagtttaagattagtctagaaagaattcttgggcttactaatctctttnggttctataggttcattcaatgagaatattttatttgtcaccttctcaaaaacacctaagctgaagattatcgtcgaaagactatttgaatattgtggatatcaggtgcctcagtttcaaagcgatgaagatgtggttaatcaa

SEQ ID NO: 28940 - DNA, 298 bp, Glycine max
  unsure (1)..(298): unsure at all n locations
ggttgccttacattatttccatgacacataatgcaaaaatgatgatttggaaactttatgcaaaactggtcatgcatgcacctatgcggacactcaagtgtcaaatttttatggtcatgtgatgctagggctcaggaattcattnctctantttaatcaacccaatgtttccaaaatatgttcttttatcaatttgtgcattcatccgagtccatttcgggcgtctggggaaatttcacagcattcacccttcaggtgtagacacattttccaaaaattggttatgatcaatgaaatt

SEQ ID NO: 28941 - DNA, 187 bp, Glycine max
acatgactgtgcaacattatgaagattataataaggaggaactatgctgttggatggaggtagtctgctatggcgcccaatagagctaatcactcactagcgagctcttcttattccattacattcgctcatggcttggtattgagcctctcatgactgagacgctgaattacccattggtggggac

SEQ ID NO: 28942 - DNA, 393 bp, Glycine max
tgacttgcccaatcttaagagagaattttttcaacaaggcgtaaagtttttgatgatacatgctctctcattgtagatagtggttcatgttgcaattgttgcagcacaagattagtctctaagttgagccttgctatcactccccatccaaagccttacaaacttcaatggctcgatgagcaaggtgagaggataatcaatcaacaagtgaaagtgcccttctccattggaagatataaggatgaagtgatttgcgatgtagttcctatggaggcaggacaccttctcttatgtaggccatgtcaatatgatatgaatatcatctataatggccgaaatatgagataccctcagcccctggaataaagttgtgtacatcctaacacttcacag

SEQ ID NO: 28943 - DNA, 399 bp, Glycine max
  unsure (1)..(399): unsure at all n locations
gcttgaacacanaattggagatgaaagatctatggtcatctaggaggatactcgggattgatattcatagggataaagcaaagggtgaactattcttgtcccaaagcaattacctcaaaaaagtggtggagaggtttaggatgcatcaaagcaaacctattagcacaccacttggtcatcatacaaagctatctgttattcaagcactagaaatagctgaagagaggtctaaaatgaatcacacaccctatgccagtggtgttggaagcataatgtatggaatggtttgcagcagacctgacttatctcatgctgtaagtattataagtagattcatgggagatcctggcagcgcacactaagaagctgtgaagtggacactaaggtatctaaatggat

SEQ ID NO: 28944 - DNA, 278 bp, Glycine max
  unsure (1)..(278): unsure at all n locations
ctggaactatcttacatggacttgatggtgtctatgcaagtngaaagcctnggacgaaagaagtatgcctatgtgggtgtggatgatttctccagatttacctgngtcaactttatcagagagaaatcatacacctctgcaactgtcaagcactttcacatctttggaagtccatgttacattctggcngatagagagcaaatgagaaagatggatcccaagaacgatgcacgaatattcctgcgatactctacaaacagcagagcatatagagtatt

SEQ ID NO: 28945 - DNA, 282 bp, Glycine max
acttggaggatctaaggtgcctcatgcatctgtacttggaggggtgccttgatctcactcacatgccacgagggataggcaatctgagatctctactaacattgtcactttttgtgcctagcaagaaccaccacaatggaggccttaaggatctcaataagctccaagggaactaggaaatattgcatctggagcacgtgaagttatctgcctcgaacgccacagataagattgtgagagatataaaacaccttgattgtttgactttaagacgggatcacc

SEQ ID NO: 28946 - DNA, 426 bp, Glycine max
  unsure (1)..(426): unsure at all n locations
actaagcttgattactacaaggtggtgaagcacaccttattaacatntatttgaagtttgtgattcatgagcttagtcattctaagataggcaggcagttcataaactgtttattctttttgctcccaaagatccaatgtttcaagatgaacattattcatccttgcgaatcgtgttttatagtacacctcaccacacaaaaagacaagtggtggatttgtagaaaacgagcgtatggcttctctcaatcaactcacaaattccttatgttaagagctttggcattaatatgttttatataattttttatttatgagagcagcaaatttagaaaagaaatatacacatgaaacactttattggatgactctatatatagagctcaatatacatctatcattggtagtataacttcaacttacatga

SEQ ID NO: 28947 - DNA, 459 bp, Glycine max
  unsure (1)..(459): unsure at all n locations
agcttgtgtgcccaaggtgagaaagagataacttaagagcataacaagttatataaaaaggtgttaagtcaaaaaatatttgggtcttacaacgaattatgacccttaattattntattggatgcaaataaatacaaaggttaaaaattgtgtcttatgcgatatcagactatgcctcatgtatctatggtacatcattaaagtgtgcatttgagaatctaatttagtactttgtgttgatccattttgtaggaactatcttagattacattctcctaagatctgtcgaatcctaaagcgcaaaggaactttcatcactttaaagatcaaaagtatcaaaagacgtgctctactgtgacagacttactctaacgcaaaggaaatatgttcttgatgaagtgttctacacgaaagctaacaagagagattntccagcatgatgaagtatgttgcattaat

SEQ ID NO: 28948 - DNA, 385 bp, Glycine max
  unsure (1)..(385): unsure at all n locations
nggttcgaggtacttacaccgtgaagatcgaagaacgatgaagaaagaatgaagaacgtcgaagaacggtcgaaaccttcgcgaaattcttcacagaaaacgttactgaaacgtttcggaagtgcctcggcttagattttcttcacggaaataattattccaagcaaattcgaaagagagagaagtgcctaaggggctgaaccttttcttcttcacttcctcccctatttatagcaaaatatgggaggtggttgccgcccagctcgcccaggcgagccaagttgcttcctccacaaacaacagccttctggaggaatattctggagggcccaagtgggcctgggtgctatttgcacccccatatttattaagtacacctgcctct

SEQ ID NO: 28949 - DNA, 420 bp, Glycine max
  unsure (1)..(420): unsure at all n locations
agctctaaatatataaanataaatatttttatataatgcacatattacaatattctgttaaattatgatttttagcattataaattgcaccatcattaattcaattctcataatcaattattattattttcttatcaatttttattgaataaaaaagagttcttttaatatttattaagcaaatatagttaataattcaaggtagtgaccgaggcaagtaacttctgaacatcagagattgttttttataagagagttctcaccaagtaaattatagtagtattttaaaaatatatgaagatctctgtaaaaaaaaaaaaaaacctgcattaataaggagaataagaattaactctgaatccttaatcacttttacccatccaccttactggtagtaatgagagaatatgtataacatat

SEQ ID NO: 28950 - DNA, 363 bp, Glycine max
  unsure (1)..(363): unsure at all n locations
tctngacaatgtgtcttgcatactngctntgagagaggaatatggtgtctttcatctgcttcactaggagtcccagaaaataagtcagctctccaacaagactcatctcaaattcagattgcatctgttggacaaaatgtcgaagcatctcattcgacatccctccaaacacaatgtcatcaacatatatctgtgctatcatcaagttttcagcatcttgcttgacaaagagagtcttgtcaattcctcccttcctatacccttgctgagtaaggaactctgttagcctttcataccaagctcttggagcttgcttcaatccatagagagccttcttgagcctgtatacatgatctggatgag

SEQ ID NO: 28951 - DNA, 164 bp, Glycine max
tatgcttcttgagagacgcaggacatgaagaatctccgagtaaaagacatgtgtacatttctgcgatcaaggctgaacactaagagaaacataggtaaggaactgaatacaattatcactctctctctttagagcatcactctattactcgggtgtatcactct

SEQ ID NO: 28952 - DNA, 340 bp, Glycine max
tggagaaccaagccaatcaaaatgctagacgaaatatatatgggtatttatgtcacaatggcggtaatgacggaccgaggcagaaccgggttgagggagtaaagctcaatgttcctcccttcaaaggtagaagtgatccagatgcctacctggactgggaaatgaagactgagcacgtatttgcctgcaatgactacactgatgcgcagaaagtcaagctagcagcagctgaattctccgactatgcccttgtttggtggcataaataccaaagagaaatgttgagagaggaacggcgagaggtagatacatggactgagatgaaaagggtgatgagaaa

SEQ ID NO: 28953 - DNA, 398 bp, Glycine max
agcttaccttgtgtgtcaaggtggtttggaggttatgttcattgttttatggaacgcaatgatctctgggtttgctagacatgctcgtgcaccataggctatgatcttatttgagaaaatgcagcaaagaggctgttttcctgatgatgtaacatatgtgtgtgtactaaatgcatgtagtcatatgggtttgcatgaagaaggacagaaatattttgatctcatggtcagacagcacaatctttcaccgagtgtccttcactactcatgtatgattgatattcttggtcgagcacgacttgttcacaaggcttatgacttgatagaaagaatgccatttaatgcaactagttctatgtggcgttcacttctaggctcttgtaaaacttatggcaata

SEQ ID NO: 28954 - DNA, 441 bp, Glycine max
  unsure (1)..(441): unsure at all n locations
tataacccatcaacacgaattaatgtcatccactataggaaataacattaagccaccctaacgaccatcgtcatattgctcatacaagcacctaaaaatccatgtcaaaagccttcatcgtaatacatacttaactaccatcaataaaagctatcataattgaagatgacccccatcatataacgaaatcgtggaaatcaccattcacttagaaaaacctcttgccttntaaaacttcaaccaatgatagggaatatgtttaaaataatgtattcgtggtatatgttcgataacagntatacacaaattgacaagaaaatgatgtcatcctttngcactgaagtaattttagtggataatggttgcttgcaaacacaagtagtggtntacaagctaacttgttgatcatatgaatgcaaacctatatagacagaatctaca

SEQ ID NO: 28955 - DNA, 482 bp, Glycine max
  unsure (1)..(482): unsure at all n locations
agcttagacatgactataatntactggcatggcatgcatatggctcttgaggcatgtactggacctggcatanataacttccggctgctaaaatagcattaggaatgagagtgattgtttctaatactctgatatgttgaattntaacctgcattctattgaagttaacaagcacaagttctctttgaacagtgctgggctgttctagaaatgcanatgggaaatatcangagagcaaaagagttgtttgatgctgccacggttgctgataagaggcatgttgctgcttggcatggatgggcaaatctagaattaaagcaaggaaatctaaagaaggcaaggattctacttggtaaaggtcttcaatattgtggacagaatgagtacatataccanacacttgcacggctngaagctagagcaaatagatatcagcaggctcgatacttattcaatcaggccactaagtgtaatcctaatag

SEQ ID NO: 28956 - DNA, 362 bp, Glycine max
  unsure (1)..(362): unsure at all n locations
tattttatgtttgagatttgttatgtatataatngcagcataacacaatcaatacacacactcacaactgtttagtgtaattataaaatagatttgaaattataattaaaatatgtgaaatttctattgagcatgtgagcacacacacaccacatttattcactggagatgaatataacaattaaccatcatctgatgtgacacctaagcaaaatgatttttccattttgtttggttgccaatctcctgaatgtttaatccttgttgctagagaatattgacttcttaaaattcgactttgatatttgtggacgcatgcctactcaattttgaatatcgttgagatatattttatatgttgt

SEQ ID NO: 28957 - DNA, 461 bp, Glycine max
  unsure (1)..(461): unsure at all n locations
agctntaacctcatcgtctctcacagtctntagaattgggagccaatccagtccttgtgttcggactctcagccacttatgatagccgccgatgatcccattactgcttcccctaagctctctgtcctttcttcacgccgcatcccatgccttgcgaactccttggagtaccctcgcattgtggtcactgaaacctcgtgcggtgaaaggcgtgatgctntcgtctgatagcactcctctcatgggacattcttcgcatgaagatagaatcctgattcttccttccttctagcgagggaaccatttaacagacgcccctccatgctagccaagagttggtgcacaacaaacaattcttgcgccgctcttttcacatccccggtcgaacgtgtcatacatggccaaaatggcgacgatcgggctttcttgccatgatgaaaggcgaggaaagcgtcaatcgc

SEQ ID NO: 28958 - DNA, 417 bp, Glycine max
  unsure (1)..(417): unsure at all n locations
ctcctctntcaaaaccatgctatgtgctcgcgactggtccctttcctcccttcgcaacttgagttcattattgctaccccatagggctccgcgaaatttgttccggccatactcttccttgcgagccctcttggtctctcgttcaagggctcttgcggtaatngcattctcttcccgtaacccggcacactcctttcgaacgtgtgtagcagccaacttgaacttctccttggcgaagtttgcctttcctaactcgcttttgagagcttggacttcctcgtcctcttccggtgcttcaaaattctcttcgctgacgaactttaacttggcgagccaatctaaacctcgtatgcgaactntcagccattcgtggtacccaccaatgatgccattacgaatgcctctaagctcttgatc

SEQ ID NO: 28959 - DNA, 494 bp, Glycine max
  unsure (1)..(494): unsure at all n locations
gtgatccttcagtcacctgcggcattgcaagcttgcttctacacgtagtggtggaagagacttccttactccaccctactcttcctccaccatgacttagggagttnttcttttcctatctccttctttacttttattacatttgtccgattctatttgatggtttaattgcttttaatcttttacttgtgctacattgaggacaatgtgttgtttaagtatggggggagtgttctttnggtttgctagttttgctagttttgataattctgttagttgtgttgggtttctagtttaatattataggtcaattctggttgcatgtacaactttgcatatttttctttgaattataggatatgttcaagtaatgggtaattgttttgaaaataaaagtcgcttgacattttgtgatttgaagaccttgtttttcctctacatgtcatgatagttttgacagctcactttggaagtgataagttacctttatgaga

SEQ ID NO: 28960 - DNA, 487 bp, Glycine max
  unsure (1)..(487): unsure at all n locations
cgtacttgtacttgctatnggcagaatacatgcattacttcttcctttccaactcatcaacgtgagtgggcattntattctttttctataattacggggttaataagatgaaacaatagggtgatgaaacgaatagggtgtcctctcactgcttgaagcatccaatttttatttttatttttatggtagaacatattatcatatcttggaagcatcagctgtgactcggctaaaagctaccgcggtctttgagccagatgggcgccccaaatgcttgccgatgaactcaccggctaacatgagctttccgagatcaacgtnggttttcaccccaagtccattcagcatgtacacaacatcttctgtagctacatttcctgaagctcccttggcataaggacagccacctagaccagcaactgaagaatcaactgcactgatccccatctgtttagaaaagaaatcaataacgtccattaataacact

SEQ ID NO: 28961 - DNA, 475 bp, Glycine max
  unsure (1)..(475): unsure at all n locations
ttaagtcacctgcggcatgcaagcttgagctcgctgttgctgccctacaaagcccctcttaacttgtatcagcctcattcttccttttgggccctcttcgttatctggtccaatgctttggtcgtggccatgttgacgtccctcatctcatcgcactcttttcggaccttgatggccatcttcttgaacttttccttgaccgcttgcactctttcaagttccaccttcatggcttgtccctcctcgctctcctcaggggtttcagtctcttcctcacttgagatctttagcttcgggagccaagntatctcttgcgttctagccttcagccacttgtgatagccgccgacgatcccatttatgcttcccctaagctccttatccttcctttgcaccacactccacgctnttcggaccttttgatacatccttgcattggggtcactgaaacctcgtgcaatgaaaggcatgatag

SEQ ID NO: 28962 - DNA, 390 bp, Glycine max
  unsure (1)..(390): unsure at all n locations
tctccgaaaggcatggttattaccaataatctgtaaatgtctaataatctctccagatgattatctctttccttcttggaacgtaccacaagatatggtacttccacaccttcatacacaactgtntcactcttactcttctgtgcatactttttatttatttcttctctttcattctttccattttctatatctctttctttttcttggtccttcaatttattcctcattttctagaccattatttttctacttctttttctttctcacttctactctacttgaccattatttattcctcattgtcttgattactntcacctctctacctatttctcttgcaatcagtacctttcttgtcatcaatttcttcttatgtacaacactatc

SEQ ID NO: 28963 - DNA, 460 bp, Glycine max
  unsure (1)..(460): unsure at all n locations
agcttgatccattgagagatcctagctagttgttggctaatagttntgacacttgacacgaagtcgctattatgcacagagagagtggggaccacaaattctttctgtagcatatcttcagagaagtacagtttgccagtgtcgcctatcactcagagctaactttcatcgtatgaatcgaaggaaacgttaacaacataagacaagaganatttaatcttttcttttggtgctatggcacttgtttcttactgagtctatgaacgttacttttttgtgaatgttttcagtatgtgaggatcaagtaattgttccattgcttttgtactgtgagccaagtgctaaagcactggtcttctcaaggttggacgttgaagcagtatcatccaataaccgatactttttttttttgccagagccttcagttatgctttttacttgatctcatagagaatatatg

SEQ ID NO: 28964 - DNA, 392 bp, Glycine max
  unsure (1)..(392): unsure at all n locations
tctccccaatnttctataaatagggggagaagtgaagtagaaaagggtttagccctcctgttaattcagaatcacttaaaattagtgagaaaaattggttccgtgaagaaaatccaagccgaggcgcttctgtaacgtttccgtaatgtttccgtgggtgatttcgcgaaggttntcgaccgttcttcgacgttcttcattcgttcttcgccgttcttcggtcttcaaccggtaagttccctagatcgaacttttcaattcattctatgcacccttagtggtcctcgntggtttttcgtgctttcatttacatttcatttactttccgtacccccttttgacatgcttaagccatttatttaagttatttctcgcttaatctaaaaataaaa

SEQ ID NO: 28965 - DNA, 464 bp, Glycine max
  unsure (1)..(464): unsure at all n locations
agcttaacatcagaccacttccagggtgctggaactacttcacatggacttgatggggcctatgcaagttgaaagccttggaggaaagaggtatgcctatgttgctgtggatgatttctccagatttacctgcgtcaactttatcagagagaaatcagacacctttgaatattcaaagagttgagtctaagacttcaaagagaagaagactgtgtcatcaagagaaatacgagtgaccatggcagagagtttgaaaacagcaagtttactgaattctgcacatctgaaggcattactcatgagttctctgcagccatcacaccacaacanaatggcatagttgaaaggaaaaataggactttgcaagaagctgctagggtcatgcttcatgccaaagaacttccctataatctctgggctgaagccatgaacacagcatgctatatccacaacagagtcacact

SEQ ID NO: 28966 - DNA, 445 bp, Glycine max
agcttctcccaagaacacagagtctagaaatattaagtcttctcattctgcggaactccaatctccattctatgattcaaacggaaatggacggccatacacgtcaagatatccaatggctggtgaatgaactcgctgattgtgcttgttagtccaagagaattgactcagcgtttaattattttgttatgcttatgcaataattgaggttagcaacttcctcctggagctggactgcattcagctactatttttcccattaaaatggtcctgagtgtcggcgggtgctttctttatctaagctcccttttgttcgcatatagcgctatttaccaaggctccggaaagaataataggagcagatgatttttcacccgagagaatgtttcactgtattcatgtatattactattaccatttttggtggcggtagtcagctattgtc

SEQ ID NO: 28967 - DNA, 447 bp, Glycine max
  unsure (1)..(447): unsure at all n locations
agctntgcattggaattgcgaaagccccactccatcattatgattagtacctgacatctcaaacaaacaaatcaaacgtaacaagacaattatagttgctgtttgaatacctcacccactcaagtgtatcacacaattatggcttttctctaatgaaacactcttgccttttaccactctaattccccttgagttcttaagtaattcaagagattatggccacaacanagaacaattcaccaatatgtgtaaggtaaggctagaaagacaaggaanaggttaaccaagaaaaaggctaacaatgtttttaggcacaaatgaaggaaataaaattcagaatttaggaattcaagtaacaatccttcatgcaaccagtatattaccttaaagagatnntttttttaaaagttcttaagcatgaaccattcagccaatttttnttttttt

SEQ ID NO: 28968 - DNA, 407 bp, Glycine max
  unsure (1)..(407): unsure at all n locations
ctcgagatattcaaatggtcataactnttcacttgcatgtntgattctcgcgcatcgtgtatcgagacgctagaaatagaacaacggaagctctcgagaaattcaaatggttataacttttcactcgcatgtccgattcaagcgtatacaatattgagacgctcgaaattgaacaacgaaagctctcgagaaatctaaatggtcataacctttcactcggatttccgattcaggtgcataacatatcgagacgctaaaaattgaacaacggaagctctcgagatattcaaatggtcataactttttactcggatgtccgattcaggcgcacagcgtatcgagacgctagaaattaaacaatggaagctctcgaganatgcaaatggtcataacctttcactcgcatg

SEQ ID NO: 28969 - DNA, 431 bp, Glycine max
  unsure (1)..(431): unsure at all n locations
agctntacatcagaatttagtaatgatccactaacctataattaaaagaacttaatgtcattaacctagggaattaaaagaacttaatgactgagtgtaactgaaattgtggcaatcaaaagtcacccccaacagccataaagtcagccaccatttggtctcccaaaagactaatgtctaggttgtcaattggacccttattacaacttgaactaaaccaaactaaagcccttttagttgattaacccaaaacatatttttggtcagccaactttacaaggattgagccattatttaaacaaactaaacactctaaaattgaaacaaagtagtgtcatttagtcctcctctatntgggtcatgatacaactcacaaccttggacttttctacttgaaactngagcttgtattcaaatagtatggacaacac

SEQ ID NO: 28970 - DNA, 399 bp, Glycine max
  unsure (1)..(399): unsure at all n locations
ggccacccagctcgcccaggcgagctaagttgcttcctccagaaggctgtgccttatggaggaacttcctggaaggtccaagtgggcctagttgctattngcaccccctgtttattaaatacacccccttgccttttgttatgattctttttctgtaacgttacggaactttacgaattccataacgatacttcttttgcttccgtaatgttacggaaccttacggactacataatcatccnctttntggctttcggaatgttacagaacctcacggattgtgtaacaatgcttncttttgatcttcggcatgttacggaacttcacagatcatgcaacaatgctctcttttgacttctggcacgttatggaacttcacgtattgtgcaacaatgggtg

SEQ ID NO: 28971 - DNA, 403 bp, Glycine max
  unsure (1)..(403): unsure at all n locations
agcttgtcgtagccttngatattgcgaaggtactcatccattgttatcccttcgagagagacaacacgcatcgcgatccgtattgtcgtgccctagacttggtgtgaaggctgatatgctcgtgaatcttctcccatgcctgatatgagtgatttgagcctaccacgcgagaaaggacaaacttcgagagtgtcaactgaagccaaacaagcaacgtttggtcctgcacttcccaagcttcgtattcaggattaatgcgattgatgatgcgatcatcttctgtgagatattgaggtggaatgattggattaaccacaaacctctgcagattatgcgatttaatgactggctcaacatgtcaccagtgtgatagttggaatcatccaatttctcagctatcgtt

SEQ ID NO: 28972 - DNA, 266 bp, Glycine max
  unsure (1)..(266): unsure at all n locations
cgtcanaacagataaccaccacttggaatgcagccacgaggtgccgactaggctgctggagcaactcggacaagattccgatgacggcacggcggcgcgtgaactacacgcgccgaaagagacacgaagctgtaaccgcgcgtggaggcgcgtggaagctccgatgacagcgcgttttgcagggttttggtcgcgctcttccggcgatcctaaccctggtctcgccggagaagatgacagcggaggacggcggcgacaatggcgga

SEQ ID NO: 28973 - DNA, 479 bp, Glycine max
  unsure (1)..(479): unsure at all n locations
agcttcatgatggatgaaccaaacaatttgatgatgccaaaatcccaaatgattgattcaagacttcaagatcaagcatcaagaatccaatccaagattcaagattcaagattcaagagaagaaatcaagaagcaacaagtcaagacttcatataggataagtattaaaatatgttttttcaaaattcaaatagcacagttttgttttacaaaagaaatttctcanattttctaaaataccagagtgattactctctggtaatcgattaccagttggcagtaatcgattaccagtgaccagtttggttntcaaaatattttcaaatggtttgcaacgttccaaaatgattntcaaatagtgtaatcgattacactatattagtaatcgattacaagtgaatttgaacgttgaaattcanatctaattgtgaagagtcacaanttttcataanatacattgtggtatcgattacaccttt

SEQ ID NO: 28974 - DNA, 474 bp, Glycine max
  unsure (1)..(474): unsure at all n locations
ctcatagantagtaccatgatctttatgtcattcaagctttcaaatgttataatcccgactcacgtcagctgacanatatttccagcatactttgacaaaaaaaaactccatttgatatcagccgaaaaatagtcttggttgatgttgattttgaaacatcatcaattatggtccaacaaaacaatcctagttaaaattatcaatattttgtatttttaaattattaaaaattgaaaaantatttttaattaatatttcaaaattagattgtgtttgttttctataaagtttaatattaaaatttcatctatttaaaatataaaaatgaaattttgcatatgtaaaaaattgaactgccttatctaaacaaatgaattaaaattcaagaaattttgaataatatatccaaacaaagcatctgaaaaataaataaataaaataaaaaatttaatatacgcattaaatctctaaat

SEQ ID NO: 28975 - DNA, 330 bp, Glycine max
  unsure (1)..(330): unsure at all n locations
agcttgtagaatggctagacatgatacatgtcatggtttggtttggttcaaggataaaagggatgccccacattatttccatgacacaaatgcaaaaatgatgatttggaaattttatgcaaaactggtcatgcatgcacctatgtggacgctcaagtgtcaaatttttatggtcatgtgatgctagggctcangattcatttcctctattttaaatcaacccaatgtttccaaaatatgttcttttatcaatttgtgcattcatccgagtccatttcgggcgtctaggaaaattttcacagcattcacccttcaggtgtacacacacat

SEQ ID NO: 28976 - DNA, 369 bp, Glycine max
  unsure (1)..(369): unsure at all n locations
ctcaagagccaagagagaccagtctatggttgaaggcatgatattgttagacaagttgaagaattgtgtttggtaccagatgttgtcatccctccgaaattcaaggtaccatattttgatagatacaaggggactacttgccccaaaaatcacttgaaaatgtattgccggaaaatggggatgtattctagggacaagaagctattgatgcatttcttccaatatagtttggccagagcagtggtcatctggtataccaatctggaagcttctcgcatccactcatggaaagatntgattactgctttcattaggcagtactaatataacactgacatggctcccgatagaacccagctatagaatatg

SEQ ID NO: 28977 - DNA, 471 bp, Glycine max
  unsure (1)..(471): unsure at all n locations
agcttattcatatttctccncaagataagtggatatgtgatttatgaagacaacaaacaaaggccatatttctccccaagaaaagtgaatctcaagaaaagtgaatatgtgatttatggagacaacaaaggccacttgatcaacaagcccaacaagtgatatcaaatgataccaacaggacacttgtctttgattgattacttttgatgctcggtttctacttgagtttagctattcttgatgattgcgattgaatttgagtgattgtatttgatgattgattgattgtgttttttgattgatgtgtttgtctttgcttgattgatattcaatgtttgttagtttgattgattggattatatttatatttgattaattgtgtttgatgatcgttcttgattgagttttgattgtctctgatgggtggtcctcgatggagttttgattattttaaagaatctattaaacttt

SEQ ID NO: 28978 - DNA, 428 bp, Glycine max
  unsure (1)..(428): unsure at all n locations
ttccttttatgaatgatgctctcctgcaacctaagacaaggtagaaagagataagctgtacatgctcaaggttcaatcaaacaatcatactttcagctcaaaatgggtgcaagggataaatcaagcatgcacaaggtaagccttttagctaagtggatatctntaatcaaaaaatggccttcatcctcttcaaactcatgtattcattccatactcaaagattcatgcaaaaaccattacttactgctagtcgttctctcacaatataagatcacactctcatcgggttgcggctaatgcattccttcacaattaaacctgcanaccaactaacattntcagncataatcctaantcccatgtctttctcttctaataactgcatgctcattcaagacatatgatctacgcattttcagtcactcaca

SEQ ID NO: 28979 - DNA, 451 bp, Glycine max
  unsure (1)..(451): unsure at all n locations
agcttacatgtctgagtgggctcgtccagtgaaacatctgcttaaccctaaagggttttctcaagttttaaatgaccttgggatagattcttgaaatctcttcgtaggtttttataagctnttgagacaatatatgagtaagatagaagctcatgataagcttttctaagagatttaggatcatcaaaatttacctcatctttntggtataactcaaacccttcaaaagttatgtccgccatcatccatatgttggcttcttcatcgtcttcctctgacaaagtgtcgtccaggtcttctcatgtactcataagccccttcttttctttagtgctaaagaatctcttcatatcttgatttttctctaaatctggacattcagacttgaaatgttcaagttttttgcactcattgcaaactatgaagctttttgtttctttcttcttgtctc

SEQ ID NO: 28980 - DNA, 341 bp, Glycine max
  unsure (1)..(341): unsure at all n locations
gtaccatgttcccttacaaatacttggatataatgatatgtacaatgaanaattaccaagtaaacttgttggctactacttcagaacctactcgtaaatgatacaaaatctattaaccatagtttctagttctcagttggttgcactaagtatggctgcttcttaataagtaaaatgttttatataaatcccatgatcaaggatcaagtttaaggtcaaaacatgcttttgaagaaacataattaactgcataacaatagtaaaaaagaagcaataaaaaaggacacaacacatcaaggagttatactagttcacccaacttgggctacaccaatccctac

SEQ ID NO: 28981 - DNA, 443 bp, Glycine max
  unsure (1)..(443): unsure at all n locations
agcttctgcaccattgccaggacttgagtggctcactcatgttctttcgaatttaagttttagttntataggccattttccgtacttttgttgttttcttatttttatataaattctctattgttatattttattttcgcttacctcggtgcttatggtttattgtagtttgttctttttccttatgtaaggtaaagttctcgcagataaatggctatntgatctgtacattgccaagattgaaaggaagaatangaagaaaaagaaacaagcaattactaagccaccgagtgaatcttcttccattgattctccttcatcagaaaagccacttgtaattgatattatggctaatagagaaggagaaggcaatagaccaccaaggaagactcttggtgactatgcttatcaacaaggaccanagcatttcaacagcataatca

SEQ ID NO: 28982 - DNA, 378 bp, Glycine max
  unsure (1)..(378): unsure at all n locations
aagacgtgggggttcatgtaacttattacaagaaacatataacctattttattgttttcaaaatcaggtgaaaagcattttaaaagtaagtaaagaaccaactcaacccaaatttatcccaacatgtttcgcttccaaatttgtattttaaaacaaataactgaaactagcaatcactagaaatggagcctaaattaacccactttcttaaagggtgtaaattaatctaaaaattcttataattaggaacaaagatagtatatcttttaaatatttattaaaatcaacgtattcaattatcgcaacaaaatatatcattttagaatacatgtctatcntttatgcaatatatatntacaatcttggatacttatatat

SEQ ID NO: 28983 - DNA, 472 bp, Glycine max
  unsure (1)..(472): unsure at all n locations
agcttgaactctnggaaatntctttaaaactagtcacttatatagttatgacttttgaaagaatcttcagaaacaagtcacttgaagaattgtgactcttggaaatgtatntttcgaaatcagtcactggtaatcaattaccattaaggtgtaagcgattacacatcaacagatgtgactcttcattttgaattttgaaaatcttaacgttttaaaacactggttatcgattacagctttgtaaatcagtttgaaaaacaatgctggctactggtaatcgattactaccttttggtaatcgattaccagagagtaaaactctttggtaaaagattttgtgaaaacttcatgtgctacttaatgttttgaaaagctttntagtacttatcttgattgagtattctcttgattcatgaatcttgagtctcgaatctcgatcttgactttttttaatcttgattcttagatcttg

SEQ ID NO: 28984 - DNA, 554 bp, Glycine max
  unsure (1)..(554): unsure at all n locations
agggacagcttttttttgatcccatgcgattgagcgacactatgactactgcagctntataggctcagcctatgtacaacatgtttgagagtgctngngcaagcccagatcatgtggtaccgcttataggtggcatgataaccattcagaatgaatagaaagacctaatcctgacaacgactatgactggtaggagaatatgcatatatcaccgcatgcttaacgaatccactaggaaagaccatcttactttgcccttcgcggaccatactgcggaaaggcttacgggacaagcttacgactatttctcgcatgggtactctagacacaacattatagctgcggaccccaatgatcaggagatgattactatgccatgcacttatggtgactatgcctacagaccattgctatttgagatctgtaatgcacacgtcacattgatatatgcatgatgacatactttcagattggtggacagactacttacgcattatggacgaatctcacatgtggcactgtgttaatgctgtcgacaaactggagaagtggag

SEQ ID NO: 28985 - DNA, 334 bp, Glycine max
  unsure (1)..(334): unsure at all n locations
agctngttaataacggaagataagaaaaccgataatgatcgatatgaagatgaaagctaanaaaataagaaatgaattgaaagtctcggattcaaaaacttacccgttgaagaacgaagaacggtgaagaacgacggaaaaccttcacggatttgctcacagaaacgtcttggaaacacctcagcttggattttcttcatggaaaccaatttttttcacccaaaacagctgatatgcatagccaaaggggttagggatattaggaacaacctcccttcgcctatttataggaaaaagggggaggacgttgccgcccagctcgcccaggcgatct

SEQ ID NO: 28986 - DNA, 468 bp, Glycine max
  unsure (1)..(468): unsure at all n locations
taagcttaacatcagaccacttacagggtgctggaacttcttacatggacttgatggngcctatgcaagttgaaagccttggaggaaagaggtatgcctatgttgttgtggatgatttctccagatttacctgngtcaactttatcagagagaaatcagacacctttgaagtattcaaagagttgagtctaagacttcaaagagaaaaagactgtgtcatcaagagaattangagtgaccatggcagagagtttgaaaacggcaagtttactgaattctgcacatctgaaggcatcactcatgagttctctgcagccatcacaccacaacaaaatggcatagttgaaaggaaaaacaggactttgcaagaagctgccagggtcatgcttcatgccaaagaacttccctataatctctgggctgaagccatgaacacagcatgctatattcacaacagagtcacactta

SEQ ID NO: 28987 - DNA, 431 bp, Glycine max
  unsure (1)..(431): unsure at all n locations
agcttcaagattcaatttcgagcgtctcgatatgttactggactcaatcacacatccgagatatagttattgtcatttgaatttgctcagaggttcaacattcaatttcgagcgtctcgatatgttacgggactcaatcagacatccgagtaaaaagttatggtcgcttgtattggctcacagtttcaacattcattttcgagcgtttctatatgttacgggactcattcatacatccgagaaaaaagttatggtcgattgaattggtgacaagcttaacgttcaatttaagcagctgatatgttacgggactaatagacatccgaganaaagtattgctgttgattggtcaagcttacattaattcgagcgttgaatgtaggactcatcaacatcgataaaagtatgtcgttgatttgctcaaatcacat

SEQ ID NO: 28988 - DNA, 341 bp, Glycine max
  unsure (1)..(341): unsure at all n locations
ctgagcanatacaaacgacgcataacttttactctgatgtctaattgaggcgcgtaatatatcgagacgctcgacaatgaatgttgaagctctgagccaatacaaacgacaatcactttntactcggatgtctgattgagtcccgtaacatatcgagacgctcgaaattgaatgttgaagctctgagccaattcatacgacaatatacttttactcggatgtctgattgagtcccgtaacatatcgagacgctcgaaattgaatgttgaatctctgagccaactcaaacgaccataacttttttctcggatgtctgatngagtcccgtaacatatcgagac

SEQ ID NO: 28989 - DNA, 436 bp, Glycine max
  unsure (1)..(436): unsure at all n locations
agctgccgcccagctcgcccaggcgagcattgttgcttcctccagaaggaacggcccaagtgggcctggttgctatttacacccccatttttactaaatgcaccccctttctatttttttgtaattctttttccgtaacgttacgaaactttacgaattccgtaacgatacttattttccttctgcaaggttatgaatccttacggattatgtatttactcttttntagctctcgaagaagttacggaaacccccggattgcgcaaaaacacctcttttcgacttccgccacattacggaatttcacggatcgcgcaagcctgcttccttttaatttctgagacgtctcaggacttcatttactgtgcaacaaaggatgccaagtatctcanagcggctaaccaaaggttacatgtcatcaagtaataatcccgga

SEQ ID NO: 28990 - DNA, 415 bp, Glycine max
  unsure (1)..(415): unsure at all n locations
actaagctcgaaggtaactagatgcctggtaacctggtaacccaactggccatgaatcanaaatctgcacctgtcgccagactctgtagtttatgctcctctaccgaccaccacacagaaccttgcccttttgtgcaacaatctgaagcaattgaacagcctaaagcttatgctgcaaacatctacaatagacctcctcaacctcagcagcaaaatcagccacaacagaacaattatgacctctcccgcaacaggtacaatcccaggtggaggaggaatcatcccagccttagatggtcgaatccttcacaacaacagcaataacaacaacagccttattttcagaatgctactggcccaagcagaccatacgttccttcaccaatccagcaacaacaacaacagcaacaaccct

SEQ ID NO: 28991 - DNA, 396 bp, Glycine max
agcttgttcttaatgagggtgattaggattgactccatcttatgaaggatagattccctactaaaaggaaatccaagcttatccctagaggggatggaccttttcaggttttggagaggatcaataacaatgcctataggttggatctcccagaagagtatggagtcagcaccacttttaacatttctgatttaattccttttgaatgtggagctgatattgaggaggaggaactaacagatttgaggtcatatcctcttcaagggggaggggatgatgatatcctccctaggaagggatcagtcactagagccttgagaaagaggctccaagaggattgggctagagctgctgaagaaggccctatggttctcatgaacctcaatgtatatttat

SEQ ID NO: 28992 - DNA, 460 bp, Glycine max
  unsure (1)..(460): unsure at all n locations
ctaagcttagggatttttctatctttcatgatgccgttttctctcttcttttctgcttaaaaaccctcctgagtttgaattcaagtgattgctcgctaagcacgcaaatgcgctaagcgcgagtaagtggttaggtgctaagcgagccatgcgcactaagtgcccttttgcctgactgcaagttctctaagttgcttcttcgtgctgggtggacattctgccgctaagcgagctctgcgcgctgagcgcgaaccattaggcttcaaattcacttactattctttgcctgtaaatgtgcaaaataaatatatcacaacagtatgaattagacatttaaggcacctactgcatataactcagaggatgctcaaattctaatgatacacacaaaaagaagcaatantaatgggacggcattgctacttcctatatgtttgagtacataatctacttctacaca

SEQ ID NO: 28993 - DNA, 398 bp, Glycine max
  unsure (1)..(398): unsure at all n locations
agcttgattaagttgtagagtagcagcatttcctaataatgattaattgngatattgtgaacaggcagtgctcttaaaggggagaaaagacattggagctattgcaggttcaagggcagcaaatatgtatggccttgacgttntagctgaaggaatccaagtaagatttcatttacatgttttggaagactcgacttgcaggttcaagggctacaacatattagtcttagtgtagtggtttctcttatgacanaatgtcttaatttaagcaatataaacaatatgtcttaatttaagcaatattagtagtatctttgtttaattataaggtttatcatttccttcatatattgttcangagattcttttgcaagcttacccaagtacaaaaaatattt

SEQ ID NO: 28994 - DNA, 392 bp, Glycine max
  unsure (1)..(392): unsure at all n locations
taacactgtatatngatttctttagttggcatactatgtgttcctttccctcaactgagaaccccattggttggtccatacaaacattctcctctaaatctccattaagaaaggcgattttcacatccatctgatgtagctctaagtcataatgggccactaatgccatgattatccngaaagaatnctttcgtgagaccgatgaaaacatctctntataatcaatgtcatctntttgagtaaatcccttagcaacaaatctagcctttgtacattcaaggtgccatgagagtcacggttggtcttgaagacccacttacaaccaactcttctacaatcctttggtaattctacaanggtccaaacaccattatgttccatggaatttatct

SEQ ID NO: 28995 - DNA, 463 bp, Glycine max
  unsure (1)..(463): unsure at all n locations
agcttcaagcagctaatacagagggacagggactatacaatatcctgtctttagatgagtcaaagtaacagtaatgacatacagtcatacaacacaatacccataaacccaatttgcacaaccccatgttttaaatcaccaacatcacaagttcacaacacaacacagctatgcagaattagaaaggagaatcgcagagatcaatgcaaatcagttgagaacacataaacacagagaacttagcattaggcactaaaccaattgaaactgaagttcaagttctccttataatcacattcttcgacgcaaacgaaccanacgcgaccaatgcatatcataactcataagggtcttcgaacaatataaaaacacaatcagaaaaagggtcttcgaacattaccatcgtgaattcataaaagagggtcaatatctgttggaggctgatacatcacacgaacattac

SEQ ID NO: 28996 - DNA, 264 bp, Glycine max
  unsure (1)..(264): unsure at all n locations
tgaaattcatcaaagcctcttggagctcactgaacgaagatgtcgaaagatttcttangaagcttcatgttaatggagtgttccctagaggtcgcaatgcatcaatcatcaccttgatacctaagattgaggatccacaaaatctgggggatcttaggtccatttcactggtaggatgtatgtataaaatccttgctaaattcttgcatgaatactaaaatgtgctttggtagtgtgattgacaaaaagcaaatcgccttcttg

SEQ ID NO: 28997 - DNA, 411 bp, Glycine max
  unsure (1)..(411): unsure at all n locations
agcttgaagtgagagagtgtggaagagtcagtcttcctacttttatttgttgaccacaaagtggtacctggagatatgtcgcgggggtcaggagaccttggggacgtcaggtggggtgctattgcccaaaaccaagcttgaccaatcccgacccaacccgggcatagtcagtcagtgagaacttgtgacgtacctaaataggcgagctcctagcagtcaaccaataaaagaacaaagaccacatgtggatgccaatcctagtgatagaggtgtcatcatctgaagaagaccctgaggaggacccagaggagttacctcccgagcctgttgtggatgctcttgactntccagagggtgatgaggacccactccctgatgtggattctccagaggacgtcatgacagcatctg

SEQ ID NO: 28998 - DNA, 369 bp, Glycine max
  unsure (1)..(369): unsure at all n locations
ctacggcacccttaccgaacatgcgccatgggtagaatcatgagtgatgtagacgaagttcaagaagagatgaaggccgacatggaggccatgaaagaccaaatagctcctatgatggaggccatgttgagcatgaagaaaataatggaaagcaatgcgactattgttgccactactagcgctgccgcttaggtagatccaactcacccatcttgtgtgaatcaaataagtcgtccaatcccggacatggttggtcagggatgagaagcattgggaagtacaggcgggcctcatgttgtgcaaagcaataattctttcccaccatatgaatngcctcccaattatgccccacccaatgttgtacatgtg

SEQ ID NO: 28999 - DNA, 486 bp, Glycine max
  unsure (1)..(486): unsure at all n locations
atcctctaagcaccgcggctgcagcttatgttganatgtattcttggatattctagacttcaaaaaggatatagttgtaattctctagccaataaacgtacatgtttgcagatctcacattcttgaaaacactatattttttctcttctttgaacaagtcccaatcttatcgtccagtattgtttcttgtatagggataatctaggatggcaacaagtcataatttactagttcaattaagggagaataacacatatgataggttcaaaaaatgtttgtcacacatttgatcatgtatcatggcaacaagtcataattgatatgttaaacaatagggaagaaaaacaacagatgttaattaggaccatttccataaaattgactcattacaccaatgactntaacaatgatgaatataaaaggtgcatgcatcttgcatgtgaatctagtttcctgctaatgcaataatgcanacaagtatacatt

SEQ ID NO: 29000 - DNA, 448 bp, Glycine max
  unsure (1)..(448): unsure at all n locations
tcagatgggacaattagctactcaatngaatcaacaacagtcccagaattctgacaagctgccttctcaagctgtccaaaacctcaaaaatgtcagtgccatttcattgaggtcgggaaagcagtgtcaaggacctcaacccgtagcaccttcctcatctgcaaatgaacctgccaaacttcactctattccagaaaaaggtgatgacaaaaatctacctaacaatttctgtgcaggtgaatcttcttccacaggtaattctgatttgcagaagcagcacattccccctcttccattccctccaagagcagtttccaacaaataaatggaagaggcagagaaagagatcttggaaacgtctagaatagtagagggtaacatacctctgttggatgcaataaagcaaattccaagatatgccaaattcttgaaggagctgtgcactaat

SEQ ID NO: 29001 - DNA, 439 bp, Glycine max
  unsure (1)..(439): unsure at all n locations
agcttctggaaagaactatttggaatgtagatttacattctatattaggtgcagaaagcaaatatagaggtgcaagaagcaattgcctgcataaaaacattatgtgtagcccactataccactctattcagcctatctaaggagagttatcccctggggaatactattcacccctacactaattgttgttgacccccaacatcattgggaaattacccttctaccccccaacttcaaaattccttatccctccctcttccctcttccttccccttcctagcacctctttccccttctccttctccatctttgtcccaaaccgacgcctcttacccttctctttctccttctcgtatcgatgccccttccttntttccttctccttctttctttctcctccccaacccaacctaaacgaacccttttccttcttctcttc

SEQ ID NO: 29002 - DNA, 347 bp, Glycine max
tgtggttattcagtcctgcttctatcaagttctaaggcagcaggtcatcttgcaatgctaaagacacctgatcgtacacacaaatgggtgatcagaccaagaacatgcattaattaagtattgaaagaagcattgtacacataaaacacaattcattagatattgaagtaattatatcaactgtgccttataaatccccaacaaggggtgttagccagccattacagaagaaccctaatacaaatgagattgagagtacaaaataattgttccttacacaagagaggggatccctcctccttttctcagcatcgtacaaccactctacaactcactaatctctctct

SEQ ID NO: 29003 - DNA, 487 bp, Glycine max
  unsure (1)..(487): unsure at all n locations
agctngaatacaaatgcataactaggctacacacaggatgaactaataagcactcttttgtatcatctaatgacttgaaaaattctcactttaaaatgctcttactccacacttcgtattttctttcattttcttgcttttgatagtagagccttggtcgctttttatagtcttcatgaaagtatccattacgagattagtgcttatctctaaattcngtgtctcgtagatggaggcagtgctatgtgtcgtgctcttatggagagagaaaaaataaaagtacaaacaagtgcatctgctcctttctttagtgataatgacctctgagaaatattcttgtgaattcttctattcccttctatnttgtccttactcaaatttcaaatttaacaattcacaataagagaggcaaagtgaatttactaaagttaagtttgtgcacttcctttttttggcaacatgagaccaatatatgagtggatgtcac

SEQ ID NO: 29004 - DNA, 427 bp, Glycine max
  unsure (1)..(427): unsure at all n locations
tcttcttccatggcttattccctagtggaggtgcctcccctttcctcttctccttagccttccgctgcatctccatggtggaaaatcaccatngaaggacctcattgaagctcaaagatccagcctccatagaagctacacaagcaagcttccatcataaggggggttgtcgcaacctacccttcggagggagggcgacgcggggctcacgggtgtgctttccaaggaaggaaggcgcgcggagttgccaccaactnttattcgaggaaaatgtcgaanaaactggaacgtgtggtctatgaactttaatcgtgaaaggttcgggagttgttttacgcacggngaagttattagcaccccacacgtctgtcacaagggacgacagcctctaatcgagtgtgcaagacatgacttcaaaaatatgtat

SEQ ID NO: 29005 - DNA, 453 bp, Glycine max
  unsure (1)..(453): unsure at all n locations
agctngccacccagctcgcccaggcgagcaaggttgcttcctctataatcaacagccttctggaggaatcttctggagggcccaagtgggcctggttgctatttgcacccncctttttactaaatgcacccncttctattgtttttgtaattctttttccgtcacgttacgaaactttacgaatttcgtaacgatacttattttccttccgcaaggttacgaaatncttacggattatgtatttactcctttcaagttttcaaagaagttacgaaaactgacggattgcgcaaaaacacctcttttcgatttccgccacattacggaatnttacggatcgcgcaagcctgctttcttttgatttcagagacgtctcgggactttatttattgcatgtcattaagtaataatcctcggacgaaatanggtatgacagntgcccctctttactta

SEQ ID NO: 29006 - DNA, 460 bp, Glycine max
  unsure (1)..(460): unsure at all n locations
nttcgattcattctatgtacccgtagtggtccacattgtgtttcgtgcatttttattctcgttntgtttactttttataccccctgttgacgtgcttaagccattttacttaagtcgtttctcgcttaacttaaaaataaaataaatttccaccgaacgtttgaattgtattatccattaacttcggttaaaataaattccgaccgttcggtcatgccgtaaccacgttggaaatcaaaaaagaggtaaaaaataatataaataatcaaaaaaacatcttttataaaataaagcggaaaatcaatcggacgttttctctntgggatntctcattcttaatcgaattgattaataactaaagtgaaactaaaggctaaaatcaattcgcctagtcaagctcgtccataaaaatagggctttgaagtttgcatttcatttctcactaagaaaatggacattt

SEQ ID NO: 29007 - DNA, 502 bp, Glycine max
  unsure (1)..(502): unsure at all n locations
gtcacctgcggcatgcaagcttccaagagtngaagaggcggttgacaacagctccagtgttaattntgcccgaccctaagagaccatttgaagtgtattgcgatgcaagcgggcaaggcttgtggtgtgtgttaatgcaagagggaagagtagtggcttatgcttcacgccaattgcgtcctcatgaagttaactatccgacccatgatttggaactagcagctgtggtctttgccttgaagatttggaggcattatttatacggtactcgtnnttgaagttttagtgatcacaagagtctcaaatacttgttcgataagaaggaactcaacatgaggcaacgaagatggatggagttcatcaaggattatgattgtggtctttcctaccatccaggaaaggctaatgttgtagccgacgcgctaagccggaagtccttacatgtngcgaactatgatgagttggagcagagattgatagaggaatttcgagatctgaatct

SEQ ID NO: 29008 - DNA, 447 bp, Glycine max
  unsure (1)..(447): unsure at all n locations
catacctttgacatctcaagctgttctcagaaataataatttaccaaaaaaagaaagagaaacccatcatgcagcatcaaataaaatccaaccctttgaccaaaaaagtaaacaaataaatacattccatccaccatcgattattaaccatgtgatcaaaccaaccattatcgcacattattaaagctaatcataaatacaaaaggataatgagaagaagaagatgaagatgatgaagaagaagaattnnncccattgcaactcgttaggggaaaatgcagcgtcatcgtacctttctccataagaaaacaacaccctcaaccccttttttataccaaaccttctttcaaaattccactacacctgaaaatgggtgtccatgtaacaaagaaaacgaaaggaatggaacacgacgagtacttcttacaagaattaaacagaagacag

SEQ ID NO: 29009 - DNA, 352 bp, Glycine max
  unsure (1)..(352): unsure at all n locations
agctntgatgacatgttaatatataatcattacaaatataataccctcaatgtatgagcacagttaatgtgcccccctacaattactatagatacgtgtaactgcaaattaaaactaatacaaaaatgattttggttattatttggtgtgatttatatatgtatttgttatatatgcatttgtatgtcaattatttggataaattatgttgaactaaatatataatctctggtggattagttaggattccaaagctttgtacaaattatttgaatgtttaatttgacgaataaaagtaaatgttcttcatgatttcagatcatggctagaacacgaggtctatgtcatgtgt

SEQ ID NO: 29010 - DNA, 455 bp, Glycine max
  unsure (1)..(455): unsure at all n locations
gctctccccaatttctataatagggggagaagtgaagtanacaatggttcagccccttagacacttctctctctttcgaatttgcttaggaaaattgtttccgtgaagaaaatccaagccgaggcgcttccgtaacgtttccgtgagtgatttcgcgaaggttttcgaccgttcttcgacgttcttcattcgttcttcatcgntcttcagtcttcaacgggtaagtacctcaaaccaagcttttcaattcattctatgtacccgtggtggtccacatttggtttcatgtatntntattctcgcttcattcaacttttatacccgcttttgacgtgcttaagccattttatttaagttatttctcgcttaacctaaaaataaaataaatttccaccgatcgtttgaattgtattatcctgtaactttggttgaaatgaattccgaccgatcggtcg

SEQ ID NO: 29011 - DNA, 477 bp, Glycine max
  unsure (1)..(477): unsure at all n locations
agcttcagacggcaaactgtggaggggtccattccatttctgtttctggttgngtttgccgaataaattgctttggttgtaccgaatagaatgacatacttttgtttcactcagcactagagacagctttaacttccattaattgtttacttctcgtaaacattactaattgttaacatttagagctggcatggcagctagcacatatgtntgtcagctacgaggtactatatgttattaatgtatttcaagtttggctcaaaatttaattcggcattgacctaatacgaaagaagtcagtatgatcaatagtcacatataagattcttgggacaggttaatcaaatgtttntcttanatgtgcagtattttaggtgtctctaatagcacgtaattaagtcattggcctaacaagtatntggatttgttgggagtatatgcttacctgtgtaatngtaaagagtgattcttggaaac

SEQ ID NO: 29012 - DNA, 350 bp, Glycine max
  unsure (1)..(350): unsure at all n locations
ggtcttggaagcanaagaaaaacaggtagcattaataatataaaaattaaaaagttagaacttcgaagcagaaaaacaaaagtatcaccttggggcggcccacgggccttcttacaggattcttggaccttcctacggcgagcttctgaggccggccgggcctaaccaccgggaagaccccacgtggacgtccgcggccacgaccacgcgctgcaccggcaacggcagatagcgccggagcccccgcagcagtaaaactctttttaggccttcctcggggcctgngagatccattgggcacggaagcagtaggaaggatgggctgcacagtaggcangccgggagcaact

SEQ ID NO: 29013 - DNA, 481 bp, Glycine max
  unsure (1)..(481): unsure at all n locations
agcttaaacgaaaatgcaacacanagccgaaaacatttacatggatcaaagttaacatatgaagatgacgattcagatgtaagtcagatgtagctcagcaggcagcacccttcaaataattntctgaaaagatactcaatattgtcactatatatgtcaggtatgctttgccaaaatttattgtcattttactaaaatcctttctgacctaacatgaaagtgttaaaaggtgtaaattttttttctgacctaacacaatacaaactgcgtgaaaacgatgtaatagatagtctctaatcctctcagtctctcattangcagatggtgtgtttagtactgagtaggaggggcagaaccattctttttaagaaaaaaaagtatgtaataaaaatgttataaatataattagaaaatgaaaatatgaataaattttaattatttaacttgtcttanatttttcccaaactctataatcaaatat

SEQ ID NO: 29014 - DNA, 390 bp, Glycine max
  unsure (1)..(390): unsure at all n locations
taatcaagataagtatgataagggtttctcaaatattgaatagcacatgattnttctcaaaatatgtttaccaaagagtttttactctctggtaatcgattaccatattgttgtaatcgattaccagtagcaaaatggatttgaaaaagttgtcaaattgaatttacaacgttccaattattttcaaaaagctgtaatcgattacacatatttggtaatcgattactagtgcctttgaacattgaaattcaaattcaaatgtgaagagtcacatcttttcacataaaagctttgtgtaatcgaatacactgatttcgtaatcgattaccagtgactgtttctgaataaatcaaaagatgtaactcttcaaaagggttttgaacttttcaa

SEQ ID NO: 29015 - DNA, 226 bp, Glycine max
  unsure (1)..(226): unsure at all n locations
cgccggaccgttgacacttcttatgcttgacagattatagagaattattgactgcatgcgcttatgatcacttatctaagcgtagcaaccatacgtctaaagacaccaatacatgctgataaaagtacgcccgtcctgccctcattaagtattgtagcataacactaccctcttgctcgctgaaatcgtgggtaacagtatgatgaaactgaatcttgagtcgttn

SEQ ID NO: 29016 - DNA, 457 bp, Glycine max
agcttgcttctacaaaagatcatcaatacttgtaatgattagtggcaatggttgggccctaatatgttacaagtgtgttagtaccacgcttatgatctcaagagatttgtttgttttgaagaactacacataatggttaaataggttgtatttcttctttgtttgattacttttttttggcgtttgagaaggggaagactcacccctacaaccaacaactttcaagtattgacaatgttgaggacgttgatgcacatatgggcttggcataactcacagtgggagtgggtatggctttgtgcagtaacatgaaatacaagttacacatgttgtacctagtacattttgtgccagtagagaatctggatgtcgtgctcattaccatagactacactctatcctgctatatctcgtggggatctacatctcgctcagagctctgctattatgaggacat

SEQ ID NO: 29017 - DNA, 501 bp, Glycine max
  unsure (1)..(501): unsure at all n locations
agccatgcgcaattgaccccgtgatgagcncctgagacatctaatccggacacctaacactctgccgaatcttaaagaagtcagaatattttgcncattttttcttatgtcgacgctggtgaacctactagataaagtcatttctcaacctcaacccatcatggatagaagcacgcacaacaatgaacaaatgcaacactcctcctgaaataactcccctgactgcctttggttcataagtgtgtttgaagagagaaacaacaatttttgtgtacgaacacctcgtgggtacgatatcattactctaaccgttaaatttaagattaatgaaaacttccttatctgcttttgaaaaagagagaaaattttgcactttcatccccgacaacgcacaatactaatgaattatatgtcttggaacattactagacacttcttctcgatgaaagaattttcttctatattaattgagatgcatcttatcacaaaatttgacccctc

SEQ ID NO: 29018 - DNA, 403 bp, Glycine max
  unsure (1)..(403): unsure at all n locations
agctngacttgcgagttgattntagccttagtttcactttagttattagtcaattcaattaagaaagagaaatcccacagataaacgtccgattgattgttggtttattctactaaaagatattttttttattattatatttttattttacctctttttggtttccaacgtggttacggcatgaccgaacggtcggatttcattttaacagagattaacagatattacaattccaatgatcggtggaaatttattttattttttgattaggcgagaaaatgacttaagtaaatgactaaagcacgtcaaaagggggtacggaaaataaatgaaacgaaaataaaagtacgcgaaacagatggggaccaccaagggaacatagaatgaattgaaaagttcgatt

SEQ ID NO: 29019 - DNA, 406 bp, Glycine max
  unsure (1)..(406): unsure at all n locations
cttgagaaaacaagtggtccttttgagaagcatgtgatacattggcatcatcaaaacattcagcttaaacctttgtctacaagtgtgacactctanaatattcatctattcctagggcagaagtgatgatgttnttggctttaagattatattggattcttcttctatcctcttcagtccatctatgtctaggtttttgtgttgttgtgctagtgcttgcatctactatggtgggtatgtaaggtcctatntctattgcttctcaaatgtttaaatctatggcttcaataaagatatgcattcgggttttccaatagtggtaaccctcaccattaaagataggtggcctatggatggagtttccttcatgaaacagagaatttgaggaggccatgaatcttgaagt

SEQ ID NO: 29020 - DNA, 366 bp, Glycine max
  unsure (1)..(366): unsure at all n locations
agcttgtaacatgacaatacctaataaaactttgaattattgttgttcttcatattgttttggtaaggcaaaccgccctctactacttcaactactgtttgaggccacttgtccaataattttaaaacaatatatatatttgggttgaatggttcatgctataatagctttcaaaaattcaccccccctcttaagttattgaggccacttgtccaacaantttaaaaatatatatatatatatatttgggttgaatggttcatgctataatagctttcaaaaattcttgaaaataatataattggatgttagaaggtttgaattactaaattatgaagtttaattccttcaaaaaaaaaaatcacg

SEQ ID NO: 29021 - DNA, 443 bp, Glycine max
  unsure (1)..(443): unsure at all n locations
cttcgattcattctatgtacccgtggtggtccacattgtgtttcgtgttattttattctcgtttcatttactttttatacccncttntgatgtgcttaagccattttatttaagtcatttctcacttaacctaaaaataaaataaatttccaccgatcgtttgaattgtattatccgttaacttcggttaaaatgaattccaaccgtgcgatcgtgccgtaaccacgttggaaatcaaaaatgatgtaaaatgataatataataatcaaaaaaatgtcttttagtaaaataaagcgagaaatcaatcggacgttttctctctgggatttctcattcttaattgaattgactaataactaaagtgaaacttaggctaaaatcaactcgcctagtcaagctcgtccatataaatatggtnttgaagttatcattcaattcttact

SEQ ID NO: 29022 - DNA, 473 bp, Glycine max
  unsure (1)..(473): unsure at all n locations
agcttctnccccaattttctataaatagggggagaagtgaagtataatagggttcagccccttaggcacttctctctctttcgaatttgcttaggaaaattgttntcgtgaagaanatccaagccgaggcgcttccgtaacgtttccgtgagtgatttcgcgaaggttttcgaccgttcttcgacgttcttcattcgttcttcatcgttcttcagtcttcaatgggtaagtacctcaaaccaagcttttcaattcattctatgtacccgtggtggtccacatttggtttcatgtattattattctcagttcattcactttatataccctttgtgacgtgcttaagccattttatttaagtcatttctcgcttaacctaaaaataaaataaatctccaccgatcggttgaattgtattatccgctaactgtgtgtgaaatgaattccgaccgatcggtcgtgccgtaaccacgt

SEQ ID NO: 29023 - DNA, 278 bp, Glycine max
  unsure (1)..(278): unsure at all n locations
gactggtataaagatataatgggcctggctgaatttatatgacactatcaatatctcttcatcttcttcaacatattcaaatcntcactcttctacaaattctgatcatctatctcatcttctaaagtttgttgaacttctcttaagaaaatctctgataaaaatcatgctttatctttcatactttcttccttgccaaaaatgaagccatccctgatttttgtgcctatttcctccaagaattcaagacccccttgagaatctttgttctcctttcc

SEQ ID NO: 29024 - DNA, 482 bp, Glycine max
  unsure (1)..(482): unsure at all n locations
agcttnctacaatcaataattcgacggtggagatattcttaatatntttaggttatctttcataagatattttaattaatttttaatttttttattatctacaaatttatttgattatttgataaataaattttttaataatttataattttttaaaattctaactgtgactaattttttattttaaaagatgttaaaattgtaatattttctagtttaaaatattgaaattagtgcaggaatggttttatcctagaatgatgattaatttttgtcaaaaatcataaatacatatcaaataaatactattgttctgtcagaatttatttcatattcaaattaatcaaaatttgaatctttagatcacttaattaacaaataatgatcattatcacttctatcgacattgggtgaaaacaatataaacaaataatacatatacttattgttgtaactatttcaagattctatctatctaatat

SEQ ID NO: 29025 - DNA, 115 bp, Glycine max
  unsure (1)..(115): unsure at all n locations
ctctatcgagggtggctctaactccaccacgaactaccaccgntaattatctgtctttcatgcatgcatatgatctactttgtgtagctatattatccgaccaataaataatgta

SEQ ID NO: 29026 - DNA, 345 bp, Glycine max
attattaattaataactagctgtgaagtctgaacactttatatcacatttgttcagttcatactaatactttcatataagctgaacctcaagctgtgttactacatgagtctgatataccagataatatggttgtgctatcatgtacggagtttccaaacatcttcacattcaaagtttatgagcaacatacattatgatgatgttcacgaccatcttttgatgatgagcaacagatattcaaagcctgagatacactgagatgtaaaatatggaaaaatactttcatgatgaaaagaatctgtgagcctggccacttactcaagatgatagaatcagtagtatc

SEQ ID NO: 29027 - DNA, 459 bp, Glycine max
  unsure (1)..(459): unsure at all n locations
agtcacctgcggcatgcaagcttcctaacanatccttggtacctgatggaatttccaaatccaaacaaacaacacccncatcttanacttgctacttgcaaatcaaatgataatattaatccctttcctagttattccaagggactcaataaggttaaaacaaatatggcaattaagaggcaattatatacgccagattcactacatgatttttcccctagcttcagtgataacaccaacatcaacataatanacccttctttagatggtcacatacttgaatttcttcaagaaatcaaacatcaaacaataaacagtcaattgatcctgtattaaaactatgactgggataatcaatagcaaaagtatcaccagcaatcaaagtgtgtgtttcccaatggataagagtcgtcatcatcgtcattaaagtcgatgatggtgtcttctcattggcataag

SEQ ID NO: 29028 - DNA, 475 bp, Glycine max
  unsure (1)..(475): unsure at all n locations
tatcgtcttatatggacgtatcatctaaaacacagacgctcatatacagatcatattctgataatacatatatagatacaacttttatcatttgtatttgtttgcatctaatacaaataattaggagtcattatttctctttaagacataaatgtattttgagttaacatttaccatttnttataagagaaaaatttaaaaattatcatccacaaatttaagataataagttattaacaataaatttaaaaatattaaatatattattntatgtcatttgaacaaaacacttcaagaactaaagcaaaattataaatatgataaaatgtgtctaaaataaactaacanaaaccaaaatatagaatttataagaactattaaaagtaataatttataagaccaaaatanaaacaataaatacaggttaaaatgttattaaactttatatattgcatgcatttaataagagaaaaaa

SEQ ID NO: 29029 - DNA, 305 bp, Glycine max
agcttctatgggtgtggacttgcactggataaccatttatagaatgcatctattgttcgcgtaattccctagttgacaaagtattttctggtccaactggagtagagttgtttacctccaatccagaaggaaggacagtgttcaacttgctgttttagaagttactattgtaagactgcttctaacttaccctgctgtgtggcatgcagttcctttgaagatccatagaagggtcattcacgctaaccatttgctatgtaccttcttgttccccttactcgtacccttttgtaagacaatgatat

SEQ ID NO: 29030 - DNA, 427 bp, Glycine max
  unsure (1)..(427): unsure at all n locations
agctnnggcttggtttagacaggtttgatacctgatttgggacttgtaagaattgatttgagcaagattggatgaggggaagtgtgattttcgaaatctgcacttatgtagaattttgctgtcaaaataggtgcagcaggattttagcttagtgcaaaaaatgcttgtgtgtggttggctgtggaaagagtagtacagaatgagttctggatgtttgctagtagatcccaacggtcacaatgtaggcttatgcactatagacttctagtaaaattttggagtcgatccaacggttaacgaattggatcgaaggaatngttactgcggtctttaagtgagaaaagctgtgattctggttgatgtgttgagcagagtattctgcctttgctctgttttgcttggctgtgatagcttgtgctgattgaat

SEQ ID NO: 29031 - DNA, 458 bp, Glycine max
  unsure (1)..(458): unsure at all n locations
tcaagaaaatgatggcctcagcanattccttatttctggaagcatatccatagaanaacctagagatagatggtctgaagaggatagaaaacgagtacaatacaacttaaaagacaaaaacataataacatctgccctatgaatggatgaatatttcagggtttcaaattgtaagagtgctaaagaaatgtgggacactcttcgattaacacatgaaggaactacagatgttaaagatctatgataaatgcactaactcatgagtatgaattatntagaatgaatgcaaatgaaaatattcagagtatgcaaaagagatttacacatatagtaaatcatctagcagccttaggcaaagaatttcaaaatgaggatcttataaacaaggtgttaagatgtttaagtagagaatggcacccaaagtaactgctattctgaatcaagagattgtctacatg

SEQ ID NO: 29032 - DNA, 357 bp, Glycine max
gcttgctctaaattacattgatgtttgtatttatgggatgttgttatatgccaattttgctttaagagtagtgtcccactggtaaaattaactttccaaatggttgccttcgcaagaatggccccgatgaagcttgccttaaagaggtccaggaaggacaaggcggccgaaagaactacttccgctctggagtacgacaggcaccgcttcaagagcgttgtacaccaacagcgctttcaagccatcaagggatggtcgtttctcctggagcgacgcgttcagctcagggacgacgagtatactgatttccatgaggaaatatggcgccggcggtgggcaccactggttactcccatg

SEQ ID NO: 29033 - DNA, 398 bp, Glycine max
  unsure (1)..(398): unsure at all n locations
cgatcaanacaattatctaatcattccaatccactcaaatcatacaattgctcattcaaatcattctcaaacactcatttcatgcaaaacaatacactacatatcattttcaatcaattcattgttcaaacacgctnntggtacaaacaaacaactcatagtgctgaaatttatataattgaaatctaaaaaaattgaaatataaaatctgaaattaaaatgactgaacataaatcataaaataattgaaaataaactaaaatgttcgagatgcacaaatttaaatgtcctgctcctgtggntgctcctatgcatgctcattaatgtccaacacctgagcagctggtgcagatggtgtggcataatcaagtatgggtgctacggatggcatctggatc

SEQ ID NO: 29034 - DNA, 467 bp, Glycine max
  unsure (1)..(467): unsure at all n locations
agctntctttgctatggtggtaagcaaagaatgcgttgatcaccgctagatctactaatccatccacatttggaaaaaggataactccaaataccaatagtgccatgatgtaaatgaagaaagcccattcaccttgatccgccaaagccttcgctttctcctccaagtggttcctcggtattccgaccaccccatttctattttgttttactcggtccaattcttgcgccgagattttgagtaccttggctattctcgccatagagggatagaacccagaaaatagatatgactttcttcctcctagcggacatcccaatatttcttcaaacttttccacggttggtactaactgaaagtccncaaacgtgaagcatcttagtggctgatcttaatcctgagtgagggacataatggcttcaacagagacttctatcatagtcaggtcccagatctttccatatgtc

SEQ ID NO: 29035 - DNA, 518 bp, Glycine max
  unsure (1)..(518): unsure at all n locations
tggacgtgggtttgaccatgaatgaagccatgcanacccgaccctnganactaagctcctcaagaactacatagtaatactgggttttgttcacactttattctcgtnaacatatgatagacgcgactgtcatcacttggcgttggtagcatcttacacaaataactagaggcagtattctctctacgacataaatgcatgttgagtgcacactctccattctttatatgaaaaaatatttataaaatagtctcttcaaaatttgtaagataattcagcttattagaactaattttcaaagtgattgacctattttttatgtcattcgatcgaaacacttcgagaactcatgcgcgattataaaaatgaagagagcttctaaaactactaacccaacccccattagaatttattggactatctgaaaataatttttaagaccacatgaaaacacccgatccggggtaaatgttttttaactctatttatgtgattgcattaaaaagagaaataagggg

SEQ ID NO: 29036 - DNA, 449 bp, Glycine max
  unsure (1)..(449): unsure at all n locations
agctntanatgaggaagtgtagaagggtgaaacttcctacttttattcgttgaccacagagtggtacctggagatatgtcgcgggggtcaggagaccttgtggacgtcaggtgcggtgctattgcccaaaaccaagcttgaccaatcccgacccaacccgggcatagtcagtcagtgagaacctgtgatgtacctaagcaggtgagctcctggcagtcaacagataaaaggaacatagaccacaaagcaaggaggcttgtgtggtggctggccagctgtgaactttgattgatatatgggatatggcctctggtaatcgattaccaagggtgggtaatcgattaccaggcttaaaaatgaagacaggagactaagatggtctctggtaatcgattaccaaaggagtgtaatcgattaccaggcttgaaaactatgtcaggaagctagga

SEQ ID NO: 29037 - DNA, 411 bp, Glycine max
  unsure (1)..(411): unsure at all n locations
tgtgctgctattaaacgatatagaattatggttcacatggtgaataatttacactaaaagcatctgcatcacaacatttagaattgggataattaccatgtacatacaaagcaagaagagatagcttgaggttgaaactgaaaatctagagatcatgaccattaaagcaacaaatagttagcaggggtaataggtgataatgatatagttacaagtaaaagtaatgaaatctcatgctcatatttacgtatcaatgcttatgcaaagaaaggaaatgttgcgacttgtgacccatctatgcacctcatcactatttaggagggagtgtcaataccaacaagtatataaaactgattgtactgcaccttgagttcatatttggattactcanatggaaaatggaacacatca

SEQ ID NO: 29038 - DNA, 388 bp, Glycine max
agcttcgagctcagcaggagctacttggaattctctgtatttgaccaattcctgaaaccgatcaacaatgaagagttcattatcatcatcaatgaaaccaatatctcctgtgtgtaaccatacttctctgcctatagtactctctgtagcctctgcgtcatttagatatactgaccaaccagaaattgaacatatcaagaaactgtgatggtgtttgtttgtaacatattacctttgacaagacttacgctaattaaaattatgcttgcggagtcttacatttattcttgtataatcaattacacattctataacccattaataggcaggtgctcgctgatcagctacttcataaactgtctattttcatgctataatgatgtgactc

SEQ ID NO: 29039 - DNA, 544 bp, Glycine max
  unsure (1)..(544): unsure at all n locations
tggatgcgangtggnccttgttgacncactagatcatcganacccgaccatanaatactaagctcgctagcctgagngactatagttctgtaagagtnnactgntggtatgtttgaccatggcaaacatgctagaagtttggtgtaatagacttactgatatctagcacctcatactgcagaggatgtatagatgtaactgatgtgcttattaactagctaaatttgtgattgaatacttactttgtgcaggcccttgcatattaagatgtcatactcaatttgcaagctttccttgtttcatactagataggtcttgctatcttttagcgtctactattattgcttatcactgagcaagggggtggcanaagtgtattcgtgtctatatcttctgatcaagcacaacacaaagagatttcacatttcacttatcaagttctatgaatcatggtggactataatattgaggagaggcttatgatatgaatctgtaactagtaatatagaagaagtatagcatggttacttgtgctgagatgcat

SEQ ID NO: 29040 - DNA, 420 bp, Glycine max
  unsure (1)..(420): unsure at all n locations
agcttgttaagtcatggaagccncannatttccttattcttggtggagtgggtcactcaggaatgacctttattctcttagagttcatgggaaccccttgattactatttaaaaaattaagaaaagtaatgcaataaaacataccttttctgtattttcatgttgattattcctaccaaaaagtatgacaaacctaaggtgtcccatatgagtacctatagttgtattgaaactaanaataagaacaaacctacctaatgagtccctatgtacacaaatcatgaagatgttgggtgcacgagtgattntacaaaagagggttgcaccactcanaacattcatcataccacctattttagggaattggtgcctaataatacctactttgggcaccaacaaagcacaaggatttaagctctt

SEQ ID NO: 29041 - DNA, 417 bp, Glycine max
  unsure (1)..(417): unsure at all n locations
tataagaattccaaattctacaaggagaagaccaagaagttccatgatagtttgatagctaagaaggacttcgtggttggacaaaaagttttattgtacaactctatgctcgaactcatgagtggtaagttgaggtcaaagtggattggtccttttgtggtaactaatgtttttacttatggtacagntgagatcaaaagtgaatccacagataagggcttcaaggtcaatggacaccggctaagactattcctcacaaatccttccttatatgatgtangtggggaggagacctccttacttcaccctacttctctgtcgccatgacttnacggagtttctttntctgtctccttctttactattattgcactcgtccaaatttattgattgttttgaatggtcttaatcttatga

SEQ ID NO: 29042 - DNA, 466 bp, Glycine max
  unsure (1)..(466): unsure at all n locations
agcttaagctccttcaactgcacaaggctcttaatanttgaagagtatccttgtggaacctttactcgacgaagacactgacaaaaacttatcttctccttcttggacaaagtatggcaggttgggggcaagtaaattttcttcccatcagaccttggatgcaactgtgatcgtatacccatatcagctagatcttgacgggtattcaagccatccttcgtcttgccttgaatgttaaggagcgtcctaatcacactgtcacaaacatttttctccacatgcataacatcaatacaatgtctaatgtcaagatcacaccagtatggaagatcaaagaaaatggacctcttcttccatatgcaactctgactnttatccttctcttgggtcttcctaaatacagtattcaggtgctgaacctgctgatatacctactcactagtcaacggtatcggtgaatatcatg

SEQ ID NO: 29043 - DNA, 419 bp, Glycine max
ctctatgtgtccttaatggaggaatctaatcactattagaaaatactctttcagcatcggttatttagaacattctacatcggttctaaaaccgactttgaaagtgccgatgttgaatgtatcaatgttaatatcggttttgtaaaactgatgttaacatatatatgacaacatcggttctctgaatacccgatgttaaacacaatgaacaaaaaaaaaaaaagtgtacgcatgatgaacgttgacatcggttttgcagtacaaccgatgttaatatgttatattaacatcggttgtttagaaaaaccgatgttaatgtaatatatcaagatcgggtctctacgataaccgatggtaatatattccattaacatcagttattcttaaaaaccgatgacaacggttatgatgcatacact

SEQ ID NO: 29044 - DNA, 286 bp, Glycine max
  unsure (1)..(286): unsure at all n locations
gtgcgagcttcaggttcctttggtttcgaggggagtgtntcttcccaccaggtgccatgtcaaattctgatgagggtccccgtntcacgtgcattgcatntaattttgtcactcatgtttattaaattcgttggttggattttcatntttaatttctccccttatagattgggtaaatttacatagtatggctttttcttctttctttnttttttctttnttttttttacgtggaaggcatggttgatgtataataaaaataatggttgtgtgtaactttttatta

SEQ ID NO: 29045 - DNA, 417 bp, Glycine max
  unsure (1)..(417): unsure at all n locations
tcaagaattatggcctcatcaaactacttgtttcccgaggaaattctataaatagacctcccatctntaatggagtgggttaccactattggaaaaattggaaaacccgcatgcaaatatttatagaggcaatagatttaaatatctgggaagccatagaacaaggaccttatgttccctctatagtggccggttgtgcaacaatagaaaaacctagagcagattggattgaggaagaaagaagattagtacaatataatttaaaggccataaatattattacatctgccctaggaatagatgaatactttagggtttcaaattgtaaaagtgctaaggatatgtgggataccctacaagtaacacatgaaggcacaacanatgttaaaagatctaggataaacacattaactcgtg

SEQ ID NO: 29046 - DNA, 442 bp, Glycine max
  unsure (1)..(442): unsure at all n locations
gcttgagccaaattccaactcatcatataccttgacccagagtgagaatgttcatcctcgccctcggaagaaaaccaaaaaaaaaagaaagaaaaaagaagtttccgatcaaagatcggaagaaagcaaaataagaaaatttcccaatcaaagattggaagagagcaaaaaagcaagaaaaattcccgatcaaagatcagaagaaaacaaaaagaaatatacaaaaagatctttggaccagacaatatccaaacaatacataatagccacaaccaaataaggaaagaaaggaaaccacaacttgaagttgtcctctccctttggttgccgaccaaaatcctgtgcactggcgactatctcaccccgcactagacaaaaacagaaaagggaaagccaaaacactcatagccaaattnccaccaaaaacactattcccaaaaaa

SEQ ID NO: 29047 - DNA, 285 bp, Glycine max
  unsure (1)..(285): unsure at all n locations
agaaagcttatcaaggaagctacctagtctataaatagaagcatgtgtaacacttgttgtaactttgatgaatgagagtcttgtgagacatacttcaaagttccacttctctccctcttgtattccttcaatttcgtgctccccccctctctctttctctccctctttcttttcctccattgaagcatccttccaagcttcttatctaaggctcacttggtggtgaagctcattcttccatggcttattccctagtggatggcgcctnctctcacctcttctcct

SEQ ID NO: 29048 - DNA, 295 bp, Glycine max
  unsure (1)..(295): unsure at all n locations
aagaaagcactttatgggttaaaaaaagcacctatggtttggtatgaaagattaagtaaattcctattagtaaaaaaattcactcgagggaaggtagatatcaccttattcataaagaagaaggataatgatatcttatcggtacaaatttatgttgatgatataatctttggatctactaatgaatctatgtgcaaggagttttctattgacatgcaaagttagtttgagatgtccatgatgggtgaagttaaatactttcttggactacanatcannacaacaaatgatggga

SEQ ID NO: 29049 - DNA, 307 bp, Glycine max
acagtgacaacgattgggctagagataaatatgatcggtaaagtaccaatggatttgtgtttttcataaggaacacaacgttcacttggatgtcaaaaaagtttccaatagtcactctttcgacttgtgaagcagaaaacataacagctgcttcatgtgttttccatgtagattggctcacgaatatgttaaaagagttgggcatgtcacaagaagagacaaccaagatttttgtggataataagtcaaccattgctctagcaaagaatccagtgttccatgatcgaagcaaacatattgatacatg

SEQ ID NO: 29050 - DNA, 438 bp, Glycine max
agctatatcaggaagttgatggaattctttgatgacatatcttttcatcacattctaagagaggaaaatcagatggctgacgcccttgccactctagcgtccatgttcaaagtaagcccgcacggagatttgtcgtacatcaaatttagatgccgtagtgagcctgcacattgcaatttgatagaagaagaggaggatggtaagccttggaacttcgatatcaaacgatacatcgaagacaaggaatacccgcttgaggcctctgacaacgacaaaaggacattacgaaggttggcggccggtttcctccttagtggaaatatcttgtacaagagaaaccatgacatggtgttgcttcggtgtgtcgatgtaagagaggccgaacaaatgctaatagaggtgcacgaaggggtcctttgtatgcatgccaatggacat

SEQ ID NO: 29051 - DNA, 378 bp, Glycine max
tgaagtgagaaagtgtggaagagtcagtcttcctacttttatttgttgaccacaaagtggtacctggagatatgtcgcgggggtcaggagaccttggggacgtcaggtggggtgctattgcccaaaaccaagcttgaccaatcccgacccaacccgggcatagtcagtcagtgagaacttgtgacgtacctaaataggcgagctcctagcagtcaaccaataaaagaacaaagaccacatgtggatgccaatcctagtgatagaggtgtcatcatctgaagaagaccctgaggaggacccagaggagttacctcccgagcctgttgtggatgctcttgactttccagagggtgatgaggacccactccctgatgtgga

SEQ ID NO: 29052 - DNA, 380 bp, Glycine max
  unsure (1)..(380): unsure at all n locations
agcttgccaccatggagttntccgactatgctcttgtgtggtggaacaagctacaaaaggagagagcaagaaatgaagagccaatggttgatacatgggtggagatgaaaaggatcatgacaaagcggtatgtgccggctagttactcaagggatttgaaattcaagcgccaaaaactaacccaaggcaacaagggggttgaggagtatttcaaggaaatggtgtgctcatgattcaagcaaagattgaagaagatgaggaggtaactatggctcgatttcttaatggtttgactaatgatatccgtgatattgttgagctgcaggagtttgttgaaatggatgaattgcttcacaaagcaatccaagtagagcaacaat

SEQ ID NO: 29053 - DNA, 388 bp, Glycine max
  unsure (1)..(388): unsure at all n locations
atgatttatatgctccagcttaagagggagtgttgaatattntagtatttatctatgtttgttagcttagttggtaagctttattcagaaggcagcagtgaattgtcactgtcaatagtccttctctctctcttgtgtcttgtatatatgtatcattttgaaatcaataaaagctaagtgagaaagagtgagggacttccaacctgaagcgtggcaaatgcaactgacgcaaaaatagatcaaagataagctcttataccatctaagaatttgggcttatggcctaacacaacaccacaaaaccagcttgaaaggtgagggttgtccacctcttatatacactacattggcctcatcactaatcaatctgggactaaaccactaattt

SEQ ID NO: 29054 - DNA, 439 bp, Glycine max
  unsure (1)..(439): unsure at all n locations
tgcccgggatcttaagtcacctgcggctgcagctgttttggctgatgggttatacatgattagactgtagatcaattgggcaaaatggatgagggcaagactgatttcgaaatctgcccaaattgtgcagcaaaaagctggtcaaatttgtgtagcagaaaaatgtgcttgtgcagaaaatgttgtgtattgctggttgtggaaagggtagtacatattgggttctggacattntctagcagattccaacggttaaagtgtagacttatgtattagggacctccagtaaaattctcgagtcgatccaacgggttaacgaatcgaacgaatagaatgttactggcgtatttgaataaggaaagctgtggtattggaatgtgttttgggcagaagtttttgcctctgcccatgttttcttgggtttggacagttcatgatg

SEQ ID NO: 29055 - DNA, 175 bp, Glycine max
  unsure (1)..(175): unsure at all n locations
atgacttagggagntgtctttttctatctccttctttactttttgacgcacgtcgccaattttattgattgatctgattgctgtgaatcttgtgatagcgccacattgaggacaatgtgttgtttaagtgtggggggcgggggattgctcnncccctcctcttctctcccccctc

SEQ ID NO: 29056 - DNA, 424 bp, Glycine max
  unsure (1)..(424): unsure at all n locations
agcttaaacattcaatttcgagcttctcgttatattacgggacacaatcagacatccgagtaaaaagttattgtcgtttgaattggctcgtaggttcaatattcaatttcaagcgtctcgatatattaccggactcaatcagacatctaagtaaaaagttattatcgtttgaattggctcataggttcaacattcaacttcgagcgtctcgatatattacgggactcaatcagacatccgagtaaaaagttattgccgtttgaattggctcatagggttcaacattcaattcgagcgtctcgatatattacaggactcaatcagacatccgagtaaaaagttattgtcgtttgagttggctcagaggttcaacattcaanttcgagcctcccgatatattacggcactgaatcggacatccgag

SEQ ID NO: 29057 - DNA, 334 bp, Glycine max
  unsure (1)..(334): unsure at all n locations
gtaagccaattcatacgacaataactttntactcggatgtctgattgagtcccgtaatataacgaaacgctcgaaattcaatgtttaagctttgagccaattctaacgataataacttattactcggatgtccgattgagtctcgtaatatatcgacacgctcgaaattgaatgttgaagctctgagcctattcaaacaacaataacgttttactcggatgtccgattcagtgacgtaatatatcgggacgctcggaattgaatgttgaacctctgagccaactcacacgacaataacattttactcggatgtctgnatgagtcccgaaatata

SEQ ID NO: 29058 - DNA, 386 bp, Glycine max
  unsure (1)..(386): unsure at all n locations
agcttcaaccaaggggagatggaccatttttagtgcttgaaagaatcaatgacaatgcttacaaagttgagctgcccggtgagtataatgttaattccaccttcaatgtctctgatttatctctttttgatgcagatggagaatccgattngaggacaaatccttctcaagagggagagaatgatgaggacatgttcaagagcaagggcaaggatccacttgaaggacttggaggacctatgacaagggctagagcaaggaaagccaaggaagctcttcaacaagtgctgtccatactatttgaatacaagcccaagtttcaaggagaaaagtccaaggctgtgagttgtatcatggcccanatggaggaggactaaatgacacca

SEQ ID NO: 29059 - DNA, 233 bp, Glycine max
aattgctaaagccccactccatcattacgattagtacctgacatttcaaacaaacaaatctaacgtaacaagacaattatagctgctgtgtgaatacctcacccactcaagtgtatcacacaattatggcttctctctaatgaaacactcttgccttttaccactctaatttccccttgaggtcttatgcaattcaggagattatggtcacaacacagaacaattcacccata

SEQ ID NO: 29060 - DNA, 388 bp, Glycine max
  unsure (1)..(388): unsure at all n locations
agctntataagtgcgggtctgggagacgaatgtcaagtggtcgcgatatgtgaagatgatgttccaagaactctggatttggtccgaccatgccctcctgatttccagctgggaaattggcgggtggaggaacgtcccggcatttacacaacaagcataatgtaaacctttacggttttaaaagctctatagttgggcctaggctntagangttttcatttggtaaggctttgtgtcttttgtctttgaatttataatacaaagatctttcttcatctgttcctggtctctacccattctcattcatttgcatgtntacttctttntctaaaacggcagatccgatgacgagtccccccgaggtactaatacctgggacccgtctatc

SEQ ID NO: 29061 - DNA, 333 bp, Glycine max
  unsure (1)..(333): unsure at all n locations
gagcttgtntgagcagtgaactggttgaatttgatatgcactggattgtttcgtatgagatgagtgtangcgaatgatttgaatgagcaactatatgatttaagtggaatggaataagtagatgtatgtttggatcaagcttgcatccattacaagagaatgagcatgcgattggaagtatgactgaatatgttagtcagtttgtcagattgattgagaacgaatgcatcgattcgtatgccagagacagcgtgatatttaaattctgagagatacgactgttacctaccaccgatttttgcatgaatctccgacagttggactgaatgcatg

SEQ ID NO: 29062 - DNA, 393 bp, Glycine max
  unsure (1)..(393): unsure at all n locations
gccagacagagaccaacatggtagctatcatcngccagtacgaagaagaagtgggtctagccacggcccacgagcatagaatcgcggatgagtatgcccaagtatatgcggaaaaagaggctagaggaagggtgatcgactctttacaccaagaggcaaccatgtggatggatcggtttgctcttaccttttgacgggagtcaagaacttccncgattgttagccaanggccaaggcgatggaagacacctactccacccccgaagagattcatggcttctcngctattgcagcatatgataaaacttatgcccacatattagaaatcgtaggaacttgttggtctctagacctgacttatatgacttctttttgaatanatgagttgtccat

SEQ ID NO: 29063 - DNA, 416 bp, Glycine max
  unsure (1)..(416): unsure at all n locations
tcttatccaacgctcatctaggtggtgaagctacttctaccatggcttagatactagaggatggcgcctcctctcacctcttctcctttgtcttctgttgcatctccatggtggaaaattaccattaaaggacctcattgatgctcaaagatccagcctccatagaagccccacatgcaagcttccatcangctttcaaccaccttcggtagccacggaagggcccattgttactgcccctgagttctttatcctttttttgcaccacctcccacgccttgcggaccttctgaagtgtctccccgttggtcttattgaaacctcgtgaaatgacaggcgcgagctcttcctctagcggtgcccctctcatagggtagccaagttgccttatagaaagaacaggattgtaactgatg

SEQ ID NO: 29064 - DNA, 384 bp, Glycine max
agcttgacaagccggcttgtttgactaactttaataataataataataataactttattttatcaaatcttatcttatctagattttattctatctagattttattttatccagaatttattccatctagattttatttcattcaatcttatcttatcttgtccagattttattctatttcgtttatacgcttggacttaaaatatatttgtgagcttgggggttgaggacctatataacaacaccaaggttttagtttagggagtttttttcggagaggagaataattctaggaatttagaattccagtttttattactgttcatgcacactattcacgtagaataaaatacatttctgcaattgtgtttgggcttcaatcta

SEQ ID NO: 29065 - DNA, 396 bp, Glycine max
tggagaggatgcttcaatggaggataagacagagggagagaaagagagaggggggagcacaaaattgaaggaagataaaagggagagaagttgaactttgagttgtgtctcacaagactcttattcatcaaagttacaacaagtgttacacatgcttctatttatagactaggtagcttccttgataagctttcttgagaaaacttcctcgagaagcttctttgagaaaacttccttgagaagctagagcttagctacacacacctctctaatagctaagctcacctccttgagatgagaagctagagcttagctacacaccccttataatagctaagctcacccccatgacagaatacatgaaaatacataaaagtccctactacaaagactact

SEQ ID NO: 29066 - DNA, 437 bp, Glycine max
  unsure (1)..(437): unsure at all n locations
caattccaattatttgacataccgtgtcgtataatcgagtccgtctcatgattatgactcagcataatgatgcgatgtaaaagaactatatctttctatagctctgactttataactgctcacatgtgacatgcctatgtgtactaccgtaacatgttctgaactacagtgcatatattcgaataacactacccaacctcacaacacaatattgtcgaagttagttacgccctctactttcgattatataagttgatgtgcgaggcatcctgcgtggaatagatcactcgagctaatagaacgatatgccagggccagtgtatgacgcttgcatgccttgcttgagtggctgattatgaagctaggcttgcttcgtctgactgtggaattaacaggtgatggctcccctactcttgtcagacaaacaaatttctacn

SEQ ID NO: 29067 - DNA, 470 bp, Glycine max
agccccagtgttgatacctgcattacggacctataaatactcagctgacttgctagttaacctgccgaggtcaccttgctctaatcagactggacagacttaaagtgtgccactggagaaaacgaccctgccaccgcccgcaataatacatataccagtcactatagggatgctagctgcatattaaatgttgacaaaacacaacggtgtaactgcaccaaccgatctgacagaatttatggaagcgcaaacatactgctcatacgcttctaagctactgcggacaattatagactttggcacaccacacagaaatggccttaatgaaatggataagcacatcaacatggggtctttccagactgcagatgagaagagaagaaactactgacgacgttaccaccacgcatcaaggcgcatgtaccctaggctaggcactattgttgagatcgctacgacatgcacatgac

SEQ ID NO: 29068 - DNA, 447 bp, Glycine max
  unsure (1)..(447): unsure at all n locations
agcttggaaaggatgcttaatggaggattataaagagagagagaaagagagaggggggaagcatgaaattgaaggaagaaaaagggagagaagttgaattgtgagttgtgtctcacaagactctcattcatcaaagttacaacaagtgttacacatgcttctatttatagactaggtagcttccttgagaagctttcttgagaaaacttccttgagaaacttctttgagaaaacttccttgagaagctagagcttagctacacacacccctctcataactaagctcacctccttgagaagcttccttgagaaaattcctaaagaagctagagcttagctacacacacctctctaatagctaagctcacctccttgagatgagaagctagagcttagctacacacccnctattatagctaagctcaccnccatgacaaaatacatgaa

SEQ ID NO: 29069 - DNA, 415 bp, Glycine max
tgtctcagcgtttatgcgagacagagaccaacatgtttgctatcatcgccaagtacgacaaagagttaggtctagccacggcccacgagcatataatcgcggatgagtatgctcaagtatatgcggaaaaagaggctagaggaagggtgatcgactctttacaccaagaggcaaccatgtggatggatcggtttgctcttaccttgaatgggagtcaagaacttccccgattgttagcaaaggccaaggcgatggcagacacctactccacccccgaagagattcatgggcttctcggctattgtcagcatatgatagacttaatggcccacataattagaaatcgttaggaaacttgtatggtctctcagaccttgactggatacgactttttttttttttttttttttttttt

SEQ ID NO: 29070 - DNA, 409 bp, Glycine max
gcttctagttgttgaggatttagggtgaacttatttttaaggtaatttgacgatttgctttggtttttagggatgtttactcttgtaatttttagtagatacagttgcaagtgtaaattttgctcctggacctctgggcatttcatgaaacatgttaagatgttccacattttaggtatatgaccaaatactccttacaagacttgatcaatcatattcccttgagttagcttttgggtttgggtttgggttaggctctggtttgtttttaacatggtatcaaagtcattgttgttaggatgataagttaaattgtagtatcctatgagttgagcctcctctctcatgctttgatgtaatcaaattcacacgtgctatttatatttaatatcgatagagtacttaaagt

SEQ ID NO: 29071 - DNA, 461 bp, Glycine max
  unsure (1)..(461): unsure at all n locations
tcacctgcggcatgcaagcttctaaatatattcttgttccatgtgatgtaactacgaggcattcctaatacttgatcagcctttgtaagtgatgaatatttatttattatgaaagctctcattcttatcatcttgtcctagataaataagagagaaggctatgtacgatatagtgatcatgttaaattttgatgtcaacaaaaaatgtcttgttggagagggctggtgtcctatttttgcaaaataataggaatttttctccctcacattggttggatcctcactaatttcccccttttccctttaattttttaggagtttaaaacattntttatttctattttccattaaaaagattgcatcttttgattntccagatttaggaggcactggaacgtgcaacttttgatagtagttcacaagtttgcataatctttcattcaatggatgggttggaatca

SEQ ID NO: 29072 - DNA, 415 bp, Glycine max
  unsure (1)..(415): unsure at all n locations
tcccaagttnttaagttcttcctcanaactgtcctaagcaaagttcccaaagtcctattaacaacttccgtttgcccatcggtttgtgggtacaagtggttgaaaataacaatgtagtgcccaacttgctccacaaagtcctccaaaaatggcttaggaacttagagtccctatcactaacaatgctccttggcaaaccatggagtctcacaatctccttgaaaaacaaatcagccacatgggaagcatcatcaatttttttacatggaataaaatgagccattttagaaaacctatcaacaaccacaaaaatggaatctctaccattgcttggttttggcagccccaaaacaaaatccatggataaatcaatccaaggatactccgaaattggcaatggagtatacaatccatg

SEQ ID NO: 29073 - DNA, 404 bp, Glycine max
  unsure (1)..(404): unsure at all n locations
cgacctgtcggcatgcaagctttcattttcattataagcgtctctatatattacgggactcaatcggacattcgagaaaaatgttattatcgttagaatntgctcagagcttccgttttcaattacgagtgtctcgatatattatgggatttattcggacatccgagtaaaaagttattgtcgtttgattttggtcagagcttctgttctgaattttgagcgtgttgatatactatggatcacaatcggacattcgaataaaaagttatcatcgntctaatttgcttagagcttttgtgatgtgaacctgaggagaagcagatcgtttgatacatgctacggaggttttggtgatgccacttccaaagagggaagaatagtcagggtagacgccactttcaatg

SEQ ID NO: 29074 - DNA, 447 bp, Glycine max
tgtagcatattcaaacgaccataacttttaactcggatgtctgattgaggcccgtaatatatcgagacactcgagattgacaacacaagctctgaggaaatgcaaacgactataactttttactcggatgtctgattgtgtcccgtagtatatcgtgacgctcgaaattgaaaacataaggtctgagcaaattcaaacgacaataactttttactcagatgtccgattgagtcccgtaatatatcgagatgcttcaaattgaaaatagtagctcctagcaaattcaaaacataataaatttttactcggatgtccgattgagtcccgtagtgtatcgagacactcgaaatcgaaaacagaagctctgagcaaattcaaacgacattaacttttttctcggatgtacgattgtgtcacttagtatatctagacgctcgcaactgaaaa

SEQ ID NO: 29075 - DNA, 324 bp, Glycine max
  unsure (1)..(324): unsure at all n locations
agcttgtctttggcttagatgtggtttatacatgatttaggacttgtaggatccaatttgggcaaaattggatgagggcaagactgatttcgaaatctgcccaatttgtgcagcaaaaagctgtcaaattttgtgtagcagaaaattgtgcttgtgcagaaaatgttgtgtattgctggttgtggaaagggtagtacatattgngttctggacattntctagcagattccaacggttaaagtgtagacttatgtattagggacctccagtaaaattctcgagtcgatccaacggttaacgaatcggaacgaatagaatgttact

SEQ ID NO: 29076 - DNA, 172 bp, Glycine max
ccttactccaccctacttcactcccgccatgacttatggaggtttctttttctatctccttctttactttatgacgcacttggccaattttattgattgatctgattgctttgaatcttgtgatagtgccacatttaggacaatgtgttgtttaagtgagggggggggggga

SEQ ID NO: 29077 - DNA, 528 bp, Glycine max
  unsure (1)..(528): unsure at all n locations
tgccnaatgtgcacnttttggaccccttgnagnancacgngttgannacccatgctcgacgtgagatccttacaggcgacctgcggcttgcaagcttgagtcctttcgtgtgcttcaccccatggatctgccattcacaccttagaaggagaccttcggaggtcaatttcggatcgaagcgggtgcgttccgccactgttataattaaattgtcagacaaagagagagagagagaatgtatatcccctggtgttcggtttgccaaacgcggtacaacgaggaggagcgagttccgcttctgctccaatgcgggcacgggatctgcagagagtgtatctcgagaatgttcttggcgtattctgacgccacgctggcgtgtcccaggagccgtcacgtgtacacagtaggaaacttcgntcacgcgttgaagtagaaatactcagtgctcgagatcataagctcgacgtaggcgcccaccgcgtttgtgacggcggtgcagtttgacggngactgtccgacgacaagacg

SEQ ID NO: 29078 - DNA, 357 bp, Glycine max
  unsure (1)..(357): unsure at all n locations
ctcaagcttgaagggacaaccacatttcctactctcaatgtctcttctaacaaattctttcttcctacacttatattgaccgctcatttcacagcctattaacacaaatgaacttcttcctctactaccagcatgtgtgttagacatcataatgattgcaacaaattcgttttcatgggcaaccgatcgagcccactgcaaaacatcatctcgggtaccaaagacctacaacataaccccgacatattaattnttatacaaaagatacattcaacaaaatgactcaaactaatgaacatcattacctgagaagtattaaaagcatccgaacaatcaacatgtggtggttcattcaca

SEQ ID NO: 29079 - DNA, 363 bp, Glycine max
  unsure (1)..(363): unsure at all n locations
agcttctatactntgtacaagaatgaagctctgataccacttgttagacaagtggcctcagatatcttaagaagggggggttgaattaagatattccaaacttttctcctaattaaaaatctatcttactttntacttaagttatgaattcccttaatgacaatcttcttaaatattaattcaaatgaagcaacttgaattatgaatataaagcaataataaataaaggagattaagggaagagaaaatgcaaactcagttttatactggttcggccacacccttgtgcctacgtccagtccccaagcaacccgcttgagagttccactaacttgtaaattccttttacaagttctaaacaca

SEQ ID NO: 29080 - DNA, 317 bp, Glycine max
  unsure (1)..(317): unsure at all n locations
tataagaacataaatgcctcaatcatttccaaatatgcatgtgaattangaagcaccaacaagaatcaagccaaggctattgtgcaagcaatcaatggggcaaaacacaccaaatgattatgatgatgtatggctcaaattctcacaaaggtaaactcatcactttcaaattgagcttttaaaacgatcatgatatgtagaggagaatcaaagatttcaagtcacaaaatgtcaaaaacttttatttctaaacaaataaccaattcttggacctattctattattcaaagaaaaacattccaaagcctaccttcccc

SEQ ID NO: 29081 - DNA, 369 bp, Glycine max
  unsure (1)..(369): unsure at all n locations
agcttccactccagttctcattcgagtacctaacgggtgtgaattttctacgttaaaaaccagaatacacaatacccttaagctaaccgacaaaccaattttggatgaaatttactaccgacagtctntcacatatgcagggaatgaagtttggtttcaatgtatgcaactgaaagatgatgttgatgttaacacaatgttaatgtgtaatcatgaattttcgtttattggtccgattggagtattatgtagcattgctagaacctcagatggtatnttaaacttacttcaagccactatgacccctactcatgatgctctgctatattacaaagggaggtagaacatgtcatgccaaaatgagtttgg

SEQ ID NO: 29082 - DNA, 361 bp, Glycine max
tgtaatcgattacatcatttgtgtaatcgattactagtcacaaaaatttttatctcaagtttgaagagtcacaactcttcagaaactaactgtgtaatcgattaccacatctatgtaatcgattactattaagaaattttctaagataactctcaagagtcacaactgttcaagaagttgttgaatgaccattatagacctattactaggtgacttgggatacgaaagtccttagagtttttctgaataacattgacttatcctctcaaaaccaaattgtcttatcactctcacaatattccttgacccaaacacgtacgaattcgataacgaatctcgatcgatcttcatttgtatgtca

SEQ ID NO: 29083 - DNA, 332 bp, Glycine max
agcttccttgagaagattcctaaagaagctagagcttagctacacacaccccctataatagctaagctcacccccatgccaaaatacatgaaaatataaaaaaaagtccttattacaaagactactcaaaatgcccagaaatacaaggctaaaaccctatactactagaatggccaaaatacaaggcccaaaagaaggaaaaaccaattctaacatttacaaagaagaatggatccaaccttgacccatgggctcaaaaatctaccctaaggttcatgagaaccctagggccttctttagtagctctagcccaagcctcttggagtcttcta

SEQ ID NO: 29084 - DNA, 341 bp, Glycine max
taataaatctatatatggtgtatagcaagcttcccgttagtggtaccttaagtgtcatgggataatttcttcatttggctctgatgataaccccatggatcaatgcatataccacaaggtcagtgggagtaaaatatgttttcttgttttatatgtagatgatattttacttgcagccaacgatcggagtttgctacatgaggtgaaacaatatttctctaagaattttgacatgaaggatatgggtgatgcatcttatgtcatcggcattaagattcatagagatagatctcgaggtattttgggtctatcataggaaacatatattaacaaaattctag

SEQ ID NO: 29085 - DNA, 240 bp, Glycine max
atgacgcttatgatatgacttaatgactagtagagagaaaaccataataccaatcccattttcttactacttttgtctttgtactattaagcattttttataaactaaactaatatgggtcctttgttttaagttatttattacaataagcacattgtttaaacaaaatcagtaatttttttttggttttataaataacaaagacggtttttaataagaatgttataatggggttactta

SEQ ID NO: 29086 - DNA, 294 bp, Glycine max
tgccactgtgctctcctccaatgatggacttggttatgcaacaaatataaataaatgtgtagcagaagaatagaatgacgttttatatatgcttgctttgacgttccgctatggtatgcatggtggtgtcactgccaagttcggctattaaacaacatcgattgagaccaacggaaaaggtttctccttttgtcccttcttcaatggccatggaccttaaattgcttcaaggaggtagttctgactctctctctctctttctcacaaagtaaaagtggagtattaaaatgagtc

SEQ ID NO: 29087 - DNA, 272 bp, Glycine max
  unsure (1)..(272): unsure at all n locations
acctgagtatgttcataaaacaatcgttcaaacagttaaaatacatactgatcaagttagaggctcagtctcggcttgtgatcgatcccgagctaactagttgaatcgatcgatccgagctgagtccaataacactagtcaggcttattaaaaatgttacttgtgatttcactgcattcctttgtcttaatgaaagccaatcgtgatgttccttangatatgacacntgaaaaacttgctcacattattgttcaaatatgaatggacataca

SEQ ID NO: 29088 - DNA, 392 bp, Glycine max
  unsure (1)..(392): unsure at all n locations
gcttgcaagtagtgtatggcccgatgcttcaactccaaattctctccttggaaanttgaggaaagggacctagtatagagagcatgtggagaagcttgaaaggtctcagcaaacgaaaaattggcggccaactaggaaagacctttcaaagtttgacatattttaaagaacaaagcttacaagttagaagaactatccgggaagatcatttcgaggagttaaaactctacacatttgaaattctactacagttaggtgcttttttgtaacgagtgtcatactctntttcctaccttgatntttcatccctataaaaatgtgaaagggttttaccgaggaggttttaatgaggcacgcttcagcaacccgctattaatcaaaatccttttatc

SEQ ID NO: 29089 - DNA, 361 bp, Glycine max
gtgaggaagtgtggaagggtgatacttttctactttattcgttgaccacagagtggtacctggagatatgtcgcgggggtcaagagaccttggggacgtcaggtggggtgctattgcccaaaaccaagcttgaccaatcccgacccaatccgggcatagtcagtcagtgcgaacctgtgatgtacctaaacaggcgagctcctggcagtcaaccgataaaagaacaaagaccacaaagcaaggaggcttgtgtggtggctggccagctatggatcttgagtgatatttgggatatggcctctggtaatcgattaccaagggtgggtaatcgattacaaggcttaaaagtgaagacaaaaag

SEQ ID NO: 29090 - DNA, 390 bp, Glycine max
tgaccaatcccgacccaacccgggcatagtcggtcagtgagaacctgtgatgtacctaaacaggcgagctcctggcagtcaacagataaaaggaacaaagaccacaaagcaaggaggcttgtggtggctggccagctcgtgaatttgtgtaatatgtggattatggcctctggtaatcgattaccaagggtgggtaatcgattacaaggcttaaaattgaagacaggaggctaagatggtctctggtaatcgattaccaaggggtgtaatcgattaccacgcttaaaaacgaagtcaggaaacttatggagcctctggtaatcgattaccagcctgtgtaatcgattacacagaggaatgggtcactggtaatccataccaagcatgtgt

SEQ ID NO: 29091 - DNA, 415 bp, Glycine max
tactttcaatctaaacatggccttcatcattcttaatttcatgcattcattccatacttcagagattcatgcaaaaatcattacttaatgttagtcgttatctcacaatttaagatcacactctcaccgggttgtggctaacgtgttccttcacaatcaatctgacaaaccgactagtattttcagtcataatcctaatttcatgttctttctcttctaatgactgcatgctcattcaaggcatatgatctacgcattccaatccactcaaatcataaaatcaatccattcaaatcaatcaacaaacactgatttccaaaatcaaacatcaaccactgaataaaacaagtgcactgttcaatcaaacttttatacaagctaccaaacaaactataactataattgaaattaaaag

SEQ ID NO: 29092 - DNA, 418 bp, Glycine max
  unsure (1)..(418): unsure at all n locations
ctacacatttaacggttggctgcgttctgggattgccctcaagtttgcctatcacccactgactatgtgcttgtttgatggtcacttctcaccaacaattatggttatgctgaaatgactctatctgaaaagagttactgaacttcattcctttgcacaaggtgatatcccaatcacaagatgccctcttgcatttgtctttagccctatgtgtatcattcttcttccacttgaactccctgcccaagaatatgctatactttctcaaggcagatttaaattcatccagagtaccaaactccatccctaattccaacgtctgttcaccaactccactactttgactatattgaggataaacatcaacatnctcatctttatcatcactactaatggggatattcaggtgctctgaatg

SEQ ID NO: 29093 - DNA, 370 bp, Glycine max
  unsure (1)..(370): unsure at all n locations
gctgcaagatatttgtttgggattttctttggttggactctctctttatgttctcttttaacaaaatgtagaaactttcaaatttaaaaattcttctttccttcttattttctttctcttcatccaaagatgtagttgtttaacattatccagagttaagcattaatatnttgttatctactctttgaggggtagaatgaggacagcgaattttgaatgaaactattcctaagtcctgacctcttaacaagttaccaatagttatcttgtgtccaacaacttcattatgacctgattaatcttgtgtgtttattttttcttttagaagctacaacctctctcagctccttctcgacagatgcttcatcta

SEQ ID NO: 29094 - DNA, 410 bp, Glycine max
ttaccgagaagaagaaccatcaacagcactgacccaatcatcatgtagagaagggtcctcctccttccgcggagccacagcccttgcgtactcaatttccaatatcctttcctataattgattattcaaaactgttagctataatcctatgacatcatagcaagtagtaacaatggtttgtttcctatgttaaaaaataaagattaaagaaattgataagttattgtttgtatacccaatttcaatccctggaatttcaacaacttccttgtaagtgactaaatggcataaggttgtagatcattcggtttcacatgattgaaacctcaaattttgtttaatgtaagatctgtgttgaattcacacaagtacagaatgttcatgatgagcatcatctttcaatgtctagt

SEQ ID NO: 29095 - DNA, 393 bp, Glycine max
  unsure (1)..(393): unsure at all n locations
catgcaagcttatnttatcctgtacttattttatcatttttgtttctttacagtttctaccatttattcatttgaagctttcctttccagattaactacgttgctttctttttatagccttttaatcattacctttcaagcaaaatcctatccactccctttcttctttgttcacctaccccaagcgctttctggagtagcttgggaacctatagccaaggaccagattccctttcttggcacaaatcatcatcattattttggaatcttgtcgagataagactagtcaaaacgtattttggcttactttgaatttgtaagcgacaataaattggcatgcctggtgggatcagataggtgaaaacattcataaatttgacaggagaaatcttg

SEQ ID NO: 29096 - DNA, 217 bp, Glycine max
  unsure (1)..(217): unsure at all n locations
ntgtgcttttactatggngtgtgtgtcctcagttagcataaacatcatgtggaatggatagagatcagagttcttttgttgtagaagggggctccgctaaggagatcccctttctccctatcttttttgtgttggttatggataagctttgtcaccttattctctaagttgtggatgaagggcacttgattatgatgagaatgggaagggggggggg

SEQ ID NO: 29097 - DNA, 375 bp, Glycine max
  unsure (1)..(375): unsure at all n locations
agctntatggatntagttctcaccggcgtatggatcgatgttggtctgaaaagaggaaaatttgatcatcctactttgacgaatgagaaaactggggcaaatggagagaatgagaaggaggagggaacccctgttgtggctgccattcctacatggccaaattttccaccaactcaacaataccaatacttaaccaatatcaacctttcttatatattgtcgtcctatcagccaagaaccctaaatcaatcacaaaggccacccctaaaccatccaatgccaaacaccactcttaacacanaccaagacaccgaccagagagggaaatattcaacgaatgagcctgtagaattcaccccaatgccggtgtcctat

SEQ ID NO: 29098 - DNA, 361 bp, Glycine max
tctcaagcaagcttccatcaccctcagtgagaccttgctcactgtgacccttaagctagatgaactcattaccaaactcactacccctaaataacctggccactcaccatggtcctctaccgtcattacaccacttgtttcaccttcctcttcttattgcatgaagcttgaagttccaaggtttgatggtacaaaccctttgggttggatattcaagataaatcagttttttgaatatcattcaaccccggaccatgagcgtctaactatagcttttccaagaggagaaggttctcgatagtcgtcgttctttccgcgacaaacctactccaattccacctttcaccaccttcttcgtctc

SEQ ID NO: 29099 - DNA, 332 bp, Glycine max
  unsure (1)..(332): unsure at all n locations
agcttgtgtaaattgtatcaaactcctcctatttataggtatntggtagtgttgtaattaatttttgctaaagataggtaataaatacttagtacttccattgtttgtggttaataatattttttctctcacttttaggttaattaggcaaagtttgaagtgctgattttcaccctctcactaagccaatcttctggcttagcgagccatccgctgagtgcaacacatctcggctgagcgtaaggaacaatctggaagaaggatgagatatgcatattcgttgagcgaaaggtcattccgctaagcgcactgcttcagtccatccgttgagc

SEQ ID NO: 29100 - DNA, 495 bp, Glycine max
  unsure (1)..(495): unsure at all n locations
cgggcagtcttgcacgtgnntttgatacctctgcatttcangcactctatanactnctccagcgtggcgaggatgctcgaatggtggagaatacagacggatagaaagagagatggcggagctctcaattggaagaccataaacggagagaaattgaactctcagttgtgtctcacaagactctcattcatcaaaattacaacaagtgttacacgcttctatatatatactacggagcgtccttgagaacatatctcgagagaacgtccttgacaagcttctttgagaaaacttgcttgagaagctagagcttatctcacacacccctctaaaactgagctcacctccttgagaagctttcttgagaagattcctgaagaagctagagcttancttctcacaccccctataatagcttaagcttctccccatgccagaatacatgagagatgtataaaagttcctatttcaagactactcaaaatgccctgaagt

SEQ ID NO: 29101 - DNA, 383 bp, Glycine max
  unsure (1)..(383): unsure at all n locations
gtagatagcgctctaaacactatataaaattatttaaagagtgcaaaaaactctatctaaaatattttaagaatgaagaacaaaactaacatatcttacaaagactaaaatgaaaaaaaaaatagtaaattacattgacaaaaaaaatatttaagcctattttatttcttattgactatatttaattattttttagatttgactcctctaaacggaatagacatgtaaagaaaaaaaaaggatatatatgtctatcattaatttaaaattgtttataaagattttaaattgtggttgtgatcacgaatntatcgcgttctttgatattgtgagaaattacggagaaatataattgatgtcatcattatgttcatanacattct

SEQ ID NO: 29102 - DNA, 424 bp, Glycine max
  unsure (1)..(424): unsure at all n locations
agcttgtgggtggtggtttccgcgatttgttggagtgggtgcatctgcttccactccatgattgatgatcaaattgagttgtgttgttgttcttcggtgttgttggccattcagagcgttgcagagaaagagagaagggttggatttagggtctgagagaggaataattgtaagagagagagggagaaagctttgcggaaaaaaaagagtgaataggcagagggaagtgaagaattagtgccacgttggatagtccacgtgacactaaaattaccaacaatgcacctcattaatggtgttacttntaaaattaacagaaggattattttgcaaaacttatgcaatgataaggactnatttttacatttcananagataggaattaatgtgcaaaatggctacaaagacagggattaaaatatct

SEQ ID NO: 29103 - DNA, 350 bp, Glycine max
ctttatctagccaagatcatacaatagtgttacaatagaacctaacggtttctaattatatgggccatcaaatctatcatgtgttgacagtaattgattatcccgtgaatttcctcaggggctaaacacacttcagcgatggcctttgctttggctagtagtcacgggaggtcttgacttccatttaaagtcaaggcgaacctatccatccacatggtcgcttcttgatgcaatgcatcaatcaccctccttcttgcttccttttcggcgtacgcttgtgcgaaatcctctactagcttttgttcatgggtcaaagactggtttaactcttcccggtactgccctatgat

SEQ ID NO: 29104 - DNA, 356 bp, Glycine max
  unsure (1)..(356): unsure at all n locations
agctngagatgaggaagtgttgaagggtgaaacttcctgcttttattgttgaccacagagtggtacctggagatatgtcgcgggggtcaggagaccttggggacgtcaagtggggtgctattgcccaaaaccaagcttgaccaatcccgacccaacccgggcatagtcggtcagtgagaacctgtgatgtacctaaacaggcgagctcctggcagtcaacagataaaaggaaaacaagaccacaaagcaaggaggcttgtggtggctggccagcttgtgaatttgtgtaatatgtggatggtggcctctggtaatcgattaccaagggtgggtaatcgattacaaggcttaaaatt

SEQ ID NO: 29105 - DNA, 441 bp, Glycine max
cttttctacaaccttatctccttctttggcaacatcaaaaagccaaagaactcggaaatcaacacagatcaacaatggagttgaaagatatagatatcagagtattaaacacaataagccacactcacatagaagaagtaatcaaaccagaatccaaataacttaaaatgtgaacaaccacaaaacatccaagactgaaattgaaaaaaccacaagataaataagcaaagtacttagcataatagtgtaaattctaagagactaaaagcgcaaatacacggcttataaaagacatataatcagaaactaaaatctaagaagacggaggtggtggtggaagatcgaaactctgacgaatgtatccgacatcctcttcaagctgtgtaaggcgaatgtccataccggcaaagcatgaatctaacgagtcgaagcggcaccaac

SEQ ID NO: 29106 - DNA, 311 bp, Glycine max
  unsure (1)..(311): unsure at all n locations
gctttcttcttgagtcttgaattcttcttgattcttatcttgaactcttaaattattcttgattcacttgagttgttctttgattgatctttgagctttttgtcatcatcttttgctatcatcattggtatcatcaaaacacctttgaatcacctttgactcaccatgaagctntacttctacaaatctttatcaattcaaccacctaatccaaccctaaattaaattactaagcgaaattaacataggcattcatatgtgataagctcacatcaccattactcataacgatcataaacatgacgtaaata

SEQ ID NO: 29107 - DNA, 322 bp, Glycine max
  unsure (1)..(322): unsure at all n locations
tctgataaggtaaagatgattaggtaaaagttgaaggtatcacaagatagacataaaagttactatgataaaaggagaaaactcgaatttcaagaagaagatgtgtttttgaaagttacattgataactgggttgcgggaacccttaagttccgaaaactctctcctaaattcattggtccctaccaaattcttaaaagagttgattccattgcatatcaaattgttntacctccaaatcttcacaatgtgttccacggttctcaacttttgaaatatgtntttgattcttcccgtgcgattgaacctgatgtagtacaatt

SEQ ID NO: 29108 - DNA, 150 bp, Glycine max
gcttaccttgaacgggagtcaagaacttccccgattgttagccaaggccaaggcgatggcagacacctactccgcccccgaagagattcatgggcttctcggctatggtcagcatatgatagacttaatggcccacataattagaaatcg

SEQ ID NO: 29109 - DNA, 354 bp, Glycine max
  unsure (1)..(354): unsure at all n locations
gctttaccaaaaggttcatcaagtcatgttgaaatatggaagtaaccattctgcaaaattggggcaaaagatgaatcgagtcacatcactgcttcgtctactgccaaacatatttaggattattgatgtccttgttacttccagtttcaccttgacaaagatgtcatggaccatgttgaaaatctaaattgattcaaccccatatcctgcgtaaaaattcgcaatacttcgactgtacatcattcgcatgcatccatgcttttcattggntgcattgctcattgcattctttccttgaaaaataaaataaaataaaatgaacttatcacaaagaataggaaacgctttacggcg

SEQ ID NO: 29110 - DNA, 142 bp, Glycine max
  unsure (1)..(142): unsure at all n locations
tctcgatatattatgcgcctgaatctganccccaattgaaaagttatgaccatttgaattgctcgtgagcttccgttgttcaatttcgagcgtctcgatatattatgcgcatgaatcggacctncaagtgaaagttatgacc

SEQ ID NO: 29111 - DNA, 415 bp, Glycine max
  unsure (1)..(415): unsure at all n locations
catgcaagcttgtaggattatgcggtacccatcacatgtggtactaggtggcggtcgggcgatggtgcaagtcaactctccacatccacagatcacacataaacccaccatccccagttgcccaccttcactgagctcacgtactcccacgtagcccttatcctcgttcctctcaacaccgggtccccatcaatctctccaagcttcgacaacatccaagcaattcaacatcccaaacatcatgaactatcaaaaccaaggaaaacagggcagaggcagaaaactctgcccaacacaaaccaatatcacagcttttctcacttaaaaaccctagtaacattctcctcgttccaattcgttaaccgttggatcgacttgaaaattnttctgaaagtctctagcacataagtctaca

SEQ ID NO: 29112 - DNA, 361 bp, Glycine max
tgaatccgcggccacctcatggacttctctaacaacaataacatcatttactgcactgaattgttgggagttggaagccatcttcataatcaaattcctagcttcagcaacggttatatcaccaagagctccaccactggtagcatcaatcatactcctatccatgttgctaagtacctcatagaaatatcgaaaaacgagttgctcagaaatctggtgcgggggatagcttgcacacaatttcttgaatctttcccagtactcatacaagctttctccactaagttgcctgatgcttgaaatgtcatttctgatggcagtggtcctagatgcacggaagaatatctccaagaacaccctc

SEQ ID NO: 29113 - DNA, 381 bp, Glycine max
  unsure (1)..(381): unsure at all n locations
gcttgtgcatncatacctngatgaggatgtcccatatgttcttaaaactggactgattcatttgcttccaaagtctcatggccttgcaggtgaagacccgcacaaacatttgaaagaatttcacattgtctgctccaccatgaaagccccagatgtccaagaggatcacatatttctgaaggctnttcctcattcattatagggagtggcaaaggactggctgtattaccttgctccaaggtccatcacgagctgggatgaccttaagagagtattcttagaanaaattttccctgcttccaggaccacaaccatcaggaaggatatctcaggtattagacaactcagtggagagagcctgtatgagtactgggagagatt

SEQ ID NO: 29114 - DNA, 449 bp, Glycine max
  unsure (1)..(449): unsure at all n locations
cgtgacactatattgtactcattctagtcacanaaggaaacaagttaaaaattattttcaaagtaaaaacgttgtttctacttcaaaactctttgaactacttcacatagacttatttggtccttccagaactatgagtttgggtggtaattactatggcttagtaattatagatgattattcaagactttgcttttgaaaaccaaaaatgaagcttttgatgcttttcgcaaacttgccaaggttattcaaaatgaaaaaggtcttaacattgtttcaattagaagtgatcatggagatgaatttcaaaatgagtcttttgaaaagttttatgaagaaaatggaattcaacacaattttttttccccaagaacacctcaacaaaatggtgttgtggagaggaaaaatagatcccttgaagaaggagttagaactcttctaaatgaaac

SEQ ID NO: 29115 - DNA, 373 bp, Glycine max
agcttcattgcctaacaagccaacttactcagcaagccccaagagactcagcataaggatgcacaggtcaaagttgagtatgtgaaaagattgtatgaccaagtgaaggtgcaaattgcaaagaaaaatgaaagttatactaagcaagccaacaagataaggaaggaagtggtacttgaacccggtgatgatcctggacatttgaggacaaatgttttccaagaaggagggaatgatgagaatcatgaaacaggccaaatacagtctaaaggcccaagtggagaaggacaaagcccccgagtggagaaggatgaatgcccaagtggagaaggatgaaggcccataggcagagacactatcaagactattaatt

SEQ ID NO: 29116 - DNA, 362 bp, Glycine max
gcttacagcagatttagtaatgacccactaacctagaattaaaataacttaatgccattaacctagggaattaaaaaaaacttaatggctgagtgtaactgaaattgtggcaaccaaaagtgacccccaacagccaacaagtcagccaccatttggtctcccaaaaggctgatgcctaggttgccaattgggcccttattacaacttgaactaaacctaactgtcataccctaatttcgtccggggacctttgcttgatgacatgcgacctttctttggtccttgtgaggtgcttggcacccatcattatgcaatttgtgaaattctaggacatgccggaaaaccaaaaaatattgatgcac

SEQ ID NO: 29117 - DNA, 291 bp, Glycine max
  unsure (1)..(291): unsure at all n locations
agcttgtgcgaatctaatcactcctgcattttatctctagcatgcattctttctttctttacccactcctcacgtttggttttttagggaaaaacaccataactaaacgcgccacaaggcatccctatcgcaccagatccaaatctagaacgatgggtgatcaagaggagacacaggaacagatganagccaacatgtcggctctgaaagaacagatggcctccatgatggaggccatgttaggaatgaggcagctcatggagaaaaacgcggctaccgctgccgctgtca

SEQ ID NO: 29118 - DNA, 355 bp, Glycine max
  unsure (1)..(355): unsure at all n locations
cttaagaaaacttccttaagaagcttctttgagaaaacttccttgagaagatagagcttagctacacacaccgatctaaaaactaagctcacctccttgagaagcttccttgagaagctagagcttagctacacacacccatctaaaagctaagctcacctccttgacgaaatacatgagaatacaaaaaaaagtccctactacaaagactactcanaatgccctgaaatacaaggctaaaaccctatactactagaatggccaaaatacaaggcccaaaagaaggaaaaacctattctaatatttacaaagaagagtggatccaaccttgatccatgggctaaaaaatctaccc

SEQ ID NO: 29119 - DNA, 137 bp, Glycine max
  unsure (1)..(137): unsure at all n locations
caagctttacactacttgtgccatatntggtttcaattaataatataacatttgctcataaaaaaagaagtaaagttagtagctattaattggttctcataatcaatttcttgtatgttagctatattcttttttgg

SEQ ID NO: 29120 - DNA, 328 bp, Glycine max
  unsure (1)..(328): unsure at all n locations
agtgaataacatgcggaatatagtacatagcttctggatgtgaatttaaaaaatggcggcttaatgcatgaagttaccttcattgtggggggtgggggacggcanatgtagactttacccgtgttagtggaaaggctatttcccctactacagcccatgatcttcatgtcacaagacaccttactgtcgtgtcaagactcacaccctatttgatgtaaattgctgcattataattataacaatctcatgcacttttctactctgagcattcaccagatctgatgccatctttattattgggattcattatgcaatgatactatactta

SEQ ID NO: 29121 - DNA, 309 bp, Glycine max
gcttagctgtcaatgcttcaattgtgccaaaaggcaaaatctggggggttggcaagagcataaccacaatctggcgacggtcagattctgattatggcagctgattactagttgaccagcatcaattttctttaagctttatttttagatataagatgaatctgggcacctaagcactctctaacaaaatacatcatttcttcactgaattgtgggagtggaaccacttctcaatcaattctatctcacagagtatataccaaggctccacctggcagataatatactccttcatgtgctagtcctcta

SEQ ID NO: 29122 - DNA, 414 bp, Glycine max
  unsure (1)..(414): unsure at all n locations
tgccacccagctcgcccaggcgagcaaggttgctttctccaaaagcaacaaccttctggatgaatcttctggagggcccaagtgggtctggttgctatttgcacacccctttttactaaatgcaccccccttctattcttttgtaattctttttccgtaacgttacgaaactttacgaatttcgtaacgatacttattttccttccgcaaggttacgaatccttacggattatgtatttactctctnttagctttcaaagaagttacggaaactcacggattgcgcaaaaacacctcttttcgattttcaccacattacgaaatttcacggatcgcgcgagncctgcttcttttgatttctgagacgtctcgggacttcatctattgcatgtcatcaagtaataatccccggat

SEQ ID NO: 29123 - DNA, 401 bp, Glycine max
  unsure (1)..(401): unsure at all n locations
agcttctatactttatacaagaataaagctctggtaccgcttgttaaacaagtggcctcaattatcttaagaaagggggttgaattaaaatacaaaaactatccccttaattaaaaatttaacttttttatattaaaaatgcaacccttattatgagttactctaagaacaattcanaacaaacttctttaaagcgaaatataaacaataataaataaaagaagtttaagggaagagagaatacaaactcaatttttatactggttcagtcacgccctatgcctacgtccagtccccaagcaacatgcttgagatttccactatcttgtataaagccttttacaaagtttgaaccacacagtagcaacccttcccttgtgttcaaataaccttacaactta

SEQ ID NO: 29124 - DNA, 422 bp, Glycine max
  unsure (1)..(422): unsure at all n locations
ttcaaaagttttaagcattggatgattcttataaagaattagacggtnaagtgtcttaagtttaactatagcttggaattctgttctactgaattcaatgaattctatggagatgaaggcatagcgagacaacataatgtatgctatactccacaacaaaatggagaatatgaaggaatgaataagaccttgttggaaaggatgagatgcatgctatctaattcatgattgaatataagtttctaagttgaggcaatcaacacaacatgctatctcgtgaattggcaaccaacactaccacaaacttcaacacccctattgaggtatggtttagaaaattggttgaatactcaatgttgagggaactgattggacgagtcaaaaccattcgaagtagcctaaaaccacaacacccagaaagt

SEQ ID NO: 29125 - DNA, 425 bp, Glycine max
  unsure (1)..(425): unsure at all n locations
agcttgtctcaacgtttatgcgagacagagaccaacatgttagctatcatcgccaagtaccaagaagagttaggtctagccacggcccacgagcataggatcgcggatgagtatgcccaagtatacgcggaaaaagaggctagaggaagggtgatcgactctttacaccaagaggcaaccatgtggatggatcggtttgctcttaccttgaacgggagtcaagaacttccccgattgttagccaaggccaaggcaatggcagacacctactccgcccccgaagagattcatgggcttctcggctattgtcagcatatgatagacctaatggcccacataattagaaatcgttaggaaacttgtatggtctctccgaccttgactagatatgacttncttttnaaataaaatgagtnggtcccatg

SEQ ID NO: 29126 - DNA, 279 bp, Glycine max
  unsure (1)..(279): unsure at all n locations
tgcctcagagaggtccaggaatgataaggcggccgatagaactanttccgctcctgagtatgacagtcaccgttttaggagcgcggtacaccatcattgctttgaggccatcaaaggatggtcgattctccgggagcgacgcgttcagctcagggacgatgagtatactgatttccaggacgaaatacggcgccgactgtggacatctctggttacttccatggccaaggtcaatccagaaataggacttgagatttatgccaatgctttgccaacaga

SEQ ID NO: 29127 - DNA, 339 bp, Glycine max
gtgcaagctgagaaatatgagcatttcttgtattacctaattattattattattatttgatagaaaagtttgacatacgaagggaagttctctacttagttcaaaggtatatatatatatatatatatatatatataacaagagtttgacaaaatagttgctttatcaagctacctttttaatatataacttgtagtgatatatcatttagtgaatgattgactgaaaaaatgattcacttatccaatattaattttttctatatgcctaattcctcaattctgtatgttctttctcttgcacggaagcactttaacttccaaaggcaacgtgaacttc

SEQ ID NO: 29128 - DNA, 383 bp, Glycine max
  unsure (1)..(383): unsure at all n locations
tagcaagcaacanaatgctcatttcatttgtatccctgtcaaaacccagttgcagaaatctctgtaaaaggtcaacagaatgcttgatcaaaatcatggatatctagtaatttaaaggatagtgcagagtcatagacctcaaaaaaaatgaagggtgaagaagcaaactaccttataaagcaatggtaagagaagtaggaaattcaaatataatcatttaggtggcattaggtgagctgtaaaaaaggttcatagattcattaattatgatctttaatgtttaatttgtaagtaaagctttagttcccaaactatgaatattaaaaattccctggccacttgcacctatagatcacaaaagctgtgctcccagtgattgtagt

SEQ ID NO: 29129 - DNA, 376 bp, Glycine max
agcttctgcaacatctgccatttcagtaacccgagaggtcttggtacctttctcagggcagtgtttcttgatacgaccaaccttttgacatttgaaacatcggacctgcttcttggtttcaggccttgacttcttccatttacccttctccttcttgccttttcccttcattgctgctagaccagataacaccttctctgtaatctatgaatcttggaagttctggaattctttggttcgaattgaggtgaccacctcctccaaggtaataattgatccttcccatatagaagagcatctctatagtgctcgaaggtcttatgtaaagcattagaagaatgacaacttatcttcatcttctagttcaccccgatat

SEQ ID NO: 29130 - DNA, 404 bp, Glycine max
  unsure (1)..(404): unsure at all n locations
ttataagaactgaggagttaccagtcacaatttggtgttaaagaaggtatgtgcctggacatagaaaatatgtgatgtgagatgatgaaatccactacatcctttggtcatgattgtttgcaacgtgaatcaatntgaatccctttttcggcaaagcatgaaaatttcttgattgcttcatattagaccaccccatccttagaagcagtgaatgaaatcccctgctatgtaaattacctacaatatgtctttgatgaaggcaaaacttatgtagggtttgagtccattttttataggaacaaattgcaacctcggaaaaatgttattgttagtaagtgaagagatatgaatagtntttatatatcgtcgtttggcgtagaaatttctctgttattatatgtctg

SEQ ID NO: 29131 - DNA, 381 bp, Glycine max
  unsure (1)..(381): unsure at all n locations
gcttcagctataaatttaaataatgagctgtttaccaatgaagaagtgctaaaggtgttagtacagtctaactactggaaaaaatatgggccaatagaaattctagctgtctctactaaatatgttctggaattctaagacgaggtgacggcgacatcgctaaacgactgaatgcaatgtttattttttgcttttcgctcatgtaacctttatctatttacagcgtgtttaaatcccataataaagttgaatgtgttgttcgaatggtccaaatataatttattntaattgtttgaccttcagaccttacgcatacttagaagggtctgattcctattnttttcgattttgtgcctcttttctgaggtgttattcgatgga

SEQ ID NO: 29132 - DNA, 401 bp, Glycine max
  unsure (1)..(401): unsure at all n locations
tctaatactttgtcacatttctcttctttntcagcagaagactctggatcattntaggcatattatcttgctatcttcccctcaggttttcccttgtcttgtgactcttaaaatcatttttagacatgccttttactgccacttcttaacttgcatttaaggtataatatgggtattttaaattggatttgattgactgactctgatatataaatacatgtgatgcttgatcatctattattacataataaaaattacgtgtcttatgatcacggcgcatctgaaatgaatccaaatagaaaataggcttaaataacttttagcttattgaaatatacctaactaattnttgttttaagtttttgaataaaaaaattattgttatgagctntngatatatc

SEQ ID NO: 29133 - DNA, 441 bp, Glycine max
  unsure (1)..(441): unsure at all n locations
agcttagttatattatatgctttgaccccttcttatcanttttttaaaataatcgaatgaagtggacaatttgaacaacaaatttcatgtggtaggtcatcaacatatgtacatgtgtagatttctcaatgtgctgaggatgtaatgtagcctcggttattttgtttttaacaatgttagtcctgcaatccaaattcacaggggtgccttatggtgacatactcaaggtcaaagagactagctggngaagaagggtctggggattaattagattaggtattgtttggtgaccataactaaaagcaattntacattgagaatttagaagcgatgcctatctcataagttcatcgtgtagtactataccgtccatctgaatccaacaaacttaggacttttttttttggggaattaaacttaaggacttattngacacactat

SEQ ID NO: 29134 - DNA, 384 bp, Glycine max
  unsure (1)..(384): unsure at all n locations
tcttcaactcaccaatgtcatctggtaatctggacagacttacacaatctgagatgtcaagacagcttagcttgttaagccctttaacagaatctggcatctctaccaaatcagagcaagaacatagccttagcacttccaaattctccagcttcgcaatatcttgtggcaatgcagatagcctgtgacagttagtgatactaagcttcttcaatggggtgatgttactcagcccatcgggcaatttaaccagatcattacaatagtcaatgctcatctccacaagatttggcattgcatctgagatttggatagaacagntttcaaaagcctgcctcgtattacacatatgaagggacaattttcgcagattcttcaatatgc

SEQ ID NO: 29135 - DNA, 441 bp, Glycine max
  unsure (1)..(441): unsure at all n locations
agcttcttttggaccttgaacaagcaactaactcctctttcagaaccatgctatgtgttcgcgactggtccctctcttcccttcgcagcttgagttcactattgctaccccatagagctccgcgaaatttattccggccatactcttccttgtgagccctcttggtctcttgttcaagggcccttgtggtagttgcattctcttcccgtaacccggcacactccttccgaatgtgtgtagcggccaacttgaacttctccttggcaagtttcgcctttcctaacatcgctttgagagcttggacttcttcgtcctcttccggtgcctcaaaactctcttcgctgacgacttttaacttggcgagccaatctaaacctcgtatatgaactttcagccattcatggtagccaccaatgatngccatacgaatgcctctaagtt

SEQ ID NO: 29136 - DNA, 423 bp, Glycine max
  unsure (1)..(423): unsure at all n locations
ntgatctaccaccactgccgccaccatcatcttagttttctattattttatattactagtactttgatttccagccttgtatttggctatattattaagatatttgaacaatttactatttctttatttgcatggtatgtttgaacaaatattaattatgttatttgactatgtggtctttatatatttgaaatattcatggttcttgcttcatggatcttgcttcatgatttggtttatatttttccatgaatgttgtgtggatgcttagttgtatttgtatgcctcaaacttgttacgcactttggctttttgttgatgccaaagggggagagaaatatggattaaatcaagaactcacatgagtaatcaacttaatttaagagaacataaattcaaaacaaaggggagaatggaattatg

SEQ ID NO: 29137 - DNA, 423 bp, Glycine max
  unsure (1)..(423): unsure at all n locations
tagcttctatataagctgataccatttatcaataaacacaagttgagttttattcagaaaattagagtttatctcttttatcttagagagagtgattcaagaacaccctggctgtatcaaaggactttcacaacctatgtgtgttgccctcgccggaaagagtgattctttccttcctttcatattcaatcttgttctttcaaaccacaattccagaaaatccacttctgcccagaattatctcgtggccataactcccattttacgcactcaaattaagtgattcttgagcctaaattgaatttcaaaatgagacctttcacctcgttttggaatcacctcatatggagccctgtagcttgagttattgtcatttctatatntctgtccagccaccacttaatcaatttccgcattcattaa

SEQ ID NO: 29138 - DNA, 404 bp, Glycine max
  unsure (1)..(404): unsure at all n locations
ntntntgttcgatgttgcctaaaaaatatacaatgcagttcggctaggtttcttcgtgcgaactgaaccgaagttgtgtttcggccgactggcatgttctcattttgtcggccaggaaaacattagcccacctcggcataaaaaacatgattcaccgatatttgacaggaaaagaaaaatgctagccgacgtcggccaggaaagatgaccgaccgaggtctgaaaaagaagcatgaccggatgactccggtcgaacatttcctaactgatatcatccaagtattattcagggattgaatagaaaaaacaatagccgacatcggtagttaaatagccgtgactgatatttttcggccgacattgcgcaatttcttgtacaaacgctggccgttaatatttcttta

SEQ ID NO: 29139 - DNA, 455 bp, Glycine max
tcgtacccgggttcctctcagtcacctgcggcatgcaagcttgataccttgcacacaagcaaacactaagcataatatctggttgacttgcagttaagtaaagaagtgaaccaatcatacctctatactttgactcatccattgatttaccgttttcatctaagtcaagataagtcgatgttgtcattggtgttgatgcttctttgcactttttcatgttgaatttcttaattagttatgtacaatattttgtttgacataggaaggttccatgtttcatttgcttgacttgaagtccaaggaagaagttcaattctcccatcatagacatctcaaattctttctgcattagtactggaaaattccatacacgaagtttcattagtagcaccaaagattatatcatcaacatacatttgcacaatgaacaactcatttgttaatctcttgataac

SEQ ID NO: 29140 - DNA, 417 bp, Glycine max
  unsure (1)..(417): unsure at all n locations
tataannttttattttagaccaaaaccaaattattaacatctaggtcattaatgagttgatcgttatttgactagagaattttctcttaattatccttattctttctatactttaacttaaaaacttaaaagtttaaccatgcctaggtatcctatggtaacatctcatttttcaccatttcaatagtctaaaaatactaaacaatcacataacaaagcaataacattgtctaccacacacatggaaaatttggatgttacaatgtgtacgtaccatcgtgaacatttgttatttttctcattctctctttgtattacgtacattatatcatattatactcatactactatntttcctctnttgatacatatattactattagtgtactaacctcccttgggatatatgtacttata

SEQ ID NO: 29141 - DNA, 359 bp, Glycine max
aaggtggagaatttgcttgaaaaccttgttgttgtgcttaaagtgcgatttgcagaagatccacaaattaatcaagtcttagaaactatagatcacgaggtatgaatttataattcaacttattcaacgatttaactatgatatgatactttacaaagaaaaaacattcttttaatttaggtacctacaaatggttctactagtaaaaatcatcaaactacaaacaatctcaactagaggtgagttgaaatttaataattaatatgttgacaataccattattgttagcatatgggataacttgtagtgtatccgtactatctatgtatgtagtaaggtgacatttaataattaatatg

SEQ ID NO: 29142 - DNA, 399 bp, Glycine max
tccatcattaacgcgtgcagagagggtcaaaatgtattatttttagttaatatattcctttctagaatgttgtagaaaataagtaattcagtttctctaataataaattaatgtcatgattgtatttaagccaattaatgctaaataacaaatagacaagcatttcatttggaaagcattctccaatagctatactttttaaggaataaaggtttaattgaagaatccatacatgaacattccttgattaaatttgactgaatccatcttcactcgaacataacccaattccctaccagctctaggagcaattgtgaccaacatctaagcaataaaaagccaaaacgttacatttcttgtcagtaacagtcatataacgaatattcatagaaaaaacct

SEQ ID NO: 29143 - DNA, 483 bp, Glycine max
  unsure (1)..(483): unsure at all n locations
ggggttgcnattgaacctgcgacccnttgatactctactcgacccgggatcttaagcactgagctgcagctattcaacaaggtcactatatattctgcaatctggtactgtgccatatatatggatggtggctttggacacttggatatgtgtagtcgctgtaataacaatgatgcttatgcctttggcatgggtttggactatctgtggtggttttggacacatgtatattatgtaactgggttcattttattgctacatgtgaggtattactattctgttnttaaagccattgcgattcctttttaattttttgcctaaagtttaaaggtgacaccgataagcatttgaaatcggtaacattccacctgaattgtgaagaatgtggggccttgaagctcaaacccgctgatacaatttaaaattcttggttcaaagctttggcatccgtcaaaaccctcttcctccgggactcacaccccg

SEQ ID NO: 29144 - DNA, 413 bp, Glycine max
  unsure (1)..(413): unsure at all n locations
tcttgcgtagccgctcttggtgctcagaaaatcccaataacaaatccctcttattactagctatgttgaattctttagttcctgaatgtacaaccttcaaattgttgctcgttcccctatttcttttctgcaaaaaagaaaatcaaatgctgtcaaaacatggatgaagtcctaagaaaatcaatatcaaagaaaacatggatgaaatcacaattaagaagcacaactacctatctttcagagtcctttggttaatttgtcttgtctccttatgtggtggggttgtgtttaataatcttatanctttgccttccaaanaaactattcattaatcctcttttcggtaatccaattttgattgtattgtataaaagatcatgggtcttcacctggctcactacttcttctctctc

SEQ ID NO: 29145 - DNA, 287 bp, Glycine max
cattcacttttataccccctttgacgtgcttaagccatttatttaagtcatttctcgcttaatctaaaaataagaaaaatctccaccgatcggttgaattgtatcatccgttaattttggttaaaatgaattccaaccgttcggtcgtgccgtaaccacgttggaaatcaaaaaagaggtaaaataataatataataatcaaaagataccttgtagtaaaataaaagcgaaagatcaatcggacgttttctctttgggatatctcattcttaattgaattgactaat

SEQ ID NO: 29146 - DNA, 379 bp, Glycine max
  unsure (1)..(379): unsure at all n locations
tgtgcattcaatatcctgataagggtgttccatatgttctcaagactggactaatacattngctgcccaagtttcatggtcttgcaggtgaagatcctcataagcatcttaaggagttccatattgtttgttccaccatgaagccgccggatgtccaagaatatcatatctttctaaaggctcttcctcattctctggagggagtggcaaaagattggctatactaccttgcccccaagtctattttcagttgggatgaccttaagagggtgttcttggagaaattattccctgcatctatgaccactgccatcagagaagacatttaggcatcangcaacttactggagaaaccatgtatgagtactgtgaaagattc

SEQ ID NO: 29147 - DNA, 240 bp, Glycine max
tatgataatcaccgctttatgagtgctgtacaccaacagcgcttcgaggccatcaaaggatggtcgtttctccgggagcgacgcgtccagctcaaggacgacgaatatactgatttccaggaagaaatagggcgccggcggtgggcatcactggttactcccatggccaagtttgatccaaaaatagtccttgagttttatgccaatgcttggccaacagaggagggcgtgcgtgacatg

SEQ ID NO: 29148 - DNA, 399 bp, Glycine max
tgtctcagcgtttatgcgagacggagaccagcatgctagctatcatcgccaagtaccaagaagagttaggtctagccacggcccacgagcatataatcgcggatgagtatgctcaagtgtatgcggaaaaagaggctagaggaagggtgatcgactctttacaccaagaggcaaccatgtggatggatcggtttgctcttactttgaacgggagtcaagaacttccccgattgttagccaaggccaaggcgatggcagacacctactccgcccccgaagagattcatgggcttctcggctatcgtcagcatatgatagacttaatggcccacataattagaaatcgttaggaaacttgtatggtctctcagacctcgactagatacgacttcctttttg

SEQ ID NO: 29149 - DNA, 248 bp, Glycine max
tgcatcctcgtatccattggtttgtttgaactgcctattcttgcgataaattctgatacaaagtggtaaatgtaagatgcttaatagggtgaataaaatcaaccttcggtctaagctaattatgaccaatgaaaatgctcactttataataattataataatacagttcacagattcaccccttacatgatgctaatcttaccagataatacttattcatattcagggagacaattgatgctatacac

SEQ ID NO: 29150 - DNA, 381 bp, Glycine max
tgaaagcgctggtgatccttgagtccaacctttccaatgaaaacgcagtattataaaacattagaagtggtaataactatatgcgtacatgaaaataagtgggaagcaaagattgtaaaaaaattcttccggaacgtaaatgatagtcacacttgaaaattcatcgacaaaagtgtcactaattacaaatcattatttagacataactaccatcttagaatattaatccacatccaaatttataatatgataagtgacaaagcattgacacacctaagtgcaatatgaactacagccggcgagttatcctattataactatcacttcgcgccttgatctataatgatatactatacattagtattcctgatagtgtatgaa

SEQ ID NO: 29151 - DNA, 395 bp, Glycine max
  unsure (1)..(395): unsure at all n locations
agctntangactcgcccnccattccttatattcagaaataatatacaattcaagaatttctctttgtcccttaatcatttctaatttctcaaatgggcaatgcagaaaatgcttatttcaaacatatccaatatccatctcctcaaacaacctccaaatgttcttaatctccaaaagtttaggtaactaaaacaaaggatattttttaatatgaagatatgaagaaaaattgagattcctatcatctagaataaaatcgaaaatagggtgtgcgagcatgtttgcacgggtggacagacattacaaatatctcacgacttaacttccaatctgttaaaagaatgtaagtcccatcataaatcacatgatagtcttttgataaaagaatctaaatc

SEQ ID NO: 29152 - DNA, 388 bp, Glycine max
  unsure (1)..(388): unsure at all n locations
ntgaaggtttttaaccgctgtggaatgtgagggttgtggttgtgggtgacactgagggccctccaaagtgttttgcaggggtataccaccaactgcttgcccttcagtggcatatccaaggcaaggctcgaagtcggctagattgtggtggggcattccatgtgtgtcccccatggtttgagagatatgtgcttgagtttattggttctcaatgagtatcggagtagagttattgagattttcattgggaatgtacgccacattgggtggtgtatagtttgggaggcaagccatatggtgggaaggcgtgcttgttttgaatttgcacatcatggagtcatccgtacttcctaaatctttgcctaccatatntgaggttggatgattc

SEQ ID NO: 29153 - DNA, 326 bp, Glycine max
  unsure (1)..(326): unsure at all n locations
gcttgtgaccatttgaataactcaagagcttccattgttcaattntgagcgtcttgatatattatgcgccttaatcggacctgcgagtgaaaagttatgaccatttgaataactcaagagcttccattgttcaatttcgagcgtctcgatatattatgtgcctgaatctgacctccgtgtgaaaagttatgaccatttgaatttctcgagagcttccgttgttcaatttcgagcgtctcgatatcttatgcgcctgaatcggacctctgagtgaaaagttatgaccatttgaattactcaagagcttccattgatcaattacgagc

SEQ ID NO: 29154 - DNA, 355 bp, Glycine max
  unsure (1)..(355): unsure at all n locations
ttttggagtagaaacatgggaccaactcattttatttcataaaggaagtcgtatctagtcaaggtcttagagaccatacaagtttcctaccgatttctaattatgtgggccattaagtctatcatatgctgacaatagccgagaagtccgtggatctcttcgggggcggagtaagtgtctgccatcgccttggccttggctaacaatcggggaagttcttgactcccgttcaaggtaagagcaaaccgatccatccacatggttgcctcttggtgtaaagagtcgatcacccttcctctaccctctatttccgcatatactngngcatactcatccgcgattctatgctcgtggg

SEQ ID NO: 29155 - DNA, 417 bp, Glycine max
gtaggaacacgatatggagcttatgagactaaatcattatgaataaaataacaaaaaaagaagagaggaaatgcacttaaagtcgcatcttctattcaagaagaaaatgatagagaatacttgaataaaatagaataagatgatgattgtagtttcttcataacgagattcaacaagtttctaaggaacaaaggagatcaaagaagaacaaacttcaatccaaataaaaaagaagacttttcttctgttccacagtgctatgaatgtaatcaaccttgacatctaagagttgattgccctaatttcaagaaaagaatggagaagtctgacaagaaaaatttcaaagacaagatagcacagaaagcttacatcacttgggaagataatgatatagactcatcatgagattcagaaaat

SEQ ID NO: 29156 - DNA, 365 bp, Glycine max
  unsure (1)..(365): unsure at all n locations
ctgcaagcttcggatttggaccacatgtccacttttgggtttgattatntcttcatttgtatatgtcacaattggccaactctaatattttaatctttagtatctagtgcacccctctaattaatgtttgtaaccgtggtaggtaattgaagacaacaaagtggggaagtttctatgaattaacatgtggatcgtgtcttagcctagccatgtgcaacattcttcatgcttctacgcccaaattgtagcctatgattagtgccgtcatgcatcacaagtgttaaagtgccctagttagtatatagactagaaattcttatgaaattatcaagaataatgctatatatatatatatattatagaaa

SEQ ID NO: 29157 - DNA, 370 bp, Glycine max
  unsure (1)..(370): unsure at all n locations
ngcatattaaattaacaaaaaaaaatgaataaagtgaaaatgacaacgaagaactatattgcttatccaagagatatcagataaattaatgattgagaaattaaataactttttttttggatcagctaaaaattatatcaataatattggtacgaagtacataaacagtgtatatattacatgcatgacagccccaaacctaagatgtcctttacattatagaacccagaacttacaactaacaaaaaaatacactcttttaacactaaataaatccttacattttcattttatattatttgaaaaggttaaaaaggaccgcttctttaaaagttgtgatagaaaaagagaaactgaaatctaacttgga

SEQ ID NO: 29158 - DNA, 297 bp, Glycine max
  unsure (1)..(297): unsure at all n locations
tagaagtaagtcaaaactttaatgttggagatttattttggaaggttatcttgcctacggatagtaaggatcgagccttgggcaaatggtccccaaattgggaaggaccgtttataataattcagatctattcgaatggtgcttatgaattataggaattaacccctcagaaacgtactttgagaataaatggtaaatatttgaaaaaatataaaccaacanngcncgaagntaaaataagcatagaatagacaaataatggaaacataaaaatggcgataacagtaaaattgccat

SEQ ID NO: 29159 - DNA, 355 bp, Glycine max
  unsure (1)..(355): unsure at all n locations
atgaatggagggagagggagaggtagagaanaagcactaaatttatgcctcanataaggtctgaactntgaagtgtaattctcaaatgatcaaagttgaaaaaatatatacacatgacctttatttatagcctaagtgtcacaaaaaattaaagggaaatttgaacacttgaatttgaaattgaatttgtggagccaaaatttcacaaattgttgtgtatcctacatttaaagatgcctgttttgcattgggctttcttcaagatgataaggaatatgttgaagcaatttaagaagcaaaaaattggggtacaggtcattactttataaaactttttgctacaatgctaatcaca

SEQ ID NO: 29160 - DNA, 450 bp, Glycine max
  unsure (1)..(450): unsure at all n locations
tatcagaacaaaattgcctcaatcatatccaaatatgcatgtgaattatgaagcatcaacattaatcaagccaaggctattgtgcaagcaatcaatggggcaaaacacaccaaatgattatgatgatggatggctcaaattctcacaaaagtaaactcatcactntcaaattgagctttcaaaactatcatgacatgtagaggagaatcaaagatttcaagtcacaaaatgtcaaaaacttttattttcaaaacaattacccatttcttgaacatatcctatgattcaaagaaaaacatgcaaagtcatacatgcgcacagaattgacccaaaatataaaactaaaaatccgacgaaactaacaacatttaacaaataacacaactaacaaattaacaaaaccaacataactaacataaacaaaagaacacttccccccatacttaaaca

SEQ ID NO: 29161 - DNA, 397 bp, Glycine max
  unsure (1)..(397): unsure at all n locations
tctcccctatttgctataaatagggggagaagtgaagaagaaaaggttcatccccttaggcacttctctctctctcgaaattgctaaggaaaattatttccgtgaagaaaatccaagccgaggcgcttccgtaacgtttccttgagtaattacgcgaagattctcgaccgttcttcaagatttatcgttcgttcttcgttttcttcagtcttcaacgggtaagtacctcaaaccaagcttttcaattcattctatgtacccgtggtggtccacattttgtttcatgtatttttattctcgctttcatctgctnttcatacccccttttgatgtgcttaagccatttatttaagtcatttctcgcttaatctaaaaataaaataaatttccactgatc

SEQ ID NO: 29162 - DNA, 437 bp, Glycine max
  unsure (1)..(437): unsure at all n locations
agcttatccaaaggatagttggatcatatagtgatcgaatgtcacaacgttgtatcctataagaggatagtacgtgctagtttcttctctctccctcactttccctaaacaaactcgagtgtgaatcatcactccagatttcatatatgaatcagcaatacacccttactccctaagctatataagacagaaaatgtcaaattttgctgtccaataattgcataatcaaacaatttgaagcaaaagagagatttttgtgcttgtcccaaagtgagataaacttttttattgaatatatacccggatttaccagaacagtatgtgatcactaatcaccacaagataaattacaagtacaaactgcaaagcatntatagcttactaagactcaccaaacttagaataaaagtcatttcatttccccatatagaagctat

SEQ ID NO: 29163 - DNA, 436 bp, Glycine max
tgatgatcgatacaacagtcaacagctgataaagagaaagcataatagcactgcaacgattcaacatgcattgaaaagacacaagtttattttccaccgacgctggtagtcttcgaacacattgacattttgttgcacgtaacataccatgacgagattgcaaagcaaggccatatatataataacttgcatgggttggaagggtatcacactctaattaagggcacttgcgtctgccaccgtgggtggtgagactggcataacagggacacacttcttggttaccggaagttcccggtggcacgcagttgcagcgtctgcagcaagttccacatgctctgtgacacatgcgttgacgagatgctaaacggcacctcgcagcacatgcagcattacaatctgaaatcaattcatcattcaagttagtaattagttc

SEQ ID NO: 29164 - DNA, 433 bp, Glycine max
  unsure (1)..(433): unsure at all n locations
agcttctagccaaatggacttaccttgaattaattcctttgatagcccttttgagccttgtttccctttccttgttttgaagctcactacaagccttaagtgaaaaaccatgatattaccatatccttaaggaattttggagctttggaattgttttgggaataagtgtggggggtttttgtttcattggacaacttgttttgttggctatgcttcatgatgtattttgggccatacttgatgtacattgtatattggttaaatgatggacatgttgaatgaagtgttgtttctcaaaggctaaagagttcaaaaaataaaattcgaataaaaagaaaaagacaagcaataaagttgagtgaataagatcttaaatggcacaagaatgatgaaactcttgngtctcctcttcatgttaaattttatncttact

SEQ ID NO: 29165 - DNA, 458 bp, Glycine max
ctcagcttacagcaatgtactcaattattcttattaattattattttgaaataaactaaaaagttaccggggggtcaagatatgtaataataatagttttttgttatacatgcctatgcttctagatgttgaatatttaatggctaatcacttgagtgttgagtgtgttcacttggaggcatgtggtggataccgtgatgtgtcatctgtcagtacttgagcccacatgtactgatattaataggagggatttcatggaatcttgaaaaaaaaaattcctcattttttaatatgttcgtactaattaaattctgactcaaaaaacaagtatctaaaattcaactcttttttatgataactattttgtacagtgaaaaatatgataacctaaccgttgtgtatgcatgtctcaattatagaagtataatattgattatatgtatattctggttttcacg

SEQ ID NO: 29166 - DNA, 331 bp, Glycine max
agcttaatttattgaaaaatgaccgtgtgggattttccctggactctactaggggcaatattccttggcaccctttaatcatgtcaatttgttggtaagtttaggtcttttaatccaaaaaaagaaacttggttaacatgtgagagtaatttggataaatgaaaatagttttggatgttatatgcatgagtatttcaatgcttgcactactacgaaagtgtgttttttatgacaggtgctctacttttgtaattatgtgtctgaaaaatccttttatgatgcacattctaagacgggtatcgaaaaccggctttaaatgtgtgttcctcat

SEQ ID NO: 29167 - DNA, 385 bp, Glycine max
  unsure (1)..(385): unsure at all n locations
atgataataaaanatagaactttccattattatgacacgttaggaaaattaaagcattcacttaatttttaaatgtcaactttttagaatttcacttgccaaataatgatttggaatggaaacaataaatggcatcaattcccatagtgggaaagggctttcttattgttctagtctgccaacccatagctttacagatcttaattacattccatttaattacgttacttcacctctatgatttagacttgtataaatctataatatcctttttcttcttggatctgaaggagatctaaaacctgttgcggngaggctatatgggaagagcaagccaaagtggtgcaaggtgatctatgcacaaactactcacattttgagagtt

SEQ ID NO: 29168 - DNA, 348 bp, Glycine max
  unsure (1)..(348): unsure at all n locations
cacctgcagctgcagcttattgtgtaacactcgtagtgatttaatatacttcctatcaaacacatattgtttgtggaagtttacagtgacttagtgaccaagaatacttaagtcttaatatcaagggaagattaagtgtagtggcatgagttacctatagaatacttattgtacccagaagtggtatagagaatacttgattgtaatcaaataaattattagtggaaccctacaagggttgaaggagaactaaaatgtacccttagttggggtgaaataatatanaacctctgtgttctttttactatggctatataactagttcttttctatcagctacttctacac

SEQ ID NO: 29169 - DNA, 379 bp, Glycine max
  unsure (1)..(379): unsure at all n locations
ntgtgtaatcgattacacttatttggtaatcgattactagtgtttgtttctgaaaaatctaaagatgtaactcttcaaaaaggttttgactttttcaaatgggttttaagtttttctaaaagttataactcttctgaatggccttcttgaccagacatgaagagtctataaaagcaaggctttgttttgcattttaaattaatctcttacaatcctttacaagccttgaatctctttgaacttcttcttcttctatgtaccaaaagctttctgaagttttttggttttccaaaccttgaaaacttgtgttattcatcttttcattctcttctccatttgccaaaaagaaatcgccaggactaaccgcctgaattctttt

SEQ ID NO: 29170 - DNA, 483 bp, Glycine max
  unsure (1)..(483): unsure at all n locations
ttgaaccgtgtaannnaccgattgataccttggtcggacgtcgtgatcctctanagtacacctggaagcgtgcgagtcttggataggatgcctcgatggangattattgaagacgggacaattatagagaggggggagcacgatattgatggaagacaattggcgagaacatcaactgtgagtagtgtctcccaaaatctcattatgaaaggtacaaccagtgctactcatgcttctatttatagactaagtagcttccttgataagctctcttggagaacctcctggaaagcttctcttgagagaacttcctgagaatgctcagcttagaacacacaccccactcattactaacctccctccctggaagcttgcttacaagattcctaaaagctaagctagctaccatgtctctctatgccagctcacctcctggatgagactagagctactcaccccctataaagctagctcacccatgag

SEQ ID NO: 29171 - DNA, 364 bp, Glycine max
ctttaacccgcttctaaatgatatgttcggaatgcagtttaagaagcaattatcaatttaataatgttctttaaacatgcaagacaaaatttattgcaataataaatgagataaggaaagagagaaatgccaacttgatttatactggttcgaccacttcccgtgcctacgtccagtccttaagcaacccacttgagatttttcactctctttgtaaaaatcctattacaaagtctgaaccacacagggacaatccttcccttgtgttcagcaattcttacaacttaagagaccctcggtcctttaatcaatctctttgaaaagatgaagaagacaaactctctctttatgagaaagatattac

SEQ ID NO: 29172 - DNA, 391 bp, Glycine max
agcttgagtcagttgaacacttcaaaatggcagaattcctgaacttgggttggacctttatcttaaaggcaagcacataacccagtagcttatcaagtgcttggggtgaagcatttaaatcaacatcaccatccttatgcaaagagaataattcgatgcataaaaaaacaataatggtattggatattatacaaacaaaaaataacatatcaaagcaaaagaattgcttttgaatccaaagacgtacttcaattttaagcctattatttgcatcagctgattgaccaatcaatttagtgcattcacggtcccaaagcaagaattttgtgctttcatctctgtggttaaccatcacctcaagcctatacctagtaccatatataacaacaat

SEQ ID NO: 29173 - DNA, 371 bp, Glycine max
cgacactataaaactaagcttcgaagaaggatgagtacttccctaaggcagagcttgaaagagcccgagtagtcgaagagaagttcaagtccatagccatcaaagtctgaaaagagtatgatgaactaagggacgtcaatatggccaccactgaagccttggaatgagaaaccaagaaggcccgaaaggaagaacacgtgccagcaaagttttgaggggctttatagggcagcaatagtaagctcaagctccgaagaggtgaaaggaatcatcacgggtcaaaggcatgatcttgaaggacgagctaaaggcttaccttatgtcgaaaagaaatttgtcccaatagttaagcgagactgaagggaatatgt

SEQ ID NO: 29174 - DNA, 349 bp, Glycine max
gggcagagcatgtgccactgatccatccacaagacactttatgtgcatgattgtatattctttcctccggtattggtcaaaaagataaacaaatatgtatgaacccctgcttcaaagtgctgaatacattccccctctgccctttcctctagaacacgccaaagtaagaacgctaggcctactggcagaatcagtgcaacctgcgcatgtgtatcctgccaatagcgaaatcttttggttggtaaccgcttttccattccgcctgtacaagaacccttctagagtaagtttacaaagagatcgtctgaggacaaaaatttctaaaccgcgaaaccctttaaaaaacaaa

SEQ ID NO: 29175 - DNA, 402 bp, Glycine max
  unsure (1)..(402): unsure at all n locations
agcttgcctcaaagaggtgcaggaaggtcttgcagccgaaggaactagttccgctccggagtatgacagtcaccgctttaggagcgccgtacacgagcagcgcttcgaggccatcaagggatggtcgtttctccgggagcgacgcgtccagcttatggacgacgaatatactgatttccaggaggaaatagggcgccggcggtgggcatcactggttactcccatggccaagtttgatccagaaatagtccttgagttttatgccaatgcttggccaacagaggagggcgtgcgtgacatgagatcctgngtaaggggccagtggatcccgtttgatgccgacgctatcggccaactcctangatatccgttggtgttggaagagggccaggaatgtgagta

SEQ ID NO: 29176 - DNA, 423 bp, Glycine max
  unsure (1)..(423): unsure at all n locations
tactcaagcttaggttgctcaattgctccaggttgctgcatggaatggcaatggtctgtatggtggtcagcagaggagcacaaaccacaaacccttgtgacaggtacagatttctgattcaaggccagctgggttaccaagttgaccaacgcatccagtttgccttcaagcttcttagtttcagatgatgcagatgggtttgtagctacctcatgcactcctctaatgactatggcatcatttttggcgctaaactgctgggagttggaggccatcttctcaattaaatntctggcttcagcaggggtcatgtctccaagggctccaccactggcagcatctatcatacttctcttcatattactgagtccttcatanaaatattggagagaaagctgtctganatctgatggtggggcaact

SEQ ID NO: 29177 - DNA, 420 bp, Glycine max
  unsure (1)..(420): unsure at all n locations
cttctagtaatagactgangtatggtttatatatcctcaaaaccgactctaacagcatgtgtcacaacttcagatgccttttcgaagccattagcattcccattgttgaagtttgaattcgtcactacggcaccaaatggattggcagcaaaagaattatcacccagagcgtgctttctaagaccaaaataaacataaaaagtaactacctaaaacagctggggattcaggaagcanaaattatagcatgaatagatcaagacataagtggaaatgaagattacaacaaagtacaccaaaattcatcaattagcatgcaagctacccattacatatcagtaattcagtgtttaaataaacatcagcatatgacagaccctattaaaacatgtcattatgctgagtcagttgtgcttataa

SEQ ID NO: 29178 - DNA, 338 bp, Glycine max
tgggtgttgcttcttgcatacgccttttcacttgtataccattactactaatattacttcttttcgcgtttttagtatttcttcgataaacattacttctttcgggaagtaaaatctggaatatgtatctgaatgttggtataatttctgaatattagttctcgcttggcatgacattggtacgaaataattatcgactttattgatgattaatctatgtaaactgactattactagtgggtcttttttttttaatcacatatattttttttcattcataaagttcgaatccgatatcttgcttaataagatagaattcagccattcacattcatgac

SEQ ID NO: 29179 - DNA, 389 bp, Glycine max
  unsure (1)..(389): unsure at all n locations
ctaatgaaacanacaaaagcataaccctaatccataacaatattgagaagaanaagaaattaatgaagaacctgtgatgctaacaaaggaagaagaaaaaatgacgaatgatgattggaagagatgacgaaggagatcggaagcatgggagaaaaattccgaggaaggcacagcacggcaagttctcatgaacgagagaaaattttagggttcagaaaaatgaggagggtatgcttgtcattttgaaattntcttgaggacattgttgtccaagttttattntgggatcagattcccganaaggagaattgagaagctgagaatctaagcttgagaggaagatctgctaagagctnttgcttttgtaaaagttaaaaaaaaaataataa

SEQ ID NO: 29180 - DNA, 385 bp, Glycine max
tggaaggatgcttcaatggaggataagagagagggatagaaagagagagggggaggacgaaattgaaggaataaaaagaggagagaagcggaactatgaagtatgtctcacaagagtctcattcatcaaagttacaacaagtgttacacatgcttctatttatagactaggtagcttccttgagaagctttcttgagaaaacttccttgagaagctatcttgagaaaacttccttgagaagcttctttgagaaaacttccttgagaatctagagcttagctacacacacccatctaaaaactaagctcacttccttgagaagcttccttgagaagctagagcttagctacacacacccatttaaaaactaagctcactttcttga

SEQ ID NO: 29181 - DNA, 449 bp, Glycine max
  unsure (1)..(449): unsure at all n locations
gctagcttctgcacttagctcccttaacctcatcactgtacctctatctcaaagcattgtggacttgtttttggcacctatgatttttctatcttttattttactaactgacgacatgtattcaatatgactacaagtaggcctgatccaatttgtcaagcattacagcttagaaagttgacccttcaatcaaaagaaacttgctatttacagccccattntcctaagtacaactcatcccttctctttagattttaatcatccactatatcatttttccttaaataggtacaccccttgtaacccctcttcttctcttccataaaccccactcttcacaaacatactcctacttatctcctatcaattggtattcatttctttatacatcttactagcacaataagccatgttattttagaaagacattttcggtggtagtaaaacat

SEQ ID NO: 29182 - DNA, 435 bp, Glycine max
  unsure (1)..(435): unsure at all n locations
cttttccaaatctcgtcctagtgtgtgttcctaccacatcatggcacatgttgaaggtgtgactatctgttatatatattttatttatatatgtgcgtgtacacagtaatagttaatgttatagatagtaaaagagtgcatgcttaggtgagatgagctaataatctaggcacaattaaagttcanaagatacttatcattattcattactttaatacattcttgttaagcttgtaagttagttgtgtacctattatcactctgcatatgtgaaaattattctttgaaattctgaatgtggtttcaaaaaggtttcaaggccttggtgggtatccaaaatgttgtatctctgatcgattaggaatcagaatcaagaagcaccacactacaaaggaagcatgggaatngcttcaattggagtttcatgatactgat

SEQ ID NO: 29183 - DNA, 387 bp, Glycine max
catgcacttacacagatttagtaatgacccactaacctagaattaaaatatcttaatgccattaacctagagaattaaaaaaaaaacttaatggctgagtgtaactgaaattgtggcaaccaaaagtcacccccaacagccaacaagtcagccaccatttggtctcccaaaaggctgatgcctaggttgccaattgggcccttattacaacttgaactaaacctaactaaagcccttttagttgattgacccaaaacatatttttggtcagccaactttacaaggattgggccattatttagacaaactaaacactctaaaattgagacaaagtggtgtcatttagtcctcctccatttgggccatgatacaactcacaaccttgga

SEQ ID NO: 29184 - DNA, 428 bp, Glycine max
  unsure (1)..(428): unsure at all n locations
atgtgaagctcctgttntagctntacccgattatactcatccatttgaagttgaatgtgatgctagtggagttggcattggggctgttttgatacaaaacaaaaggcctatagcttatttctcggagaaattgggaggagccagattgaactattgcacctatgacaaagagttctatgccattgtgagagctcttgatcattggaatcattatttgcgttctaatcactttatattgcattcagatcatgagtcattgaagtatatcaatgggcagcagaagttgagtccaaggcatgctaaatgggttgaatttcttcaatcttttaatttctcttcaaaatacaaggatggtaagagtaatgtggtggctgatgcactttcaaggaggtatgctntaatttcaattcttgaaactcgtttacttg

SEQ ID NO: 29185 - DNA, 330 bp, Glycine max
catgcaatcaatttagatcagagtttatcattttttattataggacggtcatttactctttcttgttccatctcttcaccctcatttttagattcttaaatttttgcatgagcacaaaacctgcccatcctggttgcaattgagagttccagcattggtggacaactttcttaaaggatactatccgagagccagcagtctcagactataaaatgttgagggccccaatctacaacccttgatctataaagaatatgacaatgatctgtaaaggtcccggccagtgtcttttgacacttgcaggccatctattcagtcatttcggggaaa

SEQ ID NO: 29186 - DNA, 447 bp, Glycine max
  unsure (1)..(447): unsure at all n locations
taagttctaggagagcattcatccttagataaactctttcctttntattttcaacttcaattacttgccttagagaacttagcttcactttttctttagataatagcacacacatttttatttttaatacttacatttttttattataaaaaagcactaaaaacagtagctctttacttgctgcttatttttgctgtgtgtgctgttattttcttaccattagaagctattaccaaataactcccccaaatttgggacaaatttgctttgaaccataatgctctcctacaacctaagacaaggtagatggagatataatccataggctcaaggttcaatcaatcaaattttcagctcaatcatgggtgcaaaggatatgatattcattacaagggaagctntttggctaagtggctaattcacacagaacatgggcttcatcatctt

SEQ ID NO: 29187 - DNA, 328 bp, Glycine max
  unsure (1)..(328): unsure at all n locations
agcttcttttggaccttgaacaggcaactaactcctctttcaaaaccatgctatgtgctcgcgactggtccctttcttcctttcgcaacttgagttcactattgctaccccatagagctccgcgaaatttgttccggccatactcttccttgcgagccctcttggtctcttgttcaagggctcttgcggtaattgcattctcttcccgtaacccggcacactccttccgaacgtgtgtagcggccaacttgaacttctccttggcaaagtttgcctttcctaactcgctnttgagagcttggacttcttcgtcctcttccggtgcttc

SEQ ID NO: 29188 - DNA, 243 bp, Glycine max
tcaaccttaggtgctcatttctgccccaaatcgtgaattgagagcattttcggggtcgtgaagtgcgtggctaccagtgggacttcgaaaattcaggtttgggcggacttctttctctcttaaatatcgtgggtatggcgttttggggagatatgatgggtaatcttgctagggttctgctgtgtgacgattatttgtgaagacatttgttgaaagcttgttgaaattgccatgtttggatga

SEQ ID NO: 29189 - DNA, 389 bp, Glycine max
  unsure (1)..(389): unsure at all n locations
agcttcaacatcggtttttactagaaccaatgtaaaaaatgtttttactaaaaccaatgttgtaaaggtaatttctatatcggttggtgccataatcgatgtagtttctacattatatatatatatatattgttccacaaaaaccattttcttgatccatttttaaaaaaaacataataccgtgaccatgaagaacaaaactaagacactataatattaatataataaatgcaacatgaagtaactagtgaacttcaaaataacttatggtgaaccaatgatttgatgatccaacaacaacttggatccttcttcattgtatgctaactatcgctctctcactttaacatttccanatgcatcatcatgatttatgctaactatcactc

SEQ ID NO: 29190 - DNA, 344 bp, Glycine max
  unsure (1)..(344): unsure at all n locations
ntgtccctganaccctctatgtaaatttgacagcctcatgtctcccttcctaaaaacccactaaaaactgcctaacccccctactgttactccataatttattctgcaataactacttaaggcagttacatatggtcctaaatcattacacattcagttacgattaaccctttgtgcctaactagggtttcgaaacatcacaacagagacagaccattgaacaatggattttcatcattaacatacaacagagacataccttcgatggaagcgcagacacgaactccacaaacgcgaactcgacaatgtggttgcagtcacggaagtgcaacccaatttgtgac

SEQ ID NO: 29191 - DNA, 352 bp, Glycine max
  unsure (1)..(352): unsure at all n locations
agcttcttctgacgcacgacgtaatatatcttcatcatgggcaacatctatattatttcctactgagtcagattcttttttaatatctccaaattctttaaactcacaaagatctttactcccagtgctgttgattttttcatcccgccaagtaacagtgcgactaaatttcttttcaccagcagatntaaaggaagatctgggtttaagtcttaatgatccacctgcttattccacctggaatttttcttcaacattggccagatctatattggaagtggaagcatcatcattatcaataacttctctcggtgtccctttgacttgtccagttttctagcagaataatctg

SEQ ID NO: 29192 - DNA, 417 bp, Glycine max
  unsure (1)..(417): unsure at all n locations
ttngaatcagtggaaagaggtatggacttgtcgtggtcatccactctaaatggatatgtgtcatgttcctagctcacaaggatgagtcttagtgcctcctttaaattttgtaaaagatttcaaaatgataaaggagtatgcattacttcaatcagaagagatcaagggggagaatttgagaatgaaaattttcaactgttctatgatgaaaatgttattcttaataatttttcaactcctagaacatcaatagaatgaaatagttgaaagaaaaaacatatctttgcaagagatggccaacatcatgctcaatgataatttaacccctaagcacttctaggctaaagcaatgaataccacaacanaatttatataagggtaatacttaaaaagactccatatgaattatggaatgga

SEQ ID NO: 29193 - DNA, 330 bp, Glycine max
agcttcacaattcaatttcgcgcgtctcaatagattacgggactcattcagacattccagcagaacattattggccgttgaattatctcagagcttcataattcaatttcgatggtgtcgatatattacgggtcttaatcagacatgtgaagaaaaaagttattatcggttgaatttgctgagagcttcaacattcaatatacagcgtctcgatgtattacgggacttaatcagacatccgagtaagaagttatcgtcgtttgaatttagtcagagcttcaacattcaaattagagcgtctcgatatattaccggactaattcagacatc

SEQ ID NO: 29194 - DNA, 338 bp, Glycine max
  unsure (1)..(338): unsure at all n locations
ntgggctaattcaaacgacaattatcctttgctcggtatgtctgattgagtcccgtaatatattgagacgctcgaaattgaattctgaaccttagagctaatgcaaacgacaataactttttactcggatgtctgattgagtcccgtaatctattgagacgctcgaaattgaattctgaaccttagagctaattcaaacgacaataactttttactcggatgtctgattgaatcccgtgatacatcgagacgctccaaattgaatgttgaagctcttagcatattcaaacgacaataactttttactccgatgtctgattggagtccgaatacatcga

SEQ ID NO: 29195 - DNA, 423 bp, Glycine max
  unsure (1)..(423): unsure at all n locations
agctngtaaagttaagtctcgtatcggtttaatcgattaccgatatcttgtaatcgattacactatagtttgaaacaatgagtaattttttcaagagtctaatcaattactttaatctattaccaagtggattaatcgattagttatctctctttcatttgttcagagataaacaagaacactntaatcaattacttaggtcatctaatcaattacattgttcttgagttgttttccatatgttggatgaacactttaatcgattacttagataatctaatcgattatttccataaaataatctattaccttatagatntaatcgattatagacgggtataattattttctctataaataactagcttgtgttcacatctatgaatcatgagatcattagagaatactcaatacatctcgata

SEQ ID NO: 29196 - DNA, 340 bp, Glycine max
  unsure (1)..(340): unsure at all n locations
ntgagccaaaatcctgactcaccataaaccttgacccatggtgagaatgtcaatccttaccctcggaagcgaaaaggaaagaaggaagatttccaatcaaagagaaagcaaaaaaaaagaaagagcagaaggaaaattccccaatcaaagagtgggagaaagctaaaagaaaagaaagaaaattcccaatcaaagaatgggangaaagtaaaaaggaagaagaagaaggaaagaaagctcctgatcagggattgaaggaaaacagaagaaatgtgcagagaggtctttggaccggacaatatctgaacaatacagaattgtcacccaatgaacaaaaaaa

SEQ ID NO: 29197 - DNA, 402 bp, Glycine max
  unsure (1)..(402): unsure at all n locations
agctntactgatgtaagtcactacccactctcatctattttcgataaaatcacacttcctctgcagggttaattccagtctcctcgaatagtcatatcatagagtatgaatatggtaaaggatgtgctcgggttaattaatggagaggtggaatttatcatgagtaaagagtcaacatgacataacatgatagataaatatatgcattgataattatgacttgagaatgatatgttacttgacgagttatggaatactgtgctatgtgatgatgaatggactgatgaagacaatgatgtatgatgattcgaaccttatgtaatggttgacaaactaatgattattatgagatgtgttgtcatgagaattctaagacttatgctntatgtatgatttctacat

SEQ ID NO: 29198 - DNA, 282 bp, Glycine max
  unsure (1)..(282): unsure at all n locations
ntactcttctaaatgtatcaagtctttaacaagtacattctacgcgaattcttcatacattcgttgatagagttctttaacccatagtttgtcaatcttttcaacaaacatctaattgacatgtgagttgtcaaatcactaagagaatgttcaggaatccgttgcacaattatgttatgggtaaaggtaattttacgagcggattaaaactcttacttttgcatgcgttatattcttattgagtggatttgcattgaatgcacaccacaacatttacaacgc

SEQ ID NO: 29199 - DNA, 302 bp, Glycine max
agcttataagaacaaaattgcctcaatcatttccaaatatgcatgtgaattatgacgcatcaacaagaatcaagccaaggctattgtgcaagcaatcaatggggcaaaacacaccaaatgattatgatgatggacagctcaaattctcacaaaggtaaaatcatcactttcaaattgagctttcaaaattatcatgacatgtagagaagaatcaaggatttcaagtcacaaaatgtcaagaacttttattttcaaaacaattacccatttcttgaacatatcctataattcaaagaaaaaca

SEQ ID NO: 29200 - DNA, 404 bp, Glycine max
  unsure (1)..(404): unsure at all n locations
tctagccaaatggacttaccttgaataattcctttgatagccctttgagtcttgtttccctttccttgttttgaagctcactacaagccttaaatgaaaaaccatgatatcaccatatccttaaggaattctggagctntggaattgttttgggaataagtgtggggggtttttgtttcattggataacttgttttgttggctatgcttcatgatgtattttgggccatacttgatgtacattgtatattggttaaatgttggacatgctgaatgaaatgttgtttctcaaaggctatagagtaaaaaaaaaaaattcgaaaatgaaaaagaaaagcaataaagttgagtgaataagatcttaaatggcanaagaatgatgagactctnggntctactctttat

SEQ ID NO: 29201 - DNA, 293 bp, Glycine max
  unsure (1)..(293): unsure at all n locations
tgaaccttgagcctatacaaattatctccttttacccttgtcttanggtataggagagcatcattcgtaaacgatattttggggaattatggggtgaaagcttgtaatggtaaaaaaagagcagcacacacagccatttaataagcagcaagtatataaataaataaaaactgtaagtataaaataaaagtgtgtgtgctgctatttaagaaaaagaaaagctaagtacggaaaagcaagtaatagagctggaataaaaagaanaaggttgatctatggatgaatgctctctt

SEQ ID NO: 29202 - DNA, 371 bp, Glycine max
  unsure (1)..(371): unsure at all n locations
agctgcatgattacatctccctctttctcaagaaaattcttttaatatcatcaaaatcttcatgatttacaaccctggatggaggaatcaccctaatctcagatggtccagccctcagcaacaacaacagcagcccgctccttcctttcaaaatgctgctggcccaagcagaccatacatttctncaccagtccaacaacaacaacaaccccagaaacagccaacagttgaggcccctccacaaccttccctcgaagaacttgtgaagcaaatgactattccaaacatggcagttcaacaagagaccaaagctttcattcagagcttgacttatcaaatgggacaattagctacacaattgaatcaacaac

SEQ ID NO: 29203 - DNA, 438 bp, Glycine max
  unsure (1)..(438): unsure at all n locations
gctcaagaaaagaccaaactcttctctccaaatttgatttcaggcttaaataggtggctntgtttgtgcttgcatgcttagcgctactctgaaccgcttagcgcgcattagtgaatttcggcttagcgcgtgcttttctcgctcagcggatggattgaagcagtgcgcttagcgggatgacccttcgctcagtgcaaatgcacaactcatccttcttccagattcttcctcacgctcagccgaggagtgttgcgctcagcagatggctcgctaagccagcagaatggcttagtgaaaggatganaatcagcacttcacaaacttgcctaattaaccttaaattgagaggaaatgattattaaacgcacaaaatggaaatactaagtatttattacctatctntaacaaaaagtattacaacactcaaaataccataaa

SEQ ID NO: 29204 - DNA, 341 bp, Glycine max
  unsure (1)..(341): unsure at all n locations
ntgcggatntggtctttgccagtgaaaggatcgatgtgggtctgaaaaaaggaaaatnttgtcactctgcttggacgaatgagaaaactggggcaaatgaagagggtgaggatgaaggagaagcctgtgctgtgactgccattccaatacagccaagtttcccactaacccaacaatgtcattactcagccaataacaaaccttctccttacccaccacccagttatccacaaaggccatccctaaaatcaaccacaaagcctacctaccgcacttccaatgacaaacaccacctttagcgtaaaccaaaacaccaaccaagaaatgaattttgcagcgag

SEQ ID NO: 29205 - DNA, 444 bp, Glycine max
agcttgccacccagctcgcccaggcgagcatggttgcttcctccagaagcaacagccttctggaggaatcttctggagggcccaagtgggcctggttgctatttgcacccccatttttactaaatacacccccctgccttttttggtgattctttttttcgtaaagctacggaaacttacgaatttcgtaacgatacttgttttctttccgtaatgttacggaaccttgtggattacataatcatgccctttttgacttacggaatgttacggaacctcactaattgagcaacgatgcttccatttgatttccggtgtgtcacagaaccttacggattgtgcatcaatatcttcttttgttttacggcacatcccggaatttcacaaattgcctaatgatgggtgccaagcacctcacaaggaccaaacaaaagtcgcatgtca

SEQ ID NO: 29206 - DNA, 433 bp, Glycine max
ctattcccaatggcaaatcacataacaaatttttaagatactcagcctcactagtagcagtatctaaagcaataatttctgtttccatggtagaacgtggaataatagtttgtttagtagatttccatgatactgcaccaccagctaaagtaaaaacataaccacttgtcgattttgtttcatcagaataaaaaatccaatttgcatcattaaacccctcaattactgtaggaaaacatgtataatgaatgccataattaatggttccttttaaaatactctttctaatgcaatccaatgagaatgattaggaatattattataccttcctaatctaccaactgcatatacaatgccaggcctagagaagtttgtcaaatgcaaaaaagaaccaataatttgagaatatttatatgaagaagttcctttactc

SEQ ID NO: 29207 - DNA, 363 bp, Glycine max
  unsure (1)..(363): unsure at all n locations
agctntgagccaaaatcctgactcaccatataccttgnacccaggtgagaatgtcaatccttaccctcggaagcaaaaaagaatagaagggaaatttccaatcaaaaaagaatagaaggaaaatttccaatgaaagcaaaaaaagaaaagaaggaaaattccccaatcaaagagtgggagaaagcaaaaagaaaagaaaggaaattcccaatcaaagaatgggagaaagtaaaaaaggaagaagaagaaggaaagaaagctcctgatcagggatcgaaggaaaaacagaagaaatgtgcagagaggtctttagactggacaatatctgaacaatacagaattgtcaccaaatgaacaaaaaga

SEQ ID NO: 29208 - DNA, 405 bp, Glycine max
  unsure (1)..(405): unsure at all n locations
nttggagtagaaacatgggaccaactcattntatttcaaaaaaggaagtcgtatctagtcaaggtctgagagaccatacaagtttcctaacgatttctaattatgtgggccattaagtctatcatatgctgacaatagccgagaagcccatgaatctcttcgggggcggagtaggtgtctgccatcgccttggccttggctaacaatcggggaagttcttgactcccgttcaaggtaagagcaaaccgatccatccacatggttgcctcttggtgtaaagagtcgatcacccttcctctagcctctttttccgcatatacttgagcatactcatccgcgattctatgctcgtgggccgtggctagacctaactcttcttcgtacttggcgatgatagctaacatg

SEQ ID NO: 29209 - DNA, 340 bp, Glycine max
  unsure (1)..(340): unsure at all n locations
agcttcaacccttggtgctcatttctgctccaaatcgcgaaaggagagcattttcggagtcgtgaagtgcgtggctacgagtgggacttcgaaaattcatgtttgggtggacttctttctcctttgattttcgtgggtatggggttttgggagatatgatgggtagtcttgctaggtttctgctgtatgatgattatttgtgaaggcatttgctgaaaacttgttgaaattgccatgtttggatgagttagacatacccattctgttttanggtttttgtgatgatgtctgtggtgtttatatgctganattgcctatggaaaacctgtagagatgaaat

SEQ ID NO: 29210 - DNA, 227 bp, Glycine max
  unsure (1)..(227): unsure at all n locations
ggaaattgcctncactcctacatatgaganaaaagaaagaaagaaagtaagagattgcctccactccaccaatttaattctctgttcacacctttacagcatgggaacctcacaagtcacacggcccattgccatcacactgcaaagaattcaacactgtttcaatttttaaaatttaaattggtgcctctatagtactgtgccacaaccacactatacactacttt

SEQ ID NO: 29211 - DNA, 339 bp, Glycine max
agcttctacttatgtggcagggcgggtttccttcactttcttgtttccaacgcgagctctgaccactgttcttccttctcgcgatgcttcttttcatgtccgcctgagtgggcttatagcctaaaccatacttcccacgattcccttgggtttttatcaggctagttatgccgccattgtctttgcctaaacccatcccgggttcatacccgttccccaacataactcgggccatcattaccgccgcatcggacagacaaggttgcccaaagagggagtccacggaggaaatgctgaccacctcaaaagactggaaagcggtttctaacgattcttctg

SEQ ID NO: 29212 - DNA, 358 bp, Glycine max
  unsure (1)..(358): unsure at all n locations
nttctccctctctctcacgttgctattcctttcttcttcctccaccattgaagctccaacctttggtcaccatttctgctccaaatcgcgaaaggaagccattttcggagtcgtgaagcgcatctctacgtgtgggacttcgaaatttcaggtttgggtagacttcttctcacataaattttcgtgggtattgggttttgggagatatgatgggtagttttactaggtttatgctttatgatagttatttgtgaagagatttgatgaaagcatgttaaacttgtcatgtttggtgtgattcaagcttacccattatgttntagggtttttatgatgatgctcgtgatagttatgtgct

SEQ ID NO: 29213 - DNA, 410 bp, Glycine max
  unsure (1)..(410): unsure at all n locations
agcttcttatccaaggcactctcttggtggtgaagcttctccttccatggcttattctctagtggatggcgcctcctttcacctcttctcctttatctttctctacaactccatggttgaaaatcactattgaagggccttattaaagctcaaagatctagcctccataaaaacatctcaaccaagcttccatcaagtggtatcagagcacaagagcttcaagtaggtgctccttaaacctccattaattntcagctttaccttctcctccattgttgtttcttcatttttctccatgtatctcctcacatgtcttgtgctgaatgttgntaacatgatttttttagaattcccactgattaaacttgctatagaagctagatttgatttctatgggtcaaattcttgtc

SEQ ID NO: 29214 - DNA, 433 bp, Glycine max
  unsure (1)..(433): unsure at all n locations
tcatccgcagatccctcatgtgatactaggcctaaactaaatagcactattgtgacagcataattaagaccaaaacttaacccgcagatccctcatgtaagattaagattcgatcctgcttcaatcaagttctaaggcaacagtacatttcccaatgctaaagtcacctaactgtgcatacaaatgagtgatcagaccaaaagcatacaaacactaagcattgaaggaagcattgaacacagaaaacacgatcaattagatattaggtatttacatcagttgttcattagaaatccccaactagggtgtttagctagcaattacaaagaaaccctataaaagatgagattaaaagcacagaatgatagtttcttacacaagaaaggggattcctnctcctcttcttagcatctaacactcactctctactcaa

SEQ ID NO: 29215 - DNA, 359 bp, Glycine max
  unsure (1)..(359): unsure at all n locations
gctcgcctgtccgatgcagtagtaatgatggcctgagatatgttgtggaacggntacgaacccgaaatgggtttatgcaaagacaacggcggcataactagcctgataaatgccaaaggaaatcgtgggaagtatgggttaggctataagcccactcaggcagatataaagagaagcatcgcgggaaggaagagcggtagtcaaagctcgtggttgagacaagaaggtgaaggaagcccaccctgccacataagtaggagctttataagcacgggtctgggggacaaaggtcaagtggtcgcgatatatgaagatgatgttctgagtacattggatttggtacgaccatgccctcctga

SEQ ID NO: 29216 - DNA, 344 bp, Glycine max
  unsure (1)..(344): unsure at all n locations
ngagtaaggcacccctttggtttgaagacgcgttcttgttgagaggcattcacataaagttctccacagaaaatgctttatcttgggaggtatacgaagattccatatagtggaccagcttccttgaactttgagagcttctttgttcaccatagtctccattaaaatatgataatctgatcaaaccgagtatgtccccatggtactaactttcaaaatcaaaatatcagaatcatgaagattgaagaggggcatcatctttatttcttgggaatcttctttattgaaaaattgatcagtaacctcaatgttgcaactattgctgtcaacatcaataagcgaat

SEQ ID NO: 29217 - DNA, 369 bp, Glycine max
  unsure (1)..(369): unsure at all n locations
agcttgaagtgaggaagtgtggaagggtgagacttcctacttttattcgttgaccacagagtggtacctggagatatgtcgcgggggtcaggagaccttggggacgtcaggtggggtgctattgcccaaaaccaagcttgaccaatcccgacccaatccgggcatagtcagtcagtgcgaacctgtgatgtacctaaacaggcgagctcctggcagtcaaccgataaaagaacaaagaccacanagcaaggaggcttgtgtggtggctggccagctatggatctttgagtgatattgggatatggcctctggtaatcgattaccaagggtgggtaatcgattacaaggcttaaaagtgaagacaaaaag

SEQ ID NO: 29218 - DNA, 426 bp, Glycine max
tgaccaatcccgacccaacccgggcatagtcggtcagtgagaacctgtgatgtacctaaacaggcgagctcctggcagtcaacagataaaaggaacaaagaccacaaagcaaggaggcttgtggtggctggccagctgtgaattttgtgtaatatgtggattatggcctctggtaatcgattaccaagggtgggtaatcgattacaaggcttaaaattgaagacaggaggctaagatggtctctggtaatcgattaccaaggggtgtaatcgattaccaggcttataaacgaagtcaggaaacttatggagcctctggtaatcgattaccagcctgtgtaatcgattacacagaggaatgggtcactggtaatcgattaccacgcatgtgtaatcgattacacagtgtatttctgcatatttcatg

SEQ ID NO: 29219 - DNA, 408 bp, Glycine max
gcttctgaatgctctttcaagtactttttaagccaatcaaacgaaacctgcgtgcaccacaaattagataacgatatcaatccatcagctaataattctaaagaggatatatattttttcttgtgatgactttgaagttctaactatatgtacacttacttgattttctgccaaccccatttgaataactcctgagggattggctaattcagcataggggttctcatcataggctttccacccaccaaaataacgggaatcttccccgtgagtttcataaactgcaacttttgaaagctccacacagggttgctccatctcaatacccatagctagctagcttcctggcaaaagagttgattactcaattacagaaagcagacagctgctgtgagtaacacaaagata

SEQ ID NO: 29220 - DNA, 402 bp, Glycine max
  unsure (1)..(402): unsure at all n locations
tgttgtatttgctaagttctatgtcacaacattnttaatgttccttgcttaataagcttcttatttttagactttgttgttttttttttattattagaagtaatctatgtgtcatattagatggtttagaactaagtttcagttgtttatataaataatgattgtttatgagtaaaaaatattttcttattattcaaagagataatttaagagttatttaaaattatatcattaaaataaaatatatgagttgtttaattataatgtgatattgtagtaaccaattaatatacgataaaaaaactcagaataaattacttaaattatacccaatggaaatgctattggtggtattgcaatgatctttttaatcaaaatagagtaattatacaaattatttat

SEQ ID NO: 29221 - DNA, 156 bp, Glycine max
gggggaataaggaaggaggtttaaaagaaaagaaagagagtaagggagaaagaaggaaggagaaggagagaaaaggtggagaggggatgaagaggaagcgaaaaagaagggaagggggagggaaggacaaggaaaggaggcgcggaatcaaaaaaa

SEQ ID NO: 29222 - DNA, 376 bp, Glycine max
  unsure (1)..(376): unsure at all n locations
catggtgagtaacttactcaagattcattccaactttcttattgctcacctgtgcttcaatttccttgtgatgtgactccagaagtatatctaataagttatttttagtggcttcacccgcctttagcgctttgtctctcttgttaataatatccataagtgaagcttttatatctctatcaatttccatcatccttttaggtaccaacctacaagtataatcagtcctgtgataatcatganatgaaaggaatgttctttgatgcatcaactatacttctaatgttggntccttcggtagtaaaaatnggtacattgattttaaatgttaattgagagatccccttacatactcatgtacatatatggtaaaatg

SEQ ID NO: 29223 - DNA, 337 bp, Glycine max
agcttaaagaattgagtcttatatcggtttaatcgattacggtagtactttaatcgattacactattgtttgagacaatgactgattcttttaggagtctctactttaatcgattaccagatgtattaatggattacttctctcttgtttaagttgtttagaggtgaacaataacactttaattgattaattaggtcatctaatcgattacattgttcttgagttgttttccagatgttggatgaacactttaatctattacttagtataatcaattacttcattgaaataattgattaccttataggtttaatcagttacaggcggttataattgt

SEQ ID NO: 29224 - DNA, 339 bp, Glycine max
agctttttgctactatggtcaaaggaaaaaaatcaacgaaatcaaaacatttgttgtggcattgtgcctgctgcaatttagggaagatgagaaatgaggcttatgatgggaaaaaatgatttcaacattctaacattatctgtgttgggcttgatgtaggataggccacagatagtgctatgccctgttttcttgggcttgatgtttgcctatttcaaaaatggataagctgcaaaaccaattggagaaagtcgagtctcatactcaagatcttgaagaagggcttgagtttctatttaggtgtttgataaagactagacttgcctttgttattcccct

SEQ ID NO: 29225 - DNA, 348 bp, Glycine max
  unsure (1)..(348): unsure at all n locations
tgatgtcgattatcagaaaacaacatcggttgttatcgaanatcaatgttgttgtcttactcctaacatcggttnttaaaaaaactgatgttaatatatacatacnaacatcaatttaatattaacatcgagttgtaaaatcgatgttgatatataaagatatatatgactntnnttataactcttattatatataatcggttntgggaaaaatcgatgttgtcattcttatgataacatcgattatataaaatcgatgtgaatggtattacttctaacgtcagtactttcaacatgaattaataaccgatggtgaacgttctcaataactatagggtaaacgataag

SEQ ID NO: 29226 - DNA, 339 bp, Glycine max
agcttcgcaaaatttatttttctggaagaccaattactaagtctctcctaactagatgattgagatgatgcatgtttatgtgtgctgtcctacgatgccacaaccaagaatcatttatcttacttaccaaacaactcagctcatgaaatgatgcatgctcaatgtttaacatatagatattacctattctcttgccaatatggacaacctcactagacgtagattcaccaataagataacaattcttattgaattcaattttgaagcctttgtcacatagttgactaatgctcaggaggttatgttgtagtccatccacatatagaacattctatatct

SEQ ID NO: 29227 - DNA, 332 bp, Glycine max
gctagtataaatcatatacatcctaagattcaaagacacgatgagaaataacttgaaatatatcatataaataaaggtatagagctcagcgtaataatcttaagctagaagttgaaaaaacaagacataattctcacaaaacacaaccagagtagtaatggaacatccaaatagagtacataaaatgaatgataatgtgaaaccctatctcaaaagaatgaaaacagcataacacaataatcaaatagggtgggtgcttcttcagttccatttgtttatcaacaacaacaaagccatggtgagggtggctacatggatcacatgacaccatt

SEQ ID NO: 29228 - DNA, 339 bp, Glycine max
agcttctcccttttttccctataaatagggagaggagggaagaacaaaaacgttcaactctcctggtatctgtggatcacttgaaattagtgaaaaaaatcatttccgtgaagaaaatccaagccgaggcgctttcgtaacgcgtccgaaacgtttccgtggttgatttcgtgaagattttccgccatctttcgtttgttcttcgtcgttcttcggtcttcaatcagtaagttcccgaaatcaaacttttcaattcattatgtacccttggtggtccccacttgtttcgcgtacttttattttcatttcatttactttctgtacccccttttgtcgtgc

SEQ ID NO: 29229 - DNA, 294 bp, Glycine max
  unsure (1)..(294): unsure at all n locations
actctgcgcgtattcctttcttggaacacacacccgcgagtcacgcgtcgcccaccctccgaagggtaggttgcgacaaggtccaacgccttanatgacccccttccaagtaaaaagaatcacttgattcgccccttttcaaagaactacgtangtctgatttccttatcacaattgaggaatacgtangagcaagggaaacacccttgtccaccacanaaagataaanaatacaaaaagccgtaaaagacataanaagataagaanagggaaaataaaacaaattgaagtcat

SEQ ID NO: 29230 - DNA, 339 bp, Glycine max
agcttacaaaaaaagtccctacaacaaagactactcaaaatgccctgaaatacaaggctaaaatcctatactactagaatggccaaaacacaaggcccaaaagaaggaaaaacctattctgatatttacaaaaaagagtggatccaaccttgacccatgggctcaaaaatctaccttaaggttcatgagaaccctagggcattctttagtagctctagcccaatcctcttggagtcttctatccaatacccttggggggtaggattgcatcacaatcctcatctcctcctttctcggattgagttattaattgctcaaaatcaacatccgggtcctcag

SEQ ID NO: 29231 - DNA, 298 bp, Glycine max
  unsure (1)..(298): unsure at all n locations
ctagtcaaggtctgagagaccatacaagtttcctaacgatttctaattatgtgggccattaagtctatcatatgctgacaatagccgagaagcccatgaatctcttcggnggcggagtaggtgtctgccatcgccttggccttggctaacaagcggagaagttcttgactcccgttcaacgtaagagcgaaccgagccatccacatggntgcctcttggtgtaaagagtcgatcacccttcctctagcctcgttttccgcgtatacttgagcatactcgtccgcgattctatgctcgt

SEQ ID NO: 29232 - DNA, 337 bp, Glycine max
agctttgagccaaaatcctgactcaccataaaccttgacccagggtgagaatgtcaatccttaccctcggaagcaaaaaagaaaagaaggaaaatttccaatcaaagagaaagcaaaaagaaaagaaggaaaatttccaatcaaagagagagcaaaaagaaaagaaaggaaattcccaatcaaagagtgggagaaagcaaaaagaaaagaaagaaaattcccaaccaaagaatgggagaaagtaaaaaaggaagaagaaaaaggaaggagagaaagttcctgatcaaagaaactagaataaatgtgcagaaaggtcttttgaccagacaatatctga

SEQ ID NO: 29233 - DNA, 323 bp, Glycine max
  unsure (1)..(323): unsure at all n locations
ctcctttgagtgacatttgtattgggtggtatcttgatagatgtatcttaggacatatgatatctgctntgcatcatgcataatcatgggtagtatgaagaaaagtttctaagttagaaaaatttcttcagaggccaaaactctctatgttaatcgattacagagttgtcgtaatcaattacaactagttgtctgaagcttaaagagttaagtcttgctaaaataatcgattaccttatagaattaatcaattacagatgggtataactattctctctataaataaccagcttatgttcacatttatacataaatagatcatt

SEQ ID NO: 29234 - DNA, 332 bp, Glycine max
agcttatcgcatagcttacagtaaaatttgggacctagccatggtagaagtctccacagaggcatttgcctcccttgcccaatattatgataagccgttgaggtgctttacctttggggacttctagctatcacctatggtagaagaatttgaagagatcataggatgccctctagggggaaggaaaccctacctcttctcagggttctatccctcattagctagaatttccaagataatccaaatctcggcgcaggaattagaacacaggaagcaagtcgaaaatggggtggttgcaataccgagaaaatatttggaggcaaaagcaagaa

SEQ ID NO: 29235 - DNA, 338 bp, Glycine max
  unsure (1)..(338): unsure at all n locations
atatatcatcatgtttatatncttattattgtaagaatgaccataatatctgtatgtaaattaaactagttntctaggtttctaaccataatatatgtatttttcaaaacttccatttcaaagaaaataatatntattattntaagttcaaaactcagagaggaaaaaatgcatgcaaacaaattcaaataataagtattggctaaaatagttttattatgaaattaaattctntaaggataaataatttcatttttcggaatatttgatattttgaattttatttgatccttannagtaacattgtaacaataaaataatatctttcaaagtttatg

SEQ ID NO: 29236 - DNA, 334 bp, Glycine max
agcttagagaggtatgcttcaatggaggaaaagaaagagagaggggggagcacgaaattgaaggaggaaaagagggagagaagttgaactttgaagtgtgtctcacaagactcttattcatcaaaattacaacaagtgttacacatgcttctatttatagcctaggtagcttccttgagaagcttccttaagaagcttccttgagaaacttctttgattagcttccttgagaagctagagcttagctacacacacccctctaataactaagctcgcctccttgagaagcttcctttagaagctttcttgagaaacttccttgagaagctagagc

SEQ ID NO: 29237 - DNA, 584 bp, Glycine max
  unsure (1)..(584): unsure at all n locations
cacgcgatgaacgccgttgtnangncacactatannatatctaagctcgcgaccacgtctctctcgatattccgacgtgacctccacacacttattttgtgactctgcngcggtgtgctatgtggtaacacacactcgcgagtaacgcgtctgccaccctactaagggtatgatgcgtacacgttcatggcggtacatgatcacggactccgagaatagactatcatgatgaatccctcttatgcaagctgcgtacgatctaggacgaatcattgttgactgcaccttctagagcgatggatgcaccctcgtccaccactcaaagatggttaatccgaaatgcgtaattatactctggaaagtatattctgttagctatacgcatgatgcttatatgcgcccgctatacgcagcgattcttagacaactcgtgagtgctatacatcccctcgtatggcggagcgagacattctactaagcagattaataacttcagccttcgacttgattcactaccatgtgctatggccatatcgcctggagacaacaggaacctctcatgttcatgactgacatctgcnttg

SEQ ID NO: 29238 - DNA, 338 bp, Glycine max
ctgcaagcttgcccgcttaaaccttaaacctgagaggagggactaacaaatacgttcaactctactggtatctgaggatcactctgaaaatagtgaataaaatcatttacgtgaagaaaatatgtcattttatatttttcaactacttcaacaattagtattatcaaatacttatgatataatacgtcaggttaagagcttacagcttctacttatcaacttttgactatgttcgacaaaatattttaattaatttttacctgttcttactagtgtaaaagtctggttgagaatgcggtaaacaaatttttttttggaacttcctagtagtttctaac

SEQ ID NO: 29239 - DNA, 332 bp, Glycine max
agcttaagtttttatgcactacaaacaaagaaccacacaacaatcatcacaaattcctactcagttacgcttgagagatgatgactcaagacattaacacccactttccatcatttgcattttctgatcgcttgccatatcattccattgcccttcacaaattatacaggtggccagtctgataatccgtgacccggcattgaaattcatggtatagcagacatcagaaaaacaaattcaatatgactacaaaaatcaaatctctatagctcattaaaacataactagtgagtaagtgctaatagcaaacaacgaacatcaaacaaccaaca

SEQ ID NO: 29240 - DNA, 509 bp, Glycine max
  unsure (1)..(509): unsure at all n locations
ctaagcttcaaacanagcaacacagaatctaggtgtcccatacncctcaattcaatggagtttctatgtctgagaagtganatntagaatgaggtanatntgaagcaaaccctcacctcacacaagtccataacatcaatctaaacttgctcaaactggatntacacctaatattccaccgaatcaaaatgtgactcctcaacacccaattntgccctagagatggctcttggttcactntggtcatttgtttttctctctagcacagtccaagctttctcataagtcctaaatgacatttcaagctaggattaactcactntaacctgcatttaccacagaatccagattaaccttccactctagagcctcactctttntcactcataacaccacattctcacttctaaccctaggtaactctaccctcatcttaacagttccgtagcaattcagatataacatacaagcatatacanatccctaaacagatgggatgctactcatca

SEQ ID NO: 29241 - DNA, 328 bp, Glycine max
agcttgttagagtgaatgctcagaaactgaaattctctcatttttacaaagaatgtcaattctttcattctctgcagaataaaattctttattaaaatgactaaattcaattgctctttaaatgatttatccaaacatgtaattttaccttgaaatatttcaattacatgattaaaatgaattacccagttaaaagtcatcatctaaacacactcttagtgattttatccggctcgtctagtggaatttacctgtagtcgagacaaaaaaaattacaaaatacccaaaatgttggtcaaacaatatgaaatcgaggagcagaaaatca

SEQ ID NO: 29242 - DNA, 323 bp, Glycine max
agcttatctcacccaggctagctgggcggcaagttcctcccctattttggctataaaagggcgtgggaggctgaggggaaggagttcaacacccttggcaagcatatttcacttaaaattagtgaaaagaaggagaaaaaaaaagaaaatcaaggccaaggcgcttccgtgacatttccatgatcaattccatgaacattctttgtcgttcttcatctgtttttcgatcttcattcagttagtgcttgctttaaggatttggatttgatttatggacccttaggggtcccctttattctttgtgcatcttcatctcctttttc

SEQ ID NO: 29243 - DNA, 481 bp, Glycine max
  unsure (1)..(481): unsure at all n locations
aatgtcgaatggatgcgttggttaactggtatcttaactggccttgaaccacanagttgtacctggtgctaaggtctgtggatagtgctcctctgctgaccaccatacacagcatttgcctttcatgcagcaacctggagcaattgagcatcctcgaagcttatgctgataatatatacaagagacctgctcactctcagcagcaagatcaaccacagcacaatataatgatctctccagcaacagatagcaacctggatggagaatgacacttatatcaatggtctaccctcatcacatcagacatcctgctccttcttcaaatgttgtggccaacacacataattctcaacaatcacaaagtacttctccaacaaccacataaggtctcccacctcctcaagactttagcaatatatgaaactgcgttcacataacacactcatcgagctacatcaatggacatgctaccattatcacc

SEQ ID NO: 29244 - DNA, 340 bp, Glycine max
agcttgtaacattggtaaatctgtgaatcatttgcgaactcataaaaacttggaaattcagaagaaagccaggggtttagttgacacatggaaaaaacgtgttgaagctgaaatgattataaatgatgctaggtcttgttcagttcagactgtcccctggccagccagacaacgactttctgaagttgctcaaggtgggaataaacattcaagtgggtcagctgatgttgccatgaagagctcagttacacagctttctgcatccaaaactgcctctccgaagattgccccaggagagaatactacaagatctacatctgcatctccagggtctacgaaa

SEQ ID NO: 29245 - DNA, 317 bp, Glycine max
  unsure (1)..(317): unsure at all n locations
taagctgtaataataacctgcttgctagcattttgaaattacatacattataagcttctagacttcaggtttctattgtgtatggtggtatctgtntntggaaacaaaattcacattctaacatcaatctttntctgagatatcctgtnnnttttttntttatcagccaaacaaagaatgatattaatagagatactagatgtacccaaaatacaacaaagtcaaacagaagataaggaaagggtcagcaagtgggtatgcaacattaatatgcaggtgtgctcataaatgtgaaataatcaaatgaacatcctgag

SEQ ID NO: 29246 - DNA, 339 bp, Glycine max
  unsure (1)..(339): unsure at all n locations
agcttcaaccctaagcgatcagctcgcctgggcgagcttcccttgcaccaaatggctttttctataaatagtcatgaaggggaagaggctcaaggggggggggggggttgaaaaactgaaaaacgggaaaaaaaatgcanaacggagaaagagaagaacaaaaaaagaaaagccgaggcgctgacaacctataacgtgcatcatcacctaaattctttctcttgctaaccatgtaccctgcgcaatagtcagttacttttccttgtggtaggcatgccacctgtgaactttgcttgaaatggggcttatggcctctggtaattgattaccaagggtggg

SEQ ID NO: 29247 - DNA, 371 bp, Glycine max
  unsure (1)..(371): unsure at all n locations
tctcagatgacacacagaatattcaaagtttcattatatgcaacaattgaagtggatcccagtcaatcaatctagataatcccaattaagaacataacaataccaaacatatgctcctgacaattaggatcagtctaggaatgcagatctcatagaanactaccaattaaggaacaactataacggactcctcacccacattaaagctcttgtcattcacaatttaatcttaacaataacaaaatacaagacatgaatcataacagcaccaacacagacgctctcatcaataaaaataattctttaacataagaataattaanaagagtggtaatagaagatacccttaaacggtcagagagaatggaatg

SEQ ID NO: 29248 - DNA, 340 bp, Glycine max
agctttctcataagtcctatatgacatttcaaactaggattaactccctttaacctccaaataccactaaatccagatttggccttccaactctcaaaggctcactctttttctactcataacaccacattctcactttctaaccctagtttaactctacccttcatctctagcagttttccataagcaatttcagcacataaacatcacaagcatcatcataaaaaccctaaaacagaatgggtaagcttgactcacaccaaacatgacaagtttaacatgctttcatcaaatctcttcacaaataactatcataaagcataaacctagtaaaactacc

SEQ ID NO: 29249 - DNA, 334 bp, Glycine max
  unsure (1)..(334): unsure at all n locations
agaagtgaaattgagaatgaggtaaatctggagaacactctcacctcacacaagtctataacatcaatctanacttgctcaaactggatntacacctaanattccaccgaatcannaattgactcctcaacacccgattntaccctagaaatggctctctgttcactctggtcatttgttttctctcttgcacagcccaagcttcctcataagtcctaaatgacatttcacactaggattgacacactntaatctccaaataccactanatccagaattggcctttcaactctcanaaactcactctttntccactcataacaccatattctca

SEQ ID NO: 29250 - DNA, 339 bp, Glycine max
agcttatcgcacctatccagcagatctttcccttccttgtactcttccaacctgtacctctgcaccaccaccattcccataaatagtaattaattaactcattaagaacatatattacagaaaattaaaattaaatgaggcacagtaacagttgttagtaatagtagtatactactacctctgtatcgggatatgaactagtgctgaagctgttgtctgaaatggtggacgattcatcctctgccccacccaacaacaccttctccttacgctcattattttttctcatcatcatcctgggcgacccacttggcacttgctgacccgttgcatttgcat

SEQ ID NO: 29251 - DNA, 365 bp, Glycine max
  unsure (1)..(365): unsure at all n locations
tgtatgtattatcttatcacaatcttttcaattcaattaattntccttcaatatttaatgtctatgtttntttcaatcggaaaatattagtttttgttagcagaggagattgaacttacaacattnttcctggttccttcttccttaaccatcccaacccaccttatatcttcattttaatgtctatgtgctntaagaatttgcttgtgaagacaaattaacaaagaaaccagttctattntccctttgaatgacaattaacccccttctgcttgctnttgaaatnttttgttgatcttgaataattaaagttgtntattattgcaattacaattccaaattattcttagcttgttcaaattaat

SEQ ID NO: 29252 - DNA, 341 bp, Glycine max
agctttgagccaaaatcctgactcaccataaaccttgacccagggtgagaatgtcaatccttaccctcggaagcaaaaaagaaaagaaggaaaatttccaatcaaagagaaagcaaaaagaaaagaaggaaaatttccaatcaaagagagagcaaaaagaaaagaaaggaaattcccaatcaaagagtgggagaaagcaaaaagaaaagaaagaaaattcccaaccaaagaatgggagaaagtaaaaaaggaagaagaaaaaggaaggagagaaagttcctgatcaaagaaactagaataaatgtgcagaaaggtcttttgaccagacaatatctgaacaa

SEQ ID NO: 29253 - DNA, 302 bp, Glycine max
  unsure (1)..(302): unsure at all n locations
gtatcttagtacatnttatatctgctctgcatcatgcataatcatggttagtatgaagaaaagtttctaagttagacaaatctgttcagaggcaaaaactctctattttaatcgattacagagttgtcgtaatcaattacaactagttgtctgaagcttagagagttaagtcttgctatactaagcgattaccttatagatntaatcaatnacagatggttataactattctctctatacattgccagcttatgttcacatctatacatcaatagatcattcgagaatactcaatacatctt

SEQ ID NO: 29254 - DNA, 334 bp, Glycine max
agcttgagatgttgaagtgttgaagggtgaaacttcctgcttttattgttgaccatagagtggtacctggagatatgtcgcgggggtcaggagaccttggggacgtcaggtggggtgctattgcccaaaaccaagcttgaccaatcccgacctaccccgggcatagtcggtcagtgagaacctgtgatgtacctaaacaggcgagctcctggcaatcaaccgataaaaggaacaaagaccacaaagcaaggaggcttgtggtggctggccagctgtgaactttgattgatatgtgggttatggcctctggtaattgattaccaagggtgggtaa

SEQ ID NO: 29255 - DNA, 408 bp, Glycine max
  unsure (1)..(408): unsure at all n locations
tactcagctaacaagagatccaacaccttgaattcttgcaacaacttaccaaaaactcacatgaatgtgaatctcatgatctcacataaagtcaaatctaatcataaaataacatgatctcaaccacgtctcatatcatcattaagaaatcaaccaacacaacccaagatattcattaatcaacataattatctcatcatcaatataatattctcaacaacaacatgataaattagcaatagtaaaatgatagaccaaaccatgaataataaatatgcatcactataccattgtaacaactntatacctcatgtataaggttatcaaaacatcccataagatctgggttactatctncttcattntctattatgtggctatgagcttcatangctatagacatgataa

SEQ ID NO: 29256 - DNA, 112 bp, Glycine max
agcttcaaccctatatcgagcagctcgcctgggcgagcttcccttgcaccaaatggctttttctataaatagtcatgaaggggaagaggctcaaggggggggggggggttta

SEQ ID NO: 29257 - DNA, 327 bp, Glycine max
  unsure (1)..(327): unsure at all n locations
atgacacacagaatattcagagtttttaatatgcaacaatngaagntggatcccagtcaatcaatctagataatcccaattaagaacataacaataccacacatatgctcctgacaattatgatcagtctatgaatgcagatctcatagaatactaccaattaaggaacaactataacggactcctcacccacattaaagctcttgtcattcacaatctaatcttaacaataacaaaatacaagacatgaatcataacagcaccaacacanacgctctcatcaataaaaataattctgtaacataagaataattacaaagagtggta

SEQ ID NO: 29258 - DNA, 332 bp, Glycine max
agctttgagggtgcgtagcccaccatcttttcatagtagagtaccgataatgtgtctaccatcacgattatcgtctccctttttgcacatgttctgtagttgcatcctatccggaaccatatcagaatagtaccgatactgcctaacgaaggcaaccattaggtccttccaagtatggactcgggaaggttccaagttagtgtaccaggtaacagctaccccagtaagactttcttggaagaaatgtattagcagttcctcatctttgcgtatgcccttatcttccgacaatacatctttggatggttcttggggcaagtagtccccttgta

SEQ ID NO: 29259 - DNA, 585 bp, Glycine max
  unsure (1)..(585): unsure at all n locations
tggttgacccgtagtagccacttnanattaagcctgcngtcgcacctctatgtcgtctatctatcacaatctttatattaattaatntgcttgctatttaatgtctatgttatattcaatcgcaaaatattacttgttgatctcttatgagattgaacatactgcattattgctgtaatgcttattcttaaccatccaacccaccttatatcttcattgctaatgtctatgtgctttaagattttgcatgtgaagacaactttacatagaaaccgagtatatcttcccttagaatgacaattaacgcccttctgcgtgcatttgtagatcttctagtgtatcatgaataattatagntgcgtatanctgcactctctatatccaactgttattagcatgctcagaattaatgaattgcatatgatagtgttgacaatatgcacggctctacaaattgtatccatactattggacgtctgcaacgactgattataaaagacatagatctcgttataacatacgtgaatgatgtccttccactactcaagcccactggttaagttactgttgctcacctgtagctcn

SEQ ID NO: 29260 - DNA, 333 bp, Glycine max
agcttgctattatgttaagggactacaacaagaaaaataaagttagaaacttaataaaaaagatagaaaaagagaataaagtttaagagagtaaaaaaactcaccaaaactagaatgaagaaaatgagcgtcagaaatggtacggttaagaaggatgtttgttgtcatggtggctaagaaaaaaatgagggcaagagatattagctagagttaagaaaatggttgttgtcgttgaaactttgatggtgggtgcacaaagaaatatatgaggagagaaagcttaaattataacaaaaaaaaaaaaaaaacaagtccaggtactttcaggttata

SEQ ID NO: 29261 - DNA, 336 bp, Glycine max
  unsure (1)..(336): unsure at all n locations
tcatatntttaacacatcgcatcagtacttctcatatcttgtttctatttctagaaaaataaatgtagttgcacaaactgtactgataacaaaagtgaaatattgaatgatatttaatcttttcttccaccattcattcatgtaggatgagcaacggatctaaaaaaaattattttacgaggataatacataatttataatatctttattacaaagtttcacanaatacaatgatcccttggcaaaaaaaaaaaaatctaaaatactattagagaaatctacaaataaaatagtacaataatattagntaattattctttatctctcgtaattctt

SEQ ID NO: 29262 - DNA, 326 bp, Glycine max
agctttccagcaactcctctttgcacaagccactcatgcgcgacaagactgtgctggtaaccggcggagccggttacatcggcacccacaccgttcttcagctcttgctcggaggttgcagaaccgtcgtcgtcgacaatctcgacaattcctccgaggtttctatccaccgagtcagggagcttgccggcgaatttgggaacaacctctcctttcacaaggtgctcctcctccttctattgcctgtttcattcaattttgatttgttcggtgcctttttctcgtaaacaaagattatttcgcttcgtggcttgtgtttttcggga

SEQ ID NO: 29263 - DNA, 320 bp, Glycine max
agcttaataaatctatatatgctttaaaccaaacctcctgccagtggtaccttaattttcatgggataatttcttcatttggttttgatgaaaaccccatggatcattgcatataccataaggtcaataggagtaaaatatgttttcttgttttatatgtagatgatattttacttgctgccaatgatcaaggtttgctatataaggtgaaacaatttctctctaaattttttgacatgaaggatatggatgatgcatcttatgtcattggcattaagattcgtaaagtgatagaccttaaggtattttatgtctatcac

SEQ ID NO: 29264 - DNA, 376 bp, Glycine max
  unsure (1)..(376): unsure at all n locations
atcaattgatgaaacttcaccaaaaatcaaccattgaaaacctttattcaaacctttcanagttagtgagaaggctaaaagaacaattanggaacttagaacaactaaatccttaattgaaggcgtaggtgacaaccatagtgaattactaaacaagaatggtagtttacttagagtcattccagatacccnccaagcctcggaaaatacttccaaaatggtaacaagaagtacctccaaattaatcaatatcattaatgaagatagtgaccanaactcagataacacaactgagataggatcagtgtcagagaagaaaaataaatccaattaattcaaacactagaaaacacccttcannatatattatcaacgt

SEQ ID NO: 29265 - DNA, 340 bp, Glycine max
agctttgagaaaaatcaaacgacaataatttttaactcggatgtccgattgagacccgtaatatatcgagacgctcctaattgaaaactgaagctctgagcaaatttaaaggacaataaattttcactctgatgtccgattgtgtcccgtaggatatcgagacgctcgtaattgaaaacggatgctctgagaaaaatcaaacgacaataacttttaactcggatgtccaattgagccgtgtaatatatcgagacgcctgaaattgaaaacggaagctctatgaaaagtcaaacgacaataacttttaattcggatgtctgattgagtcccgtaatatatc

SEQ ID NO: 29266 - DNA, 300 bp, Glycine max
  unsure (1)..(300): unsure at all n locations
tatgcaggttgaaagcctttgaggaaagaggtatgcctatgtgggtgtggatgatttctccagatntacctgngtcaactntatcagagagaaatcagacacctttgcaactgtcaagcacttncacatctntggaagtccatgttacantttggcagatagagagcaaaggagaaagatggatcccaagagtgatgcaggaatattcctgngatactctacaaacagcagagcatatagagtattcaattccagaaccagaacagtgatggaatccatcaatgtggttgttgatgatct

SEQ ID NO: 29267 - DNA, 339 bp, Glycine max
agctttaacccaaagaaattactcttctcattaaaatatccaaaactgaaagttccctcatgtaaccattcaacctgaccttagtaaattgattttcctttttaatcatttgaatttgaaactcaaattaactcacagctggaagaaactaatacaccatccacaaatactagacttttagtattgaaagatagtggtttacgacatgaaaataataacaatgacaataattggatatctttttctccccttggattcctctgttcacctcactcctcaactctcttctttggccaaataaataaaatgcatttcaaacaatgaaaatgaagcaacatt

SEQ ID NO: 29268 - DNA, 337 bp, Glycine max
  unsure (1)..(337): unsure at all n locations
ggagaatagagtataagtatgtctgcaagtcacatccataggccatatagnntttcccacagaaagtcttatgtccattatgcaaatgttctgtcaaacaagtggtttcgatctgtgaacgagggaactagttcactgtctaaagaaattgaagttaatagtttagaacttcaaagaggaggaactactaaatgttccaaacagggattctatgactaccagaatcctccataggtgaataagaacatgttgaanacccaatacaggaggcatcatatgttgaagagggatgcaatattggcaatgcaacaaaagagtggagttagaccaataaccg

SEQ ID NO: 29269 - DNA, 338 bp, Glycine max
agcttaagtaaagttaagcattccagaccataacaagagatagtgctaaattggtttgtacatatacattatctttaacattactattagcttgcacaagatatatgaatccactttagttcttttatagacttaaagtttaatgtcttagctattgaacctaattagccttgttccattactttcttctacaatttataagaataattaaattaagacatattaaacacgaaattgcacaatgacatgttgcaggggcaaacctagactgagaagatagagaaggccaatcacaaaaaataaaatacatccaagaacctttttatgctgaataaata

SEQ ID NO: 29270 - DNA, 409 bp, Glycine max
  unsure (1)..(409): unsure at all n locations
atcgaagaacgatgaagaacgaatgaagaacgtcgaagaacggttgaaacctttgcgaaattcttcacggaaaacgttacggaaacgtttcagaagcgcctcggcttagattntcttcacggaaaccaattttccaagcaaattcgaaagagagagaagtgcctaaggggctgaacccttntcttcttcacttcctcccctatntatagcanaataggggaggtggttgtcgcccaactcgcccaggcgagccaggttgcttcctccagaagcaacagccttctggaggaatcttctggagggcccaagtgggcctggttggctatttgcaccccatttttactaagtacacccccctctgctntntnttggtgattctttttcgaaagtacgggaactacgaattcga

SEQ ID NO: 29271 - DNA, 338 bp, Glycine max
agctttagttcactgcttttatagtgcacgatatgcttccagaggaaaacacattgtctaaaagttactatcaggcaaagaagatactatgtccgatgggtatggagtatcagaagattcatgcttgcccgaatgattgcatattgtattagacatgaatttgaacaaatgtccaaatgccctaggcgtggggtatcacgatacaaagtcaaggatgatgaggagtgtagtattgatgaaaactcaaagaagggccccccagtgaaggtgttgtggtatctaccgatcgttccaaggtttaagcgtccttttgctaattgagacgacgctaaagacct

SEQ ID NO: 29272 - DNA, 243 bp, Glycine max
  unsure (1)..(243): unsure at all n locations
gattttctactgccatgattaggtcatctgtagttntaggagcctctntgtgttgtaatgaccgaatgacattaaagaagccaagatctaagacgttaaaatctagcgagtttaggggttgagaaaccaatcgaatgtcaaaatcgccttcactagcagcttgatggaagtcgttgtcatcttcatcaatgtgacatggaacattgtcttgttgtatgaaaatattttctcctctatctccta

SEQ ID NO: 29273 - DNA, 180 bp, Glycine max
agcttgcccagagaaggaatccacggatgaattgcttaccacctcgaaagactggaaagcggtttctaatgactcctctgcggcctccacataacgcataaaggatgggcagctcaccaagatgtcttcctcgcctgatacgacgaccatatgcccttccactaccaatttcccattttg

SEQ ID NO: 29274 - DNA, 435 bp, Glycine max
  unsure (1)..(435): unsure at all n locations
agatatgtagcagatattcaaaccaacttcactattcctagttatagattccaatattctatattacctgctcattagctgtatgaggaaggcctccaacatacacccgcctatcatgtcatgtagcctgtaaattcagtacatcaaagataggccataatcagggaaagtcatgctaaacttaaaatgaaacttagataaaactgtangcagtctcagcaagcctccatactcggaaagactaaacttaaaatgttgtgttgacgaagttagtgtgtttctactctttctctataatgactctctttcttctcaatgaaagagaatattttcttccagcagcacagtgatactaaacaaacaaaagcgcaatanaaagaaacacatgtaataagaagacagaacacacctttcacctacagcagcacatgatac

SEQ ID NO: 29275 - DNA, 334 bp, Glycine max
agcttttatactttcttagttgagttctaacaaactcagtaacagactcagtaactaccttcccccttccaactaattctagaacattcccaatatcctaacagaagtcggtacacgtccttattcccatgcacgagccttcgcactttcagtcttcatacgtagtcctccatgtacgtaggaggcttcgttttccttctgggcctctctccattctgctgtgagtgtacttcttgtacaccctcggttccacttgtaacaataacactttataaaagaagcgctgcctattttctcaaatttatacagaactttcgtgccagcgctgtttcta

SEQ ID NO: 29276 - DNA, 456 bp, Glycine max
  unsure (1)..(456): unsure at all n locations
tactaagcttattgctatgcaggttngtanacttctgtctgtggttgatcctgttttatntntgtggataaaaggcaatggtattaccttgtggtgcattgatatctttttactacgctttatggatttgttgaagctacatgttattatctctgacttcaatttgttgattggatattaatttgattagatatcttntaaagggcannttttttctagtgcactntggttgaacattgcttttatgattgatttaaagcctgaatcagaataatgagaattgtatattgcattacatgaattatacatcttagaatgtggctgtgggcctaacttaactccaaaagctagctcattgcgtgagggttgtcttcacttatatactatagctnggcactatctctagccaatgtgagactnggatttttccaatagtacaatatacacatggacaac

SEQ ID NO: 29277 - DNA, 332 bp, Glycine max
agctttggctgcgcagcagctctgatttcgtgagtatttatagaagatgacgcattgtaatcgattacaggtattggtaattgattacaggcccaataagccttctggtaatcgattacaggatgttgtaatcgattacaggctgcctgttcatgtgtaatcgattacactggatggtaatcgattaccagagcctatcctaggctagtttctaagagaatatctatatttatgctcaaatacatcctatatgactaattttcactactactacactaaattcaatcattcaattactatatacacaagaaatcataaattctatcataaaa

SEQ ID NO: 29278 - DNA, 401 bp, Glycine max
  unsure (1)..(401): unsure at all n locations
gtaagagtcnacagtggtagtgttaaatacttgtaactctatgaagttagcagaacttggtagttaaccaagagttggatgtagtctgagtgatatagacaaacaagtatagttctctgtcttatattcataaactgacttagtgtntgaatatgattntgtttgacaaaataatctaatttgcaaaatttgtttctattgtttgaacttgccactagaaatnttttttatctgttttacaaagttattnttcaaatgagaacttttgttntcacaagagaggtttataaaagttttaaaatcacaattcaatccttctacttgtgatatttgcctttacaaantntntggtaaatatcaatgtgtgtgtgtgtgtgtgtataaagagacaatgaatctag

SEQ ID NO: 29279 - DNA, 329 bp, Glycine max
agcttccttgagaagattcctagagaagctagagcttagctacacacatctctctaataactaagctcacctccttgagatgagaagctagagcttagctacacaccccctataatagctaagctcacccccatgccaaaatccatgaaaatacaaaaaaaaaagtccctactacaaagactactcaaaatgccctgaaatacaaggctaaaaccctatattactagaatggccaaaatacaagcccaaaagaataaaaaacctattttaatatttacaaagaagagtggaccccacctttgcccatgggctcaaaaaatctaccctta

SEQ ID NO: 29280 - DNA, 614 bp, Glycine max
  unsure (1)..(614): unsure at all n locations
cgcgattgaaaaccctttcgttangccacactataganatttganagccagtcttgaggcgacactatanantactcaagctagtgacgtttgtcagcatgttatagttagtgctacctcatctggaggatcgctgcnacctctatctattccggaacaggtgtgggaagatgtatgacntgattgtatcacagggctgcctatgtcgagatgctatgaagctattctgggatgagtggacaggctgaccagatatagcccttttgcttcattgatacacccttatactgtcaaaggaattgtagagattttcgtaagggagatagtgaggctacatggagttccatcatctatcgcgagtgatacagagactgtatgtatgagtgtgtgatggagagaatgntgtatactcacgggacaatgctcatgatgagtacnacttaccttnncgagactgattgacagaccacagtcacatatcggtgtcttgtacctatgtgcgttgttcattactgccagaccgacattgtcccttaggtgacttgcataatctgatcatacacatcactagtttaggactctcctctggcgtgacggcggacctcagatatcan

SEQ ID NO: 29281 - DNA, 332 bp, Glycine max
agcatccacaaactgctgttggcaattgactcacaaatcatagcacggccgagaatttggtcatgagaatcaacacgaagacgaggtggactaccaacactccagacaggttggatctcatgggctagagcatctatctgtaactgcccaccactccaggcagtcaccaaaatacaatctgtgctgactaaattgtaaagaaaactaacagcacgaccttcacattctgcactacgaccaactgaatcttcattcccatcctgacctactcttcgcagaggtccctacaaaatcaaaagacataaagtagagtcataatatgtaacactgcc

SEQ ID NO: 29282 - DNA, 333 bp, Glycine max
agcttcttatccaaggcttatcttggtggtgaagctctttcttccatggcttattccctagtggatggcacctcctctcacctcttctcctttgtcttccgctgcatctccatggtggaaaatcaccattaaaggacctcattgaagctcaaagatccagtctccatagaagccccacaagcaagcttccatcaagtggtatcagagcacaagagcttcaagtaggtgctccttaaacctccattaattttttgctttaccttctcttccattgttgtttcttcatttttctccatgtatctcctcacatgtcttgtactaaatgttgttaac

SEQ ID NO: 29283 - DNA, 272 bp, Glycine max
  unsure (1)..(272): unsure at all n locations
tgtcatcatatatagcggatcatcaacctcaggatctcggcctttgtggaggtnttgctggagaaacagttgcctgctgatcaaacatagttaaataattatgctgaataaattaattgaaaaatagaagcatataatcaaagtanaatacatgttctgatagatgcttcacgagatgtgtcggccaagcaaggaaggtggtaagtgcctaccccactaaggtaacctcattagtgggtacaggaacgagagcctgtgcatctataacctcc

SEQ ID NO: 29284 - DNA, 328 bp, Glycine max
agctttacataattgtattagctttaaaaaaagatgcagttcaacttgataggattagtataactaaagatatagttgttacaccttagagaggtcatagacccacaacgaaaaataatagaagtaatactcaaaacttaaaggatgttatatcaattataatacaaagtaggcatatgctacaattgatgtgtggtctatagttaagatgtacatgacttgattgaaggatgatattgaatacatttgttgatgcaataacttgaatggtgatttatgagtgttgtggaatcattaaatgttttgctttatctctaaagtgtgaatt

SEQ ID NO: 29285 - DNA, 312 bp, Glycine max
accttggtttagcccagatgactttattatttatttggacaagttttattatgatgttagaaaggggaatgtgaaccttctacgctcttgaaagacttatatttaaatggggtttaaatttttttaattaagtttgatttcttatttcttttattattagtacatatgtggatgaagtagaagatgtcataataaacatcaagaataatagtctaatgaggcattttgatatcaatcatcttcaagaattacttcttaagatgtatttggtatacattgatatcaaaatgtctcattgtatacatgacctag

SEQ ID NO: 29286 - DNA, 421 bp, Glycine max
  unsure (1)..(421): unsure at all n locations
tctctaggcttcacccttagtagaactggctactagacacacacaactatatgttgtgttccctaggctctaagaagccatagttacnttgatggcacttctagtcctcttcagtaccaccttaactaaacacatacatncatcttttgtattcttagaacttcaaaataagtagtcatatcactactctgttaagttatcttcaatagcacctaacactgcctacgcacaacaactggtgtggtcctttcataccaagtcgcataaatagtataaaatggcaagtccgagtatcatattcacagggactngcgtaatactcanaaaaatagaaatgttcactaactatggctttnggaaacaacanatataatggatgggatgcgtanatctacataacaagagtataaataaacaaact

SEQ ID NO: 29287 - DNA, 340 bp, Glycine max
agcttgtaggattatggggtacccatcacatgtggtactaggtggcggtcgggcgatggtgcacaacaagttttccacatccacaatgcgcgcataaacccaccatcccctgttgcccacctccaactgaactcacgtactcccacgtagcccatatcctcgtttctctccacccgggtccccatcaatcctcccaagcttccacaacatccaagcaaaacaacattcaaacagcacaagctatcacagccaagcaaaacagagcaaaggcagaaaactctgctcaacacatcaaccaaaatcacagcttttctctatttgattggagcaaaaagggccc

SEQ ID NO: 29288 - DNA, 330 bp, Glycine max
  unsure (1)..(330): unsure at all n locations
cttcagactgatctacactngcacagtggccaaagatgcatgggagatcctgataatcactcatgaaggaacctccaaagtgaagatgtccagattgcaactgttggctacaaaattcgaaaatctgaagatgaaggaggaagaatgtattcatgacttccacatgaacattcttgaaattgccaatgcttgcactgccttgggagagaagatgacagatgannagctggtgagaaagatcctcagatccttgcctaagagattngacatgaaagtcactacaatagaggaggcccaagacatttgcaacatgagagtagatgaactcat

SEQ ID NO: 29289 - DNA, 339 bp, Glycine max
agcttgcccttggtttagttatgattggtacatgatttgggacttgtaggattcaatttgggcaaaattggatgagggaaagagtggttttcgaaatctgcactttatgcagaattttgctgttgaaatgtgcagcagaattttgtataagtgcagaaaaatacttgtgcatggctggttgtgaaaagggtagtacatatggggttgtggacatttgctagcagatcccaacggtcaaaatgtagacttatgtactagagacttccagtaaaattttcgagtcaatccaacggttaacaaattggaacgaaggaaatgttattggggtatttgtatgtg

SEQ ID NO: 29290 - DNA, 358 bp, Glycine max
  unsure (1)..(358): unsure at all n locations
atatatagagtgactactcagaaggaagggataggccttgattangtccatctaatcaatggagagcttgtaggccttggaacttcttcatcaatggagtccattgcttcttgtaggccttgattatgaatganaaatgatagaacctaanatcaacacanaaacaagattcaagagtagatctacaaattntgaaccatagaaatgcaagaacaagtgtagatctaagaattaatcggtttannattttttgaatctactctaaacagcaccaaaccacaagacaatggaggatatacatggagaataagatgaataacaaggaattaaagagaattcaccgaacaaaaagatagag

SEQ ID NO: 29291 - DNA, 337 bp, Glycine max
agcttgttgttttgaacgataagcttagaagcaatctaaaatgggatctcacttaattggcttcaacacaaagtgagcttgataaattgaagcaagaaaatgaaaaacttgtttcaagttataaagccaccggttgcgtttatactagatctcttaatatggataattacaaatctttgtaagatgagtttgaaaagtttaaaaatgatcactatgaagaatgcatgaagttgcaaactgagctttcctgtcttaaagatctttttagaaaaatgaataaaggaaagagtgatcttaatcactaactcagtgtgcaaaagcatgctactgataagac

SEQ ID NO: 29292 - DNA, 331 bp, Glycine max
  unsure (1)..(331): unsure at all n locations
tcgataatgtgtctaccatcacgaatatcgtctccctttccatcattgttggtaccacttgngccgccagatccctccaccttttgggcgtgttctttgaaagatccgtccncctttntgcaaatgttctgtagttgcatcctatccagaaccatatcanaattgtactaatactgcctaacaaaggcaaccattacgtccttccaagaatggactcgggaaggttccaagttagtgtaccacgtaacagctaccccagtaagactctcatggagagaatgtatcaacaattcctcatctnttgcgtattcccncatcttctgacaataca

SEQ ID NO: 29293 - DNA, 337 bp, Glycine max
agcttgtggaattcacctctatcccgatgccatatgctgacctactaccatccttgatcaccaaccagatggcagtggtgaatcctttagaagatctaccagtctcccttccctcgatggtacaaccccaatgcaactagtacctatcatgagggtgtcccggggcattcaatagagcaatgtgtggctatcaaacacaaggtttagagtttgattgatgtgaggcagttgacttttcaagaggacaacctaaatgtaaggacgaatcctcttgtcagtcataggggatcgacggttaatgcaatggaggaatatgaacctcgggggtcgaagcgga

SEQ ID NO: 29294 - DNA, 318 bp, Glycine max
  unsure (1)..(318): unsure at all n locations
tgcgtcnattaacanatccaatatcatagtcattgccttatcgcttaatccacacaaaacttttatatgatataatttgattataaattctaattntgtgtacttgcttccttcatacaatgtttggctcccgtcctttagaagctcataaaagccattatgatcttctcttggttcatcatttactatttcatcttcatttagtggttgtgatgcacctacattagggtcatgttgcctatattgttcanatgcgtcattgatcatcatttccattgggttntgaggttgaacaccactatcttganaacatcttca

SEQ ID NO: 29295 - DNA, 339 bp, Glycine max
agcttgatcaagaataaagatttatacatttcaattcactcaatcatacaattgcttcattcaattcaatcacaaacactgtagttcacatcaaaatcaaccactgaatatcattcaagtctctgttcaatcatgcttttcacaagctacaaacatactactgaaattttaaatttgactgaaatttaaagaaaactaaaacataatcataaattgaactaaacataataaaataaactgttcaaagtgcagaaatttaaaaattctgatcctgtgagtgatcctgtgcatgctcattcaagtccaacaatggtgcaactggtggatcttgaacaatgg

SEQ ID NO: 29296 - DNA, 374 bp, Glycine max
  unsure (1)..(374): unsure at all n locations
ccttctcaagtaactcttcttgtatcatcaagtcttatgaattacattctcccctttntgatgatgacaaccacctgtaggttaggagcaacaacaaagaanaaatatctatttgcatatagtttactcccccttggtttgcaatgattgcttatatgagacagttgaagatttcatatttttcacatgtaaacaaattgtctcataaataatagaataattttcatactatnntatctnttatctttctctccccctttgtcaacatcaaaaacaaatcatgaatagagaggagaaaaatgttacctcttggtgtaatgtatgagaatcaagtgataccaaaaaagcattaaaccaatcattcaatattgatc

SEQ ID NO: 29297 - DNA, 334 bp, Glycine max
agctttcaaatttaaagttccaaagtacacaacatagactagtacctactgaataaaaattagtcatatccaactacacatcctaataacaaaataaaacaacaaatgggtcttcacttttcttcatttttatactagatctttatcaatagccttccttccagtgaacctcggtgttggcatgaaaagtaatggtgttgttggtgggccatccacaacaggtgcgtctattgttgaagtgtctgaaatgttcttttgtttgggacttgttatgtttagcttattccttgctactggtggaacatcagcaatagatgcagggacctacatgcaa

SEQ ID NO: 29298 - DNA, 230 bp, Glycine max
  unsure (1)..(230): unsure at all n locations
gatgtaaatatctnnttctatctatttaatgatgctttgtgtgttcattgagctgtcagatcttcattctaccatgctatagccttgatcatgtagatgcatgtgtgtttaggatcattcaatagtggatactgtgcagattcttataacttgataggacggggctagatttgtccatattcatgacgaatcggagtacggtcacctagtcttcgtatgtatgtcttaat

SEQ ID NO: 29299 - DNA, 333 bp, Glycine max
agctttataagtgtgggttcgggagacaaaggtcaagcgttcgcgatatgcgaagatgatattccgagtactttggatttggtacgaccatgctctcctgatttccagctgggaaattggcgagtggaggaacgccccggcatttacgcaacaagcataatgtaaacctttacggttttaaaagctctatagttgggcctaggctttagagttttcattttgttaaggctttgtgtcttttgtttttgaatttataatacaaggatctttcttcatctgttcctggtctctacccattctcattcatttgcatgtttacttctttttctaaaa

SEQ ID NO: 29300 - DNA, 307 bp, Glycine max
  unsure (1)..(307): unsure at all n locations
tactcagcttcgacatgataatggagacacatgaacagcgctaggcaatgacattcatggtgctccgaacaaaggcggagtatggaggattggcttgatggtccacacttangcaattatgaaactcagctccaaactcgaaagtggaggacacacgaacaaccctaagcaagaacattcatgtggctccgaaaaaggacgagaatggaggattgccttgagggtcctctcttaggcaatcatgaaacacagctccaaactcanaagtggaggacacacgaacagccctaagcaagaacattcatgt

SEQ ID NO: 29301 - DNA, 333 bp, Glycine max
agctttgagccaaaatcccaacttaccataaaccttgaaccagggtgagaatatcaatccttgccctcggaagaaaacacaaaaagaagggaacttcccaatcaaaagagtggaagaaaacaaaaagagaaaattcccaatcgaagagtgggagaaagcaaaaaaaaggaaagaaaattcccaatcaaagatcggaggaaaacagaagaaatatacagaaaggtctttggaccagacaatatctgaacaatacagaattgtcaccaagaaaatatgaaaagaaaggaaaccacgacctaaagtggtcctctccctttgattaccaaccaaaat

SEQ ID NO: 29302 - DNA, 697 bp, Glycine max
  unsure (1)..(697): unsure at all n locations
tcccaggactgagtgnntnncnctgntncntnnncttcntntnnnttttccccnnnnnnnnnnnnnnangacgacgatgatcgccccttcgatangccacactataganactcaagccngtaatagcgtacctcgccatatatatagcaggaagaaagcgtgctgtgtctaacgcgncagataacatatccaatatcatagtggttgccttatcgttgaagccacgcaacactggtatatgatatacattgactataaagagctagtcgctgtgtactggctatgctcatacaatgcacgcgctcccgactctagaagctcataacagccactagtgatcttctctcggctcatcagttactatcncatatgcatttagcggttgcgatgcacctacaccatggacacgttgcctatattgtacatacgcgtcattgatcatcattttcatcgagatctgaggttgaacaccactgtcttggaaaacaatctccacatgagaagagtctaaagcttgcttctaccatgaacataccatataacatagttgtgaagacacggttgaatatcaagtgagattcactatggtcttagttcgcagtcgtagatcaccattcggacatggcatggcactatgctcctcaggatctctctgatatcaagcctgataattactctaacggtgagaagcgatggg

SEQ ID NO: 29303 - DNA, 332 bp, Glycine max
agcttgtgtaagttgctaacatgatgcttatgtgacaatgagttaaataaagtgaaaaataaaaagaatcttgataagagaataaaaaactaagacacgtgctttggtaagttaactttataaatactattttatatgtatcattattcaagagttattaattttttttaaaactataaaaatttatatatttaaaaaatatttaatatatgaatgtttttaattttattttatatcatttcatatatttttattatgaatatttttcatatttttattttcattttaccaatttataattaaatttcataaattaatatataaattattta

SEQ ID NO: 29304 - DNA, 621 bp, Glycine max
  unsure (1)..(621): unsure at all n locations
tgtgttggcncccttgaangncnncnnnnanatgngccctttaatgtgcactatgatactcaagctggatacattnggcactctatttgattntaccatgctatctctacatacataagacagtgccaccgtcccaatnttcgcacaatcatattcatatatcattggngcattacatcgagcacttggtgggcgcacacttagacattacattgcagagaatgggagcaatgtggcatgccccattgcttcagaatacaacctaggcctaaggccttttcattcaaatcctcaattcaagaaaacatgcaccatagcaaaccacaactgccttacatatataagcatgttcacacaattcgaggcaccataagatgaagaaagcgcatcaatggaaagcagaaacatcatcgatggaacaactatcttgtggagtgaattgaataccanaacgatagcacatgcgatcananggctgattgagcacgaaactgcatgccttctgttctctctttcttgatgaanagacggagttggacattggccttnantnttncttctacncctcaattcttatagcaaatcttagaattacctcaacccatggactatctaatcgct

SEQ ID NO: 29305 - DNA, 332 bp, Glycine max
agcttgcttctacagggtgacctattggaggctcccaacttacttccaatgaaaggccttcttgttacaaaatttgaaagcaatgaaggtaagtaaattgtcaattacaaaattataaaaaggtcctcaattttggtggttgttctttctttggtgattcactcaatttggagtgcttcttagcccaatagctcttaaggtggttgaccccttgcttcttgactcaaattcttcaagggatgacatcaatcctcctttccaattccctatatggcaactcacaaacaaggaaacaaagagacaagaaataaccaaagacaaaaaaaaaaatg

SEQ ID NO: 29306 - DNA, 305 bp, Glycine max
  unsure (1)..(305): unsure at all n locations
gagagccatgagggcggactcatgggccactntgngatagacaagacccttgtcttactcannagaaagttntattggccccatatgaagaaagatgtccataagcattgcactaagtgtgtggattggttacaagccaagtctagggtgatgcctcatgggctatacacacccttacccatccctttctcaccttgngtagacattagtatggactatgtccttgngcttcctagaacccanagaggtgtagactctatctttgtggtggtggataggtttagcaagatggcacactntatatc

SEQ ID NO: 29307 - DNA, 328 bp, Glycine max
agcttcatgatgatgaatcaagttgattcaagtagttttgatgatgacaaagatgatgacaaaaagcccaagagaatgatttcaagattgagtcaacaagctcaagatcaagtttaatttcaagtttcatgagaagaaatcaagaagattcaagaatcaagagaagtttgattacaagattcaagagaagatgaattcaagattcaagagaagaaatcaagaagacttcataagggaagtattgaaaagatttttcaaaaaacaaacatagcaaagttttgtttttcaaaagagtttttctcaaaattttctaagttaccaaagtttt

SEQ ID NO: 29308 - DNA, 379 bp, Glycine max
  unsure (1)..(379): unsure at all n locations
gcagtantttgtacagtacacacacgcacacacacatggtagcaaggactccattgcactngaagaagttaagtccaatctctattctagagagctntgactaaaggcatttgggaatggtgatgaagcctttatgttcggattattggtgacaaattctgctaaaggatagaagaataagaaaggagaaggtggcaagaagaggaaaatngatcctangacatctgcaattacaacaaagaaccgggtcattggaagcgagactatctaaagaaagcanagcaagattctattgctgctcttgtttagaatgactcctncatcggaagtgatttagttttggttggtggtgaacaagtataacaacactctgaacaat

SEQ ID NO: 29309 - DNA, 328 bp, Glycine max
agcttgcagcacaaaacaatccaatgaaaataagaggcacaagcatgaaacatgagaggcacaccttagacaaatgaaattggcaatggatttaaagagtttaaaggatgagagtaattgccaatgtttgctggaaaaagacagagtacaaaagagaagaatccaacaaagaatcacccttgccccatggtagacaacataaaaaatcaattcaatctccaaataacaatgggaaaacaaatgccatgtgagaagagtctgatacagtaccttgataactgaaaacctgtcagttttcacttcaaatgtcacaatcttttcaactata

SEQ ID NO: 29310 - DNA, 330 bp, Glycine max
  unsure (1)..(330): unsure at all n locations
tatcatcacttgctgcacaagcacaagtcatagtagctaagggaatggacctagctatgccaacccgagaaactgagtgtagtgccacgtacgtaccaattaacaatcacatgtgcagcataaattaggagttaatcgacttatagattgtgatttggatctaccttctgtcaatacatgcaataaaacatcaattattgcaactggtggttacatcaattatggttacattngcccttaatcagatatgaatatgtattgtggtataggttagcgtcacgcanattagtactatatgtattattcatttgttgacaacgaacgcatgtg

SEQ ID NO: 29311 - DNA, 340 bp, Glycine max
agcttagagctaattcaaacgacaataactttttactcggatgtctgattgagccccgtaatacatcgagacgctcgaaattgaatgttgaagctctcagcaaattcaaacgacaataactttttactcggatgtctgattgagtcccgtaaaatatcgagacgctcgaaattgaatgttgaagctctcagcaaattcaaacaacaataacttttaactcggatggctgaataagtcccgcaatacatcgagacgctcaaaattgaatgttgaagctctcagaaaattcaaacgacaataacttttttccttagatgtctgattgagacccgtaatatat

SEQ ID NO: 29312 - DNA, 278 bp, Glycine max
  unsure (1)..(278): unsure at all n locations
aagttattgtcgttttgaattgctgagagcttcaacattcaatttcgagcgtctcgatgtattacgggactcaatcagacatcggagtaaaaagttattgtcgtttgaattagctcagagattcagaattcaatttcgagcgtcccgatgtattacgggactcaatcagacatctgagcgaaaaagttattgcngtttgaatttgctgagagcttcaacattcaattctgagcgtctcgatgtattacgggactcaatcagacatccaagataaaagt

SEQ ID NO: 29313 - DNA, 339 bp, Glycine max
agctttagcttacagagttttagaatatttggattcttatgttcagagtttcatgatcttaacagtcctattgggccagggttctactatttgtattgcattactactaaattgacctagactattggtataaaatataaatgaccattaggtatgtgttatgttttacatatcaatatcaatctcctgtcatgttgtcctttggttctcttttcctcctttctcagctatatatattttcaccaactataaatgtatgatgttaaaacttcttattaaacatagtaaacaataccataaacatcatgatctggttaggcctgttaattttgcaatcat

SEQ ID NO: 29314 - DNA, 197 bp, Glycine max
  unsure (1)..(197): unsure at all n locations
cgtgtatagctgtactatggtatagacaaacacctgctcctttccttcangattgcagagtaacacaagtattaaactattgatcacagtactataatatagccaatctatactgtttaatcatcagaatacttgtataacaggtgaccctcttaactcttaagtcttgttctgagctaagagaatataaatctaat

SEQ ID NO: 29315 - DNA, 336 bp, Glycine max
agcttggactgagcattgatgaagatgctggtgaagcagatgctgacatgcctcctcttgaggacgctgatgcagatgctgagggtagcaagatggaagaagttgattaaatctgacttaattgcctgttacgtttttagaaacaatgattggagaaacagtctttttactatgttttatgttttttgaattttcgaaattttggaacgttggctagttaggtgccgtatgtagtagtttctttatggtaaatttgtgtccgctccctggccaatgaatttgtgctttcttcgtataatcgtgtatgctgattgcggaagtttcagttcgggaatg

SEQ ID NO: 29316 - DNA, 434 bp, Glycine max
  unsure (1)..(434): unsure at all n locations
cgctgcatgtacacgtctatcttggctagaaagcanaggcatgtgaatgtgatgatgacagaggaagagagggcacactcccaacaaaggcaaagactcctttagccattcccgggttgtgctctctctcttctgtcaacatgagatatctcacatcactcatcacagtccattcccaaccaccaatagaacccttcaagacatgcatttctactcgtgatcaagatcaccctgtccattatgaacaataacaccatcatgcatgcatttggataagaccatacatatataataattatatggcangtggacctttcgtgtatcaaaacaagcatatttctaattctttanaattgctttttccctactctattcttgggctacatatgtatatttatattacccaataattaaatacataactacagtttatt

SEQ ID NO: 29317 - DNA, 335 bp, Glycine max
agcttcaagattgggaacatgtaagagtaactcaggttacttcattttagacatagtatctgtacgttgtgcttaagtttttgcattttgtgcttgtattctgagttgtcttgaagcctctttaattactatgaattataactatgaaatttcttttttgacagcttggaaggaaggtgaggagtaaagacaccgattcttgtaacagatatgcaattgtggtactaattctcaattgatatttgatagtgctcaaataatgtaagtgttttttttccactgcaaaacttaggttgcttgcaatgtgtttgatgaaatgtattatttcttctttg

SEQ ID NO: 29318 - DNA, 337 bp, Glycine max
  unsure (1)..(337): unsure at all n locations
tacatctctgctgagaatatctctcttttccgagggtgactagatctctatagcctntcaccccatcaccataacccatgaatagaccctntcttgatctangtaccagctntccttcattgacatgataataagcattgcagccaaatactcttaggtttgagtagtttgttgttntgtcattccagatttcaatacgagttttaagttctatagtagtagaggatgttctattgatcagaaaacaggctgtattgatagcttctccccaaaaacttctgttgagaccagcattagacaatangcatcttgttctttncagaaagtgtttgttcat

SEQ ID NO: 29319 - DNA, 337 bp, Glycine max
  unsure (1)..(337): unsure at all n locations
agcttcttgcgtagccgctcttggtgctcagaaaatcccaaaaacaaatccctcttattactagctattttgaattctttagttcctgaatgtacaaccttcaaattgttgctcattcccctctttgttttctgcaaaaaagaaaatcaatatcaaagaaaacatggagagaattgtcatggttattattactcgaaccagaaggaataacatctaaacaagtcattttattcttacgtttattgttggtaaacccatntttatgccttcatcccttcatgtcttgttttatcacaactcttagccgaatagcctatcttcagcacagttgaatctc

SEQ ID NO: 29320 - DNA, 390 bp, Glycine max
  unsure (1)..(390): unsure at all n locations
gttagaataagatagaacattccacgtttgggctagagtggtaagatctttcctcaagagcttccacggtagaccctcgacattaagtacaaatccgctcccagggatacacagccaggctgcaagctcctgaggattangcctcagtctagcaaacctggagtaagagggcaagctctccccttgctccatgaccactggagtctccaaaaaggtgttgagagaatcaacatcaaattttattacgtgccgtcgaaccctaacttgctngggagacttgtccttagggacatatagagttgcatataattcctttacaattgccacatcaatgcttccctcagtcaagttggtcagctgtttatgccagtttcttctaatcgattctct

SEQ ID NO: 29321 - DNA, 331 bp, Glycine max
agcttccttttatcgtgtcacgtttaaaaccgagctcgatggtggtacgagcctttgatggtactcggcgggaagtgatgggggaaatcgatattcccattcagataggcccccacacttgcaatgtggtgtttcaagtgatggatataaatcccgcctatagctgtctcttggggagaccttggattcatgcgctgggagtggtcccttcaacgcttcaccagaaattgtagttcgcagtgggtggacttttggtgatagtatcgggtgaagaggatatgttggtgagctgcccctcctccgcaccatacgtagaagcggcagaagaatc

SEQ ID NO: 29322 - DNA, 358 bp, Glycine max
  unsure (1)..(358): unsure at all n locations
aagcttcagccaaatcctgactaccatanaccttgaccccaggtgagaatgtcaatccttaccctcggaagcaaaanagaatagaagggaaatntccaatcaaaaaagaatagaaggaaaatntccaatgaaagcaanaaaagaanagaagganaattcctcaatcaaagagtgggagaaagcacaaagaatagaaaggaaattcccaatcaaagaatgggagaaagttaaataggaagaagaagaacgaaagaaagctcctgatcagggattgaaggaaaaacagaagaaatgtgcagagaggtctttagactggacaatatctgaacaatacagaattgtcaccaaatgaacaaaa

SEQ ID NO: 29323 - DNA, 331 bp, Glycine max
agcttttccacttattactctgatagagttcccaaacatcaaagagaacgacaagggattgaagcctccattttatattgtcttcgtgtgatgcatatttctccatacactgatatttttttgaaaattccaacgatttaggtgtgcggaattaaatttaaaacaacatatcaaaatttcacgacaatccaacgataaacgagtccacgatcgtagttttaccaagacagttctgggtttctgcaggaaaagaaaaggctaagttgcgaagtgtatttctctcagctcggacattatttcgcaatttccaacggtaataatgtttggaaat

SEQ ID NO: 29324 - DNA, 342 bp, Glycine max
  unsure (1)..(342): unsure at all n locations
acgctcaacanagtanttttganacctactgtacgttgatttgaccaacgctgttatgggaatgttgcgacaatccttcanaaccttattgatacattctgagaggttggttgtcatgtggccatatcgacgtccttctctatcataagccatcgttcatttttcttttgaaatgcgatcaatccatgttgctatggctggactcaattcacgaaaattttctaaattntgataaaaaaatgtgcttgcaaggagtgtaggctgcataaaattagttatgaataacaattntaagtacatatgannagtaaataaacgtcaaccatcaaatatganatctta

SEQ ID NO: 29325 - DNA, 331 bp, Glycine max
agcttgtgactttcgacattttctttaaaactagtcacttaaaaagttgtgacttttgaaaaaatcttcagaaacaagtcacttgaagaattgtgacttttggaaatgtatttttcgaaatcagtcactggtaatcgattaccattaaggtgtaatcgattacacatcaacagatgtgacttttcattttgaattttgaaaattaaaacgtttagaaactctagtaatcgattacaaatgttgtgtaattgattacacaagtttaaaatgatttaaaactgttaaacacaagttgtaactcttgaaatttgaaatcttaactttttaaaac

SEQ ID NO: 29326 - DNA, 573 bp, Glycine max
  unsure (1)..(573): unsure at all n locations
agctggatgacgcactgtaagcaccttganatgtaccgtcgtagcgccttaatactaactcgcggaaccagtgttgtacgactatgttggatggcgaacttgatgtgtgggagtcataatcatgaattggccacgcattaatgtagatgcanatgcgctttggtgtcttgatgatgatcatgaggatatgatgcaatcgatgcanatgggctctttcagattataattcacgacactacttcaacgatacaagtctcaacgtcatgatgatctctactcgattatgagcggaattcctatatggatcaacaacacggattgtgcaagtaattttaattaataagcgtatatcaaaggtatactctctggtatctgataccagtggcaaatatttctatacaactactaaagtttgatcgaaatttagactgtgtatcattacacattttggatcgatacagcagtactaatgtgtattaaatttaaaactgtatcgaccacatttctgtatcattcctacagatttcgaaattattcatagtacactttcaaagctatcttgccccatggcct

SEQ ID NO: 29327 - DNA, 330 bp, Glycine max
agcttccttcatcctttgccccagttactttctccttggggaaacaggtgaggcgcttgattgagataaagggttttgattacttgcgccagggctatcatcttgtggggtgttaattgcaagatctagctcttcttcacttgggatgctagtcgtaacaagaatcatacaaactatgattaaataaaataaatcaaagaaattaatttaactcggcttcttagaacatgtttagttaaaaaataaaaatcattaataaagatttcaatttcaaagatatgaaagaaaaataaaattaagaagcacattgccatactcgatcgaaccctc

SEQ ID NO: 29328 - DNA, 356 bp, Glycine max
  unsure (1)..(356): unsure at all n locations
gctcgccctgtcgagctanngtgcttcctcaagaaagcttcgtcttctgaataacttcctggaaggcccaagtgggcctggttggctattgcaccnccctgtntactaaatacaccccttgcctttnntgctgattcttttctcgtaatgttacggaactntacgaattacgtaacgatacttgttttcttttcgtaatgtcacgaaaccttacggattacataatcatcccttctttggctttcagaatggtacagaacttcacgaattgcgcaacaatccttccttttgacttccgacatgttacggaacttcacggattgtgcaacaatggcttcttttgacttccgacatgt

SEQ ID NO: 29329 - DNA, 330 bp, Glycine max
agctttaggctgttactttatttttttaaagctgatagcgctactcaaaaattaaaatacataatgatgacctcctaactgaaaagatcaactgttccaatagagccccaatacctcaagagactaaagcttgagccctcctccatgctctacgatggacaaatggagcttggctaccatgaccttatttttgagagcgactgtaaaacgatagaaaataacatcacttcatctgaatttcatattttcatgttatcatggccaaaagaaaagctatcctcccttgtattccaaactctacggtaaattttattaggagacaagctaata

SEQ ID NO: 29330 - DNA, 544 bp, Glycine max
  unsure (1)..(544): unsure at all n locations
cggtgcgcgtgtangcccnnnaatgaagcgtgatgacaccttgtaagcagctcaaatcctgagttcttgtaatgtgctgcacatgatgactctgtgcttacactgtacatacctncgaagcagagtggcccatgtcttaaccacagtagatgcctatctcactgaccatatgatcatcggcttcgcgtctctccatatttgtgctgattgacatgaactaaccaccttagatgcgtcaatagtcatgacgcatcgtctgatgcatgcgaactgctttgtcatgaaggtcttgacattgcttgactgtatgtacgacggcganacctagttgacatgactggccctcttatgcaaagctattgtagaatcatatcgaaaatgggcagaattcattaccgtattctgcctaatacgaggaacagcggtctgctgctccaccacgttctttgatgtangacagagacatgcgaaggatttactctctacccatacgcaagagactgtgcacgccacagtgatgattctcacctatgtcttcttcccg

SEQ ID NO: 29331 - DNA, 328 bp, Glycine max
agctttgcggatttggtctttgctggcgaaatgatcgaagtgggtctaaaaagaggcaaatctgatcatcatgctttgataaatgcaaaaactggggcaaataaagagggtgagaatgagggataaacccatgctgtgactaccattcctatacggccaagtttcccaccaacccaacaatgtcattactcatccaataacaacccttctccttacccaccacctagttatccacaagggtcatccctaaatcaaccacaaaacccacctaccacacaaccaatgttaaacaccacctttagcacgaaccaaaacgctaaccaaggaa

SEQ ID NO: 29332 - DNA, 223 bp, Glycine max
  unsure (1)..(223): unsure at all n locations
atgttctcaagactatactaatacattntctgcccaagtttcatggtcttgcaggtgaagatcctcatgagcatcttaaggagttccatatttgttgtttcactatgaagcccnctgatgtccaggaagatcatatctttntaaaggctnttcctcattctctagagggagtggcaaaagattagctatactaccttgctcccaggtccattttcagctggga

SEQ ID NO: 29333 - DNA, 288 bp, Glycine max
ccaaactaaccgattactaattcaaacttgcccctattatttttaccagaagatcaattatgccaccaaatgccaactatcctaagatctcaaatagctaattattatcacgacaacatatagaaaaacaggaggtgacagatgaatattgagcaaagattacagatccagcattgacgtaaccggaagggggttgagaaacatgaaataaaaactaagagcaacacctttgctaaagcccagatgctgaagtgagcacgatattcctggtaagccatgcctccattg

SEQ ID NO: 29334 - DNA, 338 bp, Glycine max
agcttatcaacacttttatatataacaattactggatttggtttatgttgatgaaggtatatggtagcatatacttcagatcatctttcttcaagtgagtttgaaccccaaccgtaggaaaggcagtaaggcacatgttgtgagtctagaccactcacaagtattttagtcatgtgatgagcaatttatgtagtaacataataacatgcgagtcttcaactaataagttttcaagctatgattatgaatttgctctcttcctttttgtttaatgctttctaattgtggtaagtgtgtcataaagtgttttgttataggaaagttaaaacaagttaatt

SEQ ID NO: 29335 - DNA, 265 bp, Glycine max
  unsure (1)..(265): unsure at all n locations
ctcacaatcagatgaagacatattataacggacactatgaaagctgctgaagtcggtcttaagtactcaatatatatatgagagatcactcacaccgaaactacctgaaattttaacattacaatcttggtaaactaatttaaaaaggattgttatttgtagatgaatagtgttntataagacttttgtaatataatgaatagcgagatatatatgtattaaaataataatttgagagaanatannanggggatttatatatgca

SEQ ID NO: 29336 - DNA, 339 bp, Glycine max
agcttgcatataaaaatcattatttttggttataactgggttagtcatttagttgaatctatcacctaattatggaaattttaacttgtgtatccgtttttcacgtaatatttgaaattcaaaacatttttcaattttcaaaatatggaatttattgctatattataaattaagaatactttgtgaactaagatcaatctttttccttttcttttacgaagggccattaaccctaaaactaaatattatgctcataaactaacaagaagtggaggaaaaaaaaagtcattggaagcttgttgtcgcgtgaataactgaccattagctgaacaaagttcg

SEQ ID NO: 29337 - DNA, 301 bp, Glycine max
  unsure (1)..(301): unsure at all n locations
atgtaccctcccttgatctctnntgaaaaccaagtggatgtaccctccacttgaactgatccacaagagatgtaccctctcttgatctcagtataacaacctaagtagatgtaccctctacttgtgccacanaggatgtaccctccanagtgttaggacaaataattctcaggtggttagtcctttgaatcattgtaaggggaaacanaagatatctcangcggttagtcctttgaaatattttgtttaaggggaagggaagaatcagaataattctcaggcggttagtcctttgaattct

SEQ ID NO: 29338 - DNA, 337 bp, Glycine max
agcttccatcaagtggtatcagagcacaagagcttcaagtaagtgctctttaaacctccattgttgtttcttcatttttctccatgtatttcctcacatgtcttatgttgaatgttgttaacatgattctttagaatttccaccaatttaacttgctatagaagctagatttgatttcctctagttcaaatttcttgttcttgttcttgaaccatgaattgtgttgagtttaggttcctttgagttttatcttgctattttttctggccaaaacttaaaccataaaattcttaaaaaaaaattaaagtagaagaaaacctcaaaaatctagaatgac

SEQ ID NO: 29339 - DNA, 361 bp, Glycine max
  unsure (1)..(361): unsure at all n locations
gtatcgataatgtgtctaccatcacgatcatcgtctccctttccatcattgggggtaccacctgngccgctagatccctccaccttttgggcgtgttctttgaaagatccgtcgccctttttgcaaatgttctgtagttgcatcctatccggaaccatatcaaaattgtactgatactgcctaacaaaggcaaccattaagtccttccaagaatggacatcggaagattccaagttagtgtaccatgtaacagctaccccagtaagactctcttggaaggaatgtattagcaattcctcatcttttgcgtattcccccatcttctgacaatacatctttagatggttcttgggacaagtag

SEQ ID NO: 29340 - DNA, 341 bp, Glycine max
agctttgagccaaaatcctgtttcaccataaaccttgacccagggtgagaatgtcaatccttaccctcggaagcaaaaaaagaatagaggggaaatttccaatcaaagaaaaagagaaggaaaatttccaatgaaagcaaaaaaagaaaagaaggaaaattccccaatcaaagagtgggagaaagcaaaaagaaaagaaaggaaaattcccaatcaaagaatgggagaaagtaaaaaaaggaagaagaagaaggaaagaaagctcctgatcaaggatcgaaagaaaacagaagaaatgtgcagagaggtctttggaccggacaatatctgaacaatacaga

SEQ ID NO: 29341 - DNA, 298 bp, Glycine max
  unsure (1)..(298): unsure at all n locations
atctagtcaaggcctgagagaccatacaagtttcctaacgatttctaattatgtgggccattaagtctatcatatgctgacaatagccgagaagcccatgaatctcttcggnggcggagtaggtgtctgccatcgccttggccttggctaacaatcggngaagttcttgactcccgttcaaggtaagagcaaaccgatccatccacatggttgcctcttggtgtaaagagtcgatcacccttcctctagcctctntttccgcgtatacttgggcatactcatccgcgactctatgctc

SEQ ID NO: 29342 - DNA, 340 bp, Glycine max
agcttgcccttaaaggttgagtatctgataatactaagggaaagatccagaaaatcaaagatatggaagaaggactcttcaccaacaaaccacttgagtgagcatctttgattcttcaccagaaaatcaagaagctcattcaaagcccttaaagttgacaattcctctgatgaagattccaaggaagaatttgatgaagatgagctcgcctttatctcacgaaagattgaaggatgtagaagaacaaaggtgactccaaatggaagaactccaaaaaaagtgtgttcaatgaaaagaaagataaagacaaaatctccataatttcctacagatgcaagaa

SEQ ID NO: 29343 - DNA, 376 bp, Glycine max
  unsure (1)..(376): unsure at all n locations
gtggcagtaaaagtgccattcacttagcanattatctaatgtaccatgagaggacanagtacatagatgtgatactacacttcatcagagatgtgattgaatctgagaaggtgaaggtggagaaggtttcaacagaagaaaacccgactgatatgttcacaaagtccctctctagtgtcaagttcaagcactgcttggacttcgataaatttgaagatgcctaaagcagattggtagaagtgcagccctgaatcacaaggtagacacttgctgatttagagtcaagggtggaaattgtggtgtgtgactcanaatcacaaatggcacaagtgagaagactntanagtagtgctgtcataactgggtgtcagtatta

SEQ ID NO: 29344 - DNA, 333 bp, Glycine max
agctttgaagataaagaatccagttatggttttcaaagtggatttcaaaaaggcctatgattctgtatcttggtcttttttggactacatgttgataaggttaggtttctatcctaaatggagaaaatggattgctgcttgcctccaatcagcaaccatttcaatcctagttaatggaagccctacaaaggaattggcccccactagaggtttgaggcaaggggaccctttagctcctttgctttttaatatagtgggtgaaggtctcactggtatgatgagagaggcccttcataaaaacctttatagaagctatccggttgggaagcaaaa

SEQ ID NO: 29345 - DNA, 410 bp, Glycine max
  unsure (1)..(410): unsure at all n locations
gtttgataataacaaagatgatgacatanagctcataagtcaagatcactttatactaacaaagatgatgacattcaagaatgagtntaagattgagtcaataacacttcanagatcaagagtaaatttgatttcaagaatcaagattcaagattcaagaataatcaagatcaagattcaagaatcaagagaatacttaatcaagataagtattataaattttttcagaacattgagtagcacatgaagttttcacanaatcattaccaaagagttntactctcaggtaatcgagtaccagaatatagtaatcgattaccagtggttntaanatgttaagattntcanaattcanaatgaagagtcacatctggtgatgtgtaatcgattacacctttatgggtatcgat

SEQ ID NO: 29346 - DNA, 332 bp, Glycine max
agcttgtaatctattacacatatactgtaatcgattaccagagcagattttcagaaaatattctcaacagtcacatctttttatgtggttcttgaatggctatcaaaggcctatatatatgtgacttgagacacgaatttgctaagagtttttcagaacaaaaaggtcttatcctcttataaagaaaaatcgttttatcctcttacaaattccttggccaaattacttgtgattcaataaggaattatttgagtgctcaaattgttcaatctatctctttcaagagagatttcttcttctcttcttcttcattctgaaaagggattaagaga

SEQ ID NO: 29347 - DNA, 317 bp, Glycine max
  unsure (1)..(317): unsure at all n locations
tatcctgatgaggatgttccatatgttctcaagactgtactaatacanttgctgcccaagtttcatgatcttgcangtgaagatcctcataagcatcttaaggagttccatattgtctgttccaccatganatcccttgatgtccaagaagatcatatctttctaaaggctnttcctcattctctagagggagtggcgaaggattggctgtactaccttgctcccaagtccattaccagctgggatgaccttaagaaggtgttcttggataaattcttccctgcatctangaccactgccatcagaaaagacatttc

SEQ ID NO: 29348 - DNA, 332 bp, Glycine max
agcttgaatgtttttaaaagagaaacacacacaatcatctaataagcaacaaatattaaaaaaaaagttaaaaaaaaaactataagtataaaataaaagtgggtgtgctgctatttaagaaaaaagaaaaagaaaagctaagtgcggaaaagcaagtaatagagctggaataaaaagaaaaaggttgatctaaggatgaatgctctcctagaacctaagcttttgcatcctagaaaaaccatgaattgttagcagcccagcctcgttacaagcctagaaaagtccttcagattcagtttgtgtgttcttgattgtatgatatgagatgaagc

SEQ ID NO: 29349 - DNA, 285 bp, Glycine max
ggggaggatgagatgcgcttacctacgaatctgaacacacagatataggatctagtcattcgaataattggagatggagtaggacataggtgtgattcgctatagtttattctccgctgggaggaaaatactgcgctaaccatttaaatagataaaagaataattctagtgagttaaccaagatgtggctattaaattgcaaaatatgaaattgaggaggatgatctagaccatcatgcggatatgaatatgattatatcaccatgcgtaacagaatttaatgtg

SEQ ID NO: 29350 - DNA, 328 bp, Glycine max
agctttataaaagccctctttccttgtaaggatctgtggagcctggcctgcttcaccttgtaaatcattataagcactttttagtaccctttgaattgagattgtttccattccattatacgagttgttatattttcatatttatttatacctcagtctaagctatggtctacagattgacacatatttgaatcttgtgaatgtctagttccgttgtgcataatcattctatttagaatttctgttcaatcaacttgaattacttgcttgtttgcattgatgtattgaagactttcattaaggtaaaaaaaatgatgtattgaagtga

SEQ ID NO: 29351 - DNA, 524 bp, Glycine max
  unsure (1)..(524): unsure at all n locations
tgagttatnccccttgatangnccactntgnaattgaagccgtcgattgactccagtagttagtgagcttgtgtacctgagacaattctttgtgcgtcagatagactaactcgcattgtcctgatctaataattccatgctccatgatgatcggctacagtttgagcgatgtattcctgtagtctcacctcgagataggtaagagatagggccacccaatgatcaataattaggcttccatagttgatattcgctagggaagattcatcgagctcggcctagaaatgcttgcgaaagcactgtcctctaactgaatattattatagcctgttttatttccagtcctggatgaatcgtatctagagtatagtttactaagtctgctgctagcatgataggttggaaacgaggactacgagaactcacgtgccatatttatataacaattttttataacaacattagaattagtcctgcttgatacgcctaaaggagtcaaattttgaaagaaacatataatggtn

SEQ ID NO: 29352 - DNA, 328 bp, Glycine max
agctttgagcccctgattttaatttttcttttggtagatatattttttttcggtgacattaatatagagtatcaacatcttagtaggctttttttttcttaatcatattattttcattaaaaataaaaattgagatatttaaatcttaaattaaatattaaaataaaataaaaacttaatattgatatgcactttttctctatctatacaccctttgcttgcccttttatcccctttgtctttaaactcttctcctccctctccctttctcttctcatcctttaagttccaccctttccttccaaatattttggttaagaaatactta

SEQ ID NO: 29353 - DNA, 280 bp, Glycine max
gcaatcatttaccaccaacagtgaacagctatatcttgaaatccacactttatatgagtaaagaaccaacagctcagtatgaaacaaggtgatgacaccataaactacagagcgaaatagcttatgctacgaagcactcaatcataaaggaagtatatacttcatagtcgaatgcctcacaattaataagccataaccagcttacagtatcacacaaattaaagactatgaacaaagaaggtctaatgcctaaacatcacctcactagacaaatgcacca

SEQ ID NO: 29354 - DNA, 326 bp, Glycine max
agcttatcctaaatggcactcattgtaacaccaaattcctaactcaatgacttttaaagtcctgatgaatgagtacaaagtgacttgcagtagtttggtgagtaactcaacattgtatataatcagtacaaaaacacctttgtttgtcaaattttaaaatcatattctaagatgaacttaatattaatttcaagatgtgtcgagtaccatgtactcatttaagaaaggtgcaagattcacccatttgaatttgaaagggattacagaatgcaagattgtttataatcattggaggaagtctacaaaaattggctatggagggagga

SEQ ID NO: 29355 - DNA, 336 bp, Glycine max
  unsure (1)..(336): unsure at all n locations
ctcgcaggtagccatgagtngtgatatgaacctggcgatgtagttcaagtgccccaagaaaccncagacttgctgtntggtgcatggctctggcatttcgaggatggccttaactttntcggngtcaacctctatcccttttcggctcacgatgaaacccaatattnttcccgatttgaccccgagagtgcacttggtcgggttcaaccttagtcggtacttccgtgacctcttgaacaactttcgtaagatgacgagatgttcttcttcagttntgaacttggcaatcatatcgtccacgtacacttcgatatcttgatgcatcatatcatggaa

SEQ ID NO: 29356 - DNA, 340 bp, Glycine max
agcttaagctctttcaactgcacaaggctcttaatatttgaagagtatccttgtggaaccttcacccgatgaagacactgacaaaaacttatcttctcctttttggacaaagtatgacaagttgggggcaagtaaattttcttcccatcagaccttggatgcaactgtgatcgtatccacatctctgctagattttgacgagtattcaagccatccttcgtcttgccctaaatgttaaggagcgtcccaatcacactgtcacatacatttttctcgacatgcataacatcaatacaatgtctaacatctagatcagaccactacggaagatcaaagaaag

SEQ ID NO: 29357 - DNA, 308 bp, Glycine max
  unsure (1)..(308): unsure at all n locations
tctgacgagggatcgagggttagtaatttaggctacaacatagaacacaagaacacgaatgattagagaaatatatttctatgcatcagcttgtgtgttagaaagacccaacatttctatgtattgttgtcattntatntaccttgcattntatagttnttagcatanaagtttagtttaaattctatttgaaattatcactcatacatgttntctcaacaatgctttgattctgaacttaattcaggctagcattagttccctgtggttgatacttcggattcatccatttaattntaaatacttga

SEQ ID NO: 29358 - DNA, 342 bp, Glycine max
agcttcatggtgaatcaaaggtgattcaaaggtgttttgatgataacaatgatgatgacaaaggtgatgacaaaaagctcaaagatcaatcaaagaacaactcaagagaatccaaaatcaataaagaacaattcaagagttcaagataagaatcaagaaaaattcaagactcaagaagaaagtctagagacaagaataaagattcaaggaccaagatcaatattcaagaatgaagagaagactcaatcaagataagtattaaaaagtttttcaaaactttgaatagcacatgagtttttgacaaaaccttttaccaaagagtttttactctctggtaatcga

SEQ ID NO: 29359 - DNA, 547 bp, Glycine max
  unsure (1)..(547): unsure at all n locations
cgcgttaaaccctctaanggcancttaanattgaagcatcgattgctaccaactaacaacagctccagtcagtgtgtgccatatatcgtaatagatcaaccttcactgctacacacacatacctcgtggcattggctatcggtgagacaatggataacagataatacaatgaanaagatngatctatgtaatacaagaaataaagaggtcacgaagacatagaggataaatcaatatataagaaataatctattagaatgatttaatcaatgaagctataaccgagtataaactgctacctgattaagcgagaacgcgattattgtaaatatactatttatatcaatttcgctataacaatgatgaaccgcattacgtatgacgcttttagtatatatatacatctagcagcgagatttcagcgagtctatgaaccanatgacacctccctgtttgcgttggctatatggaaagagttaccttcctaaacatatttttcttatgatgtttgacattctccactggcatacattatacacctttcttg

SEQ ID NO: 29360 - DNA, 338 bp, Glycine max
agcttatgctgcaaacatttataatagacctcctcagcagcaaaaccagcaacaacagaataattatgatctttcaagcaacagatacaatctaggttggaggaatcatccaaatctgagatggacaagtcctccataataacaacagcctttccctcttttccagaatgttgctggtccaagcaagccatatgttcctcctccaatgcagcagcagtcataacaaagacaacctacaactgaggctcctcctcaaccttccttagaagagttagtgaggcaaatgaccatccagaatatgcaatttcagcaagagacaagagcttccattcagagtc

SEQ ID NO: 29361 - DNA, 399 bp, Glycine max
  unsure (1)..(399): unsure at all n locations
gcttgctnatgagaacatgactctgctgacagggtggaaggcattgtgtcggagaaggacgagcttgccaaggtggttgctgatntatatgtccgactaaaggagttgaagtccaagctagaggcgtccgagttatgggcaaccaaggtgagggagaccagcaaagagtttgaaaaggagttgaccaacaacaattntcaccanaaggggaagtttgccttntaaatatggctccttagctactccatagagcgatttcaattggggataaggtaaaaagggagagatttgaaaagataaaattataaattctgaataataagaaactaanagcaataatagagcgatttcattatgaanatgcatggagtcgccaccaacgtttattcgaggaaaatg

SEQ ID NO: 29362 - DNA, 338 bp, Glycine max
agcttgtgaagacaggccctacaacttatcgagaggttcttgaataaagttgtggatactacccccaacaactaaaatcaccatggggtgtgcgtcgatataacccaatagacgcaacgtctcaggtgcaatgtggcccaaaagggaatggaagctgatttgggccagagtggggtttgggtcatcgggtgggtcgggtggttgctctcgggtcacattggcttcaaaaggggcttcgtcttcatctgaaatcaataaaaataccctagacgagcatttgggcccgcaatgaaatttttcatcgcaattgaagcacaaacctctatctcgtcgggagg

SEQ ID NO: 29363 - DNA, 426 bp, Glycine max
  unsure (1)..(426): unsure at all n locations
ttagctcgagtcggttaacatataattgtttacatacttttattcatttattttttacaatanagataagatgaaattaattaanaaaattaatcatatcaatctaatagtttaaaaatatgtgatttaatatatgttatatatatgtaaatgagttggttcatgaactattcgaatcanattatacatagttgaaattcaactcatttataaacaagctcaccttgtaactcaacataagaatatgattgtgatcctctaaatattaactcatattaatttagtactccaaaaataatctcattacatttgatccctcaaattcagaanatatatntntaagtcctttggttaactccattaattctctattaaatggttcacaacagagatgtccaatcattaacattntcatttccatcattc

SEQ ID NO: 29364 - DNA, 336 bp, Glycine max
agcttaggaaagatctaacatacttttttttatgtgcatgagaattactgttgcagacgatattaatacagctctccctaagaccaataatactaaaaagtttatggggttagtgagagagtgctcccaaacagctaataagactcttgctgggacattaatgagtacactaaccaccatgaagtttgatagttcgcgtactatgcatgaacatgtcattgagattacaaatatgatagcaagacttaagaccttgggaatggctatgaatgagaactttcttattaagtttattctaaactcattaccgactgagtatggcccattccaaatgag

SEQ ID NO: 29365 - DNA, 362 bp, Glycine max
  unsure (1)..(362): unsure at all n locations
gtgagagacataatagaatattatcatcaactaatatacaacacaagcatttcccttctctccaagcacatggcaacgacctacttacataagcttaactcaccaattagcacaagtaaagcaagcaagataaacacccaagcagagattactatatatatgtattaaataatgtntatctacaggctatagtattaatattatcaatcttaagncanaantatatatatatatatatatatatatatcatattatttccagagccanaaaacttagtaacatataaccttatggagacatttctatggaaccacatgaaggcaaagatactagaggaatgaaaataacatgttcgtttgta

SEQ ID NO: 29366 - DNA, 332 bp, Glycine max
agcttaataaaatccttagtgacccatgttgtgaatgtgtaattgcatttaatgagatgatgtgcaaagtcgggatttgtgattccaatcgggtttgaatgaaagacacataactgaaatacttgtatactcaagagaaacattggccttgagaggagagaagcatggtttgctctttccttgataattgtcatgatttctaacctctctaaactctgagtacattctttgtatgatgtcatcatgtaaaccataacaagtgtgatcttgagggttgggaattgaaattgtttaggaaagtatgtaattatctcagttgttgtgattaagtt

SEQ ID NO: 29367 - DNA, 562 bp, Glycine max
  unsure (1)..(562): unsure at all n locations
ntagttaggcatacacaatattaactttagtaatattagacacaagttaatattagctntatgtatatatacctaacattgtgacacacgtaaatcttgagctttgttaatactanggtaaataattnttacgttgtgtaataatattaggctaaacaatgttgagttttaaataaatgagttgattagttatattattggatttagctatttgtagttggaattgttctaatatatatatatatatatatatatatatatatatatatatatatatatatatatatatatatatatatatatatatatatatatatgagagggtccgttgcgattctacctgacatgagttatctatagttagcaggagtatatactatgtgttacgagatctgacttattatatatatgatacactgcgcattgatattagtttatatgtatactggagaatataaaggtncgcagttcaatatctcgcgctatcttcaattatgttggacatggggagtgtatcgtgtcacatctctataatgggtgcgtatgtatttgagactattcg

SEQ ID NO: 29368 - DNA, 331 bp, Glycine max
agcttatgctgcaaatatttacaatagacctcctcaacctcagcagcaaaatcaaccacagcagagcaattatgacctttccagcaacagatacaaccctggatggaggaatcaccgtaacctcagatggtgcagccctcagcaacaacaacagcagcttgctccttccttccaaaatgttgttggcccaagcagaccatacattcctccaccaatccaacaacagcaacaaccccagaaacaaccaacagttgaggcccctccacaaccttccctcgaagaacttgtgaggcaaatgactatgcaaaacatgcagtttcagcaagagacc

SEQ ID NO: 29369 - DNA, 291 bp, Glycine max
  unsure (1)..(291): unsure at all n locations
tatcanaacaagctctnttgtgcttaatcaaataagtntcatgaccaaatntatatcttaagctctcatgtgcatatntctatcaaagcttctntaatttattcctttatgcatttctatttagactaatcaaagcttaacattattaggatcatgttgcaagatgtcttcaagagagaaagtgtattattcgtaatgggggccatgtacattggcaagttgatacttggagggtcggttntcctgcacttcaggtttgttcaaatggattgagatggtgcatatcatata

SEQ ID NO: 29370 - DNA, 330 bp, Glycine max
agcttctggctgataagactaagaagaagctggaggaagctacatagtcaggaagcgttgatgacgtcatcgaccctccatccccagtcagacgccacgtgaagtggaagatggcccgcacaaagaagacaggggagatgacgactgaggccgcaaaggaaatcgctgagaagattgtaagtcattttcaactaaccattacaattatgtttcaatattttgagaatgccatgtaccactgtgtgttttctatccaggattcgtttgaggagcaggccacacagggatcgttcgtcccccatggacgtcaggatgttctcgccgctgcta

SEQ ID NO: 29371 - DNA, 538 bp, Glycine max
  unsure (1)..(538): unsure at all n locations
agggaggggttgtgttggctaatgcagttattgcgactatctcttcatatatcatgcaagcaatgttgttttctcagtatatctgtgactatatagatgaaactgactgtagttgtatttggaggggtttctatgggaaagggattcatatggtgggttggaagaagattactatgtatacgaggaaaagatggtctggggttagaagaacgtgtttctaagtcggctattttgcacttcttaagacgggtntgagtcatcatatatagcggatgctctacgacaacggttccataaccgtcttattatgtataggattctaagacggttatgtcaacaaccggcttacaatgtattgcatactaagacngttntctaggtatcaaccgcttaatatgtataggattttaagagagtatgtgaccactgtctacaatgtactgcttctacacgggtttctaacatggatagatctataccgttttgaatactatcttagatccctgttttttgttacatgttttccataatatatccn

SEQ ID NO: 29372 - DNA, 327 bp, Glycine max
tgcaagcatgcaaacaacgccttgtactttgttataggactttgaactacccaccatctacggaaaaaagcctaccatttatccaagaaatgaaatgaaacccaaaaaattgtaaaccagctgatagaagcaaatgtaccaaagcatggaaaagggtgtgataacttatagatagaagttcatatatttcaccaggtcgacaaacacaaactttctattaggggctttctgaagagacacaaccaccgagtccagcacaaactaaacacatgcccaccacaaaacattcaagtgaagaacaaaaatgaaagttaaatccgaaactat

SEQ ID NO: 29373 - DNA, 326 bp, Glycine max
agcttgcatttggaattgctaaagccccactccatcattaggattagtacctgacatctcaaacaaacaaatcaaacgtaacaagacaattatagttgctgtttgaatacctcacccactcaagtgtatcacacaattatggcttttctctaatgaaacactcttgccttttaccactctaattccccttgagttcttaggcaattcaagagattatggccacaacaaagaacaattcaccaatatgtgtaaggtaaggctagacaaggaaaaggttaaccaagaaaaaggctaacaatgtttttaggcacaaatgaaggaaataa

SEQ ID NO: 29374 - DNA, 362 bp, Glycine max
  unsure (1)..(362): unsure at all n locations
ctgtgcaatccctgaataatnttttgatgatgacgactangaactgttcggttggcttcatccggtgatgctntntggtatacctcgactggtaatctttcttggccgatgtcgcatcggattattttcgatcaatgtttgtaatggagtcttttctctgttgaggtcggntacacttttgtttgcctattcaattaccgcagtccaatgtcacccgaaaagaaagtcagttgagtgtgcacgaaataccataggcgaccttgacgganaactntntgagcgacaatgaataagaaaacatnctcgatggtacgacaaatattattggccggcgctgatggaaaataaaaacattgcacaat

SEQ ID NO: 29375 - DNA, 328 bp, Glycine max
agcttcaagaaaaagatggcctcagcaaattccttatttccagaagggaattctatcaatagacctccaatctttaatggagagggttaccactactggaaaacccgaatgcaaatttttatcgaggcaatagatctaaatatctgggaagccattgaaatagggccttatatacccaccacagtagaaagagtttcaatagatggtagttcatcaagtgaaagcataaccatagaaaaacctagagatagatggtctgaagaggatagaaaacgagtacaatacaacctaaaagccaaaaacataataacatctgccctaggaatgg

SEQ ID NO: 29376 - DNA, 236 bp, Glycine max
  unsure (1)..(236): unsure at all n locations
tatgcatggtcattccatttcaactnttaatcgncatgatatattacgggcctcaatcggacatgcgagtcanaactttagcccgtcagaattcacccgagtcttccatgttaatatttgagcgtcgcgataggttacttggcttattcgaagatccggaggagaagttatggcccgttgtatntgcgatgggcttcaattntatcctaagagcatctcgatatattatgagcttc

SEQ ID NO: 29377 - DNA, 326 bp, Glycine max
agctttgagctccttggtttgacgggacctaccctctgggatggacattcgagataaatcagatatttgaatatcattcaaccccggaccatgagcggctaactatagcttgtccaagaggagaaagttctctataggcgtgagtctttccgcgacaaacctacttcaattccaccttccaccaccttgtcgactcctttaccttcttccgcaacctccttgtctcctttgttacctacaccgtcaaaacctattccttctctacctaccaagagactgtctctggaggagttaaccttgagatgtgagggtggcctttgttttaa

SEQ ID NO: 29378 - DNA, 529 bp, Glycine max
  unsure (1)..(529): unsure at all n locations
ctagtctcttgtacgtacgggctcgttcatacgactcacagtcctcaccttcataggactgacagtgctgactgtattctcttagagaactcatagttctcgccgtacgaggactcatactactcgactctagagggctcagagtgctcaccgatatatgactcacagttctcatcagtagagggctcanagtcctgatcatcagaggactcacagttctcgtcttcagagtgctcatagtccgtgcctgtagagggctcacagttctcgccttcagaggactcatagagctcgccttcagaggactcaaagttctcgcctgtatagggatcanagtccttgcctttataagactcatagaactcactctatctcttataggactgacagccatactctatctttatacgactcacagcgctactgtatctgtctatgactcaacgtctcacttatcttcattgacgcgagncgtagttatcttctatgagtcaaggcgtgcattatttgccatgaataagtccatgtt

SEQ ID NO: 29379 - DNA, 337 bp, Glycine max
agcttctgaccatgaaaactgatacatgtgacagatattaggggcgtaatcttggggttgatatccatgacaatggtactggtggtggatcataatacttgacggagaacatgcatgttggaggttcaagctttgttgttgcttcaatggctgaccatgcggcaaggaaggagaagaccattaattgtagggggacaaaaacattcaatgcttatgatgagattgtacaaaatgggatacaatatattgttagtgttaaacattcaaatcatatagctcaaataataatacaggaatcattagcaatcaattctcaaactcagccaaataatgacgc

SEQ ID NO: 29380 - DNA, 353 bp, Glycine max
  unsure (1)..(353): unsure at all n locations
ctattaactctatcaatgccgaccacagtccacaggaggtcattccagagtatgaggtagantaagattcatgtgaatcatgtcttgccgatcanaaataaaatgaaacatgtcctactcaacagctttttaacaaacctgtgaagtatgttgatgatctgcctactgctctntgaaactagaaatcctcacccaatttataatttctttatcatttctcaccatcacgctatgtctacatntctttcttgtctactattctccttcctaaagcaatgactgagacactntctaattcaagatgaatgcaagcaatgattgatgagaatattgctcttcagcacagtggcaca

SEQ ID NO: 29381 - DNA, 336 bp, Glycine max
agcttaagctccttcaactacacaagactcttaatatttgaagagtatccttgtggaaccttcacccgacgaagacactgacaaaaacttatcttctccttcttggacaaagtatggcaggctgggggcaagtaaattttcttcccatcagaccttggatgcaactgtgatcgtatacccatatgagctagatcttgacgggtattcaagccatccttcgtcttgccttgaatgttaaggagcgtcccaatcacactgtcacaaacatttttctccacatgcataacatcaatacaatgtctaacgtcaagatcacaccagtacggaagatcaaag

SEQ ID NO: 29382 - DNA, 364 bp, Glycine max
  unsure (1)..(364): unsure at all n locations
atatatcattngtacaatcagaagattcttggttgctntatanaatttgtgaactccttgcttcaaccattttcttttttagttcatcctacataaatacgctgtataaattattaccatgcatcaatatatattctcaatacttcaatgccaccaaacaaaactcgtctcctcattagttaatccccttcataccataaccatctattagaaaattgaccaaaggaaaagataaaacatagagaacgtattgaaatanaaataaattcttacaattacaataacaggcttttcaataataatgcttccatctttttgagttcgagtgtcaatataaatntctgcccaaaaaggtgcactcctt

SEQ ID NO: 29383 - DNA, 335 bp, Glycine max
agcttattgcatttgctgcactttgcgtttggtcttctccagcatttgaatggtgggtgacccattttgccacaatggtgacaaggtgggtaatttttatttttacccttacttttactttggtcatttacagtacttccacctttatattgcttggctggtaaagcaccatcaaccacacaatcttgtctcataagccttcgctgctcctgggcttgcaaggcatgtaacactcttgccaaagtgatcttggacagatcctttgtgttctccaacgtggttattgatgcttcatatttctaaggcattgcaaccataattttttctataattct

SEQ ID NO: 29384 - DNA, 330 bp, Glycine max
  unsure (1)..(330): unsure at all n locations
agagattctgctgtgtgaagacttacatagaactgagcttgaagaggaagccgtcttgagagcttgagatgagtttgtgagtgattgtgaggttctagaggtggaggacacatcctcaccgcttgtattccttcaatccttcatctttctcttctttntgttgtaaaggaagcttcccagttatgaagagctaaatcctcttttggntcttccttgtaagtacttgatgtaaatacccgtatatctatctaatgatgttntgtgtgttcactgtgttaataaaacttcattctgccatgcttttgccttgatcacgtagatgcatgtgtc

SEQ ID NO: 29385 - DNA, 322 bp, Glycine max
agcttgatggtacgctaagcctcacatctcaagctaagcgcatattgtagaaagcgctaagcgcagcctgccgcgctaagccccagatgcttatgggactttacaacttcaagttgggcttagcacgagcctaggctaagcgcttgggttttaaactcaaatgtcacgtgggcacgctaagcgtagctgtgcgctaagcgtgccatacggattttagtttttaaaatcaaaggcagaggcactttgggtactacctttgcacccaaacctctgcaccttcttaaccttgagcaactgtgtacttcctgctgtgtgtatacta

SEQ ID NO: 29386 - DNA, 554 bp, Glycine max
  unsure (1)..(554): unsure at all n locations
nttgtcgccctctttagtgacctatgatactcagctcttatgtgcgggtntagacacgaangccaagtctccgcgatatgcgatgatgactccccgacgagatcggattnggtacggccatgttctcctggttttcgactatgaaattggcgaatggaggaatgcccacacgtttacgcgataagcataatgtaaccctctgtagctntaaaactctacgaatgggcctangctctagagtttcctttttgtaaggcattatgtcttttgttcttaaagntataatataaagatctttcttcatctgntcctgtgcctctacccattctcattcattngcatgtttatatctttacgcttaaaacgccaggtccgacgaccaagtcctcgaggtactaatacccgggaccccaccatcattcgagcanaaaacggtcggatgagagtgataagacangatgtttgctttcccacactgagagataatcgtctnaggactgaaatangctctcagaagagacaactctaacttagaccacagggaataggagtag

SEQ ID NO: 29387 - DNA, 333 bp, Glycine max
agcttcagctctaacccctccaaatgaatccaaaaagaaccaacacaatgggtcttgtacaaccgaagaagggacaaattaactgaacttattccaaatggaggtccaatgatcctatccacaactgaccctggctttgactgtggttatggcgctggctatagttgtggttcatcatcaaggcatgcacgccgacatagccactctaaaatgtctctcgtctacatcttccccttcatgggaggggtcacgtccaacaatatatgatgtttgcttcgtacgagttatcacaagtctgaaataaaatttaaagcattacattagtattactat

SEQ ID NO: 29388 - DNA, 310 bp, Glycine max
  unsure (1)..(310): unsure at all n locations
tgagttagacatacccattctgtcttatggttgttgtgatgatgttngtgatgtttatatgctgaaattgctgatggaaatctgttagagatgaagggtagaactaacccaacgttagaaagtgagaaatgtgatgtatgagtggaaaaagagtgagactttgagagttggaaggctaagtctgaactctgtggtaaatggaggttaaagtgagttaatactagcttgaaatgtcatttacgacatgtgagaaagggtaggctgagctatagagacaaacaaatgaccaaagtgaaccaagagccaattc

SEQ ID NO: 29389 - DNA, 330 bp, Glycine max
  unsure (1)..(330): unsure at all n locations
agcttctatataagctgaaccattttatcaataaacacaagttgagttttattcagaaaattagagtttatctcttttatcttagngagagtgattctcctaaattcttgagtgattcaagaacaccctggctgtatcaaaggacattcacaacctttgcgtgttgccctcgctggaaagagtgattctttccttcctttcatcttcacccttgttctttcaaaccacaattccagaaaatccacctctgcccagaattatctcgtggccataactcccattttacgcactcaaattaagtgattcttgagcctaaattgaatttcaaaa

SEQ ID NO: 29390 - DNA, 83 bp, Glycine max
cttgatctcagctgaatgacgcgagctctgaaaatgagggtctagtttgcacggagtcgatcgtgagatatgtctgacgccga

SEQ ID NO: 29391 - DNA, 332 bp, Glycine max
agcttatcaggtataaactatttaaaatcgtaaggaataactttttataagattgaactgaaaataaataaattttggtggataaaaatcgtaacaaattgtgaaatcgtaaactcaatgaacaaagagggactaaaagtaacttttcgaaaatttgagggactaataaaaataattttttttgagaactaaaaaatacttaccgaaatttgaaagattaaaaatatatttaagccttaaatcaatcttataaaatcagcttgtaagatgaaagatgtcccacacttatatacactaatttgactatatctctagacaatgtgatctcgaac

SEQ ID NO: 29392 - DNA, 266 bp, Glycine max
  unsure (1)..(266): unsure at all n locations
ctctatctctacagtgaagatgacatgcctngccaaagacaactctataaggagacattcctatgggtgtngtcataccctaatntcgtctggtgacctctgctcgatgacgtgcgaccattctctggtcctcgtgaggtgcttggcacccatcattatgcaatttgtgaaattccaggacatgccgaagaaccagaaaaatattgatgcacaataccgaagtttccgtgacacaccggatatcaaatggaagcatcgttgcataa

SEQ ID NO: 29393 - DNA, 270 bp, Glycine max
agcttctcgatatattatgcgcctgaatcagacttccgttacaaaagttatgaccatatgaatttctcgatatattatgcgcctgaattggactttcgtgtggcaagttatgtccattcgaattcttcgagagcacccgttgctcgatcactagcgttcgtgatatattatgcgtccgaattggacgcgctactgaatgggtatgaccacttgaatttcttgagagccttttgtgaaaaatatgctgcgtcttgatcttgtatgggcctg

SEQ ID NO: 29394 - DNA, 311 bp, Glycine max
  unsure (1)..(311): unsure at all n locations
ctcagcttctcgatatattatgccctgaatcggacttccgtgntgaaagttattccatntgaatntctcgagagctttggttgttcaatttcgagtgtctcgatatattatgcacctgaatcggattgtcgagagacaagttatgaccatntgaatttctcgacagcttccggtgttcgatttctagcttctccatatattatgcgcctgaatctgacttccgtgtgacaaagcatgaccatnggaacttgtcgagggcttccgatgtgcgatatggagcatctcgatatactatgtgcttcaattggaca

SEQ ID NO: 29395 - DNA, 325 bp, Glycine max
agcttgtaatcaattacacacatactgtaatcgattaccagaggagattttcagaaaatattctcaacaatcacatcttttcatttggttcttgaatggccatcaatggtctatatatatgtgacttgagacacgaatttgccaagagtttttcagaacaacaagtgtttattctctcaaaaaaagcaaaatcgttttatcctcttaagaattccttggccaattcaattgcaattcattaaggaatcatttgagcgctcagattgtaaaatctatctctttcaagatagattcattcttcttctctttctaattcactaaggga

SEQ ID NO: 29396 - DNA, 285 bp, Glycine max
  unsure (1)..(285): unsure at all n locations
agtgaacctcgctcattgacatattaacactgttactatntccaaatgtagatgggctagtggacttagcaacaattgatgcctttctcacttatcataacagcaaggaagacccggtcaccactatnttggctgatgcatatgatatgttcgactngagatgcgaganaagcagtgcccgaattgtctgttgcatgcctgctctntatgtgtggttggtctcccacattnatcgtcatgaaggtaggtctgtctgtcctctacaaggtaatcgcatgtgcgctg

SEQ ID NO: 29397 - DNA, 325 bp, Glycine max
agcttgttcgcacatcgttcgcgtgtatgatatccactcgacaaggtttgaagtagaggagaccttcaatcctataacacaacgtggcggacaaaagtgggaagttaacttgaatggccattattgtcaatgcggaaggtattctgtgcttcactatccatgttcacacattattgcagcttgtggttacgtgagcatgaactactaccaatatatagatgttgtttacaccaatgagcacatcttaaaagcatactccgcacagtggtggcctcttgggaatgaagtggcaattcctccttctgatgaggcatggacactaatc

SEQ ID NO: 29398 - DNA, 326 bp, Glycine max
  unsure (1)..(326): unsure at all n locations
tgacattcatggtgctccgaacaaaggtggagtatggaggattgccttgatggtccgcacttangcaatcatgaaactcagctccaaactcgaaagtggagaacacatgaacagccctaagcaataacattcacgtggctccggaacaggatgagaatggacgattgccttgagggtcctctcttaggcaatcatggaacacagctccagactcaaaagtggagaacacatgaacagctctaagcaataacattcatgtggcttcagacaatgatgagaatggacgattgcctngaacgtcctctcttaggcaatcatggaataca

SEQ ID NO: 29399 - DNA, 324 bp, Glycine max
agcttcctattcatcaaagcagcataatcaaatttgcctcttctcaaacccactttgatcctctcgccaacaaacactaaatctgcaaagcttgaaggcatgtaacccaccatcttctcatagtagaacaccggtaacgtgtccactatcgttgttatcatctccctttccatcattgggggcgctacttgagctgccaaatcccttcacctttgggcgtattctttgaaaaattcatgcttcctcttacacatgttctgtagttgcattctatctggagccatataagaattttactaatattgcctaatgaaggcaaccatt

SEQ ID NO: 29400 - DNA, 347 bp, Glycine max
  unsure (1)..(347): unsure at all n locations
nntgagtganacaatgtgacgtcttcacattatatttgaatntcaacgttcaaggacactggtaatcaattaccanaacattgtaatcaattacagcctttcgaaaatattnggaacgttgtaaattcagtttgaaaacantttcaaacttattntgctactggtaatcgattacaacaatatggtaattgtcgcaacgtgcccttttgcgggcgagcgaaggcgaggctcacgggtgcgctntccanaggaggaaagatgcgcggagtcgccaccaacgtttatttgtgggaaacgtcgganaaaccgaatganaccggtcaaaatgaaaattctaagtccgggag

SEQ ID NO: 29401 - DNA, 449 bp, Glycine max
  unsure (1)..(449): unsure at all n locations
agctntatacatacattactcattgtnttattttctactcacattaaatttaatgtatgacaccatcttttgcatgtttagtgatatatactacatattcttattaaaaaaaatgatactacatttttagaagaactcattaccattttagtgaatataactaatttttgttttagtccatttcaagtatacaattaaaaagatgctagagtatgtgactttgagatctgatatcgaaattaaccccttgaattgaaaggagctcgcttgtaagttgtaatgggggcaaattatcctaaatggggtcttcttagaaactatatcccagaatgagttgtttctaaagattttccatcatgggtctttgttttgcacatgaaaccagccatccatgcatgcatatcgcctgcatgcatggcgagttagcacccctctgtcgcactatgcct

SEQ ID NO: 29402 - DNA, 459 bp, Glycine max
  unsure (1)..(459): unsure at all n locations
atgactgtttctaaatgggtggaagccggatgtcgntgtttttggttgatgatggtatngtggtcaaaattgcaaatttgattatgggatcaatatcacacagtcctgtgattttttatgctccctgccatcttaatctacatgaaaaatgcaacttggtgtgatcaatangattgcatgattttggatgtagaatctaaggaattggacgatcctactatgcataggaaaaaatccatcccaatccaattggaaaaaccccttgaacattgtttccttgttcatttcaacttgtctaaatcttattctcttttctgcagttcagatttgcattcatcttatatggctctttcccctgtttagtggtatggttgactgatttgatatatgcacagatcaactaccctannatgtgaaattttaanatgcctgtttaactctatacacatattaatttat

SEQ ID NO: 29403 - DNA, 475 bp, Glycine max
  unsure (1)..(475): unsure at all n locations
agcttgtaagaccacagtaagagtagtgttgtagcagtggagaacagccaaccccctcttatcttttccatgttcacgccctaattctctctctcacacacacacatatatatgtatatgctccctcttatcttttccaaaccaaacatagcagcctcctgtcctaattatagaaagccactaatcaatttcttatttcatcatattatataattagttaatagggagggggaatgaatccatgcagagtcaaaggaaccaattcaagacaaataatatcattagcaatttataactgttggggaaagatgaaacattgtgcagacaattccaaaaaaaaaaatggaatgctacaaaaaaaaatattactaataaattgtttaattgacaaatattntctttctctcttctatatcaaatgacanacgaattcagccaaaagtatgtaacttataagtcaattcttatgttactt

SEQ ID NO: 29404 - DNA, 432 bp, Glycine max
agcttccatatctaccaacaaaaacaccgaggtatccatcaagaagttggaaatgcaagtagaaaaactggccaaccaattaaaagcaaaatccaacaatgagaattgtaaggttgtcattacaagaagtggtaagggtagggagcatgggggtaagaatacaagtaataaagatgttaaaaaaagataattgagtgaaaaagacaatgagacaaagaatgataaaggtgagagtgaaaacaaaaataaagagctagaagaagaaaaataaaaagaattagaaaaaagacaaacaagagagtgagaagaaggagaacggtgttttcaaggagacattaccaaaagagttaccttatccttgaaacccttccaaggtggacaagcaaaggcaatatgctcgtttcatggatacaattaggggtggaaatgagc

SEQ ID NO: 29405 - DNA, 385 bp, Glycine max
  unsure (1)..(385): unsure at all n locations
tacatggtctgagcttaactgatttgcttgtcaaaagcctttttaaaatgtctgacttggtctatataaaagtctggtttgacctacaagcatgtttaagagactattttgtgataacttaccattaagataaaaatgaaattgtaacaatccttctttggtacataactaacaaagccaacgatttgatttgatttactttaaaaactctntaattattntatatatgaaaatattgtataaacttttcattntattttcaaaaactaacaaatataattcaaaacttgcaatatgaaccatgcatttataaaacatgactaaatcaaacttggtgcctcatggcacttcaagtcttcaaccattaaaagaagacatatcttta

SEQ ID NO: 29406 - DNA, 438 bp, Glycine max
  unsure (1)..(438): unsure at all n locations
agctntataagtgcgggtctgggagacgaatgtcatgttgtctcgatatacgaagatgatgttccgagtacattggatttggtacgaccatgccctcctgatttccagctgggaaattggcaagtggaggagcgccctggcatttatgcaacgagcataatgtaaacctttacggttttaaaactctatagttgggcctaggctttagattttttcttttgttaaggctttgtgtcctttgttttgaatttataatacaaggatctttcttcatctgttcctacgtctctacccattctcatccatttgcatgtttacttctttacttattaaaacgacagatccgatgatgagtccctcgaaggtactaatacctgtgacccgcctatcaacttcgagcaagaaacgaatcatacataagatgaagggaacgaggat

SEQ ID NO: 29407 - DNA, 395 bp, Glycine max
gagttctagagagagaaaggccaagttctatagagtctgagagaatttgctgtgtgaagaattgccgagaccaaagctggaagaggaagctattctcagagcttgagatgaattattgatcgattgtgaggtcctagaagtggaggagacatccccactacttgtatttctgcaatctttcattctcttctctttggtgtaaatgaaacttcccagttatggaaagctaaatcttctgttggatcttccttgtaagtacttgatgtaaatatctctttatctatttaatgatgttttgtgtgttcactgtgctatcaaaacttcattccaccatgcttttgccttgatcacatagatacatgtgttttatgatcatcaacagtagaaactggtat

SEQ ID NO: 29408 - DNA, 421 bp, Glycine max
agcttgaaattgaacaacggaagctctcgagaaattcaaatgtgtcataacttatcacacggaagtccgattcaggcgcataatatatccagacgctcgaaattgaacaacgaaagctctcgagaaattcaaatggtcataacttgtcacacggaagtccgatttcggcgcatattatatcgagacgctcgaaattgaacaacggaagatctggagaaattcaaatggtcataacttatcacacggaggtccgattccggcgcataatatatcgagacgctcataattgaacatcgaaagctctcgagaaattcatatggtcataacttgtcacacgaaagcccgattcaggcgcataatatatcgagacgctcgaaattgaacaacggaagctctcaagaaattcaatggtctaactttc

SEQ ID NO: 29409 - DNA, 282 bp, Glycine max
cagaagctcacgagatactacaatggtcttaacatgtcacacggaagttctattcaggtgcataatatatcgagacgctcgaaatagaacatcggaagctctcgagaaattccaatggtcataacttttcacacggaagtccgattcaggcgcataatatatcgagaagctggaaattgaacaacgaaagctctcgagaaactcatatggtcataacttgtcacacggacatccgattcatgcgcataatatatcgagacgctcgacattgaacaacgtatg

SEQ ID NO: 29410 - DNA, 282 bp, Glycine max
aaatgctctcattccttcttcattgaacacaaaagcaacatctttattcaacaaattgctcaacaggttggctactttggagaaatcttttatgaatcgcctgtagaaccctgcatgtcctaagaaacttcttatttccttgacattcaggggaggaggtagtttctcaattacattgtccacctctttccctcttacttgaaatttatgccccaacactatttcttcttgaaccatgaaatgacattttctccaattgagaactagattagattcttcaca

SEQ ID NO: 29411 - DNA, 395 bp, Glycine max
cttgattcttgaccactctctttgtgacttctccttcttggcaacgagtcctgctaaaacaacaatggcaagtggttaacccccacaaattttcacaatggatctacccagaggctctaaatcagacgggcattcttcccctctaaaaatcttctttgtgaagagttcccagctttcatcttcattgaggatgggaaggtagtatggagacgcagttccagcatagtgtgccacctctttgttgcgacttgttatgagaattctactacctgtttggtcatctggaaaggctcctttaacctcatcccatacttgggtttcccagatgtcatcaagcactaccagatacttcttccctttaaccattctgctaccttttcttagtttacctcact

SEQ ID NO: 29412 - DNA, 297 bp, Glycine max
tctttcatttcgaatgccagccaaaaattatatctgtgtcttgacttcaaatacaaataaatttcaattaatcttattttatttaatagccgtagtgagaaacatttaaactttggtacttgcaattatgtcacatgattctaatcatgtgattgatactttagctaattaggatatgtgttcaagtgttttgaagtcaaatatgagaattttatcctgaagtcatcatagagaaatttatgaaaaattctttgatgatgtcttcaactttggctctcttactttttatattcatac

SEQ ID NO: 29413 - DNA, 447 bp, Glycine max
  unsure (1)..(447): unsure at all n locations
agctntannaattgaataaattgctggtaatcaattaccatccatgtgtaatcgattacacattataaattntgaattcaaatttctagtgactattataaacattttcagctgctggtaatcgattaccggagagcaaatctcaatttgaaatgatagaattctttggtcaaaccttttgttttttcaatttggaaacttcttccaaaagattctagaaatcaacttgatcatatatcttgactttcttggattcttgtcttgaataaaacttagaagcacttgatcctttagcatcatcaagacatcaaaacatcttgcttctacatatgagtcatttgacttaatccatcaaaaaatccttcaactatntctcgtccttggaaaattctttntgcaagaatcaactgcttctttcattcttcctcactacgaggctatgaaaac

SEQ ID NO: 29414 - DNA, 371 bp, Glycine max
  unsure (1)..(371): unsure at all n locations
tgcgcgtactgatgggtaccatgaggtgttgctggggtttgacccatgccggtgttgaagagatggcatgggcatctccttccttcctttttgcccctgttgccccgattcttttggcgttcacgtntgtggaggaaacgtaatcaaactttcctctcttcaatccaacctcgattctttccccggcaaacaccagatccgcaaagctggacggcatgtaacccactagcttctcataatagaacactggcagagtgtctaccatcatggtgatcatctctctctcaaccatgggaggagctacttgtgccgncaaatcccttcatcgctgcgcatattctttaaaggtttcaccctctttcttaaacata

SEQ ID NO: 29415 - DNA, 435 bp, Glycine max
  unsure (1)..(435): unsure at all n locations
agcttgcaagcgtccaattctntatattcgtttcttttttttcacaattggaccaagttgtttaggtggtggtggtagtaaggccaaaacaactgagaaaaaaagcttatcttgttcatgattntaaggacttgttctaccacctnttcgatttggcttggtttctctttttgtcttccttttttatttgttctaaagcgcagcgaatcaatccctaattatttaagttgttgtaagaaaacaatcaagtacttcttttaaatcaaacattatttacaagttnttttgttcgaaacgcttagtattcggaaatcacattgatttggaaagaaccacttaactctcccctgcaatctatgatttttttcagagaagataataacatttgaaattgngctatattcctaaggtgaagaagtacattaagtggtctat

SEQ ID NO: 29416 - DNA, 238 bp, Glycine max
  unsure (1)..(238): unsure at all n locations
catataaactgaatcctatgcacccttaaggacttattctaaatatcagctgactgatcattagagntaatgaactcagtggccatctctttggacaatagctttctccgaataaagtgatagtcaatctctatgtgcttggtcctctcatggaagactgggttttgagcacatgtgaagagcaaccttgattatcacaatataacttcatttgcatcactttgcagaatttcaactc

SEQ ID NO: 29417 - DNA, 399 bp, Glycine max
agcttgtcggccgcgattgacgaatgtctcataagactacgttagtctctgcgtgttataaggctctacgtcttacagacagcaaaaagtttatacggataaccactcgggtatttccgcccgtcagcgtgactcaaaagtcaatatgacagatcttgtgagcgcggaagatgacgtaaatctccacatgtcaacgggcttgtcggccgcgattgacgaagggcgcacaagacgacgttattctctgcgtgctattaggcttttcgacttacagacagcaaaaagtttatacggataaccactcgggtatgtcctgccgtcagcgtgactcaaacgtcaatatgacagatcttgtgagcgcagaagatgacgtatatctccgcatgtcaactggcttgt

SEQ ID NO: 29418 - DNA, 419 bp, Glycine max
  unsure (1)..(419): unsure at all n locations
ggataacacgcagagactaacgtcgtcttctgcgaccttcttcaatcgcggccgacaagcctgttgacacgtggagatttacgtcatcttccgcgctcacaagatctgtcatactgacttttgagtcacgctgacgggcggaaatacccgagtggttatccgtataaactttttgttgtctgtaagacgaaaagccatatagcacgcagagactaacgtcgtcttctgcgcccttcgtcaatcgcggccgacaagcccgttgacacgtggagaattacgtcatcttccgcgctcacaagatctgtcatactgacttttgagtcacgctgacgggcggaaatacccgagtgggtatccgtataaactttntgctttctgtaagacgaanagcctgataacacgcagagactaacgtcgtc

SEQ ID NO: 29419 - DNA, 442 bp, Glycine max
  unsure (1)..(442): unsure at all n locations
agctntagctngattcatgccttggtgttacaattagctttcttcttgcatggacacgtcttgattaagcagtgacaactcttacttgaaatttatgattntaatatttgttgtaatcttcatatatatgatatttttgttagatttttaaaaaatacattgccccattgaccctgagtcctatattggccactgtgtgtgtcagaccttgatttttagtataagtgtgtcagcaagttacatcattggattattttaagatattatctagttaacacttgctaacacacttatattacaaaataagagtgtgtgcattagcaaacccaacaagcatatngccgacgaaaataagatattctctagttatagtgtgttagcaagttacactattgtgtattttaagatattctctagttatagtgtgttagcacactcatac

SEQ ID NO: 29420 - DNA, 420 bp, Glycine max
  unsure (1)..(420): unsure at all n locations
ttaagatcttcttcatcaatgtattccttngcttctttggagatgaatggcagtggaatggagaaggaagagagggaggagacgccacttcaaggagaagatgagtctagaagaagctcaccaccatangaggccatggataagagctggaagaagaaggagatgaatgaagggagagggagagaagagcacgaaattttgtgctctaaaagagctatganatctgaagttaatattcaatgatcaaagttgaaaaatgccacacatgacctctattatagctaatgtacacaaattggagggaattgattcatatcaattcacttgattgaaatgatttgtgagcaanattcactantatgatagngatttattttgttcacccctatccagacattccagatctcactatgtgtttgg

SEQ ID NO: 29421 - DNA, 444 bp, Glycine max
  unsure (1)..(444): unsure at all n locations
ntgaattgttgcgatccagacccgggatccttaagcagctgcagctgcagctgtcggccggattgacatttcntatatacacgggagctctggggtagtaggcttgcgtctacacacagcaacagttatactgactaccctggggtaattcgcccgccagcgtgactcacaagtgatttgagcgagctgtgagctctgaagagactttatctccccagttgcagccttgcagccgtgattgacgaaggtggcgaagacaacagtaactccgcggctataacgctcttttctccagactgctagaggtatactgaaaccctgggtatctcgtctggagagaactctangtcaccctacgatctgagagtctcaaaagatatacatctcatgtgccgtctgctgcggataataaggacagacatgagtgccacgtagcatatgctg

SEQ ID NO: 29422 - DNA, 472 bp, Glycine max
  unsure (1)..(472): unsure at all n locations
agcttattacaatgtagatttcaaaaggtaagcaatttctttacagtttacaacatgtttgaatgcaattctaagttatatatcttgagataaaaaaaaaaaaagtccgataaattcatataatagattctgctagacccactgttcacccaaattatctaattcattcacctaatagattctattggacccaaggcagatttcccttcaaagtcatgattaagccttataaatccagaagagtatttattctgtaagttaaaaaatatgacatcaatatattccggcaaaagacataaagaactcgtatataaacctttatcattctcgtgtaactcctcattttctttaaagaaaangtcctgtgttcctgtgtgtaatttccaaaagtgattctaacttttaaatattttcattttgaaattttcaggtgtcgatttaagtgatacattgacggatcgcatggaactac

SEQ ID NO: 29423 - DNA, 298 bp, Glycine max
  unsure (1)..(298): unsure at all n locations
tgaagtagcacagaaaatgcccgagagcgattcttcaacaacgaatcttaaccgacttctttcttttttcaaagctttttcccattcaacaacgaatcttactgatatattattctctactattattntataaatcctttcttaatagtttgggaatatatatatatatatatatatatatatatattatntaacaaagaagaattgtaaaatatggtgtgagatgatttaaaattattaaaagtagagtgaagaatgacgtatggtattattatgctccactcggtgggtcttctaa

SEQ ID NO: 29424 - DNA, 469 bp, Glycine max
  unsure (1)..(469): unsure at all n locations
agcttgcttattaaattaaaagcgtgttgtaaaattattgaaatagttggtaaatataaaataataaacatattgtataactgttttatgtgaattctattcttgttttgtagacaaaaacatatttaattaaaaactaattaaatagtgttgttaaagtaaatattataatattatgaaataaataacccacaaattaataaaaagaaaaaagtaattaaaaaatagttacatatgaacaatttgaagagcagagggtaaaagtatattaaaatagtaaggatataaatggaaggaaaaaataaactacaagcttataaatatacaccctctaagaaagtaattaatatcagtagtagcattaaattgttaactatttgtattattcttgtcaaaattattcttacnattatcggaagctcataattttctctgttcacttaattactttcccacctaattaattaat

SEQ ID NO: 29425 - DNA, 255 bp, Glycine max
  unsure (1)..(255): unsure at all n locations
gagcacgctggacttcacagcgtacctaggagggccgtagttgaagagccccaccacaccgcgatagatcttgaacgacgggatgtggaagagccgtcattccagggtgtttcaccactgatgccttgtggctgtcgaacacgccctggagggagatccatggaggttttcgagagctccanggagttggttgttgattgtgttctacatcatacgcatttggttcatgaggaatcgttgatcgtgcaagatata

SEQ ID NO: 29426 - DNA, 466 bp, Glycine max
  unsure (1)..(466): unsure at all n locations
agcttagttaannttttttcttccaaattcaagctctgttaatttctttttcatattcaatcttagttaattttgtttccaagttcaagctgagttagttttttattccaaatcaatttgactaataaagttatataaattttttacaagattacaacatgcctccttcgacccaaaattcacaatatcgtcctcctttttttcccctccttcttttaccaccaccaccatcaaattattttatgtgaaacactcaaaccccttctaccgttaattcttaaagttcgcagacatttccttcaattccagcaaacagtcctacgatggtttcatatgatgacgttggtttgcaatttccacaatgtggtacccaaagtgggctagacaagatcgctcttgatgaaattggaaggtctttgacaaaaaggaagcctcgagtcgcctttgcagatgaagaagatacaca

SEQ ID NO: 29427 - DNA, 486 bp, Glycine max
  unsure (1)..(486): unsure at all n locations
nttaaccttgaagcgctgatcatcagcttgatttcttgcagctggacattatatagattgttttatcaagaaggaacttttgttgntatgagctatattttataattgtgtagtgcatttgcttggagggcgcaacttgatgaccgaactttatgaaaatttctttggcacccaattcctatgggatagacttgttttaatggtattttaatggagctcaaccaatggtgtgtttttgaatgggtgtcaatgcaantttgcaggtcaaatcaaagttgtgtgataggcatactacataaaattcttgatctcactacccattcgtangcatgtcatgttttctctaccagggcattactcttctattacaggatngaccttgactggtccttgttaactcttcattaaacagaacanattcatattgccatgccacactaacctgtagttactaaaggtgacctgacacctgtaacaatatttcaa

SEQ ID NO: 29428 - DNA, 449 bp, Glycine max
  unsure (1)..(449): unsure at all n locations
agctntaaccaatcaaccttccaacatgacagtaatgctgtcaatagatacaagatcacctcaagtaattntgctcagattggtggctgattgggagacaaccaactttgactagtggttgattgggagaaacaaccaacagactctccccctaaagcttactaagcttttagcatttacaatacaatatcttgacccaaaagatggttcttgaccagatcgaaccccaagaacagcaactgagtcaatgactaggacaaccaatgcatctgggacttatctctaacagcccctccacaagctagaaggtggactcaacacttccagcctgtgatgaacaatacaagtacaaaatgaaagcgcaatacaatgaaacatgccggaaatacatcagcaaaagatagacaatgactganaacattcaaagacaattggaatatgcttaacca

SEQ ID NO: 29429 - DNA, 303 bp, Glycine max
  unsure (1)..(303): unsure at all n locations
cgagctaacccttgcatttttttgaggtattttgctacctaaacatgtgtatatttttgtgagatatttttgctatatacatgcatatccgaggtatcttgctacctaaacatacatgtatatattgtgaggtattttgctatatacatgcatatccaaggtatcttgctacctaaacatacatatatatatnttgtgaggtatctttntgttatctaaattacatacatgcatatctaaggtattttcactacctaaacacacatgcatatattntgtgaggcatgactaccttccgagctt

SEQ ID NO: 29430 - DNA, 472 bp, Glycine max
  unsure (1)..(472): unsure at all n locations
agtcacctgcngcatgcaagcttcttcagaaacgtggcagttgtgtgcaatacataatgcctaaaacaccacaacaaaatggtgtatcagaaaggcgtaatagaactttaatggatatgattaggagtatgttaatcaattcaactttactcgtatttttgtggatgtatgccttgaaaactgccatgtatttgttgaatagggttcctagtaaggcagttccaaagacaccttttgaactgtggatgaataggacacctagtataaggcacatgcatgtttggggttgccagacagaaataaggatttataatccgcaagaaagataattggatgcaagaacaatcagtgaatatttcattggttatccaaaaaagtcatggggtatatgtntttttgtcctaatcatagtatgagaatngttgaaactggaaatgcatgtttactgaaaatggtgaaattagtgggagta

SEQ ID NO: 29431 - DNA, 456 bp, Glycine max
  unsure (1)..(456): unsure at all n locations
tttcatgcaacgttacgaacgccaacttcagttgttccccaccattgctaactttgttggccgctcttaaggttcttaccatgggaagaaattcaccctctctcataaggcctccttcaactgcaataacctatttcctcatgacaacaatcaaggtgccaaatgctccatgcctgtgtgccaatattgtgttacacggngtcacatgataggttaggaaaaccactcatggctaggttcaagaaatgattggccaagcaatgaagtcctttgccgaatgccaacggtaagagaatgagcaattttgcctctctttgcaaaatgccataaacacaattctccaaccttggtgtcgtccttttacagaacatccaacaggctcaaataacaatgcttggagttgntgctgcacctgcccctacacttgcacttgtacttcaaccactcttcatacct

SEQ ID NO: 29432 - DNA, 455 bp, Glycine max
  unsure (1)..(455): unsure at all n locations
agcttgcttatggtagtttcctgcaaggaattcctacaagtttntgcagatcgttatttaatttatcatttcggattttagttgctgtctcagtgatatttgctggatgatgaagtgtcttcatgggcaatacaggggccaatgttgaataaataacaaatacttgttttgaattgttatgatatctacataaattaatgtgacaagtttatttgttctggctttgtggtcaagatgttttattattgttatgctttttctgagaattgttgactcataacttccccaaatttggtcaattattttccatgtgatcatggcaatagttcacatgaattttctgctgttagtctacattattcatggttgcatttgctctagcgtctgtggtattgataataggctcggtaatggatttgtgtttctatgtttcacacctatatgtctcacctatt

SEQ ID NO: 29433 - DNA, 69 bp, Glycine max
cccctactcctcatcttcttcttctgtgcatccacaccctgcgtctccatctctgactccgcaccatat

SEQ ID NO: 29434 - DNA, 369 bp, Glycine max
  unsure (1)..(369): unsure at all n locations
agcttgtacagcgatntcacaacaaaagctatgtgtaccaganaaataagagtttaaattataagagtgtactgcatacagtgttttatattcacccacccacataatcttgggttacttagtccttagtccttacatacaataaagtttgtctttattttttatttttttactttgagcttgagtgcagtattcttttaatataattgacactctaggattaactcagtaacatgcagtgatatattagcaaagagcatatcgtttgttctgtgttgcatgtatcagcagtttgaattgtacgttaacaaaggtgaaatatgatcttagtagagaacgtcaaacaaaagtgggttatgtttatgtgat

SEQ ID NO: 29435 - DNA, 224 bp, Glycine max
tatggatggtatgagttgtgttcatcccgcttgcagaaacttaaagattgctaattgactggcagtctaaaaatattaaaatattgctccattatgatcttgatattctttgagttccacacaagatggagattaaggttgactgatgaatgtgctgttccatctggagcttattaattaatgtattctcatctgcgtgtttttggaggagatgttgaagtttt

SEQ ID NO: 29436 - DNA, 452 bp, Glycine max
  unsure (1)..(452): unsure at all n locations
agctggcttgtggngcttctatggatgctgtatcttggagcttcattgaggtcctttaatggtgattttccaccatggagatgcagcggaagacaaaggagaagaggagagaggaggcgccatccactagggaataagccttggaagaaggagcttcaccaccaagatgagccttggataagaagcttggagaggatgcttcaatggaggaaaagaaagagggagagaaagagagaggggggagcacgaaattgaaggaagaaaaagggagagaagttgaactttgtgttgtgtctcacaagactctcattcatcaaagttacaacaagtgttacacatgcttctattatagactangtagcttccttgagaagctntcttgagaaaacttccttgagaagcttctntgagaaaacttccttgagaagctagagcttagctacacatacctc

SEQ ID NO: 29437 - DNA, 341 bp, Glycine max
  unsure (1)..(341): unsure at all n locations
tgtaggcctaggatcttcttcatcaatggattcctttgcttcttgganaatgaatggcagcggaatggagaaggaagagagagagagagaggagacgccacttcaaggagaagatgagtctagaagaagctcaccaccataagaggccatggataagagcttgggggaagaaggagatgaatgaagggagagggagagaagagcacgaaattntgtgctccaaatgagctttgaaatctgaattntaatattcaaatgatcaaagttgaaaaaaatgcacacacatgacctctatntatagcctaagtgtcacacanaattggagggaaattcaaatttca

SEQ ID NO: 29438 - DNA, 390 bp, Glycine max
  unsure (1)..(390): unsure at all n locations
ngctaaggttaaaccatactcgtgctcttcattgcactccaaaggatattgatgcaagcacctcagctagtggacttgggtattgggtcattcgtctctgatccacgttctgaggtctacaataatatgaagaacgccatcttatagtgcatgttaataaccagtttgtcatgatttttctgggtttatcctcactgccttagagctttatatcctgtttgcatgaacttaacaaccttgaacctgaagtttgcagcaggaattcanaacacagagctaataacactaatatgctgctgtgggaaacttcagcgtttatcggaatatataccaacctaagtctcttttcatctatgttcgtatgctgttgaatatctataattgctatac

SEQ ID NO: 29439 - DNA, 213 bp, Glycine max
tatgtgttctaacatgacacagaacgtttccaacaatctatattctcactctaaacaagtaaatcttataaaaacacaaacgaattataagaaatgatttttacaacatggaaagtaaaaccccttaagaatttcacatatcatatcaaacaaggaataaaatctttattcaaaacacgaaaacaccaaaaacactcagtgttataaccaatt

SEQ ID NO: 29440 - DNA, 345 bp, Glycine max
tagactatagtacaaacaattaacacttaaattattggcatctaaacgactgaaatctaaatatatgaaacattaagcaaacttaataaataataacttaattcgacatgattagtaaaaaaaaaaacaaaatttaaacatcctgctcatcttgggccaggtcttcatttaaatccagcactggagcagctggaacatcctgaagaatgggctactctaacatggtatctggtgaagatacctcctcatgagccatagatgtatctgcaacaactgaagagggctcaagaggagtgaactcattctctgctaatactggctcctctatagcctgctcaagctctt

SEQ ID NO: 29441 - DNA, 204 bp, Glycine max
gcttcacgggcggtcgctcatctttcatcgttcatcaccgctatatggtcaaatactctctgtctacatgtagcacttattcgccttagtacccatccttgttacctctagagcaagtttacacaaaaaagtcttgcctgtatccatgcgttgacaataatacttctcctctctttcgtacttgatggccgtatgaatacaccg

SEQ ID NO: 29442 - DNA, 449 bp, Glycine max
  unsure (1)..(449): unsure at all n locations
agctntgtgcagtgttcatgtggccaaaagaataaagtgcgtgtttaaatatgggctctaattttgtttttattccttcaatttagattatttttgtttcatcttctaaatttaaattattttttttagcttctcaatttcaaaaaatatttttcttaaaataaatttaaatttaaaaagccaaattaaaagttactcaaatttaaaagataaaaaatatatctaaatcttaaatatatcaatacgaaattgattgtcaattatcatgattatttttttcaaaatatgtgtaaatttaaattaatataatttttgtttgtaaatggatattacactattgattcatagagaatgttgtttagaaacttataatcaacacntaatttaagtgcataattattcaaatgggttctaagaactatgtgaataaaagtctctatatatataca

SEQ ID NO: 29443 - DNA, 371 bp, Glycine max
  unsure (1)..(371): unsure at all n locations
atgatgcagatgggtntgtagctacctcatgcactcctctaatgactatggcatcatttctggcgctaaactgctgggagttggaggccatcttctcatattaaattttggcttcagcaggagtcatgtctctaagggctccaccactggcagcatctatcatacttctctccatattactgagtccttcataaaaatattggagaagaagttgttctgaaatctgatggtggggcaactggcacatagtttcttaaatctctcccagtactcatacaggctctctccactgagttgtctaatacctgagatatccttcttgatggctgtggtcctggaagcanggaaaattttttctaagaatactctct

SEQ ID NO: 29444 - DNA, 379 bp, Glycine max
  unsure (1)..(379): unsure at all n locations
agctngcatccattagaagagaatgagcatgtgattgtaagtatgactgaatatgttagtcagtttgtcagattgattgtgaaggaatgcattgagcgtattccagtgacagcgtgatatttaaatcttgagagaaacgactgtcatttagtactgatttttgcatgaatctctgaagtatggactgaatgcatgaaattgattgtgatagccacttagccaaaaagttgaccacgtgctagaatgatttatcccatgcacccagtttgagctgaatgaattattaattgattgaaccctgagcctatatagtgatatctcctgctaccttgacttaggttgtaggagagcatcatccatatgaagcgtggttcaaagc

SEQ ID NO: 29445 - DNA, 338 bp, Glycine max
  unsure (1)..(338): unsure at all n locations
tatgctgcannatattaccaatagacctctaaccctagcagctaaatccaccatagcagaacaattatgacctctccagcaacagatataaccctggatggaggaatcaccctaacctcaaatggtccaacccttagcaagagaccagagcctncattcagagcttaaccaatcagatgggacaattggctacccaattgaatcaacaacagtcccaaaattctgacaagctgccttctcaagctgtccaaaatcccaaaaatgtcagtgccatctcattgaggtcgggaaagcaatgtcaaggacctcaacccgtagcaccttcctcatctacaaat

SEQ ID NO: 29446 - DNA, 129 bp, Glycine max
  unsure (1)..(129): unsure at all n locations
agctcgcatctttgagttgattgttatgcgttataatttttatatagagngcgacccatggactacacttacagctgattcttgtcagtctcttactttctggtgtaccatgatcatcttatgatttaa

SEQ ID NO: 29447 - DNA, 454 bp, Glycine max
  unsure (1)..(454): unsure at all n locations
agctntntcttaatgctttgctacaacctttttctcccccnttggcaacatcaaaaagccaaagaactcggaaatcaacacagttataacaatggagtagcaagatataagtatcagagtattaaatccaataagccaaactcataatcaaggaaataatcaaaccagaattcaaataacataaaatgtcaacaaccacaaaatatccaagactgaaacacaagaaaaataagcaaagtacttagcataataatgtaaattctaagaaactaaaagccaaaatacacggcttataaaagataaataatcagaacctanaatctaagaagacggaggaggtggtggaagatcgaaactctgacgaatgtatccgacatcctcttcaagctgtgtaagacgaatgtccataccggcaaagcgtgaatctaacgagtcgaagcggtcaccaacatac

SEQ ID NO: 29448 - DNA, 436 bp, Glycine max
  unsure (1)..(436): unsure at all n locations
cggaagctctcgagatatcaaatggttatatctnttcacttggaggtccaattcacgcgcataatatatcgagacgctcaaaattgaacaaggaaagctatcgagaaattcaaatgatcataacttttcacatggaggtcagattcaggcgcataatatatcgagatgctcgaaattgaacaatggaagctctcgagaaattcaaatggtcataactntacactcggaggtccgattcaggagcataatatatcgagacgctcgaaattgaacaatggaagctcttgagcaattcaaatggtcttaacttttcactcggaggtccgattcaggcgcataatatatcgagacgctcgatattgaacaatggaagctcttgagcaattcaaatggtcataacttctcacttggatgtgcgattctggcgcataatata

SEQ ID NO: 29449 - DNA, 395 bp, Glycine max
  unsure (1)..(395): unsure at all n locations
agctngctctanattacattgatgtttgtatttattggaggaggttgtatgccatttttgttttaagggtagcatttcttggtaaaactaactttccaaatgtttgccttcgcaggaatggccccgaggaagcttgcctcanagaggtccaggaaggacaaagcgaccgaaggaactagttccgctccggagtatgacagtcaccgctttaggagcgctgtacaccagcagcgcttcgaggccatcaagggatggtcgtttctccgggagcgacgcgtccagctcagggacgacgagtatactgatttccaggaggaaatagagcgccgacggtggacatcactggttactcccatggccaagttcgatccagaaatagtccttgagttttatgc

SEQ ID NO: 29450 - DNA, 299 bp, Glycine max
tctaatgactatgtttatcatctcttggcgctgaactgctgggagtaggaggccatcttctcaattaaatttatggcttcagcaggagtcatgtttcttaaggctccaccactggcagcatctatcatacttcatttcatattactgagtccttcataaaaatattggagaagaagctgttctgaaatctgatggtggggcaactggcacactacttcttaaatctgtaccagtactcatacaggctctctccactgagttggctaatacctgagatatccttcttgatggctgtggtc

SEQ ID NO: 29451 - DNA, 317 bp, Glycine max
  unsure (1)..(317): unsure at all n locations
aacgctgtctaaccttcgtaacccatggatcttctcgaaatttggtttgccacttcacaagacacttttccatcatctataccgtgggatctttgaaaagatgtctggagtgtgctcgaagctttcggttccgagagcatttcttatttaagcatttcagcctctgctttcgtgtagcttaagaaaaacgccatttcttctcctttctttcttccaagtcatttctacataccaagaacttttgcatcacncacagncaccattagccaccacaaacctgcattattctccgttgagacccacaccgagaggaaccc

SEQ ID NO: 29452 - DNA, 322 bp, Glycine max
  unsure (1)..(322): unsure at all n locations
acctttggtcatcctcatagttgntgcatgagaaaacatgctctattttcatctcccactccaagtaggcctccagatcattctttcctttaaagggatgaatgttgggtttaataccatcaattcggttttgtctaggaacaccatcattccctcttctcctcctttcttcttcattatgatctctaatctccatttgatccaacctctcatggagcgcatcatctcattggttcattaacctctccaaatgttgcatcaaagcttgcatttggaatngcgaaagccccactccatcattaggattagtacctaacatctc

SEQ ID NO: 29453 - DNA, 377 bp, Glycine max
  unsure (1)..(377): unsure at all n locations
ccaacgcgagctctgaccactgttcttcctttccgcgatgcctcttttcatgtccggctgagtgggcttatagcctaaaccatacttcccacgatntccttgggtttttatcaagctagttatgccgccattgtctttgcctaaacccatcccgggttcataacctgtccccaacataactcgggccatcactaccgctgcatcggacaaacaaggttgcccaaagagggagtccacggaggaaatgctgaccacctcaaaagaactggaaagcggttctaacgattcttctgcggcttccacataaggcatggaggatgnggcagctaccaagatatcttccttcgctgacacgatgaccaagtgtccctccacta

SEQ ID NO: 29454 - DNA, 379 bp, Glycine max
  unsure (1)..(379): unsure at all n locations
agcttgtgaagataagcaattatttctttaatataagttgaaccattgaattatggtttagtatgtnttactgattacccaagccattttggggtgagggtgaatatatggcaataattgacacctggtgccttccacattttgaaatatgacagaatcgtaactataagtgtcacaattatcctgtgtagtacgttattttgattggcatataggaacatgtgatatgaatatttttagtatttacatttacttatcactatgtatttctttcagggtaataagaaattgtatgtttaaaattttccttatatagtgttaactgttaaggaagctaagctatcttaattttatatagatctaaaaattctagcactga

SEQ ID NO: 29455 - DNA, 173 bp, Glycine max
  unsure (1)..(173): unsure at all n locations
actctttcacgctttctcacatcaagcttggtggattatggggtaccccgtcatatattgtactaggtggcgatccggcgatggtgcanatcaactcttccacatccacatatcaaacatgaacccaccatccctagttgcccaccttcatctgagctcacgtactcctacgt

SEQ ID NO: 29456 - DNA, 354 bp, Glycine max
agcttgagatgaggaagtgtagaattttgttcttcctgctcttattcgctgaccacagagtggtacctggagatatgtcgcggcggtcaggagaccttggggacgtcaggtggggtgctattgcccaaaaccaagcttgaccaagcccgacccaacccgagcatagtcggtcagtgagaacctgtgatgtacctaaacaggcgagctcctggcagtccacagataaaaggaacaaagaccacacacctaggaggcttgaggtggctggccacctgtgaatctcgtgtgatataggagatatgggcgccagtgatcgactaccaggggtgggtcatctgatacaaggcttaaaaa

SEQ ID NO: 29457 - DNA, 310 bp, Glycine max
gcctcttacgtctggtttatgaatgtagcatatagatccaaagacccttacgtagcttgctgatggcttcttcccgttccaagcttcaattggagtcttgtctcttacagacttagttggacatactgtgagtatgtaaacagcaatcgtaactgctacagcccagaatgtgttaggtagtaccttttccttgagcatcgaactaaccatcttcataactgtgtgactctttctctcagacacttcattttgttgaggagaatatgcgactgtaagttgtctcttatagccttcatgctcacaaaaactt

SEQ ID NO: 29458 - DNA, 327 bp, Glycine max
  unsure (1)..(327): unsure at all n locations
agcttatcatcattggtcttgaatgctcgttattgaggtaagnggaatgtaaaccactgattgagtaaaggtgcacaacaagaaatggttccacggtcaccctgagtaccgtcatggatagaatggtaagcatcggcgagtacagtgggtacggtgttctctgtaagaaagatcttaatggtattgatatcgatgaagttgtcaatatttaggaagagtagaaggccatatataaggagggctaagatataatggaaggcacgtatactacctgcttcagcaaatatggaggcttgttggcagaggaagtgggtgcgaagaccttgg

SEQ ID NO: 29459 - DNA, 109 bp, Glycine max
tatcttattcagcattgtagttcaatattatcaagtggctgggcctagattagaaacaagtacgataggatagataaaaatctcccgcactcaccctcattcccaaccc

SEQ ID NO: 29460 - DNA, 74 bp, Glycine max
  unsure (1)..(74): unsure at all n locations
agcttngagccataatccttacttattatttttcttgacccagagtgagaatgccaatctcttccctcagaagc

SEQ ID NO: 29461 - DNA, 438 bp, Glycine max
  unsure (1)..(438): unsure at all n locations
aataattatatatatatatatatatatatatatatatatatatatatatatatatatatatatatatatatctggagttatacgatttttttatgtatgcgttaatttttttatatacgattccctcacgtgaatggtcaaacctcaaattgatttttttcgtgtgaataattcttgtggcctggattttctaattttggcactcaaagcagcatcacccctctatgtcctttggttataataattaaaatatgtgtgtgggtgttagatagatataagagttgtttctcaaatgttttttaatagtctacacggatttgcagcagtaaaatgttgatacgttagaggcttccctcgagggtgcaatatatatgtgtcaaaccttaatgatggtgcatattatattggaaacggagtgtacagtnatatctcttcacg

SEQ ID NO: 29462 - DNA, 306 bp, Glycine max
caccgtctgatcaatttcatgccccactaactataagtctgtaacacgaccataaaaactcaattctgctatcaaaaccaaggttttaaattgtcgtcacattaaaaatttgatctttaatattacagaaaattatagggtaatgtagtcgatacagaaaattatactaccatagaaacctaaaaaattatggacaaatattaattgttagtttgttagtaatgtagcttcatgtagagcttgtaggccttggatcatcttcaacaatggagtcctttggttcttgaagatcaatggcagcagaat

SEQ ID NO: 29463 - DNA, 467 bp, Glycine max
  unsure (1)..(467): unsure at all n locations
agctntgcagaagaaaatgagaaattaactttttttgtgttgttaggtttttcatttttaattataatgttagttttagggggaatgtattttaggtaaaatctgtaatagcatcttttgatattgtaattgttgttttgctgaagaatttgtagtaagaagaaatctgttgttactgtcagttacccatttcaatgaaatataatttgttgctgaaatttgcagctgaaatttgttgctgaagtttgcaatttattaaatataatttgttgttgtatagctttttgaagtcattgaagtagcactaaaccaggtggtcctactccaactctaaatccaaaacactgtgtaaattataaaagaaagagaagaaacatgacattaaatcatgtgattanttttcacatatcagcaaacacttcctaaaccaaagaaccataatggctcagccataatttcatttcaca

SEQ ID NO: 29464 - DNA, 337 bp, Glycine max
  unsure (1)..(337): unsure at all n locations
gggttgatgcgttctgtctcgtagaatggcattatcactagctgacatgttctcaattagctcaggtgcttcttctaggatcttcagttntatctttccccctgcagaagcatctaacagttgcttggtttatggtctcagcccatctataaacatattcaattgaattggctcagaaaacccatgggtgggagttcttctcaataaacctttgaacctctccaatgcttcactcagagattcatcanggaactgatgaaatgaaggcattgcagctttcccttctatagtctntgactntgggaagtatttctttangaacttttcaataactctt

SEQ ID NO: 29465 - DNA, 470 bp, Glycine max
  unsure (1)..(470): unsure at all n locations
agcttcaagcatgtaatatatatatatatatatatattatataaccacacaattattattatagagaaaattcacaaataatatgatttctattataatttaaatttaaatacactcaaaatgaaaaaaaaaatgtcaaagctgcggttctctaaagttagttagaaagtacggcttttgctatctttctacaatgcaaacataactgtcacccacgtattgatagttgtaattcagaatatattagatataatgtgtaattgtgagtttgttaagtttgattaagtctgtacttagactatataaatgttctaatgtgtaattcagtttcaataatattcatctcatcattntgagtgtgtatgattntcgggttttctctccttttctccaaccgaattggtatcttgagtganaaatctgagtgtgagtgcaaacagtgtgagagaatngtgagaatcaaacactgg

SEQ ID NO: 29466 - DNA, 243 bp, Glycine max
  unsure (1)..(243): unsure at all n locations
ccttcaagctcttgttaatctccttactgcatgaaaagttatattttcccatgtaataattgtggttgtggtttcatcatgaaccttcacattatggataattgtggctaatgttgccacaatngcaattgcaatgcaaccattgtggagagtccaaaaactaaggatgattgtggaaaacttagtaatgctactanggttttgaataagaaatcattttggttttctggtgatgcactatat

SEQ ID NO: 29467 - DNA, 446 bp, Glycine max
  unsure (1)..(446): unsure at all n locations
agctntggctgctgctggccatgttccccctgaaacacttgcagccattcatgctgagctcttaggtcacccgacaaataacataatgtctacagtggaccaaactaccctactgcaagcatcaatacaggggctaaaacattcccatgctggacatgctgtggcatatggtcagcctcttgtaaagtgtccttcgaacattggcaagaatttctctccatctatcttgactgtaaatgatacgtcatcaggatatggtgcatggctgtcatctaataatacaattggtttagtgagacccaataatagtgttgaaagggtgggtattcagaataacaacatgctgatattagagcaccaacaaaggcagcagccccagcaaaaacaacagcagcaacagcaaaagcaacagcaacagctgcagcagcagtcattgatacatgatc

SEQ ID NO: 29468 - DNA, 320 bp, Glycine max
ctctcttttttattgagatagatcacatgattgacctccaaggagccttctaaccattaagaggtcaccttcttcgtgggggtagacttcctcattaaactcttcaccccttacttcatcttcacttccactaaaggaagggcaagaagtaatctcctcttgactactataaatttcttgacccctcatgatcataattttctttgtggggcattgagaggcaatgtgacctctcccaagacatttgaagcatttaatattactagtcctttcttgggaactagtcttaggggtgtatttctctatggtcctacctttat

SEQ ID NO: 29469 - DNA, 396 bp, Glycine max
  unsure (1)..(396): unsure at all n locations
tcctctacatcacctgatgcatgcaagcttcanaangattcatcaacatagaaacattttacagagatgtataaaattacgcaaaaatctaattgataacaaaacctaaacttacttgttgtttgatggttgacattgttcttaacaatctacattaacacaacacactaatggcgttggtttatctcaatcgagttggcactaaactacttgcaaccaaaaataatactcaacaacaacaaatattgtaatgagttttgagtggtcgagagtgatatgaattgaaaatgcaatcaaaagtcggtgtgtgtgcgagaagatcacaataacacacctatcgacggtgagcgttctacaaatgtgcaagtgagagtttctagtgagagttctgagtgg

SEQ ID NO: 29470 - DNA, 350 bp, Glycine max
tgttatcttctgtgatttgtaccgaaaaaatattttgttaaagattgtagatttatcacaacaaaaatattcgtttttcacttttattttacataaaattaacaaaaaatgggaattagattccgtcataagatattttttataaaaaaaaaatggagagtgagaagataaatcatgggtgtgcgatatcacagcccatcccaaattctcactgtgagcttcattggatgcatgtcagatatccggtcatacttcctatgcaacaatgcatgcactacgcaacatgaaataactcgtgatggtgcccataaatattaatgaaacagagactcatgaggaggaaagcttat

SEQ ID NO: 29471 - DNA, 355 bp, Glycine max
tcatacctgaagttctatgaacatatgatattcttatacatgaaaatacaccatagaatatgcttcagagtctctattctctcatgttggaaagtccccttaattgcagtcatccctagtccaccttaaatgtggtgggtagtcctgggcatgagaagggcatgttggatatctcacatgactagtgatatgatcgaaatagagtatataagtggaagacaatcttcatcttataagttgatttttaggggtgagtaacgccccaagcccaatttctaacttctctatactaaatccctgtagttcacatatctaacacacagagccacatctaataactttcagggagaaaaaa

SEQ ID NO: 29472 - DNA, 291 bp, Glycine max
  unsure (1)..(291): unsure at all n locations
tcttttggaccttgaacaagctattaactcctctntcagattcatgctatgtgctcgcgactggtctctntcttcccttcgcaacttgagttcactattgctaccccatagagctccgcgaattntgttccggccatactcttccttgcgagccctcttggtctcttgttcaagggctcttgcagtaattgcattctcttcccgtaacccggcacactccttccgaacgtgtgtagcggccaacttgaacttctcctttggcaagtttgcctttcctaactcgcttttgag

SEQ ID NO: 29473 - DNA, 374 bp, Glycine max
ctagagaggttaaatgagcacaatctacatcatactcctaatatttttttgttttttactgcacttccacacttttattgaaaatataccacaacattcgtgaagtatgtccaacctatttttgaggaagacatacaaaactgaccaaaaatatttctctataacttataagtaatatactaactaatttctttccaacacatattgtagtgataggcaccagaaagcctaataaaaaaatggatctcttgcacacatcccattataagaaacaattagatttcaaagatataaatggaacgaagaattcttaactaatgatcctggactataattcttattactttaatatatccatactataaattttttct

SEQ ID NO: 29474 - DNA, 404 bp, Glycine max
  unsure (1)..(404): unsure at all n locations
agctnttcactcggatgtccgattccggagttattatatcgagacgctcgaaattgagcaacggaagctcttgagaaattcaaatggtcataactttccacatggatgtctgattaagacgcataatatatcaagatgttcgaaattgaacaacgaaagctctcgagaaattcaaatagtcataactttttactcggaggtccgattcatgcgcataatatatcaggacggtcgaaattgaacaacgaaagttcttgagaaattcaaatggtcataacttttaacccggataaccgatttagaaacatcacatatagagaagctcgaaattgaacaacggaagctctcgagaagtttaaatggttaatacttttcacggaggtccattcgggcgataatatatc

SEQ ID NO: 29475 - DNA, 453 bp, Glycine max
  unsure (1)..(453): unsure at all n locations
caccttctggtcctcctattagttgttgcatgagaaaacttgctctatnntcatctgccactccacgtaagcctccagatcattcttttctttaaatggaggaatgctgaggttaatatcctcaattcggttttgtctaagaacaccatcattccctcctctacatccttcttcttcattatgaactctattctccatttgatccaacctgtcatggagcgcatcatctctgtgatgcattaacgctctccacatgttgcatcaaagcttgcatattgaattgcgaaagccccacttcatcattaagagtagtacctgacattcgaaaccaacaaatcaaaccttagcagagcattattgttgctgtttgaatacctcaccaactcaagtgtatacacaatattgctcttctctatgaaaactcttgctttacaccttaataccttgaagttt

SEQ ID NO: 29476 - DNA, 468 bp, Glycine max
  unsure (1)..(468): unsure at all n locations
agctngcccagagaaggaatccacggaggatatgcttaccacctcgaaagactgaaaagcggtttctaatgactcctatgtggcctccacataaggcatagaggacgggaagctcaccaagatgtcttcctcgcctgatacgatgaccagatgcccttccactatgaatttcaacttttggtggagtgtagagggaacaactcccactgattggatccacagacagctgtaggggggttaatatccattatttggaaggtaacttgacaggtgtgagggcctatctgtactgngagatcgatctctcccctaacctctcggcgggtgtcgtcgaaggcacgaaccaccattgaactcggcttcaggtgggaagcatngaatggtaatttctccaaagtgctcttaggcatcacgtttaaactggaaccattatcgatgagcacctcggctacgatatggtccatacac

SEQ ID NO: 29477 - DNA, 415 bp, Glycine max
ggcctgtccgatgcagcaatatatgatggcccgagttatgttgtggagcggttactaacccggaatgggtttaggcaaagacaacggcggcataactagcctaataaatgccaaaggaaaccgtgggaagtatgggttaggctataagcccactcaggcaaatataaagaggagcgttgccggaaggaagagcggaagtcaaggctcgcggttgagacaagaaggtgaaggaaacccaccctgccaaataagtaagagctctataagcgcgggtctgggggacgaaagtcaagtcgtcactatatatgaagatgatgttccgagtacgctggatttggtacgaccatgccctcctgatttccaactgggaaaatggcgagtggaggaacgccccgacatttacgcgacgagcata

SEQ ID NO: 29478 - DNA, 435 bp, Glycine max
  unsure (1)..(435): unsure at all n locations
agcttgaatacaaatgactttgcttatcatttaatagacaatatgatctcaaatgtatcgtctagtgatntagcagagtttcacttaagagattntgctcgttttttctatatttttttttccattttatgcttttgagtagagactaccttttatagactttagtgaaggatcctgagattagcgctaagtcttgatatgacggttgtctcacatgtggaggcaaggcaacctagcatgctttgatttgagaggaaaagaataatatacaaacaacacaactgttctttccacgtcaaaaatgaactttggaagaatattctataaaagccttatattatcttctattctctccctttctcaaattcanatggtagcaattcagataaagagaggcnaagttaacatttataaagagagaaattgtgactttcc

SEQ ID NO: 29479 - DNA, 238 bp, Glycine max
  unsure (1)..(238): unsure at all n locations
taaagtgacaagtcanaatgcttgttgcaatcaaacattgtttagtggaaccctttatagttttgtaaaggagaactaaacatagctcangttgagtgaactagtataaattgagtgcttctactactctcatttaacttttctgagtatgtcttaaggattattattgacacaactctgcacatatattttatattaaactgtattttgaatcactattttactaaacattggatga

SEQ ID NO: 29480 - DNA, 457 bp, Glycine max
  unsure (1)..(457): unsure at all n locations
agctngtaggattatggggtacctatcacatgtggtactaggtggcggtcgggcgatggtgcacaacaagttttccacatccacaaatcacgtataaacccaccatcccttgttgcccacctccaactgagctcacgtactcccacgtagcccatatcctcgtttctctcatcaccgagtccccataaatcctcacaagcttccccaacatccaggtaattcaacatccaaatcatcacaaactaaaaaaccaagcaaaacagggcaaaggtagaaaactctgcccaaaactcaaaccaaaatcacagctttttctcacttaaagaccccagtaacatttccttcgttccaattcgttcaccgttggatcgactcgaaaattntactggaagtctctagtacataagcactacatttgaccggtgngatctgctaganaacatcaagaactcattct

SEQ ID NO: 29481 - DNA, 331 bp, Glycine max
  unsure (1)..(331): unsure at all n locations
tatgcgcatatttccttacaaacgttctcttgcacaagacattctattaaccgaaaaaaatgcacccatatacaatcaaggcagcttcgttacctagattatttacacgtacttccaaggtgtatntgttacttacatcacacacctccttggttaaattcacatacatgcatactcaaagcattttggggtaccaaaaattgcacatgtgcacatcttggtatttctaatacctatacatacacaaacttcatgatgaatcttgactatctacacaataaggtgctacattttatgctcttttcaagtttttgctacctaaagccgcatg

SEQ ID NO: 29482 - DNA, 433 bp, Glycine max
agcggatcggtctcaggatggaacggtgccatatcccattgctggacctcgggtgcaggtgcactggaggcggcaaagaccagcggtgcatccgactcgtcacgcagcgacagcggcgcggaggcgacggattccagtccaccgaacatcaagctgttgtccgccgctgcaagcgaaggcctgtgcggtggcggatcgaaggtgaagtccggcagcggtaccggcacctcaccgggtgccggcgcggccgactgtaccgggatctcgatgtgctctggctgcagtgcctcgccctgcagcacgaccggctcacgctcgatcgactgcggcacggacgctgccggctcagccgcatcgtggtccggcaacggacagtagcgcagcgcctcaaggctgctgcgggtgatgtcgatgatgtcctcgcgacccgggc

SEQ ID NO: 29483 - DNA, 305 bp, Glycine max
  unsure (1)..(305): unsure at all n locations
ctgatcggtcgccagcgcgtgcccagtggccgncagctggacactctggccgacgccatgncatcctggagtactacctcgaagccctgcgcgaccgacagccgggtcgcgaggacatcctcgacatcacccgcagcaggcttgaggcgctgcgctactggccgttgccggaccacgatgcggctgagccggcagcgtccgtgccgcaatcgatcgagcgtgagccggtcgtgctgcanggcgaggcactgcagccagagcacatcgagatcccggtacagtcgggcgcgccggcacccggtgag

SEQ ID NO: 29484 - DNA, 463 bp, Glycine max
agcttcctagtgggcctaggggctggaaaatgtcctcaaagtgaccattttgcccctcttctgaacattttgcacatttccttccaaaacatcacaaaaccctatggattgcgcgacaattaatgttaagcagctcaattcggccagcaagaatccaaatgttagccaacgattgtccccggacaaaattaggttatgaaagttgcccctctttacttatcttttattggagatagaagggaagtaaagacaaagacactaatttcattcgagcaatctcaccacccgaccgaccactagcccaatcagcgaaacctgtcaaaagaaagagcataatacgcatcaagtatatcaacaagcaccttatagtcttgcaaaaataaggtggacattaaagtctcaacagaagactctgacagtcttagaaaagataaagaacggaagacattgattgtctctacat

SEQ ID NO: 29485 - DNA, 372 bp, Glycine max
ctgcgaaggcaaacatttggaaagttattttcaagaaatataactatcattacaaacaagggccaaacaacacttctcatggcccgagtgtcaacatgcactttataaaataatcatattggggtcgtgctattttatgacacatacgtatttgcacacataaaaattctgtgtgaagcattttacgacacctatccatgtacatattttttgacaaaccttttcatgctacatcctatatatatacacacacattttgttggaaggcttcttttgttacctactcacaaatacacatattttgaaaaacacttttacgctacccatccaacactttgtaaggcacttcatgctatatatatttcacatatg

SEQ ID NO: 29486 - DNA, 460 bp, Glycine max
  unsure (1)..(460): unsure at all n locations
agctntagctggtttgaatgtcgtaaagttgttaccatctccaaatcacctgattctgggaatagactgatttagttcaacaaggtcaggtaaggtatgttcacatttctgttttagttgtatatacaataagttttttaaggaaaaaatattttagtaataaaacatatttttagaaaaaaaatagtttgaaccaaataatttttttaaaatattctcgagaatttaaaaagaaatttccaactaattttaatagttaaatacatattttttaaagatactcaaaaatatcattttcatctaatatttctggaaatattattttcaggaatcctatataaagttctgtgaaacaaaaactacctaaaatttggatcaatgaccttttaatagtggcatgtgtacgtgatgagtagtatattaacatcaacatctattaaacaacttataacttaacaaa

SEQ ID NO: 29487 - DNA, 458 bp, Glycine max
  unsure (1)..(458): unsure at all n locations
agctnttcctctntgctgcttctagggctcttttcccgaaataagcactatggctgctgtgccaaatttgtgccaatcatcagcttaccctaattctgcataaaacaggctttaaataagctctaaattcacgatgttgcgcttagcgccatcctcgcgcttagcttgggtaagtggaattgggcctagcgtcagtctcgcgcttagcctggctgaaggcacctgctgcgcttaggacattgatcttgcgcttagcgcgcagctttgatgctgatgctatgccagattctcctttgcgctaagcacgctgaagttgtccttagcggtggatatgcgcttagcccaactgctgagcttagcccaactgctacttgttgcaattcaaaacttagcctctttttcacttgaaaatgcacagatttcatcattaaatccaatgganatgttctagagatagc

SEQ ID NO: 29488 - DNA, 418 bp, Glycine max
  unsure (1)..(418): unsure at all n locations
agcttcatgatgaatcacgattgattcatagttgttttgatgataacacagatgatgacgaaggtgatgacataaagctcacaggtcaatcacagaatgagttcaagatgttcaagatagaatcaacaacacttccagattcaagaggagagctgaattcctgaatcaagaatcatgattcaaggatcacgcttccaagaatcaagatcaagatgcaagaatcaagagaagacttaatcacgataagtatgaagaagtttttatttcaaaaactgagtagcacatggattnttctcaaaacatgcataccaaagagtttntactctctggtaatcgattaccagatcgttgtaatcgattaccagtcgcaaaatggattcgaagaagctttcatatgaatctacaacgttccaattga

SEQ ID NO: 29489 - DNA, 457 bp, Glycine max
  unsure (1)..(457): unsure at all n locations
gctcgcacaatggaagcacagatgtctttctatgggaggcaggatatccctcatcaattctgtcttaacagccctccctatctaccttctctctttttttagaatccctaaaaaagtggtgcataaggtagtttctattcagaggaactttttgtggggaggaggttctgaggcagccaagataccgtgggtaaattgggatattgtttgtcttcccaagaataaaggagggctggggattaaagatatgtccaagtttaatgaggccttgattggtcaatggggatgggactatgctaataaccanaatcagctntgggctatagttttgatgtccaaatatggtgtgtggaatgctttatgctatggaagaaacagtgcagactgctccccttggtggaaggatcttagagctgttttccagccacagcatagtaacagtttcatcaataacatg

SEQ ID NO: 29490 - DNA, 458 bp, Glycine max
  unsure (1)..(458): unsure at all n locations
agcttcanaccaaagaaattcanaatctatgtatctaaaacctctcaatttagtggattttcaaggtttgagaagtgaaaatgagaatggggtaattntggagcaaactctcatctgaaacaactctataacattaatctaaacttgctcaaactggttttacgatgaaaactccaccgaatcaaaatttgatccctcaacccccaatttaccctagaaatggctcttgctttcaccttagtcactcatttttctcctttgctcagcccaagctttcccacaagtcctgaatgacattntaaactaggattaactcactntagcctccaattaccactaaatccagatttagcttttcaaacactcaaagcctcacactnttccactcatatcactaccattctcacatttaaccctagggtaactctacccttcatctctatcagttntctatcagt

SEQ ID NO: 29491 - DNA, 181 bp, Glycine max
ctagttccgctccggagtatgacagtcaccgctttaagagcgctgtacaccagcagcgctttgaggccatcaagggatggtcgtttctccgggagcgacgcgtccagctcagggacgacgagtatactgatttccacgaggaaatatgacgccggcggtgggcatcactggttactcccat

SEQ ID NO: 29492 - DNA, 346 bp, Glycine max
  unsure (1)..(346): unsure at all n locations
gtggaaaccaagtttgcgacatatacacgtttggggatgcccgtctaaagtaagaatttataatccacaagagaagaaactagaccctaagactattactgggtatttcattggatatgctgaaaggtctaaagggtataggttctattgtccatcccataacactaggattgtcgaatcaaggaatgcaaagtttcttgaaaatgacttgaccagtgggagtgatcaatntcaaaacatttcttctgaaaggaatcactatgaagctgaaccttctacgacaagtaatatggtggtagtcattccacccctcaagttaaatgggtgtagacaccagtgatgaagt

SEQ ID NO: 29493 - DNA, 456 bp, Glycine max
  unsure (1)..(456): unsure at all n locations
agcttctatataagctgaatcattntatcaattaacacaagtngagttntattcagaaaattagagtttatctcttttatcttagtgagagtgattctcctaaattcttgagtgattcaagaacaccctggctgtatcaaaggactttcacaacctttgtgtgttgccctcgctggaaagagtgattctttccttcctttcatcttcacccttgttctttcaaaccacaattccagaaaatccacctctgcccagaattatctcgtggccataactcccatnttacgcactcaaattaagtgattcttaagcctaaattgaatttcaaaacgagacctttcnacctcctttggactcgcctcatttggagccctatagcttcagttattgccatttccatatttctgtccagccaccacttaacctacgttntatcatcccattcatccattttat

SEQ ID NO: 29494 - DNA, 245 bp, Glycine max
agagtttatctcttttatcttagtgagagtgattctcctaaattcttgagtgattcaagaacaccctggctgtatcaaaggactttcacaacctttgtgtgttgccctcactggaaagagtgattcttttcttcctatcatctccacccttgttctttcaaaccacaattccagaaaatccacctctgcccaaaattatctcgtgaccaaaactctcatttacacactcaaattaagtgattctt

SEQ ID NO: 29495 - DNA, 114 bp, Glycine max
acctaatcaccgagctgcgcttctgagatgggattttttatttcgccacaatggaggatgttgattgcaattacccctattaccaaatggtatttaaacgttaaataccttttg

SEQ ID NO: 29496 - DNA, 459 bp, Glycine max
  unsure (1)..(459): unsure at all n locations
agctngcattntgtggaagattaaactcttgttagggtatattagagcacctcactgtgctattaacatcaaaccaagtaaatattatacccttgcaaaggatagtttagtacaccctcggtgaaatagatccaactacaataccacaacattaaacaataataaagaatttaacttggaataagaaaacactcatgaaatgattagatcattatagcccagtaaagggccccaagatcaacggtttcaaaaaaactgtacacgatctcatccacaaaatatttttactcacaaaattttaaaaagaagatataaacaaaacaaactaaaaatagagagttagggggtatattgaattaagattntaaaaaactattttaacataaaaaaacttgtggagtttaaagaatatgtaggaatattatgacttatcagattntntacaagacttttatgata

SEQ ID NO: 29497 - DNA, 354 bp, Glycine max
  unsure (1)..(354): unsure at all n locations
tctcgcgcacttctccgtgttctgcgaaatcgaagaaagttcgttagggtttgataaacaaacaggaaagtcgaaagggtttgctttatttgtttataagtctcccgagggtgctcaggccgcattgatagatcctgtgaagactgtggaagggaggcagttgagttgtaagttggcgattactgatgggaagcagggaaagcgggtagggccggactctgcccaggcccatcacgggaatgttcagcacgggcatggagatggagtgggggcgggaatggngatgcctcctaatgcggggtccgggcctgtgcagtatggtggacctggacagtatgggcccccggttgggat

SEQ ID NO: 29498 - DNA, 371 bp, Glycine max
agcttctacattcaattgcaagcttttcgatatattacgggactcaatcggacatccgagtaaaaagttattgtagtttgaatctgctcagggcttcgggattccatttcgagcgtctcgatatatcacgggactcgatcggacatcagagtaaaaagttattgtcgcttgaattagctcagagcttctgcaattcatttcgagcatctcgatatattacgggactcgatcagacatccgagtaaaaagtgattgccgtttcaatctgctcagggcttctgaatgacatttcgagcgtctcgatgtattacgggactcaatcagacatactgataaacagttattgtcggttgaatttgctcagagcttct

SEQ ID NO: 29499 - DNA, 140 bp, Glycine max
  unsure (1)..(140): unsure at all n locations
ntgagcatattcaaacgacaataactctttactcggatgtcttgatgagtcctgtaatatatcgagacgctcgaaatggaataccgaagctctgagcaaatttaaacgacaatgactcttttactcggatgtctgattga

SEQ ID NO: 29500 - DNA, 443 bp, Glycine max
agcttcccagatccgctcatggaatgacttggcaactgccttcattaggcagtaccagtacaatacggacatggcccccgatcagaaccagctccagggtatgactaaacgagagcatgagtccattaaggagtatgcccagagatggagagatctcgcagcccaaaagggcatctccggatgtattgccggaagatgggggcgtattctgcggacgaaaagttgttggtccatttctttcaagacagcttggccggggcagctgtagcatggtataccaatctggaagcttcccagatccgctcatggaaggacttggcaactgccttcattatgcagtaccagtacaatacggacatggcccccgatcggaaccagctccagggtatgactaaacgagagcatgagtccattaatgagtatgcccagagatggagagatct

SEQ ID NO: 29501 - DNA, 169 bp, Glycine max
aatctttaaaaccttattgatacattttgagagggtggttgtcatgtggccatatcgacatccttctctatcataagccatcgtccatttttcctttgaaatgcgatcaatccatgttgctatggctggactcagttgacgaaatttttctaaattttgataaaaaaat

SEQ ID NO: 29502 - DNA, 466 bp, Glycine max
  unsure (1)..(466): unsure at all n locations
agcttcttatccaaggctcatcttggtggtgaagctctcttcttccatggcttattccctagaggatggcgcctcctctcacctcttctcctttgtcttccgctgcatctccatggtggaaaatcaccattaaaggacctcattgaagctcaaagatccagcctccatagaagctccacaagcaagcttccatcacaacccctaagcacttttgggccaaagcagtgaatactgcatgttatcttcaaaacaaaatttacataagacctatccctaaaatgaatttgtatgaagtatggaaggaatgaaaacccaacatataatattttcttccatttggatgcaaatgtttcattctcaacacaaaggataacctgngagaaattgactagaaaagtgataatgggatatttcttagatactctaaaacttctaggacattcaaagtttacaactcaagaacctt

SEQ ID NO: 29503 - DNA, 345 bp, Glycine max
  unsure (1)..(345): unsure at all n locations
ctctaccttgtncaagttcagttgagcctttgtggacttgtgtgacagtcttctcaaactcattagcccaaaaatctacaattctccaagtccttacttggaagttagcaatggaatccattgatgcttggtgatcggcttccctcaacatctcacaatctgactagctaagcattgaagactaaataaaggcatgtgggttgaagtcctaatcccaaagagttaaccctatccttcatagaaagaaaggcgggtgactcttgatggaggaaggagtagcaattggaacaagttccacccttttgccttgtgctgcaacatctntgtgatgagaatgacttggat

SEQ ID NO: 29504 - DNA, 468 bp, Glycine max
  unsure (1)..(468): unsure at all n locations
agctntcctctgtgataaaaaagaaattcctgttgtataataataatctatagtatataaaataagatataacaaccttaagtgagtgatctcaatgatctttatttttgtagatcaatctgtattcacgtattcccttttagaggatattgatctaagcatccccattacatctaaatagtaaataataaaataaaaattatataaacacgaaataaatacaaaataattaagaactttgaaagttaaaagctaaccaaccaataattcagatgtacattattagtagcaatctgagatgagttgaatataaaatgagcaatatttgacggaaaaccattgcgaactcgagaaatatgtgtagtgggaagaaaactaacaccatatggatgaatagtcgctcanataggtgcctagtttccatgcacaagaataatctgtgtatagtacacaccaccttcaaacata

SEQ ID NO: 29505 - DNA, 148 bp, Glycine max
aaatgagccgcaatatactggcagcggagatgattttcaccctgctgtctttgacatcatgattcacttgattgagcatctggtcagagaaatcaaatgttgtgggcctgtttatctactgaggatgtacccggttgagcgatacatg

SEQ ID NO: 29506 - DNA, 402 bp, Glycine max
agcttgactaagcgagttgatattaaccttattttctctttatttattagtcaattcgattaagaatgagaagtcccaaagagaaaacgtctgattgattctttcgctttattttactaaaagggtattttgattattatatttttattttacctctttttttatttccaacgcggttacggcacgactgaacggtcggaattcattttaactgaaattaacggatattacaaatcatatgatcactggaaactttttttttttattattaggcgagaaatgacttaaataaattactgaagcacgtcataaggggatacataaagtaaatgaatatgataataaaagtacgtgaaacaaaatggcgaccaccacgggtacatataatgaattgaaaagctc

SEQ ID NO: 29507 - DNA, 406 bp, Glycine max
  unsure (1)..(406): unsure at all n locations
acttttcttcattctaaccatgatgatgcaatacatatatcgaatgtactaggatacaacaaccaagataacaaccaatacaaatgtcattcaaggaagttaggcatgtaaaagccaaaacttcttcaagcttttccttgagcttcaagatttaaccttaggttgttcattgtattgctcatgttgctcccctcatctctaacgatctccctttttttggctttgatgatgccaaacataaatacaacattgagtgcatttggagagtcaatcttgagaatggattagagactngatccttagtcttatcctaaaaaattcttaacacttaagaagaagataattcatcattatcatcatcatatatgtcaantcattatcctgtatcatatatataaataacaat

SEQ ID NO: 29508 - DNA, 385 bp, Glycine max
  unsure (1)..(385): unsure at all n locations
agcttgagatgaggaagtgtagaatgttgatctttctgcttttattcagtgaccacagagtggtacctggagatatgtcgcgggggtcacgagaccttgtagacgttatgtggggtgctattgcccaataccaagcttgaccaatcccgacccaacccgggcatattttgtcagtgagaacctgtgatgtacctaaacaggcgatctcctggcagtcaacagataaaaggaacaaacaccacanagcaaggaggcttgtggtggctggccagatgtgaatttttgtgtgatatatgggttgtggcctctggtaatcgattaccaatggtgggtaatcgattacaatgcttaaaaatgaagataggaggctgagatggtctctggt

SEQ ID NO: 29509 - DNA, 444 bp, Glycine max
  unsure (1)..(444): unsure at all n locations
agcntttgtctcagaacaagtgtgtccaagttatcttttctctggtaatcgactaccaggtagcgtaatcaattaccaaaagacaattttgataaacaactttttataaggggtttgaatctgaatctgagacttgaatcatgtaatcaattaacagatgtttgtaatcgattaccagcaacgacaattcaaaacacactttaaaaagttatgacccttcaaaatataactgcgtaatcaattacaaatttctataatcgattactagtgaagaatttcagaaaaagttttttgaaagagacacatctcttcacaccatnttgaaaaggcacgaagggcctatatatatgtgtgtctaagctcgaacagcacgagagatattctaagagaacttaattgtcgaatgctctctcaacaactcatgggcatatacttgctaatcta

SEQ ID NO: 29510 - DNA, 503 bp, Glycine max
  unsure (1)..(503): unsure at all n locations
nttgtcccttcgaaaccgncttgatccattgantacggccctataaaacgcagctatccatacattagactatatttactaaaacagtaattttctctcccgctcaatgatacaattctgacacaccattatcaagctggaaaaattgcatcatgatgcaatttatcctcaacactacataatagttctgacttaaacaacttggaaaactacactggggcatgtgcgngtgatgtctttttacagctgagtcacaacctctcccattaaagtaaactgaaatacctctgcatggccgaagtgctaagcaactctaacaaatgccctctatacctagtaagtttaacgagaaggcacacagaatgtcaaggttgaggcctcttctcggctctgagatgatgaaagatgatgttgacccaaatgtttcaacacaacgagcgttttccgctggatcttgactttaaagccaagatctctcgaattattctttaaacgatctggcc

SEQ ID NO: 29511 - DNA, 465 bp, Glycine max
  unsure (1)..(465): unsure at all n locations
agcttgtaatagaaaaatgcagagttttcttttatctttccagcaagaccaaaaccatctcaaccggtgctctgagcagagagttataacctgtacactcaaacaatgccaagagtagaaaaaaaatacaaaaattaagaaaatctgacacttgggcccaatgatgcccaacctcacaaaactcaattaaaaaggttcaaaaccatcataaaaatgtgttttatattttcagggtgaaataactatgcctacttgtttttcacatgaattttttgctgaaattccacacgtggtgaagctcacagatcctgcttcaaatttgtaacttttatggacttaatgagggaggttggttaagtatatttattgtccgggtctaaataaatatgtgacttttatggacttgctgagggagggtggttaagtatgatgtantttaacacagaacatgtntatgaagagtgt

SEQ ID NO: 29512 - DNA, 237 bp, Glycine max
actaagcgggcttttgagacacatttttgattggaagtctttccacccctcgccggtcatagtggaacatgagtttcttgagctaaaatatcaaacctgattttgaaatgatatattctgacctccaattgtagtgtactggtatcacccatatccttcttgataagactttgatgctgtgagaatatgctgaaaaatatcatggctacggaacacttggttcttacccagataaat

SEQ ID NO: 29513 - DNA, 450 bp, Glycine max
  unsure (1)..(450): unsure at all n locations
ctcagctttattntcttctttttgaagctggtctcttcaaatttgtaggcaggtaaagtcttctnttgtatatgcttcctgatttcaaggtggacttcatggactctcaagatgcccaacaacttatcctatgcaagatntttcatatctcttgtttcttggatgggtgtggtcttgggttcccacaccttgggaaagttgtccagcaccttcaagtttatttgagccttggaatacgtctatctaagagcctncatattgtttagaagcacttgaagtcttccaaaatgtcatccacaaactattcatccttcanggtgaagctttcataatgtttggttagagtcgtcacttttctcagtctgacatctttatttgcttcataagttatgctcactnagtcctatatctctttagcagttctcaatctacagatcttgttgactcatt

SEQ ID NO: 29514 - DNA, 450 bp, Glycine max
  unsure (1)..(450): unsure at all n locations
agctntcaccttttgtcctcctcatttttgtttcatgagaatacatgctctattttcatctcccactccaagtaggcctccggatcattctttcctttaaatggaggaatgttgagtttaataccatcaattcggttttgtctaggaacaccatcattccctcttctcctcctttcttcttcattatgatctctattctccatttgatccaacctctcatggagcgcatcatctcgttgtttcattaacctctccaaatgttgcatcaaagcttgcattnggaattgcgaaagccccactccatcattaggattagtacctgacatctcaaacaaacaaatcanacgtaacaagacaattatagttgctgtttgaatacctcacccactcaagtgtatcacacaattatggcttttctctaatgaaacactcnttgcctttaccactcta

SEQ ID NO: 29515 - DNA, 312 bp, Glycine max
  unsure (1)..(312): unsure at all n locations
ctaacctagaattataataacttaatgccattaacctagggaattaaaacaaactaaatggctgagtgtaactgaaattgntggcaaccaaaagtcacccccaacagccaacaagtcagccaccatttggtctcccaaaaggctgatgcctaagttgccaattgggcccttattacaacttgaactaaagccctcttagttgattaacccacaacatatttttggtcagccaactttacaaggattgtgccattatttagacaaactaaacactctaanaatgaaataaagtggtgtcatttagtcctccat

SEQ ID NO: 29516 - DNA, 372 bp, Glycine max
  unsure (1)..(372): unsure at all n locations
agcttgcgacggggcacactccgcttcataatttcgtaccaccacacaccagtggcagatcgtttgtatatgacacctatcaggcctcacaatacgtatatatgaggggcttctaacgaaaatgtactccctccacgaatataagacccaatgccgattcgctgcgagttgcttttttatgtggaccgattaatgatcctcttccgctgattggaggcacgagacaccctatcttacaaatcaatggggggagtagggacgaatattaatgaaaacgatgattgtgtgaagacctatctgtactatgagattattatcatcacttacccttctgatggtgtcttaattntgacgaaccagctatactactct

SEQ ID NO: 29517 - DNA, 428 bp, Glycine max
  unsure (1)..(428): unsure at all n locations
tagtggtggagggncaccnncnnncccnccaccaacacactacaatcgccacccatctcacaacaacncaccccantcaccattcaacccctctcttgtcacaatttgaacacctcatattaaacttaaacctcattcatcattggctacncaccccaaacataattatttaagtaacaaacttattattcaatcgcacctcggcataacccacacttatactattgtagctttgaccaacgccacacattttggacgcatgaaactcaatatatataaggaaatctttataagctatctcaatgactgttggtaacatacaaggcgcctctcttaagttgcttgcttacttctctttataatgacatccaactcaccctaccatttcttccatctagtttctcatccaacttatagtaacgaacttt

SEQ ID NO: 29518 - DNA, 137 bp, Glycine max
  unsure (1)..(137): unsure at all n locations
tcgattacaatatatnggtaatcgattaccagcgtatctgaacgttgaaattcacattcaattgtgaagagtcacatcttttcataaaatgctttgtgtaatcaattgcatggttttggtaatcgattacctgtgac

SEQ ID NO: 29519 - DNA, 463 bp, Glycine max
agcttgccgaatggcttaagcatgaaactttctagcttaagcttgtaatggtgcaaataagtttggtgatccctaaaagcaagttggcttaaacgtgattagtggtggcttaagtgagattgttgtgcacttaagcatgatttgtgataatgaaatagagcttctttggagacaattgcacttaagtgagccctatacttggcttaagcaagatttcatgctaaaaaatgttattcatatggcttctaatgaacttgcaattgtaatggtcacaaatgtgtgaagattaagaaaatgccacactagagttctagagctatgttagaaaattcacatttgttgtgtaaaggaaagtcttatgatgtgggtaaggatttaaagtgtgagaatgccttacctaggcttattgaactgctagatgtgttcaaaaacaaattataaaggaaatggtgaatgtgaacat

SEQ ID NO: 29520 - DNA, 462 bp, Glycine max
actaagctgggttgggctattcaccccacctgacgtcccaaggtcttctgacccccgcgacatatctccaggtaccactctgtggtcaacaaacaaaagtaggaagaccgactcttccacgctttctcacatcaagcttgttagattatggggtacccgtcatatgtggtactaggtggcgatcgggcgatggtgcaaatcaactctcccacatccacaaatcaaacatgaacccaccatccccagttgcccaccttcaactgagctcacgtactccaacgtagcccttatcctcgttcctctcagcaccgggtccccatcaacccttccaagcttccataatatccaagcaaatcaattccaactatctgaaactaccctcaaccaagaaaacagagtagagggcagaaaatctgcccataacacattcacatattacaagctttcttactcaaatacccc

SEQ ID NO: 29521 - DNA, 455 bp, Glycine max
  unsure (1)..(455): unsure at all n locations
agcttgaagcaagagccggtttgagagcttgatatgtgtttgcgagtgattgtgaaatcctagaggggaaggagacatcgtcaccacttgtatttttgcaatctttcatcttgttcttctctttgttgttaagaaggcttcctggtatggaaagctaaatcctctgttggatcttccctgtaggtacctgatgtaaatatatttatacctatttaatgatgttttgcgtgttctctgtgctatctacttttcattccagtatgcctttaccttgaacacgtagatgcatgctctgttagggtcattcaatagtggaaactggtctgactctaaagtccttgatagtgtacggctgagttgtcgtgctttcatgaggaatcggngtgtgataattaagtgttgtatgtgtgtcttaatgcgcgcctggttgagtttagtcttacaagatgaatctg

SEQ ID NO: 29522 - DNA, 426 bp, Glycine max
  unsure (1)..(426): unsure at all n locations
ctatcgtgctactatngaggcctgggaaattcctggagaagattatgaatttgatgaagaatagtccatgtgtttgtaattacattctggatgacctcctttgttctggttttccaaattatccaacaagcaaccataaacagaagacaatggtccgacgatgcatgagtttgaagccaatccaagatagagatgtcaccattgtgatggcaaacatctagctgtaaagagctccaccttcccgccaccttagagcagtgttagtcaatgaatacgactaacttttgtgtataaaacctgtgtatactgtatcaaactntcctaanttattggtngtttgtaatactataagtacttttttgtaaatatanggtaatagataattatactttcgttttgtgcatttaataatcaatttctctcaat

SEQ ID NO: 29523 - DNA, 446 bp, Glycine max
  unsure (1)..(446): unsure at all n locations
agctttaactntntccagcttaccctggctgtattcatgctatctcaatatctaagtacaactacagtctgtatgcctttattgattatctttacttcgcacttccttgttccttacatcatgaccacatgatgttctactcgttttcccctttgttccactgagctgcattccatctacttgtctgataaaatttaggacaaagaccttttcatttcaggaacatatactgtgaggtagctgataatgttccaatttgacatatgatcagttcttgagagggtacttanggaaagccggatatttcattttcatttctgtttggagatattgtaatgttttataatggcagggcatccctttgatcacgcacttgcataaatagaatagaatgcattgctacatcatcatcatcaccctgtgatgttatattctgattaattatg

SEQ ID NO: 29524 - DNA, 153 bp, Glycine max
gcatcggcggtggacatcactggttactcccctggccaagttcgatccagaaatagtccttgagttttatgccaatgcttggccaacataggagggcgtgcgtgacatgagatcctgggtaaggggtcagtggatcccgtttgatgctgatgc

SEQ ID NO: 29525 - DNA, 479 bp, Glycine max
acctgagctgcagcttgactagacagttgatttagccttatttctttttatttattagtcaattcgattaagaatgagaaatcccaaagagaaaacgtccgattgattttccgctttattttactaaaaaaaaatgttttttgattattatattattttttatctctttttgttttccaacgtggttacgacatgaccgaacggtcggaattcattttaaccgaagtttacggatcatacaattcaaacgttcggtggaaatttattttatttttaagttaagcgagaaatgacttaagtaaaatggcttaagcacgtcaatagagggtatgaatagtaaatgaaacgagaatagaaatacacaaaacacagtttggaccaccacgggtacatagaatgaatcgaaaagctcggttcgaggtacttacccgttgaagatcgaagaacgatgaagaacgaatgaagaacgtcgaagaacc

SEQ ID NO: 29526 - DNA, 455 bp, Glycine max
  unsure (1)..(455): unsure at all n locations
cggcacagataacacctcanatgggaaactataacttaagatatgtcatggnctttctaagggtgncatcataaaactaatactagacttagacaancttttaagtatactaactataagaagttaatcaaatactcctctaacaccagacataatataataaaaacaaaaacaataataatagcaattatttacaaaaaaaatataatagaatgtcctaatatgagttcttatgtatattcctcgtactcaaaattntgggtgttacactaattattttgattagatgtaaataaatacaaatggtatttgggtttgatttgctatcaagtcatggtttgaattcctgcgtctgagttttcagacaatatatccatataagacaatccggtatagcattaagtagtacatttgatgaggaccaactcatgagcatagaccttggagcagagcat

SEQ ID NO: 29527 - DNA, 372 bp, Glycine max
  unsure (1)..(372): unsure at all n locations
agcttgataagccatcttctccaaaagctctttgtataataactttatatgaatcctgagatttaacacaacaatatgaaggatgaaactcaaagaaacagctattatctcgagtgaatttactaacactaagtaaatttttggtaagggagggaactagcaataaatttttaagggagagagtagtggttggaaaatagggggacctaaacagatttgagcctatggaagagattcttgtacctgtgccattagccattaggatatgttcatttcctgcagctgtactgctctgaaggagattatgtggatcattggttgcatggngtgaagcacctgaatctggaaaccaagcctgagaaatgttagcag

SEQ ID NO: 29528 - DNA, 450 bp, Glycine max
attacagagttcttgcttgcactgcttcaggttttgacttcgagttgtaactcaatgaagcatcaagagatggcaccaaattatcactacaaatcccattcccaaacgttaaactgtagtctgccttcaccgaactaacagctttatgctcttcttcaatcataggaggaagtttactgacacagaggggtaagaagttttctgaaatattccaatattctaacattgccatgcaaataccattgtatacaggtctatgttgttcggatgcataaaggacttggagaactctatgaatatcattctgagtgtagtatttaagacaaaagtcatcacttttgacattgagtctgcagtcataaaagatcacaaaatcaaaactcagtttcaagtgcatctatagtgagaactgatcatgatatgcaaaaggagaacagataaataaaaaac

SEQ ID NO: 29529 - DNA, 403 bp, Glycine max
  unsure (1)..(403): unsure at all n locations
agcttccacttgtatactgcgtcagtaataaacagctntctantttccctcccgtggatgtagccttactcaaggtgaaccatgtaaatctgtttctgtgttctttctctcttcaacttctctttcattttgcagcaacattggtatatgacatttctgttccgctacatctactgctgctgttcttgcttgttcttcatcacttccataacaggaagcaaccttggtgtaatgatcctccatgtacatgcatttcataaacttgagttttttttaagagaaaaagggttttgagaaaaattattattgtgaagttgtgaggaatnttgtttgcatgcatgttcttgttcttattttaatctaattgttcttttggagagctntaaatgcaaaggaaactcta

SEQ ID NO: 29530 - DNA, 365 bp, Glycine max
  unsure (1)..(365): unsure at all n locations
ngagtctnatttagctgatcaacaanaaaaaatcttgagtttaaagaaaatgttgtgattcgccaaaataaattatttattgaggattaacctagctagtaccaaattctagaataacatctgattatttcctttcaaaatattctacttttatttgggcattccaaatgtttttatgttcgaaaagttaacgagacattntgttttatgattcaacttaaaagctagaacaattaaagtagaatatttggaattaactaaaatgctattggctgaaattaattatacgattgggattttttagataattatacgattgattctttaccaatattacttattacaacataantaattcttataac

SEQ ID NO: 29531 - DNA, 478 bp, Glycine max
  unsure (1)..(478): unsure at all n locations
attgatcctttgcgancccggaccttaagtcgactgcagctgccaactttaaattttttagaaggtatttttatattatatatcatactttatgaatatactcacggatatgtgcttaaaatgggtggcactctaagattggggtttaacatttatatattgtaggggccggttctaattaatggcacctctcccagttactaaatggtaatatgtgcaaaaggggtctggcttctatggccagtgccttcaaaactaatgaaaaagagaattgcaatgaaaaagaaagtattattttctgcatgcttgattgtttgatacatatgtatttatacaactcctgataacagatttggattgcttgatgcngaatattctatacagaattagttgttttgtctagttaaagagacattcaatcaactgatatgattgtgctggtgatatcggagctgggtcatcctgttacctatgcgat

SEQ ID NO: 29532 - DNA, 339 bp, Glycine max
  unsure (1)..(339): unsure at all n locations
attcaaactcggaaattcaagaagattccttgatttctaaagtgtataagattaagatgatcatagaccattcccttttcttggatctcactcaattatcaagtgacggtgtaccatctaatggttcacttgatgatgagtggaagtttgatttctctgtgtctgatgccccccggatggtttgcaccaaccaagcagatatgatcggaaggcttcttgcctgttcattggcattngaatgtcgcatcatgcactacttgattatgcgcatcctactccctagatcttccaaccttgcacaagtgtctgaggaagaattgataatcatgtgggttttct

SEQ ID NO: 29533 - DNA, 412 bp, Glycine max
  unsure (1)..(412): unsure at all n locations
aaaataacttaatgccattaacctagggaattaaaaaaaaaacttaatggctgagtgtaactgaaattgtggcaaccaaaagtcacccccaacagccaacaagtcagccaccatttggtctcccaaaaggctgatgcctagtgatgcaatcctaccttgcaagggcattggatataaaacttgaagtagattgggccagagatgcaagagaaggccctagggttcttatgagccttagggtagatttcgggcccatgggctaagtacgagcccacttatctttgtaaatattagattaaggtttcaattattttgggcctcgtatttagggctccataatttaggtagggtaccctaganatataggactttcagcccttgtattttagggcacctagactatgttttgatt

SEQ ID NO: 29534 - DNA, 304 bp, Glycine max
  unsure (1)..(304): unsure at all n locations
tgagatgaggaagtgttgaatggtgaaacttcctgcntttatttgtgaccacagagtggtacctggagatatgtcgcggnggtcaggagaccttggggacgtcaggtggggtgctattgcccaaaaccaagcttgaccaatcccgacccaacccgggcatagtcggtcagtgagaacctgtgatgtacctaaacaagcgagctcctggcagtcaacagataaaaggaacaaagaccacaaagcaaggaggcttgtggtggctggccagctgtgaaacttgattgatatgtgagatatggtctct

SEQ ID NO: 29535 - DNA, 555 bp, Glycine max
  unsure (1)..(555): unsure at all n locations
ttgtttgtatcgatgcctttccgacccgngatcctctanagtcgagctgcaagcactgcgaagctctgtgcagaatcacaatcatcttcatttatgtttactcttctagcagagcacttgtatcgtttaacccacctacctcgacggtgttgtgttgtgtnttacgcggaaaanagcactcataatactcatagcgccgctcacacagggcatgnctctattcgcacccagtattccaatatacttagaatcgatcgtggtgactcatagatgatgacacaatgaacaggattgaaagccggcatgtctgctctgaaagaacaaacggcctccatgatggaggccatgttatatatgaatcagcttataaagaagaacgcgggcaccactgcctctgtcagttcagctgtccaagcacaccccactctcttggcactgtcaccatcctcctcaacatagtagactgtgatgacacactgggcacgatgcacccctccctggatacactgaggggtaccctatggatgcggcacctactccccctgttgctagaag

SEQ ID NO: 29536 - DNA, 520 bp, Glycine max
  unsure (1)..(520): unsure at all n locations
ccctttgtaatnacanccttgannnncctannnttgacaccccctgctatgtacgcgacactctggaatactcaagctngttatatctcggccactacctatttctgcacatctagaatggccgcgctgacgctccactcgtgactgacacctggcttagctacatactctcaagctgtctatgcatgccgagggatgtgctctcaccactaatgagtgctttagtcgtacaatggctttcttgcggctgtcgcgtaatactcaccacttttgctggtgcgtagctaccttggacgctgaaatgagcattggtcattctatactgtgcttcaagtaaacatctatgaaggatgctactacaggcttcatctttggtgtgtgtggcggctgaaccgccggacgaactctggtatgagaataaaacggttctcactcttaccacataacacaaggataaggtttctccctcccatcgtgtaacgcgtgtgacgtcaaaaaccacaccatggtcaaatctgcg

SEQ ID NO: 29537 - DNA, 457 bp, Glycine max
  unsure (1)..(457): unsure at all n locations
agcttatagaatatataataaaagaacaatgacaattgaagagtctatacatgtttcctttgatgagtctaatgccattcttccaaggaaggattttttagatgatatttcagattccttagaagatacacatattcatggaaataactctaaagaaaaagatgaaggaagcaatgaagattctcaagataatggggctagaggaaataatgaacttccaagagaatggaaagcctcaagagatcatcccctcgacaacattattggtgatatatcaaaaggggtaacaactagacattctcttaaagatttatgcaataatatggctcttgtatctatgattgaacctaaaaatataaaagaagccatagtagatgataactggataattaccatgcaagaagaactgaatcaatttgaaagatataatgtgtganaactagtagaacaacctgaa

SEQ ID NO: 29538 - DNA, 287 bp, Glycine max
  unsure (1)..(287): unsure at all n locations
cgccttaatctaacttccgtgtgagaagtatgaccatttgaatttctcaagagctttctttgttcaactttgaacgtctcgatttgtgattcgcccgaatcggacatccgtgtcaaatggtatgacccattggatntctaaagagctttcgttgttcaatttcgagcctctcgacatattatgcgcccgaatcgggcatccgtgtgaaaacttatggccatttgaatttctcaagaagttccgatgttaatttcgagcgtatcgatatatnataagcctgaatcgga

SEQ ID NO: 29539 - DNA, 359 bp, Glycine max
aacgaaggaagacacgtgcctgacatatgctaaaccgcatctcaacatgaaagctagatgaagctgggatgacaaaccaattcggtgccgacagataatagcctatcagaggaagcatggttgtcgctcgaggtaagaaggaagactctagtccatcacgtatggaacgatatgcagaggggaggcgactatcactcaagatacaaccaaataatagtggcgtaagaaactgggtcacacaagcgagaacaaccacttgaatcctgcgaagatcgtcgtgcaagtaaacaacacaaaatgtctatccaaagatcggatgagatcagaaggataagacacatcctggatcctatccactc

SEQ ID NO: 29540 - DNA, 257 bp, Glycine max
ctttctggttccaagaggcccacgtttctgtactgcagatctctttaattaaacctcagacccaccgaattggatgccagaatcgcatcatctgtatcttaggtagaatccttggcaaaacaccatatttggaacttaatatgatcagaccacttcatataacattcttagggatgtttgggagttggcacgggaatcaagatgaacggagacaatccattgcctttaactttatatttaccaactctagattccac

SEQ ID NO: 29541 - DNA, 443 bp, Glycine max
  unsure (1)..(443): unsure at all n locations
agctcgcatcaagtcctgtctaagtggtcctgaatatttgtgtatgacagnggtcaagaatgatagagatgagctaattcctacaagaacagtcaccgggtggagaatgtgtatcgattacaagaaactcaatgaagccaccatgaaagatcattacccgcttccctaaatggatcaaatgcttgagagacttgcggggcaatctttctactatttcttggatggatactcgggctacaatcaaatcgcagtagatcctcaagaccaagaaaagacaattgtcacatgcctcttctgtgtattagcttatctgcacatgtcgattggtttatgtaatgccccagctactttccaaagatgtatgatggcaatgttcgctgacatggcatagaaatgtattgtagtctctatggatgattcttctgactttgcacatcttttgg

SEQ ID NO: 29542 - DNA, 341 bp, Glycine max
  unsure (1)..(341): unsure at all n locations
ctgatacaagatgatgatctcagaatcaagaatgagttcaagatgttcaaaattgaatcaagaacatttcaaggttcaagaggaaatttgatttcaaaatcaagaatcaagattcaaggttcaagcttccaagaatcaagatcaagattcaagactcaagattcaagaatcaagagaagacttaatcaagataagtatgaaaaggttttttaaaaaattgagtagcacatggattnttctcaaaacatgtttatcaaagagtttttactctctggntaatcgatacctagatgttctaatcgattaccagtagccaaatgttgttgaaaaagttttcaact

SEQ ID NO: 29543 - DNA, 462 bp, Glycine max
  unsure (1)..(462): unsure at all n locations
gtcacctgcggcatgcaagctcgcttgtggagcttctatggaggagggatctnttagcttcttgnggnccttcaatggggattgttcaccatggagacgcagcggaaggcaaaggagaataggagaggggaggcaccatccactagggcataagccaaggaagaacgagcttcaccaccaagaattgccttggatcagaagcttgaagatgatgctttaatggatgaaaagaaacagagaaggggggagcacgaaactgaacgaataaaatagggagagaagtggaactttgaagtgtgcctcatcagactctcattcatcagagttacaacaagtgttacacaggcttntacttatagactaggtagtctacttgagaagctttcttgagaaaactaccttgagatgcttctatgaaaaacttccgtggaagctatagctatctacacacacncctctcat

SEQ ID NO: 29544 - DNA, 380 bp, Glycine max
  unsure (1)..(380): unsure at all n locations
gctccttcaactgcacaaggctcttaatatttgaagagtattcttgtggaaccttcattctatgaagacactgacaaaaaattatcttctacttcttggacaaagtatggcaggctgggggcaagtaaattttcttcccatcagaccttggatgcaattgtgatcgtatacccatatcagctagatcttgacaggtattcaagccatccttcgtcttgccttgaatgttaaggagcgtcccaatcacactttcacaaacatttttctccacatgcataacatcaatacaatttctaacgtcaagatcacaccagtacggaagatcaaagaanatggatctcttcttccatatgcaactctgactnttatacttcttttgg

SEQ ID NO: 29545 - DNA, 408 bp, Glycine max
  unsure (1)..(408): unsure at all n locations
agcttctggctgagaagacttatattattatgtgttaacctacacagncaggaagcgttgatggcgtaatcgaccctccatcccccgacagacaccacgtgaagtggaagatggtctgctccaacaaaacaggggagatgactactgatgccgctcaggaattcactgataagatcgcacgtctttttcaactaataattagaattatatctctctattttgagaatgccatgtacaaatgtgtctttactatgcacgattcctttgatgagcaggcgacatagatatccttcgtcccccatggacgttaggatgttctcaccactgctattggacatccaaagcaccctgtgcgtgtgcatgctgcttgagccagtgncaccatcaagcaatactttggatcgactc

SEQ ID NO: 29546 - DNA, 157 bp, Glycine max
  unsure (1)..(157): unsure at all n locations
tctttttatccgctctggngctcataaataccaaattatatcctctattactagctatttgaattctctagttcctgaatgtacaaccttcatattgttgctcgttcccctctctgagaatgaggaggatcttcataggacttcatccagctgatgt

SEQ ID NO: 29547 - DNA, 459 bp, Glycine max
  unsure (1)..(459): unsure at all n locations
agcttgatctagtgtaaaattaactttacctataagataaagcaaacacaggtccagatgattaccgaanttgtaagaacaacaattaagtcatcttgaaagtactcaaacagataatagtgcactatagcttccctcagagacagaggccatgaaaccttcaccctttcttccaaaattcagtgaaaaatcagcattcaaaagtggtaaagggcattaaatgttttttttttttacttggtgcaggctggacaaacctcactagtgataattgttccccaatccgggtcttttgcaaacattcagctgataagattttgaaagtgggaatagtagactgaggccacctaaatgaaaattgtgaanagggtgtcaggtgcatttatcagatacatttttataatgatatattacttagtttcaaaaacattactaaggtatacaagtacaacaacattc

SEQ ID NO: 29548 - DNA, 345 bp, Glycine max
  unsure (1)..(345): unsure at all n locations
ctaagcttgaaataaatggagtctattagataaaagaatactcgttttataaactantaaataacattttacactctcatacttgatgaaagattcaagtaaaaaaaatgcttattgtaaagcattatagttaaattagacccatgaataatatttaggaaaaattgcaattgcaatggcacttttaatttataaaaaacattcacctcctttngaatgatttttttaagattatgattttttaaatgacgagtcagtaaaaaataatggtgtatgatttttaaaanaattaaaaatcaacaaacttttattataattcgtaatttgatatcattgcatatacta

SEQ ID NO: 29549 - DNA, 454 bp, Glycine max
  unsure (1)..(454): unsure at all n locations
agcttgcanaatggaagcaaagatatctctctatgggtgaaagaataaccctcattaattcagttttaacagcattacccatttacttgctgtctttttttagaatccctaaaaaagtggtgcaaaagatagttactattcagagaaattttctatagggagggtgatttgaggccaacaagatcccttggtgaaatgggacacaatttgtcttcctaagaacaaaggggggttagggattaaagacttgatcaaatttaatgaggctctgcttggcaagtggggttgggagttggctaataattagaaccaactntgggcaagaattttattgtctaaatatagcggctggaatgaatagctctctggtagaaacagtagtgatttctctcattgatggaaagatctaaagattgtatttcagtagtaggacagcaatagcatcatcaataat

SEQ ID NO: 29550 - DNA, 307 bp, Glycine max
  unsure (1)..(307): unsure at all n locations
ntagtgatttgcatgtcagatattctagcatanttggccattagttntntaaagtactaatntatatatacactcttactaaatatcatctgtttatgctaaattatggatgaaaaatagcttctggtggactctctatctcanagcaagaagactactgtcgcaacctacccttcagcgggagggcgacgcggngctcacgtgtgcgtcttccaagaaaggaaaatgcacacagttgccaccaactatttatttgagaaaaacgtcagaaaaaccggaaatgtgtggtctacgaactttaatcgtg

SEQ ID NO: 29551 - DNA, 394 bp, Glycine max
  unsure (1)..(394): unsure at all n locations
agcttgaatcggacatccgtgtganaagtnatgatcatttgaatttctcaagagcttccgtagttcaatttcgagcttctcgacatattatgcgcccgaatcggacatccgtgtgaaaagttatgaccatttgaatatctcgagagcttccgatgtttaatttcgagcgtatcgatatattataagcctgaattggacatccgtgtgaaaagttatgaccatttgaatttgcgagagttttcgatgtttaatttcgagcgtatcgatatattatacgcctgaatcggacatccgtgtgaaaagttatgaccatttgaatttctcaagagcttcgatgggtcaatttctagactctcgacatattatgcgcccgaatcggacatccgtgttaaaa

SEQ ID NO: 29552 - DNA, 375 bp, Glycine max
  unsure (1)..(375): unsure at all n locations
ctcagcttctatataagctgaaccatttaatcaataaagacaagttgtgttntattcagaaaattagagtttatctcttttatcttagtgagagtgattctcctaaattcttgagtgattcaagaacaccctggctgtatcaaaggactttcacaacttttgtgtgttgccctcgctggaaagagtgattctttccttcctttcatcttcacccttgttttttcaaaccacaattccagaanatccaccacctctgcccagaattatctcgtggccataactcccantttacgcactcaaattaagtgattcttgagcctaaattgaatttcaaaacgagacctttcacctcgttttggaatcacctcatttgga

SEQ ID NO: 29553 - DNA, 423 bp, Glycine max
agcttatccatggcttcctatggaggtgagtcttttcttgattcatcttctccttgaagtagcgtctccaatcatcattcttccatctccattccactgccattaatcttcaagaagaaaaagaatccattgatgaagaagatccaaggcctactatcatactctaatttcgtccgggcaccgttgtttgtcagcatgcgaccttcgtttgaccacttcaaaatgtttaacacccatcgccgtgaaattcgtaaagttccgagatgtttcggagagaaatcggccaaaaacacgaaaatggaagtgtagttagcaaagtaggggtgtgtaaatagactgttacaccctaatttcatctggggactgttgttgatcgcttcgaaaggcttcacacccatcgtcatggaatccgtaaatttcgga

SEQ ID NO: 29554 - DNA, 425 bp, Glycine max
  unsure (1)..(425): unsure at all n locations
gagtaganacatgggaccaacttantttatttcatataggaagtcatatctagtcaaggtctaagagaccttacaagtttcctaacgatttctaattatgtgggccattaagtctatcatatgctgacaatagccgagaagcccgtgaatctcttcgggggcggagtaggtgtctgccatcgctttggccttggctaacaatcggggaagttcttgactcccgttcaaggtaagagcaaaccgatccatccacatggttgcctcttggtgtaagagtcgatcacccttccttacctctttttcgcgtatactgggctattcgccgcaacctatgctcggggccgggtagatctaactttcttgtacttgcgatgatagtacatgtggtctccgctccataacctgaacaacttcttggacttgac

SEQ ID NO: 29555 - DNA, 338 bp, Glycine max
  unsure (1)..(338): unsure at all n locations
tacattcaagcttctgtcaagtggtattaaagcacaagatcttcaagtaggtgcttcttaaacctccattaattntcagctntaccttctcctccattgntgtttcttcatttttctccatgtatctcctcacatgtcttgtgctaaaagttattaacatgattctttagaattttcaccaattaaactagctatagaagctagatttgattntctatggttcaaatttgttgttcttgttcttgaaccatgaattgtgttgagtttaggttcctttgagttttgtcttgctattttttgtggctgaaacctacatcataaaattcttaccaaaatat

SEQ ID NO: 29556 - DNA, 404 bp, Glycine max
  unsure (1)..(404): unsure at all n locations
agctngatatatgtaaatggttggaaatcctttgacttgagtattcttcagaaataaattgagcagagctactccaactttgctccagactccagattcagaacaaagttctgtagttcagtcttggaattttaaacaaaaaatccaattcttgaagtttaagaaagaggaagcaatngcacttggggctcaagccctggatttgagattgccatttggtgaaattgaggttcttaaggaaaacttggacgtgatcaagagacagataggtctagaagatgtggaaattttatctgcagtagatgccgattccttggccagagctgaaccattagcttctntactaaatcaaaatcctccttcacctggaaagccaactgccatctttntaactcggtagctac

SEQ ID NO: 29557 - DNA, 441 bp, Glycine max
  unsure (1)..(441): unsure at all n locations
ngagaatgaacttccacctcatatgatatctctggatgtttatatcgattggtagccaggnttgtaatcttttatcagatgtccttgagaagaccgattgtacttgttataacaacttcaataaacaccttgcattttagattacagatgcagatcttcgcaaggaggccacacctgctaactatattaaagatgtgcttcctctttctttgaaaaatggagttgttcacttcctgggatacggaaatcgacttgggtttgatccaatgccttctgatattcaggttataccattacctactttaccttggtgtctagntttcaataggggctcattatanaaagttgcctatatgcanattcacttgtaatatgacggtattggttaccacatcctataagttttttgaactatctacaacttaacacctataggttagt

SEQ ID NO: 29558 - DNA, 391 bp, Glycine max
  unsure (1)..(391): unsure at all n locations
agcttgtccgcaataaaatcagtaataatgattttaangttcgatacctcagtttttctcaccaagtaaaaatgggtcattttaaggtccaacgccttaaaaggacccccttccaagtaaaaaaaatcgcttgatttcgcatttaaaaagaactacgtaggtctgattttttcatcacaattgaggaatacgtaggagcaaagggaaacgcccttatcgaccacaaaaatataagaacgtaaaaagggaaaagaatataaattgaagtcatatttgcacatctgattaaaggctgccgtctcttacgacagacgcgtggggtgctaatacctcccccgttcgtaaatacaactcccgaacctttcacttaaaattcatagaccacgtcttt

SEQ ID NO: 29559 - DNA, 328 bp, Glycine max
  unsure (1)..(328): unsure at all n locations
tgcttctacaagctcaactctctcattagttttgagcttttgtggttaggctaagcgcgtcctgtgtgctaagcctgagggtcattctggtgaggttgagctangcgccccatgctgcactaagctcaagccctcttctgttntgaaaattgtagacttatgctaagcccagcatgctgcactaagcctaatttgtagaaaaacattttttgtgtcttcaggctaagcgctcgtctatcgcacttagcccatgaataaatgtgcataaggcgcgctaagcccagcatgctgcgctaagcgcccaattcaggtttcaaatttaaatttc

SEQ ID NO: 29560 - DNA, 487 bp, Glycine max
  unsure (1)..(487): unsure at all n locations
gaacatttggcctgaccggactactttgcgcttcgctcgaacgaaacattctacattttatctcgtaaatgttactatatttaatcatctctttaaacaatttctggcgacttaatactaactaaaaaataatccttgtaaatatantgtaatataacaaaattattatcacattcatcaattaacaccaaccatgttatgggcaaaaaaccaaatatcgaacaaagacttcaggaacctaaactanttcaaattttttgtttagaagcctaacatgagaacttcaaattaaatatgaacccaaaaacacaatttaccctgatttttttttacgccatgtttgacaagacatntcaaatagcttctagttttttactagctaacaaacttagtttgatgtttagtaaatattttntttacgaacttctggcattttcaaaggacttcagtagatttttaaatgctgcttacaacatacctttatatt

SEQ ID NO: 29561 - DNA, 431 bp, Glycine max
  unsure (1)..(431): unsure at all n locations
taagaacaaaatngccttaatcatntccaaatatgcatgtgaattatgacgcattatcaagaatcaagccaaggctattgtgcaagcaatcaatgggggcaaaacacaccaaatgattataatgatggatggctcaaattctcacanaangnnnntcatcactctcaaattgagcatttaaaactatcatgacatgtagagaagaatcaaggatttcaagtcacaaaatgttcaagaacatttaatttcaaaacatttacccatttcttgaacatatcctataattcaaagaaaaacatgcaaagtcgtacgtgcacatgaaattgacccaaaatattaaactgaaaatgcgacgaaactaacaacattgacaaatgtacacaactaacaaattaacataaccaacaaaactagcaaaatcaaagaacact

SEQ ID NO: 29562 - DNA, 128 bp, Glycine max
aacgcatgcatgtgtttatatctatactctacttgctcgtctattttcgttgagtcctagatgacctatttatactgagaggcattcctatgggaggatctcagcatagaaattgacaatggtgatct

SEQ ID NO: 29563 - DNA, 524 bp, Glycine max
  unsure (1)..(524): unsure at all n locations
aggacacgtgatttgaatccatgcgtacncgggatcctcagagtcatttgcngcatgcaagctcgattttcctttagtagggaatgtttccttcttatatggacccaacccagtcccccttaataagaactaacttccttctttctctaatggccctaatttgataccaccttggttgggtctttaattggaacctaacccttcttatggcacttttttaccaacctctgacctaaaatccccttctttatgtataaaaaagtgtcaagtgggaggggaatgaggtctaaaggtgtcnagggaatgaacccatagacaaacctcaaaggggaatggctggtgggtctatgaacccccctggtgtatgcaaattctacatgaggaagatagtcatcccaagacttatggttgccttttaaaagagctcttacaagggtggaataagacactatcacttactcttgttgccatcagtttgtgatgacaagcgtagaagaaagaactttgttctagcttaccataat

SEQ ID NO: 29564 - DNA, 493 bp, Glycine max
  unsure (1)..(493): unsure at all n locations
ctacagcagaatttagtaatgacccactaacctagaattaaaataacttaatgccattaacctagggaattaaaaaaaacttaatggctgagtgtaactgaaattgtggcaaccaaaagtcacccccaacagccaacaagtcagccaccatttggtctcccaaaaggctgacctaggttgccaattgggcccttattacaactngaactaaacctaactaaagcccttttaattgattaacccaaaacatatttttggtcagccaactttacaaggattgggccattatttagacaaactaaacactctaaaaattgagacaaagtggtgtcatttagtcctctccatttgggccatgatacaactcacaaccttggactnttctccttgaaacttgngcttgtattcaaatagtatggacaacacttgttgaagagcttccttggctttccttgctctagcccttgtcatangtcctccaagtccttcaagt

SEQ ID NO: 29565 - DNA, 406 bp, Glycine max
  unsure (1)..(406): unsure at all n locations
tctaacatagtttaattcatcatatatgagtctattttgtcatngaaagaatagtgacatatcatgtctattttgtctttgaaagattaatgacatatcatgttgaagcatgggtggataattactcaaacttttattattaactttgaataaggtctcaatttatgctaatgcaaagcttttcaatttctaatccaacaataccaatttggaaataaaaaaaaaacataagaaaatagttacatgatattctcaattcccaactacttccgttgatatgatntttttttttaatatgatatatcntaatgaagcctaacatntcanaantaanatatatcaccacaggtaaacaaattgttattaatttttaattcatgtcattaaattaagatatgatctcata

SEQ ID NO: 29566 - DNA, 479 bp, Glycine max
  unsure (1)..(479): unsure at all n locations
ccttcaccttgtattttggctattatagcttagttcttttgttatggttgtcttggatgtttaccattatgtnttggtttgtgtttggttattttagactttgatttggatgattcggacttgtttggtttattctatggattgaatcagtttatggattattgtgctatgattttactgttgtcttagttcctttctcctaacatttttggctttttgatgttgccaaatggggagagaacttaaggatagaatttatgatgaacttaggcataaattcgaatcttaagggggagtaagggttgtgagcatgcattatcaatggtatatcgtttatcttgattacagattattgtcatcatccaaaaggcggaaatngtataagcatatatgatatgaagttntgatgatgccaaagatgagagcgattcatgtcaagaattcagaaatgcaagaagaacgatgtacttggttaggat

SEQ ID NO: 29567 - DNA, 331 bp, Glycine max
  unsure (1)..(331): unsure at all n locations
agctgtcaaacaaatcggtgatctcactcaccacaattattatatgaaagatctaagttagatgctgaaggttgaaaagaaatgatggaatctcataacctatgttattcaaatcgaggccctaatgatttacttgggtgatgttcgcaaaatattgagcaatggctccagtgaagctattatgagaaaaacacaatgaagtgagatgttgaggatttgaaagtgatgatggaatctcattgctganattgttccaacacaggtccaagtgttatacttgtgtgagattagataaaaacagaggaatatgtcctttgaagtcagatgaatg

SEQ ID NO: 29568 - DNA, 453 bp, Glycine max
  unsure (1)..(453): unsure at all n locations
actgtactnnttagttngtcaatgtttataatgtgaaatcaaaatcatattgttcatcaatccattgaagattgtgactatgacttctggttggatagtggcaatgggacattttgcttcctgatgtaaatcaaggtagtagaactatcaagatnttaatgatagtactcatgttcttggatttttaaattgaaactaatgattaagcctaaattttcagataagggtttcagtaaatctgataataatataaacgttaattatcaggataaagttgcaaatattggataactcaactgactaacctacttccaaattgcaattaagcccacttggcttgatctcaattctcatgttcaagcctatacctttacatgcttgcttgaaagcactcaaaattaatcaatgtgggattaaatacnttttaaaatactctaataaaatcatgcatat

SEQ ID NO: 29569 - DNA, 480 bp, Glycine max
  unsure (1)..(480): unsure at all n locations
agaaaccgtgtttgaaaacattggaacacccgaactatanagntttgagaccatgtgaacncgcgngactcttagtctaactgcgggcatgcaaactttgctaccctctaactgtacatggcccgnattatttcttatactaaaagacattcatttcttattttanaatagaaatattaacgcgtatttgtatggtaatggccaagtacattaatataatcttttacacagattattaccaacataatctttaattactaactttcacccgtagtggatcattaaaaaaattcccgagaaggccttgaatttcattcaatgtaaaaccatttcacccttttttcttcatcaatccttcattcattcacaatttgtttttttttttatttcgactatggaaaagggtacaaaatttcacatggaatatattcttggacccagcgatacctaactttacgtgttattataaaataacatata

SEQ ID NO: 29570 - DNA, 333 bp, Glycine max
  unsure (1)..(333): unsure at all n locations
taacgcgcatcctcatttagggagcaagttcaggcttattgcaagattatccactacgaagcccgtaaaaaacaaaagaaaaagacacattgagtcttagagagtctaagcctatttcttagggagaaatccttcttctttagtcgnaacctttcttctttcagtcatcgagccattcttcatcctatagtccttgaagtgaaagtttctcatgattatgagagactaaactccatntgttgagagtctgacacgtcaaactcttgtagtctattatctatntaatgtaattctatttttattattcttctatgtgcctttgggtttattatg

SEQ ID NO: 29571 - DNA, 469 bp, Glycine max
  unsure (1)..(469): unsure at all n locations
tacgatattatttggcataacttgtttcacaaggggcactgtgttgtctgcataattataatgctatatatgtgcgcagcggcaggtgcataacctcttagtnttttgtttttttcctaattaaactaattgaagctatgatggtttgattatctgatgtactttatgatatatttaggaaggaatcatatgacaatgagtgctgcatgacttgcgcgaaggaatgacctggagatcactcggagttatatgaaaattatatatgataattcaattcgctaattatgtgcctgattttattctaatcaacgcatttactcttacatcttgtgaatctgatgaggctagctataaacgaagtttgctgaaactacttgaatttaggtaaaggccccatgattgcttcagaattgtnttagcagtttcctttcttgtcctaacaaacttatatattccataccaatatcgc

SEQ ID NO: 29572 - DNA, 217 bp, Glycine max
gactctctttggcgctgatgaatgcaccggcgccgatgacctcacagcgcagttactgcttgtgcccaaggctgtctagatagcattggtgccatgctttacactaatgatgaaaccttgtgatgaccgagacattgctatacgaaactagtgacttgctaagacgaacgtgaaaggaagcttagtcaagactatgatactggctatcgtaacgcct

SEQ ID NO: 29573 - DNA, 304 bp, Glycine max
  unsure (1)..(304): unsure at all n locations
ttcatacgacagataactattactcggttgtctgatttatncctgtaaganaacgaaacactctaaattgaatgtttaatctttgagccaatacttacgataataactctttactcggatgtccgattgagtctcgatgattagatatgttaattgaacgttgaactctagccttttcaacaactataactattactcggatgtcgttcagtgacgaatatatcgggacgctcgaatttgaatgttgaacctcttggccaattctaacgactatatacttttactcggatgtctgattgagttc

SEQ ID NO: 29574 - DNA, 451 bp, Glycine max
  unsure (1)..(451): unsure at all n locations
gagcgatatatctaactcaattgatcaatctatgtaaattatcatagataatnggatatatagtctttgaatgtatagataaaaaaatgaaaacaatcaatttataaatcaggtatctttgttctctctaggaatttttacaaccaaacaattattgcacctacaattgcttgtgaggtttttatttatttatttaaacttttaattgaattctaagactctaaaaattaattatgtatacttgactcgaatntatactaataacaaagaaagacttaatatctctatttgtttataactaattaaaattgaatgtatctgaagttcaattctcatgtataaaaattctattaaacttctcatttgtctttatctctttctatcatactatatcaattatgctatcaattactcatctctcttttgttgcaatttctctcaagatgtatac

SEQ ID NO: 29575 - DNA, 86 bp, Glycine max
accattactcatttggaacgtacaaggtggtttcttttagcttggcacgaggctactaattgtttttataacctgactatggttgc

SEQ ID NO: 29576 - DNA, 450 bp, Glycine max
  unsure (1)..(450): unsure at all n locations
gttccttcacanataatcattacacagcagataactatcataaccacccatcatatctcccaaaaccccatacccacgaaatttaagagagaaagaagtccacccaaacctggattttcgaagtcccactcgtagccacgcacttcacgacccgaaaatgctctcctttcacgatttggggcagaaatgagcaccaaaggttgaagctntgtgtggagcttcaatggagaatgaagaagaagaaaggcaacgtgagggagagggagagagagagagctgttctgaaattgggctgagtgaagagagagagggttgctttntgggttntaataaaagggttttctctttntctattatnttatataagcaatgccacatgtctccatttgagtggagcaagaagggcccactntctctntttgactgtgacccatactcagtcacaaaagt

SEQ ID NO: 29577 - DNA, 81 bp, Glycine max
  unsure (1)..(81): unsure at all n locations
cgctttccacgcgtaccacccaacatgccgtcgagcgcctggccggactgatgcttgcctacngcggaacgggccactggc

SEQ ID NO: 29578 - DNA, 126 bp, Glycine max
cagtggaccgttccgccgaggcaagcatccgtccggccaggcgctcgtctgcctgttttgtggtacgcgtggaaagcgggcaaccacggtcgagcaggctcaccacggcaacaatgccgcgatgct

SEQ ID NO: 29579 - DNA, 221 bp, Glycine max
  unsure (1)..(221): unsure at all n locations
acacaaagaaaacaaagttgtctttctcaaattgactcacacttaacaaattttttgaaattgaaggatatgtaacaacttatgaagcttaaaggttatgatagtatcattanggagaaacaataacttgaggaaccagtgttggagatacttaaaccttcaccgttgcctatgaaaatctgctcaggttcatcaaaatgagtaaattgtttaatattttg

SEQ ID NO: 29580 - DNA, 461 bp, Glycine max
  unsure (1)..(461): unsure at all n locations
aattatagcctcanaacatgctacatattcatcttccatggtagatgcaacaacaactaatgcatatggaattgcttccatntgttttcattccaaatcatttaagacattgtgcaaggctaaatntgtctcctttctaaatggaacgggtgatgttgaacactttttcttcctaaatctctctagtactntattgatatatgctntatgagataagcttaacaatccaagtgatctattacggaatatatttatccctatcatatatcttacctcacccatatcttttacatcaaagttgctagagagaaacttcttagtctcatgaagaagaccaagactattagttgcaagtaagatatgatncaacatacagaatagaaaaataaccttactcccactgaccttcagatatatatacaccaatcaacaatattntccttaaattcaaaggaaacaat

SEQ ID NO: 29581 - DNA, 309 bp, Glycine max
ctgagtctgttatacatatctgactttatggcatgagatgaaattcaaagattggacctcttgctaagtgttattaatgaatagcttaaacacttgtgcttgagtgaaacaatagcagtgagactgtgggttaagctactttccttgatatctggcttatgcctaactccatctatttgttcatgttacatgttatttcttctctttggataactgcataccttgggaaagacaagtgatgagggccatttactccattatcttattatgcaatgcagaactttttggtgcatacaccattgtatatag

SEQ ID NO: 29582 - DNA, 501 bp, Glycine max
  unsure (1)..(501): unsure at all n locations
ctcagctgtgttttagtagtgatggactcaacaaccaagcatggttagggtttacaaaggtttaaacacttatctggatcaagggatgaaggatagcttagagtcaacgctcccaattcctttcttcttccatcttctctcctctttctctatctctccaaaattgatcctaatgtcatctcttcttttctcataacactttggtggataaggcttgggtgcatgggcttggccctttattggaccttagacactttcttgatcttattatcttattgtgtttgctaattttaatactatagcaccttacaacaacattaaatataataataacaaaattatcaagattntnttcattcttattatttaacatcgatgatttatgaattctgttatccagatatattatctaactctaaaattgtaattaacacatacatgttattaacaaaataatcaaatccataaatccaaaacaaatagtaaaataaattattatgt

SEQ ID NO: 29583 - DNA, 388 bp, Glycine max
  unsure (1)..(388): unsure at all n locations
agcttctatatagctgaaccatgttatcaataaacacaagttgtgttttattcagagaattagaatttatctctgttatcttaacaagagtgagtcttctaatttcttgagtgattcaagaacaccctgtctatatcaaatgactttcacaacctttgcgtgttttcctcgcgcgaaaagagagattatcttctttcttaactgtgtaacacctgggcttaaaaccctaattccagaatattcactattacccagaattatctcgtggccataactcccattgtagtgctaaaactaagtgattcttgagcctaaattggaattcaaaacgagatcattcacctcattntggaatcacctcatgtagagccttggtgcttgagttatt

SEQ ID NO: 29584 - DNA, 452 bp, Glycine max
  unsure (1)..(452): unsure at all n locations
ctcagctgttgtattatgctngtaagatcccttgtggatatggcatggatggataagctctaatactntttatttcaattactataactccttaatttgcaacagagttaaattctaagagagaatagatcctagactcacccaatttatttcttttcaatttatgtagctcactcttgccttgcatttggccttattacaacaacacacactctctntattttcattntactcttttttttaacacgtaactttattgttgtgtgtgttgatgtgtcttactttntcactntaacatcccaactaactcccccaaattggggcaaattgccttgaaccatatgctcccctagcacctaagcaaggtagatggagatattcattcaagctcagggttcaatttgaaaatntaattcagctcacaaagggtgcaaaggatacatatataattc

SEQ ID NO: 29585 - DNA, 475 bp, Glycine max
  unsure (1)..(475): unsure at all n locations
ctggattctctgtctgtntatggtacataagcccnctacacgtacctcattttatctccataccttttaattntaaacattgcgtggactgtgttgtgactctcttgtggtattttctaccatagaagggctagtcacgatcaacaaangntatatcgtacatgtcgaatccaaaataaactagtacattctcatttaaaaaaacaaataatacttgtttggttaatattgaagaactaattttaaatcttaagttgattntagattacaacanatttgattaacttttacgttgaattaaaattttatctctatcttgattttataataaaaatatcgtcatataaatcagttaacattcatctaaacacaactntaatggaacatttcataccaggctattatgattcagattcatcaatgataatatgagagccaatannttggcttcaattcgaatcgactctcanatctc

SEQ ID NO: 29586 - DNA, 111 bp, Glycine max
  unsure (1)..(111): unsure at all n locations
tcttgacgctctgaagtcgaaggtagaatctctgagcttaacccaacgacaattaacctctactcggatgtctgttgatgctctgaatatacgcacgacctactgaattcn

SEQ ID NO: 29587 - DNA, 361 bp, Glycine max
  unsure (1)..(361): unsure at all n locations
tcaacattcagatttgagcgtctcgtaatagtgcgggtctcaatcattcattctagtnaananatattgtcgtttggattggctcagagattcaacattcaatttcgagcgtctcaatatattacgggactcattcagacatccgtataaaggcattgccccttgaatcgctcataggtcaacattaattttagcgtgtgattattacggactcatcagacatccagcaaaaatattgcgctgaatggctagagcttaacattaattcaagcgtctcattatacgggactcatcagacatacgagtaaaagtattgtcgttgaatgctcaagcttaacattaatttgagcgttcgtatata

SEQ ID NO: 29588 - DNA, 425 bp, Glycine max
  unsure (1)..(425): unsure at all n locations
ntgaacaatatactnggccttcatttaactgtctttgggctnggcgtccacgctcaacanagtactttcgacacctactgtacgttgatttcaccaatgctgttatgggaatgttgcgacaatcctttaaaaccttattgatacattctgagaggttcgttgtctgtgtgccatatcgacgtccttctctatcgtaagccatcgtccatttttcttttgagatgcgatcaatccatgttgctatggctggactcagttcacgaaattnttctaaattttgatcaaaaatgtgcttacaaggactgtaggctgcataaaattagttatgaataacaatttaaagtataaatgaaagtaaaataaacgtggccatcaaatatgaaattntacccaatttcttcaacattntcttttgttntgcatta

SEQ ID NO: 29589 - DNA, 482 bp, Glycine max
  unsure (1)..(482): unsure at all n locations
cttgactctcanntttgtttatttactgtattatattttacgtatatttcacactgtatcccaagtgtagtacttatgtacaattcgattccgaggatattaaaaggctttntatttattattttacttttctgtacattaataactctaacatctcacactataattagtaaatatgattaattaattcaatatatactgacataattaatatcgaataagataatcaaatagttaagaaaatggggataaaaatagactaaagttatatgataattaaaatagttaaggaaatgtataaaaagataactcgctttagcatttaattntattggtcttaataatttacataaatttaaatattntacacaaaaattcactctaatattaagaatgttaaaatgagtgactannatttattttataggtcgtataatacttaaaaaatatattatttatacaataaatgttntaaacaatag

SEQ ID NO: 29590 - DNA, 418 bp, Glycine max
ctggactaacacatttgctgcccaagaatgatggccttcgccgtgaagatctctcatcagcatcttatggagttccatattgtatgttccaccatgaagccgtcatgtccaagaatatcatatctctctgtacgctattcctcattttctggagggagtggccaaagattggctatactacctcgcccacaagtctatgttcagctgagacgaccttaagatggtgttcttggacaaatttctccctgcatctatgaccactgccatcacaaaagacatttcaggcatcaggcagacttatggataaaccatgtatgagtactgggaaagattcaagaaatcgtgtgcaagctatgctcaccactagcattctaagcaactacttcttctatatttctatgagggacttagcaacatg

SEQ ID NO: 29591 - DNA, 476 bp, Glycine max
  unsure (1)..(476): unsure at all n locations
agcaggatgacatgaacncgancnaagcactgagctcagcnccgaaaaaaaaagaattganccttgtgaccgggacttaagcaccgagctgcgctgtaatgtaactaacatgtaggttgggtgttcaagaaaaggatgccacatatttcataccaaatgcaaaatgattaattggaanacttatgcaaaactggtcatgcatgcacctatgtggacactcgagtgtaaaattttatggtcatgtgatgctagggctcaagattcattttctctattttaagtcaacccaacgtttccaaaatattgtcttttaatcaattgtgcattcatccgagtccaatttgggcgtctgggaaaatcttcacagcattcaacccttaggtgtatacacattttttcaaaaactaggtatgatcagtgaanttttttcaaaaaaaaagttgaaatcatctttttcaaaaccatgtttgtttttn

SEQ ID NO: 29592 - DNA, 467 bp, Glycine max
  unsure (1)..(467): unsure at all n locations
gggttcgaggtacttacccgttgaagatcgaagaacgatgataaactattgaagaacgtcgaagaacggttgaaaccttagcgagattcctcacggaaaacgttacggaaacgtttcggaagcgcctcggcttagattttcttcacggaaaccaattttcaagccaaattcgaaagagagagaagtgcctaaggggctgaaccccttccttcttcacttcctcccctatttatagcaaaataggggaggtggttgccgcccagctcgcccaggcgagctcagctcgcccaggcgagcagggttgcttcctccagaagcaaccgccttctggaggaatattccggagggcccaagtgggcctgggtggctattgcacccncatttttactaagtacacccncctctgctgttttttggtgattcttttttcgtaaagttacggaaacttacgaatntcgtaacgatac

SEQ ID NO: 29593 - DNA, 404 bp, Glycine max
  unsure (1)..(404): unsure at all n locations
taagtccgatggtatcactcaggttttgccttaaatgaacgccttgaggtgctcgatccctttcgctgacctggatatgataccatggccttataataacactangggatatcgtgcgcgtgagaggatgcaaaagagaggcggaaattatattttagaatataaagaagaccctgcattaaaccacctgcggatattggccccccaagcttcagaagagctttattaccgatgaagataccctgttacaattcattggcttatattggcctcgaggaacacccaaagcggatggaaaaaaactgtgctaaatgtgatcgggtagggatcgtgaaagaggtcgctctacaaagaggattgaacctgccttcgggatgaaattgctgtgtagtgagcaagcacgg

SEQ ID NO: 29594 - DNA, 320 bp, Glycine max
  unsure (1)..(320): unsure at all n locations
gctgacaaaagcaaaacagtccctcattcaatgtttcaatgattcatatagccaatctaaggtgttgcttgctactgtaaaagcatcttctgatggcattaacttaataggatcttcaagggtcatgcgtcttgatgttgttaggaatcccttcaatggaatgagctatttgatcgagcatattacttggacaaaagagggttgntgcacatattgtttatagacagggtacctcctaagcacaaagtattgtaacaagcagaaaagaaccagtgtgtgatactgaaatctaaatataaatgctgaaagccatgagctca

SEQ ID NO: 29595 - DNA, 321 bp, Glycine max
  unsure (1)..(321): unsure at all n locations
cacccgactaagacactaacaaaaacttatcttcttcttcttggacaaagtatggcaggctgggggcaagtaaattttcttcccatcagaccttgtatgcaactgtgatcgtatacccatatcagctagatcttgacgggtattaagccaatcttcgtctttgccttgaatgttaaggagcgtcccaatgactctatcacagacattnttctccacatgcataacatcaatacaatgtctaacgtcaagatcacaccaatacggaagatcaaagaanatggacctcttcttccatatgcaactatgacttttatccttctt

SEQ ID NO: 29596 - DNA, 476 bp, Glycine max
  unsure (1)..(476): unsure at all n locations
gggaacatgagctgaagcatctcaagctgcaccaccttctgtgcttgcctacattnttgatttgctcacacaccagtggtagttagttctttattactctagctccatgcccctctctcagatggtaaaacatatgaatattggaagagtgtgcagggggatggaattatgaaaagacttggcagcgtccaaacatataacaactccaagctagagaactctagtgtgggtggaagattcttcttctaaagtagatgatgcagtggagcttgattgcttgattgaaacccatgactgaaactcagatgttgagccatgataaacttcctcagaccaaaacaaggagggatcccaaactcagataacaacacaatggggctggcctttagaatgattagtactgattaggagacaaccaacacactccccctcaagatggaaggtggagtcaacacttccagctggctccaccttct

SEQ ID NO: 29597 - DNA, 307 bp, Glycine max
  unsure (1)..(307): unsure at all n locations
agcttctgaatgaaataaaagtnctgaagccgtgatacacttcattcttaagtactttaataaaataataaactagtgtataacttccaagtaaaacttttatatgttgcttcaacaactacttgtaaaatcacaaattctgttatcaaacatattggttatcactgtactaatacaaagtagatgctacttgcaaacataagaaagtatattgttagaactcttagataaaatatcaatgctaagaattttgatcancaaattntttgcaaacataagataacgacgtaataaactgaaattaaat

SEQ ID NO: 29598 - DNA, 382 bp, Glycine max
  unsure (1)..(382): unsure at all n locations
atagcttttttatgagatagtattnctaaaatttattatcaattggaattatagaatttgtgaaatgttaatattttaaattttttccctttgtggactcaaactttaaattttcaacaacacctacattaaaattggaagacattctcacattaattattgaaacttagaaatgtcaaataagttcttaaacttaatgatttagttttatttcggttcttaaacatatgctaatatttttaataatatgtctacattatcaccctatgtatattatcttgaatgttgcactaatgtcatcgttgattatatctttagagggttntgtttcttcgatttaataactatctgacaattcattccattttcaagatctaaagtg

SEQ ID NO: 29599 - DNA, 427 bp, Glycine max
  unsure (1)..(427): unsure at all n locations
agctcgcctagagagggaatccacggagganatgcttaccacctcgaaagactggaaagcggtttctaactactcatctgcagcctccacataatgcatagaggatgggcagcttaccaagatgtcttcctcgcctgatacgatgaccagatgcccttccactacgaatttcaacttttggtggagtgtagagggaacaactcccaccgagtggatccactggcgccccaacacgcaactgtaaggtgggttaatatccattatttgaaggtaacttgacaggtgtgagggcctatctgtacagggaggtcaatctctcccctaacctctcggcgggtgccgtcaaaggcacgaaccaccatggaatcttggcttaggtgggaagcattgaatggtaatttcttcaaagtgctcttgggcatcacgt

SEQ ID NO: 29600 - DNA, 502 bp, Glycine max
  unsure (1)..(502): unsure at all n locations
actcaagcttcgacgagggagcaagtagagaaacagccgtgtagagctgcctagctcagtttacgttcagaaaattattttaaacattctatatgtttcttgttattatcccgtgaatataaaaattaaaccaagaaaaatattgcactgcaaataagcatgtcttcatatttttactataccttttggaagcttcaagttctcaatnttgtttgttgggttatagaaagctttggaaagcttgatttttcttcttattattccgagaatatgaaagcaatggaggaaagatattgcatagctaaaaacgtatgtcgtcctaagtatactatacacgctgaaagcttctggtggcttgaagttttgtaacgtacaaactntacactgtcatattcgagtgaacttcattntagttctcatatatatntttatagaaacatcatgcgtacgtggtattagtattttctaatagacgggtatcacatcatccgttaataatgac

SEQ ID NO: 29601 - DNA, 187 bp, Glycine max
  unsure (1)..(187): unsure at all n locations
agctctgtgagtgcaggtttaagatgcgaaggacaagtttccgcgatatgcgatgaggactccctgaggagatctgaattggtacagccatgccttctcggcttcaactanggaatngacgggtggaggaacgcccagacgtttacacgacaagcataatgtaaccttttttagctttaaaactcta

SEQ ID NO: 29602 - DNA, 449 bp, Glycine max
  unsure (1)..(449): unsure at all n locations
tgactcanaaacttggaatccctatccgatacaatgctcctaggcaatccatgaagacgcactacctctttgaagaaaagatccatcacatgacaagcatcgtccaccttgtgacatggaatgaagtatgccatcttggaactatcaacaaccacaaaaattgaatccttgcccctcttggaccttggaagaccaagcacaaaatccatggaaatgttggtccaaggggaggtaggaattggcaatggagtatacaaaccatgatgcatgatnttggactntgccttatgacacacaatgcaattagaacaaaaataaaatttcatgcaaaatgttcaaagtcttttcaactccaaaatggtcccattaaccccctttatgaacttcataaatcacgagttcacgcattanactttgatgctacacaatctattatttttaacaagtat

SEQ ID NO: 29603 - DNA, 484 bp, Glycine max
  unsure (1)..(484): unsure at all n locations
ctgtataatcttagataaaagtgtgagattaagttattgagtggaatccctcttttaaggagaagaattgtaatttgtgcaataaatcataaacccgttttctataaagtctagtagtggcggttagaagagaaatccagtggtgtagctagtgcctgaggctaggattgaagtctggtggggaattggaagggttttgaaatctagtggttatccgttctagttgtgtacaagttgtgttggtgaaatctcatctttaagggtaaggatnggatgtaacccaaggttggggtgaactagtataaaaacctctgtgcacttttcccttttctctttctttacattgctntgcacanngattggaaactattttgatcaaatcattaaatctgttatctttccattntaacaacagaactaaactttgctttaccaagaattttttcattagacaactattcttgaaataaaagctttataatgc

SEQ ID NO: 29604 - DNA, 380 bp, Glycine max
ctaagctttagaaacattccaatcatgcatctatgcttgacatttacaagtctcaggccatcacttttatgtggactatttgccaaaccatcttatccagggcaattatcgttgcatatcaaggcaattcaggcaggtttaatgcttattcatgataaagaccaaaaaatatgacttctactactaatgtagtctcaaaaagttttcaaaatcttacaagtactctatttttaaacaacaaatgtctatctatggcacaatccaaactgtatcttactatatcattctacatacagcaattgatatcatatttacaagtaatttacatgcaggttgcatctaatcaccattatatttccttatattcataactaatgtat

SEQ ID NO: 29605 - DNA, 426 bp, Glycine max
  unsure (1)..(426): unsure at all n locations
tgcctcanagaggtccaggaaggacaaggcagccgatggaactagttccgctccggagtatgacagtcaccgctttaggagcgctgtacaccagcagcgctttgaggccatcaagggatggtcatttctccgggagcgacgcgtccatctcagggacgacgattatctgatttccaggaggaaatagggcgccggcggtgggcaccactggttactcctatggccaagtttgatccaaaaatagtccttgagttttatgccaatgcttggccaacagaggagggcgtgcgtgacatgagatcctgngtaaggggtcagtggatcccgtntgatgccgacgctatcggccaactcctatgatatccgttggtgttggaagagggccatgaatgtgagtatggccagaggaggaaccggtctgatggg

SEQ ID NO: 29606 - DNA, 527 bp, Glycine max
  unsure (1)..(527): unsure at all n locations
cgtccacatttttgaccctttgggacacgngatccttgagtctttgaccccttgcaaacccgngatccttagatcacctgcggcatgcaattttatatgatgaagtgatgaagggtgaaactttctgatttattgttgaccacacagtggtaccttgagatatgtctcgggggtcaggagacctttgggacgtcangtggtgtgctattgccccaaaccgagcttgaccaatcccgacccaacctcggcatagtccgtcagtgaaaacctgtgatgtacctaagcatgcgagcttctgactattcacatataatatgaacatctaccacaatgcagggaggctcgtgctggctggccaactgagaattatgtgtgatatatgggttgtggcctctggtaatcgattaccaacggtgggtaatcgagtactacgcttagagatgaagacaggangctaagatggtctctggtaatccattaccatgaggagtaatcgattccagtcttgacacgacgtaaggatcatg

SEQ ID NO: 29607 - DNA, 482 bp, Glycine max
  unsure (1)..(482): unsure at all n locations
ggttccaacactctgttcaagctctcccaaaatctatagggtaatctaggatctctatcagatactatgctagatggcacaccatgtaacctgacaacctcacttatatacaaggtggtcaacttctccaaggaaaatctgatattaatgggaatgaagtgagagacttagtcaatctgtcaacaataacccagatagaatctaaacctgtaggggttctaggtagtcctaccacaaaatccatggaaatactgtcccacttccactgaggtatctctaagggttgtgacttccctgaaggtctctgatgttctatcttagccttctgacagactaggcatgaattcacaaactcactaacctctctcttcatgttgggccaccaaaacatcgtctntaaatcatgatacatcttggtagctgatgtgccatcattntcttctattatctgaacccttttcgaccatttaattattattggc

SEQ ID NO: 29608 - DNA, 292 bp, Glycine max
  unsure (1)..(292): unsure at all n locations
atatatacccaccacagtagaaagaataacaatagatggtagcacatcaagtgaaagcataacaatagaaaaaccttaagatagatggtctgaagaggatagaagacgagtaanatacaattttataagcccaaaacataataacatctgccctgggaatggatgaatatttcaaggtttcatatcgtaagagtgctaacgaaatgtgtgacactctacaattaacacatgaaggaactacagatgttaaaatatctatgataaacacactaacccatgagtatgaactgtt

SEQ ID NO: 29609 - DNA, 429 bp, Glycine max
  unsure (1)..(429): unsure at all n locations
tcataaaagtntatatggctagaaacaagtaccgaggcagtggttctagaagtttaatgagtttatgagcaactcacgattcaacagatgtgacatggaccattgtagctacgttgttgcaacctacccttctgcgggagggcgacacgtgaatagtgatgcgtattccacgaaagggatacgcgcggagtcgccaccaacgtttatttgaggaaaacgtcagatgaaccagatagacgcgatctacgaacttttaagtgaaaggctcgggagatgtatttatgcacggggaaggtattagcaccccacacgatcgtcacaagggacggcagcctttaatcgaatgtgcaaacatgactgtgattttacgttccgctttatgtccttatatccttataccctgtttacatttttctctcttgtggcgac

SEQ ID NO: 29610 - DNA, 137 bp, Glycine max
  unsure (1)..(137): unsure at all n locations
gtgtggtcatactattgatacaaccccagttcaggagaaagtcaaggtggagtgttcatggccaatggngagacaaagacccattgctcatttaagtttagttgctaaaatgccaatctgaagtggtgacaattgtt

SEQ ID NO: 29611 - DNA, 503 bp, Glycine max
  unsure (1)..(503): unsure at all n locations
ctaagctaagagcntccctggatccagctatcaattgtattttatcaacagcacgtgccataactttataatcgccaaccctgaagaacaactccaagaaacaacagaacatgagtaaaaaaaaccaagcatgtaggcgaacgagcaaaaaactaaactaccaccttaacgatgcataaccaaagcgaacagcgtgtgaccaataactcaaataagaaagtggataggacacgattcagaccacagtaaactgcatataaatcacgaaaaataaacatgtggacaagacatctgcacatgtgactaaacaaaattaacatataaaaatccatcaacacccatgttaacagaccatacaaaaatagtcatcctcaacttagacctcaactgtcttctgacaaacccaaacttgggtacaaaagtataattggcatgtgtcacactataaactaacagccaaacaaagccaaactgtaaaacaaactactcaggcaaagaatcac

SEQ ID NO: 29612 - DNA, 182 bp, Glycine max
ttttatagacttggaagaagaagtatgaaataaaccgttccattattttcaagttaattacttcttacatatataccatgtcaatggactagttagcttacatagatatgatgataatacccaaatcgacatcaggattggttattaacttgagaatggtatataattaccggaatgggcct

SEQ ID NO: 29613 - DNA, 441 bp, Glycine max
  unsure (1)..(441): unsure at all n locations
agaaaaatttacattactgtttacaaacagctgggttctaaatcatattcgcattttccaaatagagataactaaggccccttgagggtgccttcacaagaattagccagacatagtgagattcatactacagtttatcggagaaaacttttggggtagagggggaaagatgcagaaaagaacttgatattattgcacatacaactattacaagcttctctttctaagtttctctctctctcaatattgggtatgatattgttcagcgtgtgtgttcaactgaacctgaacaccctntatatagagaaagtttatacaacaagacaaaaccncttcagtcaagaacagtaaaattactgttcctttactctgtcacagggctgtcctttacatatacatttattacagataagctcaatgtctaatctagcaatagtaaag

SEQ ID NO: 29614 - DNA, 454 bp, Glycine max
  unsure (1)..(454): unsure at all n locations
agcttatgctgatcccatatgggtggatcattctcttataacatcgtgaccctgactggtctccctatgatcttacttagtgagagtgacctgacaaacccattgtgtggtgtgtcttgttatgtactcctaagcgtcccaaagtggtttttcactgacatggtaccacattgcatataggattgagtcttagcataactggtgcatatgcttgctaattgatgtgttattatatctcgatcgaagtgtgggattcttgtgtaatgtgattgatgattgaaaagtgaactttgaatgacgaagtggtgaagttacatgagctatgtttaagcacgtggtatctcatttatataatatgtataattcaatggtctggttctctattacntaggaatgtgataactcacttcctgtgtgttgctgtgtatggatcctgagatgatcttgaacttgt

SEQ ID NO: 29615 - DNA, 467 bp, Glycine max
  unsure (1)..(467): unsure at all n locations
aatgaaagacaataatggtagatctagaatattttctttgagggaccaaataaaaaaaataaattaaactaaaacataaattaatattttaaaaatataaaaatgaattaaaattataaaaaatgaaatgagtttcatgcaagtttatccaacttgataaaatctaagagaggtatgaatgagttttaaaaaaatataatatatatccgtntgtcatgtctaccttatatataaatatttatgtggatgtaattnttttctagagatataaattgaatgataagagtaaattaaataaaaacatatgatatatctttttcagatntgttaaattatattatatttgtataatgcaataatatatatatatgttataaaaattacctgtctatttttaagtacttaattataagatggtaacananaaataataataaaaaacaatacttaattataagaggatctta

SEQ ID NO: 29616 - DNA, 416 bp, Glycine max
tcaagctctggctgcgcacgagctcgcatttcgcgagcatggatagaagacgactcattgttattgattacaggtatgggtaatcgattacaggcccaataagccttctggcgatcgattacacgatgttgtaatcgattacaggctgcctgttcatgtgtaatctattacactggatagatcgattaccagagcctatcctaggctagtttctaagagaatatctatatctatgctcaaagttcctgctatatgtctaatgttcactactcatacactaagttcaatcattcaatgtctatgtacacaagaaatcatgctttctatcataaaaacacgaattcagacaagatcaagcaaaattatctacgctctaaatgtaagaagtaaatcgaccaatcaatcaaccaatcaat

SEQ ID NO: 29617 - DNA, 201 bp, Glycine max
gcttggcctatccttacactgaatagtaaccaccaagcacatagcttcacattaggtctttagtttatggctttaattattagcctgacagttcattgtgatgacaagctgtattctgtgtgttttgtcttgttagtttcatacagtctttcattggcaagttggtaaacataaaatgagtttaagagttatgtcttattt

SEQ ID NO: 29618 - DNA, 463 bp, Glycine max
  unsure (1)..(463): unsure at all n locations
tcatctcacggaggtgagcttagctattagagaggtgtgtgtagctaagctctagcttctttaggaatcttttcaaggaagcttctcaaggaggtgagcttagttattataggagtgtgtgtagctaagctctagcttctcaaggaagttntctcaaagaagcttctcaaggagttttctcaagaaagcttctcaaggaagctacctagtctataaatagaaacatgtgtaacacttgttgtactctgatgaatgagagtcttgtgagacacaactcanagttcaacttctctcccttttttcttccttncaattcgtgctcccccctctctctntctctccctctntcttttcctccattaaagaatcctcttcaagcttcttatccaaggcaattcttggtggtgaaactccttcttccttggcttattccctagtggatgatgcctcccttctactcttc

SEQ ID NO: 29619 - DNA, 539 bp, Glycine max
  unsure (1)..(539): unsure at all n locations
agcacttgaccaccttgcgtacaccgngatactctagagacgttctgcacgcatgcaagctcgcagtgctnttactcggctgcctttagctattgtttgcaacttttatacactnggaagagaatgtatgaaataaaccgtatcattaattataagttaactacgtcttacatatataccatcgtcggtgtactacttaccttacatagatatgatgagtgtacccaaatcgacattagggaatgtttattaacttgagaatgtctataaaactctcgaataggggcctagtgataagaggcgtaatacgatgtaatttacgacacgatggtttactagcctaactatatttcttgttttgtacgggtacacaagtgaaaagaaatagattcataagtggtgatagcagaataactgtcgcacattatatagcccttgctacgagcaatactgagcatctaattacatatacttaattacttttctaccatactctagcctcggactctttcttngagactactcggcctcctcccttn

SEQ ID NO: 29620 - DNA, 474 bp, Glycine max
  unsure (1)..(474): unsure at all n locations
gaatgactccttggacaacngancttaagtcattgccgctgcagcttgcaggctttactgtgtagctataactatttttgtcatattttatagacgcggaagaggatgtatgatatacaaccgtttcatttatctctacaggttagtctacgtctctaacactactatactcattgtcgaatgtacgtactctagttcttacatatgatattgatgaatattactcacaatcgacatcatggattgttnattaacttgagaatgtaataatatcacccgaattgggcctagcgataagaaggctataggatgaatttacacaaggtggtaaaaagctaagtaattttgtcgtcacggtaacaatgaagtaatgataaaatgggagagaatacttgacataatacactgctaaacttgggaggctatacaaattaatcttcaccaaaagctggtttttttgagcatgaccccctt

SEQ ID NO: 29621 - DNA, 225 bp, Glycine max
atatgcgcatgagcaattagatcactcagcccctcgagggccttacataatatcccacgttagagaggttacacagtttatcgccgaaaactattggggctccgggggaccgatgcctaccctagcattggctcttggcacattcagctcttacatgcttctctctatcacagtccatgcttcttactatgggctatgagacagttcaggctgtgagtaactctc

SEQ ID NO: 29622 - DNA, 464 bp, Glycine max
  unsure (1)..(464): unsure at all n locations
cagcaacactcatgttcatccatcttgcccttactgtaaaaaaactaatcacccacaaaacaagtgttggtggaggccagatgtaaggtgtcatatgtgtggtcagttatggcatgtaaaagaattgcaaatttaacacacaagaagaagtcaaggttgttgaggaccaatcacaagaggagcagttgttcgttgcatcatgcttggctttcagtagctctacaaaaagttggcttattgatagtggttgtacaaaccacatgacctatgatcgtgagctctttacagaacttgatgaagctattttttctaaagtcaagataggaaatgcaacatatattgaaataaaaggcaaaggaattgtgtcaatttaaggccacacgggtttgaaactaatttctgataactactaaatatgagttantttgataataaaaatatattgaanatatctctaaaaatat

SEQ ID NO: 29623 - DNA, 487 bp, Glycine max
  unsure (1)..(487): unsure at all n locations
tgatgtntgtgttgaatgcattaaaggtaaacagactataagcattatatttagtgcacatagggctacagacgtcttggaattgatacatatagacatttgtgggccatttcatacaccttcatggaatgatcaacaatattgtatatcattcatagatgattctctagatatgctgatgtgatcttgactaggagcggatcgcttgatacaggctacagagaatttggatgacgtcacttccagtgaaggaagataagtcagggtagacgccacaaggattaccttgataagtctgagattggttcaacaaggaacccaaagagaagctctcaccaatatttatgataattccaatagtcctttcattgaaaacaaaaaccaatacttatagtgtatctgaacanaaagataaaaatagacatgggccttcacaacagtgtgcgccannaaaattataaataaaatattagaacatatttattat

SEQ ID NO: 29624 - DNA, 397 bp, Glycine max
  unsure (1)..(397): unsure at all n locations
gttggcattttttcttgagaagcctctgcatgcacaagagtctgttcttggcttgaagctnttgcatgtttangaagntctatagggagaaaggtcctacttccacatagttctaagagatnttgctgtgtgaagaattgtacagactagagctcacatgggaaggcattctgtaagatagagaatgattttggagttgattgtgagatcctatacgtgaaggagacatcctcaccacttttatttttgcaatctttcatttgttcttctatatgatgagaggaggtttctggactatgaagctaattctctgtggatcttcttgaggacctgagaaatatatttatctatgaagatgttttggggtctctatgtatctgatttcataccgatgccn

SEQ ID NO: 29625 - DNA, 493 bp, Glycine max
  unsure (1)..(493): unsure at all n locations
tccacaatctccaagcaatacaatatccaaatatcatgaactaccctaaacccagaaaacagggcagaggcagaaaactctgcccataacacattcccataccacaactttccctactcgaatatcgcagtaatattctcttcgttccgattcgttaaccgttggacaactcgaaacttttattggaggtccctagtacataagtctacattttgaccgttggaatctgctagaaaatgtccagaacccaatatgtactacctttcccataaccagcaatacacaagcatttttatgcacaagaacaaaatttctgctgcacaattcaatagcaattttctgcataacagggcagatnttcgaaatccctcttgccctcatcaaatnttgctcaaattggatcctacaagtcctaaatcatatataaaacatatntaaaccaaaaacanacttcaggtcaaggcaattcanaatctatgtatctaaaacacct

SEQ ID NO: 29626 - DNA, 440 bp, Glycine max
  unsure (1)..(440): unsure at all n locations
ccctcagccttatagtatccatcttgtgcctttttcccacaactctngtaaatgggagagaaatgttcatctaaagcatacaagtccctaatgttatcaaatcctaaaatatgagctcctagggagcaaaacatgtgtgtctcctagagagggcatcagctaccacatttgtttttccctttttgtatttgataaaatatggaaattgctctaggtactctacccattttgcatgccttttgtttaacttgctttgccctctaatgaacttaagtgattgatgatcactatgaatgacaaattccttggaaacaaggtaatgttcccaagttcggagtgctcttattaaggcataaagctctttatcatangtggtgtagttaagggtggcaccatgaagtttctcactaaaataagcaatagggtgcccaccttgcaac

SEQ ID NO: 29627 - DNA, 446 bp, Glycine max
  unsure (1)..(446): unsure at all n locations
ngaggtacaaagaattattagctcacattcttntaattatttattatttctaagttctttntttataattagtgttagttaatattggtcttaataccactactacaatgtgatctttaacaatatttctctgtctaacacttagtaaaaatattgntaaggttttgacaacacttaaaatatgtcgctaaaaatgaataaatattattaatatatgtttntatgacactttatcaaatatagtgtataagtcatgttgttaaaacctttaatcacttatatttcatcaatcaattcaagcaatccatacacttagccaaatagccatttaatcacaacaacaaacgtaaaactcataaccctagaccgcttgaaaacaaaacagaatcatgccataattaaaattagacanagattttcaacatagaaactnnttacatagcagt

SEQ ID NO: 29628 - DNA, 206 bp, Glycine max
ttaaaaaaaaataattatagtgactaaatagaaatatataataaatttattacttgaatatcaaaataatcacatgataatgtaacttaataatactagtaaaaaaaactaacaatatcaaaatccctaaaattgtagaggtatcatataaactctcgtttttaatttaaaaatattaagcaaaaagataacaacctaaagtgact

SEQ ID NO: 29629 - DNA, 377 bp, Glycine max
  unsure (1)..(377): unsure at all n locations
gaagaagaaaacctatgttgtcataccttgctctggaagaatggcgacacgangatgatgacgagttcggacgtcgatcaacctgaagagcacgggagaaaatcaagagatgatgttagaaaaggaatgcagaaatagacgaaaaaaacctagcgctttctcaacactaaaactatattttagtgagagtagaagtccagatatcagcgatcgtgaatcaacactgtagaagctgaaacgttgtcgtacctttgtctcgactacgagcaccaaaatggtagagttcctacttcgaattggtagctcgagaggtcttggttgaaagttgatgcagttcaaggtgctgctatgccaatgctcacacatatatttgatta

SEQ ID NO: 29630 - DNA, 390 bp, Glycine max
ctttgtattcgtttaacatgcatgaagatagatcagtcggagaactattggatttgtttaataaactgattctagatcttgaaaatatcgatgtcactattgatgatgaagatcaaacttttgtattggtgtgctctttgcctaagaagtactctcatttcaaagagactttattgtttggaagagactctgtttctcttgatgaagtgcacgctgctctgaattaaaggaattgaatgaaagaaggaaaagaagtcctctcaagtggtgaagggctgacagcatgaggcaagaccttcaagaaagatagtaaatttgataagaagaagcttagccacataccagaagaatgttgaggaacatattcaaatcgatgtatcactgaaaaaa

SEQ ID NO: 29631 - DNA, 498 bp, Glycine max
  unsure (1)..(498): unsure at all n locations
ctgttcatgacactgagattcctcatggccactagggtttgggagactcatagtaccccaattaacagcatgagttntactggttgttctgttctccctagataaaggccctttgtactttctgtatctcgtcttcttctaggtgtcttccttaagagaggaacccctaaatgtgccccaaagtcattgcctctgaatatccccgacactgccaccaaggatgttttggtatgcagactgacattttttgagaagtatatttgagtcttctccttgctcacttcttgacttgacatttcacaaaagaggttcattgtgtcttgaacacactgcatctgagagatnttagcttgactacaaaggagcaagtcatcagcaaacagatgagaaataggaggactattcctccccatactatgattatntacattataagatttaatgtgacaataaaacctaaaacgctggtccttatttatactaagaatcctaattaaa

SEQ ID NO: 29632 - DNA, 414 bp, Glycine max
atttctattgatattctcaagtagttatctctaagatacattattggattctgtacaatactacaagtgtcatacatactgaacccaaacagaaaatgtggcagtttattctgtacaaataacacatctagttgataacataaccatctaattgattcatgaacatctggacttggagaataccttctattcatatgtacactcttttctctctatctgtgatctaatacacaataattcaaatcgtacaaagttttagtaatatggctctacatcatgcacatgcatgaataattggatcatagtatttgcttgccttttctaactgagcaatatatgtcataaatctaggttattgcccaacttattagctcagataaataagtgatagtatttggggtatcaatgtatgct

SEQ ID NO: 29633 - DNA, 452 bp, Glycine max
  unsure (1)..(452): unsure at all n locations
gaggaagaagagaagaagaaggctgtgtgagagagatggagagcttctcgaattttctgcttggctgagtgaggagagagaaaagctttttggttttaaataagggttttctctttntctattattttattcaagctatgccacatgtctccattgagtggagccaaaagggcccactttctcttttgatggtgacccatactcagcccacaaaagtgagaaaaacctgacctttgaaatgctaaaaatcctgcctcggtttgcgtgccatttctttggttccaatttctcgcgtttctctgcgtccgtcggggtcagttttcgaaagcaagcaatatatatatcataacgctcagaatataaccccgagcgtggttcagaggttggtttcgttaaattctaagtcgcacgcaaaacgatgtttttaactaattaattaggaattaacccat

SEQ ID NO: 29634 - DNA, 395 bp, Glycine max
  unsure (1)..(395): unsure at all n locations
agtcttgaaccaattcaaacgacaataactntntactctgatgtctgattgaggcccgtaatatatcgagacgctcgtaattgaatgttgaagctctgagccaattcaaacgacaataactttttactcggatgtctgattgagtcctgtcatatatcgagacactcgaaattgaatgttgaagctctgagccaattcaaacgacaataactttttactcggatgtctgattgaggcccgtaatatatcgagacgctcgaaattgaatgttgaacctttgagccaattcaaacgacaataactttgtactcagatgtctgatagagtctcgtaatatatcgagacgctcgaaattgaatgttgaagctctgagctaattcaaacgacaataactt

SEQ ID NO: 29635 - DNA, 502 bp, Glycine max
  unsure (1)..(502): unsure at all n locations
gctaaacattcaacttcgagcgtctcgatatattacgagtctcaatcatacatccgaganaaaagttattgtcatttgaatntgctcagaggttcaacattcaatttcgagcgtctcgttatattacaggactcaatcagacattcgagtaaaaagttattgacgtttgaattagtcagagcgttccacattcaatttcgagcgtctcgatatattacgggcctcaatcagacatctcgagtaaacgttattgtcgtttggattggctcagagattcaacattcaatttcgagcgtctcgatatatgacgagactcaatcagacatccgagtaaaaagttattgtcgtttgaattggctcagagcttcaacattcaatntcgagcgtctcgatatattacaggactcaatcagacatccgagtaaaaagttattgtcgtttgaattggctcagagcttcaacattcaatttcgagcgtctcgatatatgacaggactcaatc

SEQ ID NO: 29636 - DNA, 430 bp, Glycine max
tccaatattctgtgtcctaccaagtcactttgacttttacaataatcaaattgttttttttttgcacaatgactaactctcaatcacttacagataatatacaatctcacacttatctttctctcaaatgttaaagttttgagggctttttcaaactatacaaaaatttacaaagagctttttacataaagaaattgaataataatgtgtaggtttgtatctcattcctttaaatgacaagtgtatcctacgccttagtaatattggactaaaagtttgaatattataccctaaagaccattcttgctaaacttgtctctctcaacaaagactattgtatatataaagaggaaacaaattgtctctctcaacatagactattgtatatataaagaggaaacacatatatgaaatgtgaatagaaagaatg

SEQ ID NO: 29637 - DNA, 437 bp, Glycine max
  unsure (1)..(437): unsure at all n locations
tagagtggcatactcttattggaaatcaacttgttacaaaattaanagttntaaggactgacaatggcctgcagtttgattcagagcaatttaatgagttttgcaggaaagtatgtatcaaaaggcacaaaacagtttctacacaccaacaaaatggattagcagaaagaatgcataagaccattttggaaagagtgaggtgcatgctgcctattgcaggactgccaaagaccttttggggagaagctgcaaacacaacaacctatgtgattaatagatgtccatcatcagctttagacttcaagacaccaatggaagcttagagtggtgaaccacctgattactcaagattgaaggtgtttggatcactggcctttgctcatgttaaacaangaaatgtggatgcaaaggctgtanagtgtgtgttcattatctat

SEQ ID NO: 29638 - DNA, 464 bp, Glycine max
  unsure (1)..(464): unsure at all n locations
tcatgagagagtcaaagatcaaattgagaggagaaattaaagctatgctaaacaagccaacanaggaagaaagaaggttgtcttcgaacccggagattgggtttgggtgcacatgagaaaagaaaggtttcctgaacaaaggatatcaaagcttcaaccaaggggaatggaccatttgtgcttgaaagaatcaatgacaatgcttacaaagttgagctgcccggtgagtataatgttagttccaccttcaatgtctctgatttatctctttntgatgcagatggagaatccgatttgaggacaaatccttctcaagagggagagaatgatgaggacatgttcaagagcaagggcaaggatccacttgaatgacttggaggacctatgacaagggctagagcaaggaaagccaatgaagctcttcaacaagtgctgtccatactatntgaatacaagcccaagtt

SEQ ID NO: 29639 - DNA, 164 bp, Glycine max
  unsure (1)..(164): unsure at all n locations
tcatctgtagagtcttggtggtcatctctagagtgtcggtagccatggtggatagcttctgtgtgaggcggtagacagcctcttcaaggtggtccatggtactctggtagttgttgtgggtgggttatggctcgaggcangtgtangggttctggcaggggaaa

SEQ ID NO: 29640 - DNA, 446 bp, Glycine max
  unsure (1)..(446): unsure at all n locations
agctcatcggacacgtggggaacctgacggatgataacttctaccacctcgagggagagaccgccttataacgcgccgaagcagagtcaatgagtgcgcgagggagggcaaaatggtggggaacttggagggaggtcgagggagaatgagaaccaagaacactgcagagaggtatgacagagtgtggtggggaacttggagatagagaggtcgagggagaatgagaacgcacaaagaacagttgcagagaggtagggcacctttaattntgggaatgagaacgaagacgatttttaagtaaaacccgtcgtagtttttattccataaaattataggattgccagcaacgtacattctaagatggtttctaataaccgccttagaatgtcagtcgtaaaaagcattnttcatttcactaattacaaaattaccaccgcgatactttc

SEQ ID NO: 29641 - DNA, 433 bp, Glycine max
  unsure (1)..(433): unsure at all n locations
ctgaccttagttacaggctgtaactacggtttacacgcttctccatctttgtcaaagcagcaaccttacgattatcctctaagaatatcgtaacaaccctaccatctcttcatcaagcttcccatgattgctcacaatattgacccttggcatatgtgaaaaggatggcagattataaagtttgtgtagtaatgtagtcccagtcagctttctaaacatgcagcttcaagtgttcattntagatacgaatttcattaggtgaaccacatatagaggcagactctaccttgagagatcagagtccttacgttttgttcagaagcacatctacactatccagagctcctcctccaaagacagcatctctacctaaacttaatgaaaacatcaagaagcacatgttctattggctagtgattattattaatcttct

SEQ ID NO: 29642 - DNA, 470 bp, Glycine max
  unsure (1)..(470): unsure at all n locations
cagctagaatgttaggacggtatcaaagtaatctatgaatggtacattcganaactacaaagaaggttctaagatacttacaaggaacaaaaagtttgatgcttacatataggaggtttgatcaccttcaggtgattgggtatttagactcgaacttgctcaatgtgcagatacaaggaaatccacccttggttatgtacttcttttagccaaaggagtaatatcatggaagagtgcaaagaaacctattgttgctacattcattatggaagctgaatttgtagcatgttttgagactacaattcaagctaattggcaacaatattgtcaagccgctaaaaatatattgtaataactccataacagtattnttctctaagaatgacaagtactctaaaggtgctaaatatatggaattaaagtaatttgtcctgaaagaagtacagaaacaaaaaatgtcaatagaaatt

SEQ ID NO: 29643 - DNA, 460 bp, Glycine max
  unsure (1)..(460): unsure at all n locations
tgagcanattcgaacgacaattacttttaactgggatgtctgattgtttcccgtaatatatcgagacgctcgaaattgaatgttgatggtcgttgcaaattgaaacgacaataactgtttactctgatgtctgattgagtcccgtaatatatcgagacgcttgaaatgaatcttgatgctctgagcaaattcaaacgacaataagcttttactcggatgtctgattgagtcctgtaatatatcgagacgctcgaaatttaatacgagagctatgagcaaattcgaacgactataattttttactcggatgtctgattgagtctcgaaatatatcgacacgctcgaaattgaatgttgatgctctggtcgattcaaacgacaatatattttctgccaacattgcagaatttntatacatacactggtctataatatctctttatggtagacgaagttttgt

SEQ ID NO: 29644 - DNA, 486 bp, Glycine max
  unsure (1)..(486): unsure at all n locations
gctcgattctttctatccctggcacattgctcgaccttttctgctgcagttctttgtgctngctngtatntagcaaaggtcaatgctnttcttacatcttctctactgtaccactgagcatctagataagcaagttgcagaatcagttgtcacagattcaataaaccaagcaaaagaaatggagataaataaaaatcatctgcataagttcattactcctaaaggaaaattcttcatgcaccatatgtatggatatggtgcagccaaagtttcagcaacaaaagtctgacatgtgtacaattgagaattcagccactccataaacatacacatgttgaccttagtctgtctaacaaatagggttttacaagctaactcaccattttaagtcatgcatataaataaaggggaaatagcaaaagaaaatagtatcagggctaaatccaagtaaatacgaaggaggacaatgtaccttctaactctgtc

SEQ ID NO: 29645 - DNA, 364 bp, Glycine max
agcttctattgataactactcatgacatatgtccttatgtcttcctcctttgtgagttaatgctgcaatggcatgtcagcatggcatcccaacatcaaagttgtaaaatcagcacacatgtatgttaggaatgaaaaacaaaactataaagaacacaacctgttaggtgccatactccacaagtgcatgtccattcagctaaagtgacctcacgcttattcccccacatgtggacctcatatctcaagcccatgttatcacaacaccaaatgggagtccattgattagcaaaatgaaattctttttctagtcttttatactgcactggacataatggccacgctttctagaaagttaaccttgc

SEQ ID NO: 29646 - DNA, 468 bp, Glycine max
  unsure (1)..(468): unsure at all n locations
catanaatctatataagataagataaaataagatctagatgaaataatatctagatgagatcaaatctaaataatatctagataagatcaaatctagataagataaaatttggtagaataaaatagtctgctctcttcaagcaagcccaattctggattcaagcctaatgcttcattaattcctgaaattagattaaaaacatcaaattagctgaatgagcccaaataataaaactgtctaattaatttgacaattaagactaatcagtaattaaaataatgtaaaaaaaggtttaagaaataggagaaaataatggcacatcaaaatcccccatactttggcctttgcactcctgggcaaaatgaaacaaagaacaaaatcctaggatatcaaagagagaaaaacaaaaacattcacatatttctcaatgaacatcaaggaatgaaagaaatgggtaacatctaaca

SEQ ID NO: 29647 - DNA, 254 bp, Glycine max
tctctacgaggggaggtgatcttgttctagttaaaatagaaggaatgttatatagaatttcgaatacctgacaaagacaaagctatggcccaagacagagccacttcctactaactatgaagtctattattcggacaagggtgaaacacctgattgccctatcagcctatatacaaatgtgtctacagcctacatgggaaactctttctctcattcaatgacttatttgtagacactaatcgaaggtgccaaat

SEQ ID NO: 29648 - DNA, 469 bp, Glycine max
  unsure (1)..(469): unsure at all n locations
tcttaaatcaagaaagtctcactttgtcatataccaaagtgttatagtccatggccatccttcaatggtgcatgtgattggtcccaaaaccttatattttctttgttgtgaagaataatcgaggtttttaaaaagaaaggggaaaaccctaggatcaactttcagttgattgattaaatgtcaaaatggctccattgtcataactccaaaattgtcaagtgactaaattaaacagaacatacactctaaaggagttcccgaagagatctgcaaaagataggatgaggttgcatgagttatcacatctttccaaanagagacagtcaatctgtgttcttcacaaaaaaagaaaaaaagatcataccaaaatcaaaatcacaaatataagaaagaatgtcatgaacattgtacaatttttcattgcattgcattggtgcatacaaagcctgcatttactgcatttcaagat

SEQ ID NO: 29649 - DNA, 506 bp, Glycine max
  unsure (1)..(506): unsure at all n locations
caacccatgaatccgttggaacncgngancctcttagncacttgccgcntgcaaaccgcgtccctaagtgaacgcagctgcatttgcaaccaagctaccactgtaagagtatctttcattggttataaaaccccttcttaaataccttaaagaagtgtattacatccttgttgaactcaaggcaaaatgatcaatttatgccaagataatacacagaatttttcttatataccagagaaanagtctatgtataatcgattcttcttttcgaaaaaatttctttaccaacaagtcttgctcttgtatctcttaatgctgcctaatgaatcccttttgggcctaaagaaccatttacaaccaatggtctttgcctcattagacaactctacaaggtttcgaactctgctactctacatggaattcatcttatccttcatggcatcataccataaaattgactatttacaactcatggcttgatcaaaagtgtcgggaatcatttaacg

SEQ ID NO: 29650 - DNA, 487 bp, Glycine max
  unsure (1)..(487): unsure at all n locations
tagcgttatgccttgatgaagagttttatatgtacaatttgtagcatcttacatcacaccgagtatcaatcctccatgtcagtcttgctacagatgctacaggagcaaggacacctgacctttaacagccagactccccaataaatatgttatctttaaccactaatatttaaatgtatctaaatatcttatctattgacaaataattaataatctataacgtcacattttatccacacggtacgattatcttctactnttaatctataaacgaatatttatctctaacattatctataagttcttggttattatctataagccgaaaattatttacaaaggctacaacaatccctataaacaaggaccaacaaccacactcaactaatataaatacaagtttcattgaactctctacacatctgatcacacactcaacacaagagcaacaagactatgtctttctctctttctcgcttatatgagt

SEQ ID NO: 29651 - DNA, 333 bp, Glycine max
agatagggcatgctcgatggcccttaacactgtattcattcaaataccaatatgcttggaagtcattattggtaccaaattacatcccacaacttgaatgttttatttcgatacccatgaaacactacaattctctattctacaactttgtcagtctttatctatggaccgagataaacatcaatatcatttcctggttcgcttgtggctgatatcatcattgacaacatcatgtattcttgtttcatgcacaaccaaggaggcaacgtgtatattactaacataacaggccacatactatgttgagtacttaaactatcatatggattcatt

SEQ ID NO: 29652 - DNA, 418 bp, Glycine max
  unsure (1)..(418): unsure at all n locations
ttccgtcgtcatatgctatactngatcccatatctactagataattcaatggtagccataaccctagccaaggttcatcaacctccatttctccgagaatacgactcgaacacaacgtgtgcttgtcacgaaaaccccgtgcgtcattgagcattgtagggctctgaagtgtagggtgcgaggtctaattgatgctggctgaaacttgaggagaatcgtgtgtaaatcctgacattgacaagagatgccacacatggggcaattttgaaagctgttgttagatgtctctaatgactcaccaggattntcaactntcaccggaatgtgggtgtaagccattggtctgtttgctcaagcaacctgcgctcctgagtggtgacttccaagaccgttcaatcagagattactcatcttgcac

SEQ ID NO: 29653 - DNA, 324 bp, Glycine max
  unsure (1)..(324): unsure at all n locations
tttgtgaagtgatttgccggatatgttgatgatagaanaagtactaccgganttgtattttttatgggtgattggtgttttacatggagttctaagaaacaaggcattgtgacactttctacttgtgaagcccaatatgtagctgcaacttcttgcacatgtcatgccatttggctaagaagaaatgtggaggaaccttcagtgttgccataagaaagcaccaagatctatgttgataatagatctgcataagagcttgccaagaatccggtgttccatgaacgaagtaagcatatagatacaaggtatcattttattagagag

SEQ ID NO: 29654 - DNA, 463 bp, Glycine max
  unsure (1)..(463): unsure at all n locations
agcctgatagacctctcaggctgacctgtttaatatgtgtgtgtgtgtgtaaacttttcttgattcttatttcttatttattttagtatttgacattaagactagattatcaaatgaaacttatggtattctacttagcttgtttattttgttgtacttaaagtgcttcgattataattcttacttgggttgttgtgattagtgaattttaatctcatattagagtggctctaattaatttaactttntttttcatgcacaaactaaaagggaagtatgtgtctttctttatattaaattttaaaaagtacaataggaattttcaaaattttactatatagtcattagattcccttcatatataatattcattgtaaaatacgatttttaataggctcgcaagccaagccaaacttttaaataggctagaccaagcctaacaaaaagcatatgacaggtaaat

SEQ ID NO: 29655 - DNA, 483 bp, Glycine max
  unsure (1)..(483): unsure at all n locations
agaaccacagtngtgacccccatcgaacacgngagcctcatagncatgaaccgctgcagacccgcgaccctaagacgaccgtgaacattgttacgcatcttatgacctcttgctctttcttcaacataaagcttcatggccgttttatttgcttgaataatctgatcctacaagggactcttatatggagaagataattatgttatagaaccctatacttaacacgaacacaataatctttgcaataacttaacaatataagtataggggccgagtatgtgtctaacgtgaattatattctaaagtagtgggagtctaaaaactatggtcacaagagattctatagactaaacagagcggatagtggtatgatgcattcaaagtctgtaaagcaacgtcaaccatgctgatgacgctagaatgaggaaagggaacatatcttgattgagtacatgaacagctctgtatatctccaattagccn

SEQ ID NO: 29656 - DNA, 379 bp, Glycine max
atcctatctcgcccctgatcataatctctcaggtatgatggttagacaattggtcatttgggcctatttgctaattgtgccctctgttctgtcgcctctgcattttctatttgctgcaatcgtagtagctagttcctctgtgatagggtgtgcaatgtttgtttctccgtataattccacggtccattgagaagcaccttgtcctcaaggtgaaattcatcgtgaagggtattccagttcttccatgttgcatcatctggagacaattcttgccactgaacctaaactttcatgagtgtatcatctctttctgcatgtggtcaatattaccaatggagctactgttccttgtttgatcgaaggaagactcgtgaaatag

SEQ ID NO: 29657 - DNA, 244 bp, Glycine max
atggagtagcccgaagcttatgctgcagacatttacaatagacctccttaacctcagcagcaaaatcaccacaacagaacaggtatgacctctctagcaaaagatacaaccctggatggaggaatcaccctaatctcagatggtctagccctcagcaacaacaacagcagcctgctccttccttacaaaatgctactggcccaagtagaccatacattcctccaccaagccaacaacaacaaca

SEQ ID NO: 29658 - DNA, 495 bp, Glycine max
  unsure (1)..(495): unsure at all n locations
cttgtatggactaaagcaagctcctcaagctaggtatgaaaagttaagttctcttttaactgataatagctntatatgagggaaagtagatactactttgtttcacaaagattatggaaccctaaaccctaatcatctagatatatatggatgatatcatattcggttgttattgactctctgtgaaaggatttttccaagtttatgcaggcagagttcgaaatgagtgtgatgggagaatagaagtctttccttggacttcaaatcaaacaagcagacgaaggcatatgcatacatcatacaaagtacgtgaaggaactctagcaacaaatctagatggacgatgcagaatatatgaaaactctcatacatccaaccactatacttagactagatgatgattcatagaatgcggacgacaagacctacagagcaatgataggatctcttttgtatctcactgcgtccagacttgacattatgttcagtgtatgt

SEQ ID NO: 29659 - DNA, 473 bp, Glycine max
  unsure (1)..(473): unsure at all n locations
gctngcctcanagaggtccaggaaggacatggcagccgaaggaactagttctcactcctgattatgacagtcaccgctttaggagcgctgtacaccagcagcgcttcgaggccatcaagggatggtcgtttctccgggagcgacgcgtccagctcagggacgacgagtatactgtttccaggaggaaatagggcgccggcggtgggcatcactggttactcccatggccaagtttgatccagaaatagtccttgagttttatgtcaatgcttggtcaacagaggagggcatgcgtgacatgagatcctgngtaaggggtcagtggatcccgtttgatgccgacgctatcggccaactcctangatatccgttggtgttggaagatggccaggaatgtgagtattgccagaggaggaaccggtctgatgggttcgatgaggaggccatcgtccagctgctatgtataccggggc

SEQ ID NO: 29660 - DNA, 472 bp, Glycine max
  unsure (1)..(472): unsure at all n locations
attggcggcatgcaagcttccgttcccgagagcatctcttatttaagcatttcatcctttgctttcgtgtagcttaagaaaaacgtcatttattcttctttctttcttccaaaaccatttctaaagttccaagaaatttctccatcacccacatccaccattagccaccacaaaccatcattgttctccattgaaaacccacaccgagaggaacccttcaaccgaagcgggaatcttcaacttggcttgcggttccggtagagaaacgaaaccctaatctgacctttcattttctttcgagggaaccatggttctattcttggttcttgttagtttcatcttgtctttgcatcttttctgactttggaaccgccattgcatgtcttatgcttccttngaaaaaccttagagaaagagactttgtaaacgttatcctttcatgaaatgcatggtattntcgtaacctacactg

SEQ ID NO: 29661 - DNA, 439 bp, Glycine max
  unsure (1)..(439): unsure at all n locations
cctctccttacattggtccatgaaaggcaaaagatagtggtctttcctcatggcttctntgagcttgtggtaatcgatgcatattctccagccagtgaaagtccttgttgggattaggtcattcttttcatcctgaatgattttcgtgccccctttctttggtccacctggattgggcttacccaagtactatcagaaatggggtagataatccaagcctctagaagcttgagcacctcttccttcattgatgggttaaggcttctcttgggctgtctgactggtttgtaatcttccgccatcattatgttgtgcatatagtagacagggttgattcttttgagatctgatatgtgccaccttattgctcactgtcaatgtacatccncttcttggtgaagaatgtccttcatgaattggcgtagagtggcatctactg

SEQ ID NO: 29662 - DNA, 390 bp, Glycine max
  unsure (1)..(390): unsure at all n locations
ttgagctgttgtcatcacaagttggaaggcttcctgaagaacaatactctgngatattttatgagtggattgaaacctcaaatttggaggagggtgcatactctgaatcctcgaaataggatggagatgatgagaattgtgaaagatgttgaagaggaattgaatgaggaagatacgatggtgagcgtcgtgaggtgaaaaaaggggggtacgagcgtgtgggccagaaggattgggtcgggttattaatgaggaaaggtgggtctcaacctatggatgcaactcgttcatttcagtcgggtgggtcaaacccgagtcagaaaatgggtctgagtggatccaacacaaattcaactttgtctttggtttcctttagctcgcaaaatgatg

SEQ ID NO: 29663 - DNA, 373 bp, Glycine max
  unsure (1)..(373): unsure at all n locations
tgatagctaanacagaattcagatgtatatgacacataccaattaagcaaacaacagatattgtggtttcactctttagcaaaacaatatgtttaataacagaaaataaagtaaaaacaagacattttggcgatcatttgggaaaaaaaatgttttctcaaaccacataagccctaattgtctcatggtcacaatagtaagtatccggcacaataacacaagtgacaatgtcacatacctccccaacatcactctggaaacgtttaataagctcaatagcaatattcctgaattcagtttcacggtcttngaggttcactatgactntaacctacaggagttgatgcaaaacatatggatgcattaataccat

SEQ ID NO: 29664 - DNA, 502 bp, Glycine max
  unsure (1)..(502): unsure at all n locations
ctcaagcttctcaaagacttatgtaatngattaccataattggtaattgatntattcagtgagttatatggcactgaagatgtttcttatcttagaaactatcttcctacttgtatatgatgatgcatgatgtacacacaaatagactaagaataaaaagcaacaagtaatacaaatgtatcaacaaggagttgggcatgtaaaagttaaaaatattctatgttagtccccctatctctaacaatctcccccttttggcgttgatgatgccaaactntaattgccattgagtgcatttcaagaggctttaaagtagggacttctcttgatacaccacctaaanttttntgttaacactatggccaagagaagtgtcaaatcatgtcatatcatcatcatagtagagtggtcgaatgaataaataagaatgtatgtcatgtgccaatgcaatgacaatgcnnaattttctccttttgtgcataatgtcataccctattttcgt

SEQ ID NO: 29665 - DNA, 370 bp, Glycine max
  unsure (1)..(370): unsure at all n locations
tgctggacttgaacggancttagcatgaacctgagctctgatctctgagcgactgctgctgcagcttatacactagctgatttttacaaatttttttttttttggacctgccccaatgctcctattgcttttgtatctttactggactggtgaaacttatataacctgtttgttacatgagttttaaaaatgagagaccaatataagttcatgattttcccattttataagacttttctcatttaaacttaacatgggaatggttaggaaaatgaactggctaaaagctaccctgatggggttatttcgtaaataaatgccgggcaaggcatgattgtttataccgtcgtactttatacaatctgtattg

SEQ ID NO: 29666 - DNA, 399 bp, Glycine max
  unsure (1)..(399): unsure at all n locations
gtcgctatggatcagtagaaatgtctcaacgcttggcagagctggaaacccataagagaaaggatgccgaataatagccaagcatgagaaagatggaggaacatgntgcatgaagttgtatgtaatagtattccatattagaagatacaaatttgaagatattgaagcagcaacaaataaattcgacaatacttttgaaattggtgaaggtggatatggacctgttcttagaggagtcatcgatcatactgttgatgccattaaggctgtgagaccagacatagcccatggagagaggcaattcacaagaggaattgtagttttcttttgcaccacaaaaacataatatgagtctagcaatggatcattttgctgcaaactaaggtatataatattggc

SEQ ID NO: 29667 - DNA, 483 bp, Glycine max
  unsure (1)..(483): unsure at all n locations
tcaagtttttgtcacactcgcacgtactacccataccttcttattattttctttgaaaaatgctaaatgaataccaatgtgttataccatataaatataataagatttatgatataataagaaaatacataaacaaaaaaatgtattgaaataatgtttaaaaagaataaatattaattaatattcttaaaataataaagaaactaaaataaaaatgtttctattaaaatagggaaaactggagttttttatttttttatatgatttttataatattttataatttcttaattaatgtcatgaaaacactaatcagtcaaacccttaaaattattattagttnctttttttgtttgccctctctcttacaagtagcacttagaaacaagtgcgaggggcagatatatctttatagaactattgacccacacgcaggatgtctaatgtatntcacttgaggcagctattataacagtgataatg

SEQ ID NO: 29668 - DNA, 476 bp, Glycine max
  unsure (1)..(476): unsure at all n locations
cgacaatatctntntactcgtatgtctgatttagtcccgtcatataacgagacgctcganattgaatgttgaagctctgagccaattcaaacgacaataactttgtactcggatgtctgattgaatcctgtcatatatcgagacgctcgaattgaatgttgaagctctgagcgaattcaaacgacaataactttttactcagatgtctgatatagtctcgtaatatatcgagacgctcgaaattgaatgttgaagctctgagcaaattcaaacgacaataactttttactcggatgtctgatagagtcccgtcatacatcgagacgctcaanattgaatgttgaagctctgaggaaattctaacgacaataactntttactcggatgtctgattgagtcccgtcacatatcgagacgctctgaaatgaatgttgaagctctgagccaatgcaaacgacaatcaacttatactcgga

SEQ ID NO: 29669 - DNA, 312 bp, Glycine max
  unsure (1)..(312): unsure at all n locations
tgcttctcaaggaagttntctcaagaagatgttgggttcatgagtgattatacaaaagagtgttgcaccactctacacattcatcataccacctatcatagggatttggtgcttaataatacctattttaggcactaacaaagcacaaggatttaagctcttgcgaaccaaaccctcatccaacaactcctttacttgaagaataacctcaagctcaagagggggggcaatgctaacaagtgtctttttacaaaggagaaaatgtggaggttgtctaacaagggaaatctctttaatatttgactttatttc

SEQ ID NO: 29670 - DNA, 309 bp, Glycine max
  unsure (1)..(309): unsure at all n locations
agcatgggctcatgaacgcacacctttggctaattttatttgatggagagataaaccaatggctcttttcattgtgcaagcaagattggttggactaacccactttttcggagggtatatatttacttatgcagccttcttaattgcctcgacttcgggcaaatttgggtaatttcattaattctttattattatatctggcatatcatttccttttatggggaanggacgccaattatacatctaggatccgacttctatcattgatactaataggaaatgaaccactatggcaaggaaaagtgtgat

SEQ ID NO: 29671 - DNA, 316 bp, Glycine max
  unsure (1)..(316): unsure at all n locations
ttatctgttctnggttttattgcttgnagctgngactggcttaataataccgcttatcctcatgagctttacaggcccactgggccagaagcttctcaagctcaagcatttacttttctaggtagagaccaacgcatggggctaacgtaagatctgctcaaggacctacaagtttatgtaaatatctaatgcgttcctcgacaggagaagttattctctgtggagaaactatgctttttgggatttgcgtgctccttggttaaaacctctaaagagtcgaatggtttagacttgattagactgtaaaagatataca

SEQ ID NO: 29672 - DNA, 442 bp, Glycine max
  unsure (1)..(442): unsure at all n locations
actaagctcggaagcaatagacgactcgctcagtgagttgataacgcactaagcgcatgcttgtgaagcagatgtctntccagataccttttacacgctaagcgcgctggtgctgggcttagccgttgatgcgcgctaagcgcattgagctcgnttagtgtagactcctttggcacttattcaaaatagctcctttttgcctgaaattaaagaatgattaacattatttccatgttaagaggcttctactgagcagagatcataaaaaagaaattttatttactatcctaccaaatagaaccataaattgagagatctatatacattttggaaaactgttctatacaaaagttagtcgtanacgacgactaacacatccccttccttcttctttgccacagttgctctgaatcttctgttgctcgaccggcaggggcgacat

SEQ ID NO: 29673 - DNA, 482 bp, Glycine max
  unsure (1)..(482): unsure at all n locations
tccaagaatcaagatcaagaatcaagactctagtatcatgaatcattagacgacttaatcaagataagtatgaaaaggttctttaaaaaattgagtagcacatggatttttctcacaacatgtatatcaaagagttattactctctggtatcgattactattgttctaatcgattaccagtagcaaaatgtttttgaaaaagttttcaactgaatttacaacgttccaattgatttcaaaagctcttatatgttttggtaatcgattaccactgtctttgaacgttgaaattcaaattcaaatgtgaagagtcacatcctttcgcataaaagcttngtgtaattgattacactgattcggtaatcgattaccagtgattgtttctgaataaatgaaaagatgtaactcttcacatagtttctgtatttctcaaatttggtctaatgttctttaanagtcataactcttctaaatggttctct

SEQ ID NO: 29674 - DNA, 493 bp, Glycine max
  unsure (1)..(493): unsure at all n locations
agcttaagcntgaagaagtttgtcttttacatgcccaattcattgattgacatttgtatntattgttgcatcttagtctttatctttccatatgtacatcatgtatcataatgtagaggtaggaagattgtttctaaagttagaaacttcttcagtgccttaaactctntgtttaatcgattaccaagatatacgtaatcgattgcacaagtcatttgagaagctagtagagagatcctcgttttggtttaatcaattaccagctatctataatcgattactcagttcagttgagaccatgtgtgattatcatgagtctctgctttaatcgattaccaggtgattgtaatcgattacttcattcttggaagtgttcccaaaagtcatcaagacaactttaatcgattaaatcaagaatctaatcgattatattgttcttgaaaattttacatgtttcgcgaagaacactttaatcgattgatatgataatcta

SEQ ID NO: 29675 - DNA, 485 bp, Glycine max
tatgaggagaagcataagaagaagcaagagatcaccaagcgactcttcaagttgcaactgaaggagaaggaagaaagtcaaggaaatgaaagaagtcattgaggccgaggtagaggttgaggtcacggtcgacgataggttggaggtggcaatagtgtacgaggttaaatcatcaacaatagttacgagaaatgaaaaagctcaagagaatgtggaaaaggctatacaagcacaaggtatgataaatctcaaactcgatgttataaatgtcaaaagaatggccactatgcttcaaaatgtagattcgccaagaatagagttgaggaggagactaactatgtggagcaaaaggatgagaagtttcatatagtgctcctagagtgtggaagtaatgaaggtagccaagacaacacatggtaccttgacactagtgcaaacaaccttatgtgcgaaagaagaagcttgttcgtggatcttgatgaatc

SEQ ID NO: 29676 - DNA, 508 bp, Glycine max
  unsure (1)..(508): unsure at all n locations
tccttgacccttgcgacacgggatccttaagcatctgccgctgcagctgagagaggaagtgtgaaggttgaactttcttctttttattgtngaccacagagtggtaccttgtagatatgtcgcggnggtcaagagaccttggtgacgntaggtggggtgctattgcccaaaaccaaacttgaccaatcccgacccaacccgggcatagtcggtcagtgagaacctgtgatgtacctaagcaggcgagctccttgcagtcaacagataaaaggaacaaagaccacaaagcaaggaggcttggtggtggctggccagctcttgaatttgtgtgatatgtggattatggcctctggtaatcgaataccaagggtgggtaatcaattaccacgcttaanaatgaagacaggagactaagaatgtctctggtaatcattaccaaggggtgaatcgataccangcttgaaacgaagtcaggaaactagggagccttctgtatcgatcacaccan

SEQ ID NO: 29677 - DNA, 493 bp, Glycine max
  unsure (1)..(493): unsure at all n locations
ctttcctacttcttctctcgcataanaaatgtgtttcatgttttccagtgaagtgacatgtcactgttgctgattcaagtcttacactttcggatttttctgttgacagttccagtcttaaagaaccagatgccattttggatcagatgatggtttggagaagaggacaagtgtgaccaaggttttagtcaagtggaaacatcacttgcctgaggattccacatgggagttctactatgatctcaggaaatggtttccttcttttcatccttgaggacaaggatagttttgagggggtgggattgatatagagcaaagctcaaggatccacgtgtcatgcagttgctgaaggacacatgtctgtcactaagggagccttggattggtaattagttagtaccattttctattgagataaagttgataataacaactttgtatagccaattcattcttctgatgcattcattccattacttgtaaacattctact

SEQ ID NO: 29678 - DNA, 176 bp, Glycine max
ttgagcgccttgcaagctcctcgattcattctatgagctgcgagtggcccactattgtgtttcgtgcattattattctcgtgttgttactatttataccccctcttgacgtgcttaagcccggttaattaaggtgtttctcgcttaacttaaaaataaaaataaatttcacccgac

SEQ ID NO: 29679 - DNA, 485 bp, Glycine max
  unsure (1)..(485): unsure at all n locations
aagccacacgatttatatgcccctaccgaaaaaaaatatcttaagccttttacctaaggaatgaaaaaaaacttaatggctgagtgtaacagaaattgtggcaaccaaaagtcacccccaacagccaacaagtcagccaccatttggtctcccaaaaagctgaagnacgttgccaatagggcccttattacaacttgaactaaacctatctaaagcccttatagttgattagcccaaaacatatatttggtcagccaactttacaaggattgtgccattatttagacaaactacacactctataattgagacaaggcggtgtcattgaagcctcctccatttgggccatgatacaactcacaaccttggacttttctacatgacacttgtgctaagattcaaatagtatggacagcacttgatgaagagcttccttggctatacttgctctagcacttgtcatatgtcctncaagtacttcaagt

SEQ ID NO: 29680 - DNA, 159 bp, Glycine max
  unsure (1)..(159): unsure at all n locations
cgtaatactcaccacctctatcatatctaataattntcacatttctgtctaattgtctttttacttcattctagtaaatttctaaggcattctgatgcaagctccattggagcttgtaggcctaagatcttcttcatcaatggattcctttgcttcttg

SEQ ID NO: 29681 - DNA, 478 bp, Glycine max
  unsure (1)..(478): unsure at all n locations
gcttcttctctgcattctctctctccagaaattatcccattgagcatctgtgcttccttttcgcattatctacttacaatcacgaagcatttatcatccatgtaagttccttgctttatattctcttttacttgtctaaactttagggtagaaaaccttacttagttttagatttttagggttttaatgctttgttagaattagtttaagattaggactttatatatgtttgtattgtattaagtattttgggaacatngcatgtctgatatgccttttagaggcttgaaaagtgcaagaaaacgaattgcgttttctggaaaacgcggtgaactcgctaagcgagaatgctgcgctaagcgggttcatcagtattcattgaatatacgcgttcttggaagaactcgctaagcccacctaccgtgctaagcgagttcatctnttgaggatgaacactcatcctcttactgaaatgcct

SEQ ID NO: 29682 - DNA, 78 bp, Glycine max
ctatttaatcctctattacgttgttcccttatataaaaaatacattttttttttgtacaaaaaaaaaaaaaaaaaaaa

SEQ ID NO: 29683 - DNA, 484 bp, Glycine max
  unsure (1)..(484): unsure at all n locations
tattaggacacaatngaagatattcttcttagctctctccatagtatactagtgtcctataggccctgcataagtcaaataagttagttagcacaaaaatccgaaaataagttacaattatcaattaagctcaatcatttgcttaatactaaaattaaattaaatacaaaaaaataaaagtcaaagaaatattaattgagctaagaagaatagaaaaatattaaactataaatgttgaatcacacatggcaacttatcattccaatactntataatttttagttatcattcctatactttctaattnttcttcttaaatgccgttcatgtaaagtgctttgtaagatggctgggatgacatctgatagttagtaatgatngatgctattggagaaaattcttatataatttaaaatctaggtttatggattcttagatttatntatttgaggacttattatattntatntaataatatcattga

SEQ ID NO: 29684 - DNA, 454 bp, Glycine max
  unsure (1)..(454): unsure at all n locations
ngaatgggtaatgatctntacacatgttcagccattattttaggtgtatgatcaacttaggttgttaaattaaatgccaagggtatgaactaagcttgaagntttgggcattgctttagatgcaattgcataagtcatatgaatgcttaaagttgtttgaattaactggcctaattgtttggttaaacttgttgcaccaaggcgggtacattgcgcataaattgctgtagaatgtcaaattctttccttcaaaataatacacattgagtggtgatctttattagttgtatggtaatacctacaattactaaagaccacacaaaaattggttgacttcttgtgtgctatacttgggataactaacatagtatggttatgtatttcatgcaaaataattttcatgctaagatttagttggatgtgtctttgtaggcgatggctccgaagaagcttc

SEQ ID NO: 29685 - DNA, 412 bp, Glycine max
  unsure (1)..(412): unsure at all n locations
ttcagtgctataaagaatcaatgacaatgcttacaaagttgagcttgccggtgagtataatgttaattccaccttcaatgtctctgatttatctctttttgacgcacaatgagaattcgatatgaggacaaatccttcttaagagggagagaatgatgaggacatgaccaagaagcgagggcanggatccacttgangggacttgaggacctatgacaagggctatagctaggaaatccaaggaagctcttcaacaagtgctgtccatactggttgaatacacgcncaagtttcaaggagaaaagtccaggggtgtgagtngtattcatgcccanatggaggaggactaaatgacaccacttttgttcaatttagagtgttagttcgtctaataatgccccatccttgtagg

SEQ ID NO: 29686 - DNA, 495 bp, Glycine max
  unsure (1)..(495): unsure at all n locations
cgctnggtgggcttctatggaggctggatctntgagcttcaatggtttcctttaatggtgattntccaccatggagatgcagcggaagacaaaggagaagatgtgagaggaggcgccatccattaaggaataagccatggaaaaaagagcttcaccaccaagatgaccttggataagaagcttggaaggatgcttcaatggaggaaaagaaaagagggagagaaagagagaggggggagcacgaaattgaaggaataaaggagggagagaagtggaactntgaaagatgtctcacaagactctcattcatcaaagttacaacaagtgttacacatgcttctatntatagactaggtagcttccttgagaagctttcttaagaaaacttccttgagaagtttctttgagaaaacttccttgagaagctagagtttagctacacacacccatctaaaaactaagctcacctccttgagaagcttncttgagaagcta

SEQ ID NO: 29687 - DNA, 524 bp, Glycine max
  unsure (1)..(524): unsure at all n locations
tgggttgaccctttggaacacgggatcctttnagncattgagacccttgcaaacccgccgatcctttgagtagagctcacgcatgcaatctataagaggatgctgtaatggaagaaaacaagttataagtggagcacacactgaagacatgagatggaaagaagggtacttcgagtgtcgctcataatactttcattcatcaaagttaccacaagtggtacacatgtttatatctatagactaggttgcttccttgagaagctgtcttgagaaaactgtcttgagaagcttctttgagaaaacttgcctgagaagctatagcttanctacacacactcctctaataactaagctcacctccttgagacgcattcttgatgagaattctaaagaagctagagcttatcaacacacacctctctaatagctgagctcacgtccttgagatgagaagctagaacttagctacgcacccgctattatagctacgctcacccccatgacaaaatacatgataatacaan

SEQ ID NO: 29688 - DNA, 493 bp, Glycine max
  unsure (1)..(493): unsure at all n locations
cttctatgtgagtaagccaaaaataaccaccgactctatcattcatttcattctggcgaagctcataatattctgaatagcttatacagaataagaatcaagacaaatttcgagtaaacaatgaaacaacgacagacatttgtaggccaagtcacacaaccggattgatacacaaaatcttaatagccaatccgcaggggagaaaattaaagggtgatcaatgaatgacaactacaatgcaggagacatttatgcaaagaatagtaatggatgtgatcaataagatatagttaagatttgctacagacaataaaagagatagagcaaaacaatttttcaacatgccataaaagtaaaaccaatattcaaagtatgaaaaagtgttcgaaaaacaacaaatttctccaatacgagataaattggcatatcgatcctctaagaccctccaaggtcgacatcaacatcagaatcacctgtnggcctatcatcaaca

SEQ ID NO: 29689 - DNA, 157 bp, Glycine max
aaaaattgaacttgtactaccaaataaaagttgggctactttagatcagcatatagggtcacgcatatctattatttttatctattaaaaaaatgaaaaatagatcttatattaagggttgcaagaatatgatttttccttcccaatggactacctt

SEQ ID NO: 29690 - DNA, 517 bp, Glycine max
  unsure (1)..(517): unsure at all n locations
cgcacggattgaacgttggaaacgcaacaaaagcgatgacccctgcaacancgnnaaccaaaaagggaattgaacccttgtggaccgggatcttaagcgaccgcggctgcagcttggaaatgattctatacacaagtaggcgtattaagcgactaatagaaagcctaaagaggagccggagaatttcataagtcaaaaaaataattttatctctaaattgggacaatattaaatatgatatacaatgtataaaagactaacctatatttaaatatttaccagggatttatggttgaaaatatgatatatattaaataaatatcatatatgaatcaaatgatttaggattttgaaaagatgggatatttaataaattattgtcatatatgaatccaataaactattatattattttgaaagctcttatgaatgaggagtggcacactacttacatggtattaggaaacacaacttagatcttaaattgccgcgatttttttataaatcattcggattt

SEQ ID NO: 29691 - DNA, 481 bp, Glycine max
  unsure (1)..(481): unsure at all n locations
ngtaggattatggtgtacccatcacatgtggtactaggtggcagtctggcgatggtgcacaacaagtattccacattcacaaatcgcgcataaacccaccatcctctgttgcccacctccaactgagctcacgtactcccacgtagcccatatncttttctctcaacaccgggtccccatcaatcctcccaagcttccccaacatccaagtaactcaacattcaaacaacacaaaccatcacagccaagaaaacagggcaaaggcagaaaactctgcccaaaacaccaaccaaaatcacagcttttctcacttaaagaccccagtaacaattccttcgttccaattcattaaccgctggattgactccaaaatgttactggaagtctctagtacataagcctacattntgaccattgggatctactagcaaacatccagatactcatttacattactgtntccacaaccagcacatacata

SEQ ID NO: 29692 - DNA, 307 bp, Glycine max
  unsure (1)..(307): unsure at all n locations
ttttatataagaataaaataaatgatgcatatatgaatattgagtatctataaaaattagaatcaaaatggtaatttttgaatttcttttataaattttaaaaattggtgaattcaaatttttctatttgtannatacgacatttagttttcttatttactaaataaatagttaatgtcaagtaatgtgattgtggaaagtgagtactgaatagtaatgtgctgagctattaaatataatgatgaaataaaaattttataaatgactatgattttctagcacataatccaacctgttgtagtataat

SEQ ID NO: 29693 - DNA, 485 bp, Glycine max
  unsure (1)..(485): unsure at all n locations
tataanagacgaggatntcacactcgagcatgatggcaccgtccctttagacacatccatcatagcactntttcacatgctcttctctntntatatcgntgacatttctaaagtaattaattcaccccactttttcatggaagcaataaataaatttatctccatgaactttatattagtattgaatctatatatgcatccgtcccttgaaatctgccattctaagagtggttgattgagcgtcgcatttgtgatcgaaaatcacatccaattcctatgttaagatcaaaactatnttgtattgtttcatatnttcacatcctggattcacattnttggggttttgacgcacattcaaaaacccattgaatntgtgatggccttgctgggcatgagatactgtggcatgaaatatgaaagtactggttggttgtcctcaaactaaagaaattatgcatcgtagttatatgcctcttgtatatatc

SEQ ID NO: 29694 - DNA, 423 bp, Glycine max
  unsure (1)..(423): unsure at all n locations
agcttaactcatccaaacatggcaagtttaacatgttttcaacaaaattcttcacaaataactatcacaaagcattaaccaagcaaaactgcccatcatatctcccaaagccccatacccacgaaaatcaagtgagaaagaagtctaaccaaacctgaaatttcgaagtcccacacgtagaggtgcgcttcacgactccgaaaattccttcctttcgcgatttggagcagaaatggtgaccaaaggttggagctttgttgggcaacagtggtggatgagagaaaagaaaaagaaagttgtgtgagagagagggagagagcttctgaaattntggggctgagtgaggagagagaatacagctttttantttaaaagaaaggcttttctcttttctattaatttaatttaagctatgccacatgt

SEQ ID NO: 29695 - DNA, 371 bp, Glycine max
  unsure (1)..(371): unsure at all n locations
attcctaaagaagctagagcttagctatacacacctctctaatagctaaggtctcctccttgagatgagaagctagagcttagcaacacacccnctataatagctaagctcacccccatgaaaaaatacatgaaaatacaaaaaaaaaaaatccctactacaaatactactcaaaatgcctcgaaaggctaaaaccctatactactagaatggccaaaatacaagtcccaaacgaaggaaaaacctattctaatatttacaaagataagcgggctcatacttagcccatgggctcgaaatctaccctaagactcatgagagccctagggccttcccttggatctctaacccaatctacttggagtctttta

SEQ ID NO: 29696 - DNA, 414 bp, Glycine max
gcttataagaacaaaattgcctcaatcatttccaaatatgcatgtgaattaggaagcatcaacaagaatcaagccaaggctattgtgcaagcaatcaatggggcaaaacacaccaaatgattatgatgatggatggcacaaattctcacaaaggtaaactcatcactttcaaattgagctttcaaaactatcatgacatgtagaggagaatcaaagattccaagtcacaaaatgtcaaaaacttttattttcaaaacaattacccatttcttgaacatatcctataattcaaagaaaaacatgcaaagtcgtacctgcacacagaattgacccaaaatattaaactagaaatccgacgaaactaacaacattaacaatataacacaactaacaaattaacaaaaccaacaaaac

SEQ ID NO: 29697 - DNA, 445 bp, Glycine max
  unsure (1)..(445): unsure at all n locations
aactaagcttcctcgggccatttcctgcgaaggcaaacatctggaatgttagttntaccagtgggacactactcttaaaacaaaaatggcatacaacctcctcccataaatatgaacatcaatgtaaatttagagcaagcttatgcgcatatttccttacgaacgttcacttgcacaagacattctattaactaagaaaaatgcacccatattcaatcaaggcagcttcgttacctagattatttacatgtacttccaaggtgtatttgttacttacatcacacacatctccttggctaaatttacatacatgcatactcaaagcattttggggtaccaaaaattgcacatgtgcacatcttggtatttctaatacctatacatacacaaacttcatgatgaatcttgactatttacacaataaggcgctacatttcatgctctt

SEQ ID NO: 29698 - DNA, 409 bp, Glycine max
  unsure (1)..(409): unsure at all n locations
agcttgtaggattatggggtacccatcatatgtggtactaggtggcaatcaggcgatggtgcaagtcgactctccacatccacaaatcacacataaatccaccatccccagttgtccaccttcaactgagctcacgtgctcccacgtagcccttatcctcgttcctctcaacaccgggtccccatcaatccctccaagcttccacaacatccaagaaattcagcatccaaacatcatgaactatccaaaaccaagaaaacagggcataggcagaaaactcttcccaaaacacattccaataccacagttttcctcactcaaataccccagtaacattctctttgtttcgattcgttaaccgttggatcaactcanaattnttactggaggtccctaatacatatatcta

SEQ ID NO: 29699 - DNA, 436 bp, Glycine max
  unsure (1)..(436): unsure at all n locations
tggtggttgagtcatatatacagtttcttgaaggtctccatgcaaaaaggcattgttgatatccacttgatgaataggccaatgttgataaaccacaaaggacagaacagatctaatcgttgctggcttaatcactggactaaaggtttctttaaaatcaaacccctctctttgatgatacccttttgctaccagcttgtccttgtgcctttgaaaacgtccatcagcattaaacttgcttttaaaccgtcatgttcctctttcatagctttgagccattctggcttggccattgcttcctttatagtatgtggctcaacaatgtgatcatagcttccttccttgtaagaagcataagttttcgggttaaaaacaccagctttggctctggttgtcatgggatgagtattntgaggaacataactngcaatgggag

SEQ ID NO: 29700 - DNA, 372 bp, Glycine max
ccaagcttatgctgcaaacatttataatagatcccttcaatttaaaaaccaacaacaatagaataattatgatctttcaagcaataaatacaatccaggttggaggaatgatccaaatctgagatgggcaagtcctccacaacaacaacagcctatccctcctttccagaatgttgctagtccaagcaggccatatgttcctcctccaatgcagtagcaataacaacagtaacaacaaagacaacaagcaactgaggccccttctcaaccttccttagaggagttagtgaggcaaatgaccatccaaaatatgcaattttagcaagagacaagagcctccattcagagtctgacaaatcaaatggggcagat

SEQ ID NO: 29701 - DNA, 85 bp, Glycine max
tctaaactctatacaagaatgaagctctgataccacttgttatacaagtggcctcaaatatcttaagaagggggggggaggttgc

SEQ ID NO: 29702 - DNA, 360 bp, Glycine max
  unsure (1)..(360): unsure at all n locations
agctntgagccaattcaaacgacaataactttttactcggatgtctgattgagtcccgtaatatatcgagaccctcgaaattgactgttgaagctctgagccatatcgagacactcgaaattgaatgttgaagctctaagccaattcaaacgacaataacttttctctcggatgtcctattgagtcccgtaatatatccagacgctcgaaattgaatgttgaagctctgacccaattcaaacgacaataactacttactcggatgtctgattgagttctttaatatatcgagacgctcgaaattgaatgttgaagctctgagccaattccaacgacaataactttttactcggatgtttg

SEQ ID NO: 29703 - DNA, 432 bp, Glycine max
gtatcaaattcaaacgacaataacgttttactcggatgtttgattgcgtctcgtaatatatcgagacgctcgaaattgaaaacggatgctcgtagcaaatgcaaaccgcaataacttttaactcggatgtatgattgagtaccataatagatcgagacgctcgaaattgaaaaaagaagttctgagcaaattcaaacgactataactttttactcggatgtctgattgagtcccgtaatatattgaggagcacgaaattgagaacagaagctctgaccataatcaaaccaaaataactttatattcggatgtgcgattgagtcccgtaatatatgaagacgctccaaattgaaaacagaagctctgaacaaattcaaacgacaataactttttactcggatgtccgattgagtcccgtaatatatcgagacg

SEQ ID NO: 29704 - DNA, 344 bp, Glycine max
cttttggtgagtgggtttattagcattttgttagttgaaataaaggctcaaacttgtggttaagtggatgatgattctcttgggatttgcaccacctatgggcttgttttaatttaaataaattaaagcttaataaggtgaagaatttaggattgtggctgcctcttggctgaccaaggagatgcacaattttccatatgtttatgtgtcttaattctagttttaattaggtataatgacaccatcaattgttgttatcaattctaattttaattacgtttaatggcaccatcaaatggtgttattggtgatcattcacttcgcgaaccaacttgatgtcattc

SEQ ID NO: 29705 - DNA, 421 bp, Glycine max
acgaaagccccactctatcattaggattagtacctgacatctcaaacaaacaaatcaaacgtaacaagacaattatagttgatgtttgaatacctcacccactcaagtgtattacaaaattatggcttttctctaatgaaaacactcttgccttttaccactctaattccccttgagttcttaggcaattcaagagattatggccacagcaaagaacaattcaccaatatgtgtaaagtaaggctagagagacaaggaaaaggttaaccaagacaaaggctaacaatgtttttaggcacaattgaaggaaataaaattcataatttatgaattcaagtaacaatccttcatacaaccaatatattaccttatagggagttttttaaatgtcttcaagcatgaaccattcaggccatttttt

SEQ ID NO: 29706 - DNA, 353 bp, Glycine max
agcttcggagttaaaaggagacaactttgtcatgtcaagtgtaagatgggctattgtggtcaagtgtaagctgagcaatgtggctcttctatgacaaaatcagtatgtacggtttgtatttttcatttttataatttatatatattttctccaatcaaactgatattcaactttaaatatctacatcaatttattacaaaaaaaaaaaaaaacttcacttaaactagctaattattgaagcacatgcaataatttttcaaacatacaaatttatcctagaataagtcgtactgataagaaaattcaccacgtaaaaaaagaatcattcagtgtactaattattgacatattct

SEQ ID NO: 29707 - DNA, 376 bp, Glycine max
tgtagcaccacttcaccctaccttacctctcgagagcggcaacaacatccaccgtggtacccgtcttccccttaacatgctcagtcaccaccctgtgcccattggatcctctcttgccttcctcccacgaccatcatattcgtcgtcgttacttccaccaccaccaccgaagccaccacctctacctcgaccacggttagcgcgggtttgcgcttcatggatagtgatgttcggccgtcaaggtcttggtcgtgcaaaccactattcacaactctcgctccctcttgttgcttcttctgaccatccaacaacagtatctcttcagtgtggtgagttcccttcatggcttgcacccattggagcaacagttcgagct

SEQ ID NO: 29708 - DNA, 388 bp, Glycine max
agcttcttggttggtaataatagggagtctatcaacatattacagtatgctgatgatactgtttttgttggagaggctgtgtgggacaacattcatgctattaaagccatcttaagaggatttgaattagcttctggtttaaagattaattttgccaaaagccaattttgggatattggtgatggtgttaattgggccagggaagcagctaataacctgaactgtcagcagctggaatgtccttttctttacttacgcatacctattggggctaatccctctagccagctggtgtgggagcctatcatcactaaaatcaagtccaaattagtcaaatgggctcataaaaatatatacatggctgggaagggtactctaataaattatg

SEQ ID NO: 29709 - DNA, 418 bp, Glycine max
tctcaagcaagctgccatcaatggtgcttcctttggtgaggctgggggtatctctcttttggcctcccgagctaactgactcttggtcttagggattaagacctcatcattcttcttcttcccctcatcatcttcttccctctttgtatcctctccttcctctttgctagcatcttgcaatactctgtcagcttcagcatcctccttcttctgacttcaggtgacacctgccttgggcatcttctggcactcctgctatcttcaccgtgttgcagatctcggtgtatgtgccaaggtgtgcgtacggatcttcactcggtaagccatggaatagattcccttggatcaactggatgagggaatgtgggtaagtgatgttggccgcctaaataggtctggctatgttgttgaagtactg

SEQ ID NO: 29710 - DNA, 341 bp, Glycine max
agttactctatgtgtatgttgttagagattatatctcggacgctgtcaaagttttatttggtcctctgaatttttgtgaaaaacataattatttaatttatgagctactttatgatacaaaaaaatttaataactttcttttctatgaaattgtcttaagaatttttaattcgtcaaccttttatttttatttaatctatcatttcaatattcatttgtaaataatatttaatattaatattaatgacaatcatgctaataaagattatttttaattatgcatatgttttctgatgggatatcgttgaagaaagatatcaataactaaaaataatctttat

SEQ ID NO: 29711 - DNA, 417 bp, Glycine max
  unsure (1)..(417): unsure at all n locations
tatgatctatctataaaacattaaagaacccaaacaaaacgaaaacaaattagaaaatgaaatagaataaagtatcccatccaaaacataaccaattttccctttagatttacaccatttttacaccaattaatagttactcagttattgattaaccaattctatggttaatgttgataatgattcgattattggttcacacatggttactacatatcagtaaaagaattgttgttccttaacctatttatataaagtataacccaataattgaggcatgatttaacatttgttattttggatcaccaaaataacaatattacctcaatcaaatctccttttggaagtagtgctctgcatgcatatngtatccttttgtatgatgatattaaactagtgaagcaaataacaccacca

SEQ ID NO: 29712 - DNA, 370 bp, Glycine max
  unsure (1)..(370): unsure at all n locations
agcttgccacccagctcgtccaagcaaactcagctcgctcaggcgagcaaggttgcttcctctagaagcaacagccttctggaggaagaatctggaaggcccaagtgggcctgattgctatttgtacccccttttttactaaatgcacccccctctacctttttttggtaattctttttccgtaacgttacgaaaatttacgaatttcgtaacgatacttattttccttccgcaaggttacgagtccttatggattatatatttactcttttttagcttttgaagaagttacaaaaactcaacggattgcgaaaaatacctcctttcgatttccgtcacatcacgaaatnttcacggatcgcgtaagcct

SEQ ID NO: 29713 - DNA, 437 bp, Glycine max
  unsure (1)..(437): unsure at all n locations
tgttaaaatagtttgtttggttcaaatatttagagatcgttacaatactcagtttcaaaaatatgttaactaaattatttttttatctagaacactaaagtttagttcactaaattatttttatatagaacactaaagtttaatgactttatttgtctattgaaaaaatacagtggtaaattatactctctctttatattcttaattataaaattttttcaactaattcatacctcttaagaaaagtaattagtttttatttaatcacattaaatttgtcaattaattgttaaatcatttcaaaattactttttttttttagagaaaaaattacattcatcttatctttatccacttaattatttatanattaatattggagaaagacntaataagaaagggtatgtaagacaaatataattaatgcatctagaaat

SEQ ID NO: 29714 - DNA, 467 bp, Glycine max
  unsure (1)..(467): unsure at all n locations
cttgacacattggacacctgcgatgtacgcatagttccgtcaacaccttcngcatgcacgcttagagataaaagttaccnctcttgtatgtccaggtgtgacacgggctcattgagcgtcatagtgtaaggctgaacaaatgggctcttctatgacaaaatcaaaatggacgggttgtatttccaattatataatcttatatatatattctccactcggactgatattccactttagaaatctacatcaatgtattactaaaaaaaaaaaaaacttcccttaagctagctaattattgaaacgcatgcaaaaatttttcaaacatatcaattaatcctataataagtcgtactgtaaaaaaattcaccccgtaaaaaagaaccagtcaccgactaaatattgactaatctggggaatttggtgttgctaaacaaatcttattatttattatcgtccggacaaatgtg

SEQ ID NO: 29715 - DNA, 498 bp, Glycine max
  unsure (1)..(498): unsure at all n locations
cccctatgaaaccattgattaccttagcacnnttcgaganaccctacacnntntntcacantggacccacccnatcacacctaccttagcttttgagagctttacctactttcaccgggggacgccgttgtcccttaacatagcttcaacaccatccctcgtgcccattgagactcttactcttggccttcactcccacgacacaatcatatatagctgagccgtacttgtcaccaccactgccgaagcccccacctttaacttgaccacggttagcgtggattgctcttatggaaggacgtaggccgtcactgcttggtgagcgaacaacatgtacaactttcgctgccttttgtagcttctatgatcattaatatcagctctgctcacggtggtgattcctttgatgtttgagtcattggcacacactcaagcttgtgggcgttctggagcttaatcaatcgagaaacggaccgggtgcgataaagtctgtgctcc

SEQ ID NO: 29716 - DNA, 450 bp, Glycine max
  unsure (1)..(450): unsure at all n locations
actcaagctgtaatgcttcatcccatcttctctgcaattcttgcttgaattcattaaattctgtatgggagatgaccacatttctctctggcagcaccttcctaggaacaataatgtcattatacctttcccaggcctcaggagaagtgaacctcgatcggtcatatcggacatgggaaggtgaggcaggtgcctatctcttctttgatgccatctgagaatactaagatcaaacaacaagattagtcagggttatttctcaacaaaacagaaaatataaaactaaaaactgaactgggcgctcagagcagtatgctgggcttagcgcgccttatagaatcttacccatgggctaagtgcaacagactcgcgcttagcctaaagacacaaaaaatatttatctgcatattacgcttagcgcagcatgctgggcttagcctanatatacaa

SEQ ID NO: 29717 - DNA, 418 bp, Glycine max
  unsure (1)..(418): unsure at all n locations
agcttccaatgatgaaaaaaaaatnttggtaccaaacataatgactttgcttgaaaatgatgaagaaataagaagaaaagaagatatttaagagcttatgaccaaagctttaagagaagaagtcttagaacactaagatagagcttggaagaagatgaaaatgggggcctctccctccttgagtgtctcatgcaagatggagagaatgaaggtccatgttttggcttttgtgagcaaatgctgagaaaaggtgcaaagctaagcctcatgctattgatagaatcaattagcaggaatgaatgaacatttaatggccatgttggatgggtccaaggctaccataagtgggttgttttgctttttgaatttttagccagaaatggataaagtacgcacaaacaaaaagggtaaaaactaa

SEQ ID NO: 29718 - DNA, 450 bp, Glycine max
  unsure (1)..(450): unsure at all n locations
gagttcattgttgctgccccataaagcccctcagaacttgtttcagccccattcttcttttcggtccctctttgtttctcattctaatgcttcggttgtggccacgttgacgtccttcaacttgtcacactctttccgaaccttgatggtcatcgtcttgaacctttccttgaccactcacgttctttcaagttccactttcaaggctttcacttcttcgttctcctcggggacctcagcctctccctcacttgaaatctttagcttcaggagccaagttatcctttgcgtccaagccctcaaccatttatgatatttgccaataacaccattgttgcttcctctaagctccttatcctttatttgcactgcattccatgcttttcagactctttgaagcattattacattgnggtcactgaagcctcgtgcgatgaaaagcgtgatact

SEQ ID NO: 29719 - DNA, 408 bp, Glycine max
agcttcggaagaaagtgatgaggtacaatccctaaatgtttagcttgaaagagcctgcgtagtcgaagagaagttcaagtccatatccatcaaagtctgaaaagagtatgatgaactaagggatgtcaatatggccaccgatgaagccttggaatgagaaaccaataaggcccgaaaggaagaacacgaccaaagcaaagttttgaggggctttatagggcagcaatagtgagctcaagctccgaagaggtgaaaggaatcatcacgggtcaaaggcatgatcttgaaggacgagctaaaggtttgccttatgtcgaaaagaaatttgtcccaacagttaagcgagattgaagggaatatgtgggccatcatcgatgagtacaaagaaaagctaaatctagcggcgac

SEQ ID NO: 29720 - DNA, 430 bp, Glycine max
  unsure (1)..(430): unsure at all n locations
tgcttctggggcttctatggaggctggatctntgagcttcaatgaggtcctttaatggtgattttccaccatggagatgcagaaaaagacaaaggagaagaggtgagaggaggcgccatccaccagggaataagccatggaagaaggagcttcaccaccaagatgagccttggataagaagcttggagaggatgcttcaatggaggaaaagaaagagggagagaaagagagaggggggagcacgaaattgaaggaagaaaaagggagagaagtttaagtttgagttgtgtctcacaagactctcattcatcaaagttacaataagtgttacacatgcttctatttatagactaagtagctagcttccttgagaagctttcttcaaaaacttcttgagaagctttttgagaaacttcttgagaagctagct

SEQ ID NO: 29721 - DNA, 397 bp, Glycine max
agcttctttaggtgtgattcccttaagctctttgttggaattttgttcaaaatacagttagtagtagataccgcttccccaaaagtaataaggcatcttcttccctttcatcatgcttctgcccaagttccgaaatgtcatatttcttttctcagcaacaccattatgttgaggtgtgtaaggggctgccacttcatgagttttaccttcatcaccacaaaatttctaaaattcatgtgaattgtattctccatttgttctaagaaccttaattactttcccaccttgtttttcgacctgtagtttgaatttcttaaagatctcaaacgcttcactcttcttattgataagataaatccatattttctagtaaactcatcaacaaaagaaacaaagt

SEQ ID NO: 29722 - DNA, 441 bp, Glycine max
  unsure (1)..(441): unsure at all n locations
tgtcaatgcttcatcccatcttctctccaattcttccttgaattcatcaaattcagtatggtagattaccacatttctctctggcagcagcttcctaggaacaataatgtcattatacctttcccaggcctcaggagaagtgaacctcgatcggtcatatcggacatgggaaggtgtggcaggtgcctttctcttctttgatgccatctgaaaatataagatcaaacaacaagattagtcagggttatttccaacaaaacagaaaaataaaactaaaaactgaactgggcgctaagagcagtaggctgggcttagcgcgccttatagaattttacccatgggctaagcgcaacagactcgcgcttagcctaaagacacaaaaaatatttttctgcagattaggcttagcgcagcatgttgggcttagcctanatctacaat

SEQ ID NO: 29723 - DNA, 410 bp, Glycine max
agcttgtaggattatggggtacccatcatatgtggtactatgtggcggtcgggcgatggtgcaaaacaagttttccacatccacaaatcgcgcataaacccaccatcccctattgcccacctccaactgagctcacgtactcccacgtagcccatatcctcgtttctctcaacaccgggtccccatcaatcctcccaagctttccccaacatccaggtaaaacaacattcaaacagcacaaactatcacagccaagaaaacggggcaaaggcagaaaactctgcccaaaacaccaaccaaaatcacagcttttctcacttaaagaccccagtaacaattccttcgttccagtttcttaaccggtggatcgactcgaaattttactggaagtcttagtacataaatctaca

SEQ ID NO: 29724 - DNA, 445 bp, Glycine max
ctaagcttgagcctaatcctgactcaccataaaccttgacccatggtgaaaatgccaatccttaccctcggaagtaaaaaaagaatagatggaaaattaataggaagcaaaaaaaggagagaatgaaaatttccaatcaaagaggaagcaaaataaggagagaaggaaaatttccaatcaaagagaaagcaaaaagataagaaaaaaaaattcccaatcaaagaatgggagaaagaaaaaaagagaagttaaaagaagaaagctcctggtcaaagaaaccataagaaatgtgccgagaggtccttggaccagacgatatctgaacaatacagaattgtcaccaaatgaacaaaaagaaggaaaggaaaccatgacctaaaagtggtcttcttcctttgattacgaaccaaaatcctatgcgctagcgactatttcaccccgcact

SEQ ID NO: 29725 - DNA, 410 bp, Glycine max
agcttgtacaacccaaggtttgaagcttttagcatttataaggtattataagaaccttacaactaaagaggattttgaatacataaagagagaaaagaaagtccaatttgaaattggtaactttgaggtctttcatcaaacccgactcaatctgttcactttaccagttagatagcgaattctattttttttattttttatttgtgaatcccaccaaacccataacataattagatttattattatataaagaggaattattaattacaaaacacatttatttttagctaccatagtctttaatttattaaattaaattattcatgagtgtctttttggtttttaaggagcgtatatgttattatagagtttaatgagtaaataaccatcttactctgtatgttatctct

SEQ ID NO: 29726 - DNA, 439 bp, Glycine max
  unsure (1)..(439): unsure at all n locations
gctatttaagaaatgatgactaaattcgatcttgtantggttataattcaagtggagtggttcaaaatttcacgtaaagttattttattattttgaacataattttttaatagttttatacttataatataaaatcatttatactttgatgtaggaaagaagcttgacaaacaaagctaatagaagcaagcaagaaataaaatcaattattggcacaaaaatcaatcatgcaaaaggcatttgaaatggtaacatcttttaatattttatattcattttcttataagttatataataataactctttttttttgttattgtttttatatgatatatgaaagtttggtgaaatttatataaaagcatcatgcattagattatactgtttttatattatttaatttgtctnttactatatttaattttaataaaaagaaga

SEQ ID NO: 29727 - DNA, 411 bp, Glycine max
  unsure (1)..(411): unsure at all n locations
agcttcatgatgatgaatcaagttgattcaagtagttntgatgataacaaagatgatgacaaaaagcccaagagaatgatttcaagattgagtcaacaagtttcaagaatcaagagaagtttgattttaagattcaagagaagatgaattcaagattcaagagaagaaatcaagaagacttcacaagggaagtattgaaaagatttttcaaaaaacaaacatagcacagttttgtttttcaaaagagtttttctcaaaattttctaagttaccagagtttttactctctagtaatcaattaccagtttcctgtaatcgattaccagtggcaaagtttgatttcaaaagctttcaactaaatttgcaacgttccaattgatttcaaaatggtgtaatcgattacaagatatt

SEQ ID NO: 29728 - DNA, 429 bp, Glycine max
  unsure (1)..(429): unsure at all n locations
ctttgcatgtttagagatttctagagagagaaaggtacatgttccagagagttttgagagcttttgctgtgaaaagaatggcaaagaactgagcgagaagaggaagccatcttgagagcatgagatgagtctgtgagtgattgcgaggttctagaggtggaggagacatccccactacttgtatttattcaatccttcatttttctcttctctttgttgtaaaggaagcttcccagatatggagagctaaatcatctgttggttcttccttgtaggtacttgatgtaaatacttgtatatctatttaatgatgttttatgtgttccctgtgctatcagtacatcattttagtgtgcttttgccttgatcacgtagatgcatgctttgntaagatcattcaacggtgaaaactagtctgattcttagaac

SEQ ID NO: 29729 - DNA, 227 bp, Glycine max
ttgaaggcactgatcaattttgttcaacaactgaacgtacaaaccatgaagatattcaatctcttctgcgagctagtcggggttgtcttgagccatataatccttgacagcctgttgctccttaattccagtcctcagaagcagtaagaatgcagaaaaatacccaacatcgtttgacaaaggccctgctgccgtgggggacacaatactccagttcatatccctca

SEQ ID NO: 29730 - DNA, 238 bp, Glycine max
taagcctgtggcattcttcataccatacaaatctaaactgcaggaattcaacatattagcattgatacttttcactgtcataaaatcactagacataacactaacaatttatgaattatccaagaataactaaagcttctacatccgctttttcgaggactctctcgaatgttttcacacccagttttacaaacaaagactttattatgaagagacgagaatgatacaatggtaagag

SEQ ID NO: 29731 - DNA, 272 bp, Glycine max
taaaaaaaggaaaaaaggggaactttgaagtggggcttataatactttcattcatcaaagttacaacaagtggtacacatgtatctatttatagactaagtagctgtcttgaaaagcttttttgagaaaacttccttgagaagcttttttgaaaaaacttccttgagaagctagagcttaactacacacacccctctaataactaagctcaccttcttgagaagcatcctttgaaagatttctaaagaagctagagcttagcaacacacacc

SEQ ID NO: 29732 - DNA, 407 bp, Glycine max
  unsure (1)..(407): unsure at all n locations
nttctaatgggagtaagccaaaaaataaccaccgacgctatcattcagttcattcgggcgaggctcaaaatattctgaatagcttattaagaacaagaatgtcgatatatcttgagtaaacaatgaaacaacgacagacatttgtaggccaagtcacacaaccggagttgatacacagaatcttatatagccaatccgcaggggagaaaattaaagggtgatcaatgaatgacaactacaatgcacgagacatttatgcaaagaatagtaatggatgtgatcaataagatatagttaagatttgctacagaacatcatatagatagagcacaacaatttttcaacatgccataaaagctaaaccaatattcacagtaggaaaaagtgttcgaataacaacaaatttc

SEQ ID NO: 29733 - DNA, 402 bp, Glycine max
agccttgagatttcaccctataggtttatattaatgcgtgaacttaatttgatatcatatattagatcaaacactactcattactagactaaaagatgtagctgatggtaaaaataaaattctgttaatttcctcaaagaattttatagttacaactaacttaagagtatggaaattaaattcatcatggagtactgcgagatgttaaattcatcaaattcttgttggaatcgcgttaaccaaattaaataaaatcaacacatcttataaatgtttaaagtcaatatatagttgaacgtcaaaattaactgttgatcatattaaagaattgcaagggagaaagcatatcccttaaaagtctttttttttacataaaataaatagtaagtttagcattactac

SEQ ID NO: 29734 - DNA, 425 bp, Glycine max
tcaggctgctcaattgctccaggttgctgcatggaaggtcaaaggtctgtatggtggctagcagaggagcacaaaccacaaacccttgcgacaggtacagatttctgattcaaggccagttgggttaccaagttaaccaatgcatccagtttgccttcaagcttcttagtttcagatgatgcagatgggcttgtagctacctcatgcactcctctaatgactatggcgtcatttctggcgctaaactgttgggagttggaagccatcttctcaattaaatttttggcttcagcaggagtcatgtctccaagggctccaccactggcaacatctatcatacttctctccatatttctgagtccttcataaaaatattggagatgaagctgctccgaaatctgatggtgagggcaactggcacatag

SEQ ID NO: 29735 - DNA, 389 bp, Glycine max
agctttttattttcagcatatgaagattaatctgtggccaccacatggactcctctaaggacaataacatcatttcttgcactgaattgatgggagttggaagccatcttctcaatcaaattcctatcctcaacaggagtcatatcaccaagggctccaccactggcagcatcaatcatactcctctccatgttgctaagtccctcatagaaatattgaagaaggagttgctcagaaatctggtggcgagggcaacttgcacacaatttcttgaatctttcccagtactcatacaagctctctccactaagttgcctgatgcctaaaatgtcttttctgatggcagtggtcctagatgcagggaataatttctccaagaacaccctctg

SEQ ID NO: 29736 - DNA, 419 bp, Glycine max
  unsure (1)..(419): unsure at all n locations
tctcgcccaattntctataaatagggggagaagtgaagtataaaagggttcagccccttaggcacttctctctctctcgaaatagctgaggaaaatgagttccgtgaagaaaatccaagccgaggcgcttccgtaacgtttctgtaacatttgcatgagtaattacgcgaagattctcgaccttttttcaagattcgtcgttcgttcttcgttttcttcagtcttcaacgggtaagtacctcaaaccaagcttttcaattcattctatgtacccgtagtggtccacattntgtttcatgtattttttattctcgttntcatttactntttatacccccttttgacgtgcttaagccatttatttaagtcatttctcgcttaatctaaaaataaaataaatttccaccgatcgtttgaat

SEQ ID NO: 29737 - DNA, 469 bp, Glycine max
  unsure (1)..(469): unsure at all n locations
ctgacaccattgaacaaccttcggattgacnaccattgtacgtccccgcgattctcttagtaaccctgcagcatgcgagctatttcctctctttgttcgtaaagtatatctggacgtagacatacataatgagcactctatgttgcttatcgacacttgccttaatcttatttttgttaatcttacttgatctcattcgataacaattaacaccaaactctcttatgctacactggtcgtatatctcttaaggaagaaaaaggttcattgggcagtaggcacctacttgccatggctattatgtttggtatatgtggtggatgcagagaataatatagggtcgatctttttacctgcctggacagctgtttcccataccacatcaagaacaaggacgctctctcattggccagtactagacagccacaaataatacccacatttgatagaagatatgatgtgttgttag

SEQ ID NO: 29738 - DNA, 435 bp, Glycine max
cgcctttgcctgatccagattatgaggtacatattgactatttttgggggtgtgaaggtcttaagaaaaccatttggaaacttatgaatggtgatgagaacagccccattgaggaagatctcaaatccagcaatgcacattgcatctcatacaaaataaaggatcttagtaaggtataaatcaacatgacatttaccattatattaatttacataatggctagctgggcgcactaagagataaatgataatcatgtgtattaaaattcaggcaaaaaaagttgatgagttgaggcagaagcttacgatgagaggtctacgttgtcatcctatgtactgcagggggtcatctagaatgcatgtgattcctcttcttgcatctagagcccaggcactcacgtaattaccacttcatccttaacttctaatttatatt

SEQ ID NO: 29739 - DNA, 396 bp, Glycine max
  unsure (1)..(396): unsure at all n locations
agctntgaaggtgcgtagcccaccatttttcatagtagaatactggtaatgtgtctactatcattgtcatcgtttttttttttcattgaggtgccactttgagctgcaaggttctccacctttgggcgtattctttgaaagatttgtgccccctttttgcacatgttctgtagttgcatcctatccgaagacattatactgacactgcctaacgaaggcaaccgctaggtccttccaagaatggactcgggaaggttccaagttagtgtaccaggtaacagctacccagtaagtctttctttgaaggaatgtatcagtaattccttatcttttgcgcatgcccccatcttccgataagacatctttagatggttcttggggcaagtagtccccttg

SEQ ID NO: 29740 - DNA, 421 bp, Glycine max
tggaaggacatctctaaggattcttctgtggcttccacatatggtgtagaagaaggacaacttacaaggatgtcttcctccaccaatactatgattaactgcctttccaccacaaacttcaacctttggtggagcgttgaaggaactaccccgaccgagtgaatccaaggtcggcctaaaaggcatctataggccagattgatatccatcacttggaaagtgatttgacagatgtgcgatctaatctgaattaggagatcaatctccccctttacgtcccgatggctaccatcaaaatcccacaccaccatggagctcggcttcaggtgtgatgcattgaaaggcagtttgtccaacgtgcttttgggcatgacattcaacgacgagccgtgttcgataagaaccttggccacgatgtggt

SEQ ID NO: 29741 - DNA, 417 bp, Glycine max
  unsure (1)..(417): unsure at all n locations
cttaccaccataggaagccatggataatagtttgaatgaaggaaaagatgagtggagggagagggagagaatgagcacaaaattttgtgcctcaaatgaggtatgaactttgaagtgtaattctaaaaagatcaaagttgaaaaaatgcacacacatgacctctatttatagcctaagtgtcatacaaaattggagggaaatttgaatttctattcaaattttacttgaatttgaaattgaatttgtggagccaaattttggagccaaaatttcactaattatggttagtggaatttagctatggttcatcccactaatccaagatcaagtccaagattctccactaagtgtgcttaggtgtcatgaggcatgtaaagcataaaggacatgcacanagagtgattatatgatgtgac

SEQ ID NO: 29742 - DNA, 431 bp, Glycine max
  unsure (1)..(431): unsure at all n locations
taaccataactctcatactattcatcaaaacaaaaaagtacacaatgcaaataaaaaattacattattgaacaatgtcattcatgtatcaagaaatagttcagatggggcaagacgaaaattgtatccaaccacttgtgcatttttataattataataataacccttaatcagtgtgaagaagaaaaccagtacagtaacgtagattccttttgtcatttgaatccaacgggttatgcatatctaataatggaggaaaataatccaaaccacaaatgcatatgtaataaatccaacaagctatgcttgatgtgcaccaatccagatgcgaaaaacgcgaaaccaaaacaaccaagaacataaacttcctcagtactctgacttaagtaaaccctttggccttcanatccatatggcatattcaacgatgac

SEQ ID NO: 29743 - DNA, 318 bp, Glycine max
ttcaacattcaattgtgagcgtctctatatatgactagactcaatcagacatccgagtgaaaagatattgtcgttttaattggctcagaggtgcaacattcaaattctagcgtgtcgctatattacgggactcaatcagacatccgagttaagagttattgtcgtatgaattggctcaggggatcaacattcaattttgagcgtctcgatgtatgactggactcaatcttacatccgagttaacagtaatggtcgacagagatgactcacaggtttaacattcaattacgagcgtgttgtatgttactggactcaatc

SEQ ID NO: 29744 - DNA, 394 bp, Glycine max
  unsure (1)..(394): unsure at all n locations
gaatgcactgttcaatggagtagacaagaacatcttttgactgatttacacttgcacagnggccaaagatgcatgggagatcctgaaaatcactcatgaaggaacctccaaagtgaagatttccagattgcaacatctggctacaaaattcgaaaatctgaagatgaaggaggaagagtgtattcatgacttccacatgaacattcttgaaattgccaatgcctgcactgccttgggagagaggataacagatgaaaagctggtgagaaagatcctcagatccttgcctaagagatttgacatgaacgtgactgcaatagaggaggcccaagacatttgcaacatgagagtagatgaactcattggttctcttcaaacctttgagctatgactc

SEQ ID NO: 29745 - DNA, 414 bp, Glycine max
acctgcggcatgctagcttttgaattccctcacatccttctcttccacttcagagaaatgcaactattcgcgaaacctgagcctaaaagcaacaacagcggaagaagcgaaagaatgaaaacgcacgaagcaaaagaagcggttagaggttagcagttacatagagagttgggtaccgtgatggggttttgttgttggggagagagggtgtgggtggcgtgaaccctaacagcaagggattgggagtgttgggaaagtgaaatgaggaaggaggagggagaagaatggagtgggaaaattagggttttggagaatgggtcccagtggttgggcggcatcataaaaaggtcgtggctgcacactacttactccaactggaatggtgagggaagctatcttaatggggaggatgag

SEQ ID NO: 29746 - DNA, 438 bp, Glycine max
  unsure (1)..(438): unsure at all n locations
tcttctccatcaccattttcaaccctcattgtcataattcagccaattccccattgctctcatttaaagacactacaaatcaaatcaacaatgcacacactttcatgcacaaagccatgcatttccttagcatttaaaccattaataataaaaaaaaaaaatacttcgttgctttcaccattttccagtacaaggggtcatgtgaaagagttcattttgacctttataacactctcacaacaatcattagggcaaaaataaaacattttcttaaactaaagaaatggcatcatatagtattacatcaaatttttccctcacaggttttcacaatatttcttttccacaaaagggggtaaattggtaattccatgatcaagtatatgatagaacataatctatcgntaaaattcataggaaaaattgaaggaaaagtga

SEQ ID NO: 29747 - DNA, 411 bp, Glycine max
gcttcttcattcaggtatccattcagatacgcgctcttcacatccatctggtacagcttgaatttgaggaagcaagctacaccaagtaacaatctgatggactcaagtctagcaacaggggcaaaagtttcatcaaagtctacaccttcaatctgagtgtagccttgagtaacaagtctggccttgtttctggttataacaccatcttcattggttttgttcttgaagatccacttggtgccaatcacattagttccctcgggtctaggaactagctcccaaacttcattccttttgaattgctccaattcttcttgcatagcattgatccagaactcatcagttagtgcctctttcacattcttgggctcaattatggagacaaagcatgaattggagacaatctcaatc

SEQ ID NO: 29748 - DNA, 372 bp, Glycine max
cccctcgttcattactgaccaagctgaaattaatcacaatctcttgcgacatatcctaactatatgcaggaaacaagtatgaaaattaggaagagagaaagagaagctgggctgcctcccactaagcgctcttttaacgtcactagcttgacgcgtcgggctgtcatctatgatccaacaaagttcctacttcaagagaccttcttctcaagtctcttttcatccatcacatgcactgtcaaacagacattgtggcaacgaggatctttgtcctcacgggacaaatcagaagaagagcttctgagcttctatgcccatctgcagtatctgtttccccatgtccaccatgcaacttacaatagacatgaatgg

SEQ ID NO: 29749 - DNA, 257 bp, Glycine max
  unsure (1)..(257): unsure at all n locations
aaccactatctctgggccattgaagtatgattcccacaacacaaccttagagggtaaatgagaactatataaccttctcatatattncgtgccaggatcatgactggtgctgaaacatctaatggacacacacggaaatgagagaattacattacattatagaatcatgttcacgccatattgcgcatcgtggtattaaaacattattgaagaaactatccacttatgtgcaatacatcattgtgaccaatctaaca

SEQ ID NO: 29750 - DNA, 380 bp, Glycine max
tttttctaaattgtaaatttcagttcctagataaatatttaagttgtaaaagtcctcaaaaatatatttagttacaacttttagctcctgccgtcattagatgatgaagtggtgtcctgtgacctctgctgcgccctggtgggtggctccaagtggcttgtcaggtgtcaaagcttgggtcaacccttccacaaggaccacttcatcctcataaattttataattatataatttatttttatttatactgtgcactattcaccaaataaagctcatgataaaaagttatatatgtatcatttgtgactatatgtcagagatgctacatacatcgaggcttacactacatcaagtatgcatcaaacgcatgtttaaagtac

SEQ ID NO: 29751 - DNA, 398 bp, Glycine max
  unsure (1)..(398): unsure at all n locations
gcatgcaagctntttctataaatatttaacatagttgcatttcatgactcaacaatatataatttttcattacaaaataatgtattaactctatgtttaatagcttcatatacacaaattgctaatcatttgagtactaaattaactatggtaaattaaataaaaaatatatgacactataatcaaatatatgttttgtatataaatgaaatgttcaagttatatttatgttcatgtaaatgttcaagtaatgtttgacaattatgatacattcatgaagcatataagtgaaatgttgtatgtttagcactcactaagaccctgtctcattagtttagtgtgtatgttccttaggtaaagagatctagtccaagagcatacaagtgcaaagcataatt

SEQ ID NO: 29752 - DNA, 428 bp, Glycine max
  unsure (1)..(428): unsure at all n locations
tgtccataaaaataggcttttgaagtttgtcatttcatttcctcactaagtaaaatgggtcatttttaaggtccaacgccttaaaatgatcacttcttaaagtaaaaaagaatcacttgataagaaagaactatgtaggtctgattttctcatcccaaattgaggaatacgtaggagcaaagggaaacacccttgtcgaccacaaaaaaggaaaaaatataaaaaggatataaggacataaaaggggacgtaaaaatcaaagtcacgtttgcacattcgattaaaggctgccgtcccttgngacggacgtgtggggtgctaataccttccccgtgcgtaaatacaactcccgaacctttcaacttaaaagttcgtagatcgcgtctcttccggtttttccgacgttttcctcanataaacgttggtga

SEQ ID NO: 29753 - DNA, 405 bp, Glycine max
  unsure (1)..(405): unsure at all n locations
agcttgtgatatttttactatatatgtgtgtgtcttcgtttatctctacctgtttaaaaatgtgataattcactcctcatgtgttgtttatgtttggatcatgtgatgatcttaaaccttgtgtttgtgagagcaaatggctaggtgaattactttaagaaaccttgtgatggaggactccgagacacaatattttgataggatgtaacattggaacaagagtttttattttatttgcatgacgtatcaaacatgtcattttactttatttgataaacttgaacagtcttgttttaagtcataaatatttctaagaaattntatttggtaacagtgaagcgaatgtgagcattacccacgtcgactgatttacgattttattgaataaaattgatttaattagat

SEQ ID NO: 29754 - DNA, 391 bp, Glycine max
  unsure (1)..(391): unsure at all n locations
tgttccacctaaatagcataggttcttcattggtaatcatcctacgctgcggnngccaantngntaatctatcccacacccaagcatggaccaagtagcaacagggtggccaaagagttaactacaattccaattcttcattaccagtcaaataaactattgagttcttcgataaaccaaaatcatttcatatgtcggataaaactgtgggtcacaaagctgattctctctagcaagatgaacatcaataaggaaaacaaactttctcaccaagccactacgagagaagccattcattgctctgccagttgcttgggatgcttcatgctctatttcactcccactattgacaaacatacatccatgctaatgcttatatagaccacactct

SEQ ID NO: 29755 - DNA, 230 bp, Glycine max
atgttacagatgattatgcccttaatactgattgggatccagagtaaatcttggaaatattttttaatgtatctttggtaattaataattacatgataattggcgaccacgttggggattggaacaagcgatttttttgtttacacccccattattggtttttttacttactgtctaaattaatcttttaacacccctggcatgagtactggtaactttttgtttttttt

SEQ ID NO: 29756 - DNA, 345 bp, Glycine max
ctttcgccaaattgagtttcttcaacgagtatcttaccttttgtcaggatcctctccacgctcggtccgctattttcttcgtttccatactcgccttcttaggtaacaacaaacttcgaatttaggaaatagatttaatatttgaagttcgcattagatcaggttatgaaatatgaatagctctaattaatggtgtgtgcgtgagtgtggatgccattgatttggctttgcctttttttaagctttgtacgcgaattttgaatgtgatccgtacgccgccgcggcgccggtgaagcaagtgtttgtgcatcctcctagtgccactcgcgtagtgcttcctgatgg

SEQ ID NO: 29757 - DNA, 400 bp, Glycine max
  unsure (1)..(400): unsure at all n locations
cacctgcggcatgcaccttnagctcngacattatagatttacccttctcactctctctgtctgcgatactaataatatttaataatttttttttacccacttcatgtgcaaaatatatcatctaaggcaggattattgcttttaatgaaagactttaaaggtatttatttcattggtaataaaagaaaaaaatacaatgaaaagtttcatgagaaacataatttatttgtagtcttagaaaactcaacagtttgaaaagctagaaaggacacttttacatggttttgatccttgaataacgcggcatctatgttgcgtttgatggagtttgtcacgagtcacaatgaagtaaggatgagtcagatgttggaaagcaaaaaaactgatatggctggggaca

SEQ ID NO: 29758 - DNA, 429 bp, Glycine max
  unsure (1)..(429): unsure at all n locations
tgaggaagtagggtggttacgttcaacaactccatcattctcatctacaccaatgtccatctcatcagcaatcaaagattttgaactctggccaacaatattgtgtttaaatttttctacactcaaaccacccttgttcagaattcgtttatcatgttcttttgcaagaacagaacccaagcaagcttgttcaggacaatcctgcaccttggtgcaaaggcttgccatctggcacgacccatcattgattgccatagattttgaatcttcactgtaatcaactgaagaaacattggttttcttcaattttccctccaacttaattgaaaaattctcaccttcactacaaggtgcgggtggtactgagaatgcatcttgagtaacaggcacggngtcttttatagtacttttaggtgcatcaatttcctg

SEQ ID NO: 29759 - DNA, 374 bp, Glycine max
agcttgttaaagaacttatataaaatcattaacaagcttgttcgcacatcgtccgcgtgtatgatattcactccacaaggtttgaagtagaggagaccttcaaccctataacgcaacgtgacggacaaaagtgggcagttaacttgaatggccgttattgtcaatgcggaagttattctacgcttcactatccatgttcacacattattgcagcttgtggttacgtgagcatgaactactaccaatatatagatgttgtttacatgaatgagcacatcttaaaagcatactccgcacagtggtggcctcttgggaatgaagcggcaattccttcttctgatgaggcatggacactaatccctgacccaactaaa

SEQ ID NO: 29760 - DNA, 433 bp, Glycine max
  unsure (1)..(433): unsure at all n locations
tatgttattcgatgatgtgattgtcctttttcttgtcttagaagatgtgactgccttgtttccttttgtaatgtagtctctacttgtagtgaccatctgttatccctatatatgtctgaatagttagctaataaaattaaaagttgctagatggtggatgccattcttcccaacatatgatgcctttttgccttataataactaagaaaaactaatttcttttgtcagtggacctaaagtttgaggtttagtttagttgctttattcttagattcgtcctgatgggattaatactatgtagtctggtgaaatgagacttactatgactgacaggattaggggctgtagtgtctaaaattcatagatcagaataaaagtgaagcttacctanatcaatgaagctgaatggtttggtgagtggatgcctcacaaa

SEQ ID NO: 29761 - DNA, 400 bp, Glycine max
  unsure (1)..(400): unsure at all n locations
agcttgtangattattgggtacccatcacatgtggtactaagtggcggtcgggcgatggtgcacaacaagctttccacatccacaatgcgcgcataaacccaccatcccctgttgcccacctccaactgagctcacgtagcccatatcctcgtttctctcaacaccgggtccccatcaatcctctcaagcttccacaacattcaagcaatacaacattcaaacagcacaagctatcacagccaagcaaaacagagcaaaggcagaaaactctgctccacacatcaaccaaaatcacagcttttctcacttaaagaccacagtaacaattccttcgatccaattcgttaaccgttggatcgactccaaaattttactggaagtctatagtgcataagccta

SEQ ID NO: 29762 - DNA, 370 bp, Glycine max
tgtacgagtattgggaaagattcaagaaattgtgtgtgagctgtcctcaccaccagatttctaagcaactcattcttcaatatttctatgagggacttagcaacatggagaagagtatgattgatgcttccagtggtggagctcttggtgatatgacccctactgaagctaggaatttgattgagaagacgacttccaactcccaacaattcagtgcaagaaatgatgctattgtccttagaggagtccatgaggtggccacggattcatcttcatctactgaaaataaaaatcttgaaggaaaacttgatgccttggtcaacctagtaacccagcttgccatgaatcagaaaacagcagtagtcacaac

SEQ ID NO: 29763 - DNA, 571 bp, Glycine max
  unsure (1)..(571): unsure at all n locations
cacactgcgccctatatgagcgatcgcgtaccaatagagcaagcgtggcctcccatgtcncgnngctacccacactacnacanncacgcacgccnttgagacgtgcaagttgaagcccatcggagnnaccgacgcnncnnnggagnacaaccgcgggaccaacagcagagagacggaaagaacgaatccgttttcagacaaggccggaaagaccatacaagaggcctaacgagtcccaactcagagggcgcagtagagctatcatatgccgacaagagccgagaagcccatgaaccgacccgggggcggagcaggagacagccaacgccagggccatgacgaacaatcggcgaagtgctggactcccgtgcaaggtaagagcaaaccgatccatccacatgggagccacagggcggaaagagtcgaccacccaacctcaggccgcatttccgctacccccgagcatactcaaccgcgatcctatgcccgcgggccgcggctagacccaactcttgccggacatgacgatgacagcgacatgtggggccctgcacgcgataacgctgagacg

SEQ ID NO: 29764 - DNA, 374 bp, Glycine max
  unsure (1)..(374): unsure at all n locations
ccaagctntgggactgaggacctatataacattatcaaggttttagtttagggagttttttttcggagaggaaaataattctaggattttagaattccagtttttattactgttcatgcacactgttcacgtagaataaaatttattttttgcaaatcatctctaatccatacatcttttaatattatgctctttttattttcttttgatatactttgtgctttaacgacttgaattcaatatgattttgtttatcaattatttttggatttatacattacttatacaaaattttataagtntctttttttagttaatatttgactaggttttaaaataattaattaaagatgtctttaaacagacttttaaat

SEQ ID NO: 29765 - DNA, 450 bp, Glycine max
tgaccctcgagcccatccatgcatctttattggcttgataccacatactcaaaggatatcttgtctatgaccttcactcccacaatattatagcatctcgcaacatcgtcttttatgaagaccatttttcgttatttcatgaaaaccaagcctcaaacaccacacatacctctctttccccaactccattttcgagcaaccccgaaaattttgactctcctatcacacccattgtcaacccgtcttcttcacatgctcacgaccctcacctacgacgatctacgagaccgaagcatgcacccacctacctccaagactaccatcgtgatctcacttctctcactgttaccacctcgcccaatgttcggtatcctcttaactccgtcttgtcttactctcgtctctctccttcgcttcgtcacttcgtcatgtccatttcggtatctactg

SEQ ID NO: 29766 - DNA, 466 bp, Glycine max
  unsure (1)..(466): unsure at all n locations
attgacaaccttgagnacctttggaggttctcgaganttcctgcaggcatcatcgctgtgagcaaattcaaacgacaatgttttattacttttatgtccgcatgaatccggtaatatatcgagatgctcgctattgaaaacagctgctcataacaaacgctaactcccttaactattaactaggacgttcgattaacccccgcaatatgtcgagacgctcgcaagttagtacacaatctctgcacatgttcctaccacgagtacgtcatgctcggacgacccaacgaatcccgcaagatatctagaagctctgaactgaaaacagaagctcatagcagttgcaagccgctgtaactcttaacttggaagtggggatgagccccattatcgatgtgagcgcggatcttgaatctaaactgccgccaaagtcgagcgacgcttagtggaacgaggagtgatattgacn

SEQ ID NO: 29767 - DNA, 448 bp, Glycine max
  unsure (1)..(448): unsure at all n locations
tgagcaaattcaaacgataataacttttaactcggatgtccaaatgtttcccgtaatatatcgagacgctcgaaattgaaaacaaaagctcgtagcaaatgcaaaccacaataacttttaactccgatatccgattgagtctcgtgatataccgagacgctcgaaatngaaaacaaaagcttgagcaaattcaaacgataataacttttaactcggatgtccaaatgaaacccattgtatatcgagatgctcgagattgaaaaccgaagctcgtagcaaatgcaaaccacaataactttntactccgatattcgagtgagtcccttattatatcgagacgcttgaaattgaagacagaagctcgtagcaaatgcaaaccacaagaacttttaactgggaggacgattgagtccggaatatatcgagatgctcaaaattgaaaacagaa

SEQ ID NO: 29768 - DNA, 371 bp, Glycine max
tagcttcctttcagtgcgtcacgtttaaaatcgagctcgatggtggtgcgatcctttgatggtactcggcgggaagtaatgggggaaatcgacattcccattcagataggcccccacacttgcaatgtggtgtttcaagtaatggatataaatcccgcctatagctgcctcttgggaagactgtggattcatgccctgggagtggtcccttcgacgcttcaccagaaattgaagttcgcagtgggtggacttttagtgatagtgtcgggtgaagaagacatgttagtgagctgcccctcctccgcaccatacatagaagcggcggaagaatcattggaaacgactttccaatcctttgaagtggtgagcta

SEQ ID NO: 29769 - DNA, 433 bp, Glycine max
  unsure (1)..(433): unsure at all n locations
ntntggagtagaaacatgggaccaactcattttatttgtaaaaaagaagtcgtatccagtcaaggtctgagagaccatacaattttcctaacgatttctaattatgtgggccattaagtctatcatatgctgacaatagccgagaagcccatgaatctcttcgggggcggagtaggtgtctgccatcgccttggccttggctaacaatcggggaagttcttgactcccgttcaaggtaagagcaaaccgatccatccacatggttgcctcttggtgtaaagagtcgatcacccttcctctagcctctttttccgcatacacttgagcatactcatccgtgattctatgctcgtgggccgtggctagacctaactcttcttggtacttggcgatgatagctaacatggtggtctctgtctcgcataaacgctga

SEQ ID NO: 29770 - DNA, 411 bp, Glycine max
agcttctgctttggccgctcctcacggtctcaaacatgaccaacattgtggtccttgtaatattgaataagggaaaaaaacaatgaaatcttgtactatgttgaatgattgaaagtaaaacatcaaatgtgtatgaaatgtgtttagatttctcttaaatataattgtcaattgttgcttccaagtataagaggcgacagaggtgggcatatgcattcaacgttgatgttaggatttgcatcaggatgctcactatcaaacatggagcatacttcgataagaaaggtaagctcaattgtcactaatagtatgcctaaaaatggtacattaaggaggataagatctccatgatagtgaactctgtcatcgcctctatggaaaaaccattgccttgtcagatagagcattact

SEQ ID NO: 29771 - DNA, 350 bp, Glycine max
ttgaaagcggagatcgaaagaatgagagtcgtcaaggataagctaattatgacaatcactagggttaggaaagaatgtgatgagctgagaaatgtcaacatgactatggtagaagcattagagcaggaaacaaaaagggcccgaaaggaagagtggagcacgaacaaattttgaggggctctatggggtagcagcaatgagctcaagcttataatggctgaaagggatgagtcaagggtgaaaagcatggtgtttgacgataatttaaaggcttgtcaaaggtcgaagagaagtttgacggaatagctaagcagaacggaagagagtatgttgaaaattattgatcaata

SEQ ID NO: 29772 - DNA, 361 bp, Glycine max
  unsure (1)..(361): unsure at all n locations
tgcaagcttcatgatgatgaatcaagttgatttatgtagttttgataatgacaaagatgatgacaaaaagcccaaagaatgatttcaagattaaatcaagaacaaattcaagaatcaagagaagtttgatttcaagattcaagaaaagatgaattcaagttccaagagaagaaaccaagaagacttcacaagggaagtattgcaaagatttttaaaaaacaaacatagcacagttttgtttttcaaaagtgttattcttcaaaatttctaagttcccagagtntttactctctggtaatcgattactagtttcatgtaatcgattacccgtggcaaagtttggattcaaaagttttcaact

SEQ ID NO: 29773 - DNA, 387 bp, Glycine max
ataccaccagcatcaaggaattagggcggttgatggaacctctccaaatgctagctttccgcaagacttacggaaaaatcttagagttgaccttagcagaggtatccatagaagccattgcatcactcacccaatactacgaccagcctttgagatgcttcacattcggagacttccaattagtaccaaccattgaagaatttgaggaaattctaggatgtcctctcgggggaagaaaaccatatctttcatccgggtgtctcccctctttgagcagaattgcaactgtggtcaaggattcaacaagaggtttggaccgcataaaatagactcggaacggcatagcgggcctaccacggaggtacctagaagacaaggcgaggggta

SEQ ID NO: 29774 - DNA, 402 bp, Glycine max
  unsure (1)..(402): unsure at all n locations
agcttatctaatgcacatatgaggaaatttataatatatgacaaagatgtcttgcatcttttattcatttgatgtaatgtacgccttcaaatatattagatttcaaaaactatttctaattggtttgtgttcttttattaatattttcagggttgaggatgctgttgttcgctacctgacccgaaaaaatgctcgaagtgatgctcctggaaacatctgagagataattgtgaaatagtaattgtttttcacttgggtggtggaggtggttagttttctgataccactttaaggtcttgtcccaacattgctaaagtttctattccatccttcatatatatgttntggagtagagtactgacagtacgttgactcgagaattatctgatcgcccctggctca

SEQ ID NO: 29775 - DNA, 428 bp, Glycine max
  unsure (1)..(428): unsure at all n locations
tcaagctagttntatccacatagtggatatcttcccattacaaacttgggagtttactcaataatcatccaaaaacactttttccaataatttagttttctcattgaatttcaatgcatttggttatatgaattaataaaggagaataaatgaaataagaaaaaaattattgtttgatttgtaaatgaaactgaaatgaaataaatgtttttaataagttttaatattgttttaagcaaaagtgtgggcaacaaaaggatatactttttagaataaaaaatacatttttttaatttgtcagtatatctttatgagcatttaatttgcaatattttgttctttaaggatatctaagttatttctattaaaaaaggatatctaagttatttaatgaacatacctcttctttttccttattcaactaaata

SEQ ID NO: 29776 - DNA, 374 bp, Glycine max
agctttagagaacttgttgtaatcgattatgataactctattaattgattaaaataaagagtttttgcctctgaaaaaaaactttaacttagaaacttttcttcacttacactatgatgatgcacaatgcaaaaccaatatcaaatgtactaagatgtagcaagcaagctaacaatcaatacaaatgtcactcaaaggagttggacatgtaaagccaaaacttcttctaaaacttgttcaaattttagccttgagcttcaagctttagccttaggttgttccatgttgctgctcccttatctttaacaatggtgatgaaccacattagcgattttggcgagtatccttcattctttcactgccacatcatgtcg

SEQ ID NO: 29777 - DNA, 404 bp, Glycine max
  unsure (1)..(404): unsure at all n locations
tcttatccaaggctcatcttggtggtgaagcttcttcttccatggcttattccttagtggatggagcctcctctcacctcttctcctttgtcttccgctgcatctccatggtggaaaatcaccattaaaggacctcattgaagctcaaagatccagcctccatagaagccctacaagcaagcttccatcaatagtttcattcaaagattcattggactctattggaatgattttttatgatagtgagtcattcatttcaaggaaataggatatctatgactattattctttccaaaaaattcatattgtgtccttatcatcttgagtcctcttacagaagaagatttctaaagattctgttggacaagtggcctcaataacttangaggggggagtgaattaag

SEQ ID NO: 29778 - DNA, 359 bp, Glycine max
agctggtccccacttaatttaacatcctttaatcccactggggtaaccgaaaacccaaccagccggtaaagggcggatcaatccagggtcattttcaaaatcccaacttacacctctataaatggctactcgtgcccctatccttttctcgcattcatctcaaaagtaaaagaaaacctctcgatttctttctctctctctaaaacacgatttccaattttctttctctagaaatgggaacagcaatccttcgttcccacgattgcctacaaagccgggtcctccacaacgaagccttcgcgatcgccacgtcacgtgttgcatcgcgaagacaccctaactctaacaacaataaccat

SEQ ID NO: 29779 - DNA, 427 bp, Glycine max
  unsure (1)..(427): unsure at all n locations
tgatcaacttaattgatttagacagatcatacatcctttctacttttagaattttattagatataatccctatttcaggtagataaaggaaccactttgtgaagtactaaggaaaaatctgaggaactgtcccactcaagctcacaatgcattcaaacacaatcaaaagtacatcttttagggggcggggaattatagagaaaaaaaagtttctgaaaaatgaataagaacctaatattcatccctcacattttattttaggttattaattagcaactatgtatcattctctagaaaggcggggaaattcaagagtggtctagatgtatgctacaagtacgccttgctggttgataacaacagctactctttcctagacctgataanaagaagaaattaaactagtacttgccctttctctaatgca

SEQ ID NO: 29780 - DNA, 343 bp, Glycine max
agcttgaaataaggaagtgtggaagggtgagacttcctacttttattcgttgaccatagagtggtacctggagatatgtcgcgggggtcaggagaccttggggatgtcaagtggggtgctattgcccaaaaccaagcttgaccaatcccgacccaacccgggcatagtcagtcagtgagaacctgtgatgtacctaaacaggcgagctcctggcagtcaaccgataaaagaacaaagaccacaaagcaaggagacttgtgtggtggctggccagctgtgaatcttgagtgatatatgggatatggtctctggtaatcgattaccaacggtgggtaatcgatta

SEQ ID NO: 29781 - DNA, 417 bp, Glycine max
  unsure (1)..(417): unsure at all n locations
nttagcaacattnttatttaatgttatcgaaaaaatattcctaatagccacatgtgtagtagtgataaatcatgcatcttaatcgttattttgaatagaataagaaattttagcaaagagtaaagagaaatacaaacaagaaagtctacgcacaatgaagtgcagaaaaaaaaactaagaatgcaacaagaatgcccaatcccatttatcatagagcttagtgaatctaagattcacattggttccaaacactaaagaattaagtttagtaattttggaaatcattgagtactatttgttatatttatttgaatgcattgatgtgttaataatattattgaatgctttctttattgagaatattacatcaataaattgtgggtgatcttttagaatttattntattcactgggatta

SEQ ID NO: 29782 - DNA, 400 bp, Glycine max
agcttgcattaatagtctcaaatacagatttattggtgaagaggaaaaactgatcagaattcaatagtaataacaaaacctcaaagagagttatgcttgatcctcaagagaaaacaacgttggagacttagccttccattaatcagttgaaaacaaaattgtagattgaagtagaaatgaaattgcagaaattgaaattttattctacgtgaacagtgtgcatgaacaataaaaactggaattctaaaattctagaattattctgctcttcgacaaactctctctaaaactaaaaccttggtgctgttatataggtcctcagccccaaagcttacaaatctgttttaagtgcaagcccataaataaaataaaatctggacaagataagataagattggat

SEQ ID NO: 29783 - DNA, 403 bp, Glycine max
  unsure (1)..(403): unsure at all n locations
ttaccttcacaaacacataaacacattactccattaatgcatcacacgggactctatttgaaatggaacttttactctgtgccttgcaggacttgtgacccttccacctgatagttcatcgcaatcaatagacaaaatatatcataagatataagtctcaaagttcataaatagagagagccacacagtcaaaataagcaaactaaccatgaatgcaaaaacaaatattgaaataaataataccactattatgtgtagtgcagctttccaacttttgtacctaactgaaggagactngtcaatcacttgagagcctgtagcagatgcaatactgtaattaatgaagcttcattgtgagaactgtggtaaaacctatagtgacagacaattagtcatcattata

SEQ ID NO: 29784 - DNA, 320 bp, Glycine max
agcttgtagagccgtatcgaggcttactttgacggaccttgggttttatgagcttgtgaaactcaccaaggcagaccttgggtttggtgagcttttggagaatcaaccaaagatgcgtgcatcctatattatgtagcacgcgtgccatgcttttgcatacatgtcacttatggagcggcatgtattggagtcgtagtgtcgtgctcttgcatacatgtcacttgtcaagtggcacgcactacaaacatggtggcgtgattttgcatacgagtcactcatatactgacacgtcttggagacgtggtgtgtttggagaactg

SEQ ID NO: 29785 - DNA, 319 bp, Glycine max
tcagggatttcaaattccgcctgacaaacaataaattatgttttattgtaagtaaataacaaaattagactaataaagaaaatcaacgaagaaaactcaaatacctgaataccaggtgtcatatgtgacgtcgaccttatcacgagcgacgatccccaaatatgttcttaatttcttcttgtggggaccgtcggccttgccagtatcaagatcgacgttaaccacaggtctttctgccccaggtggtctagaggccaatgatgtagccatgttgccttgcgtgttcgcttcaacgtatatggagatgctgatgcgtctg

SEQ ID NO: 29786 - DNA, 414 bp, Glycine max
  unsure (1)..(414): unsure at all n locations
agcttgtgatttagttnttgatgcagcatgtgagggaaaacaattcttaattgttggtacaaaaaaaaaagcagcggattcagtagcacgggctgcaataagagctcggtgtcattatgttaataaaaagtggctcggcggtatgttaacgaattggtatactacagaaacacgacttcaaaagttcagggacttgagaatgcaacaaaagacggggagactcaatagttttccaaaaagagatgccgctatattgaagagacatttagctcatttggaaacatatcttggcggcattaaatatatgacggggttacctgatattgtaataatcgtcgatcaacaagaagaatatacggctcttcgagaatgtataactttggaaattccaacaatttgtttaatcgatacaaa

SEQ ID NO: 29787 - DNA, 378 bp, Glycine max
  unsure (1)..(378): unsure at all n locations
tcttacaagcatacggctntctggatgtagatgatgatatctatacagatggatcttatatatctatatatctatagatagatatatagatatagatatatagatatagatcatacaatgaagtaccgcacgagtgggtatataggaatccaaatctgccgaatcactcatgttatgatcttctacatcctaggtcttcccgttccttcatctggcttatgttcttcatgtagcattcagactgaatgactctatgaaattacgtcgctacttccacatggtacgggtaacgtaagagacatctctatttttcccggtgggaatccttagaattaccacagcttagctttcaattcgcctctgaccatcaaatgaaat

SEQ ID NO: 29788 - DNA, 102 bp, Glycine max
agctgtgagcctctgacgttccttagttttctgcgtctatcatacatttttttcatgggatgaaagataccacaatcattctgcgcctctgaatgcagatat

SEQ ID NO: 29789 - DNA, 429 bp, Glycine max
  unsure (1)..(429): unsure at all n locations
aactcaaccttctatgcgcttcctaganagaggtagaaggaaggatccttggactcttttnttcactccagcaaatgacacttttctcccctagtgtgtcatatgagacttcaatgaccttttatcaaacgatgaaaaaattggcttgatagaccatctaaaacggcttcttattggcttcatataggcaatcaatgactataatcattgcattgatgatatgaacatatggggcaagcatcttcaaaggcagttcagagaatagattgtaacttgcagaacagaccttgaattccttcatcactctcaaacccttgatgatggtattcaataccaagcttttttggaaaagctactccatctggttgctcactaataattatattggagacaaagagctaagatctactggctgagagatggagacac

SEQ ID NO: 29790 - DNA, 404 bp, Glycine max
agcttggacttcctgtgttttgggaacctctccttcctcaggtgtacccaaacccaatcacctggttcaagcatgactttctttctgcttttgttggcttgccttgcatagctcgcatttttcttttcaatttgggccttcacttgctcatgcaacttcttcacatactcagctttagcctgtgcatccttatgcttaaacatagcaatgttaggcataggcaacaaatcaagaggagtcaaaggattaaatccatacactatctcaaatggtgaacaattagttgtgctatggacagcccgattataagcaaactcaacatgaggcaaacaggcttcccaagatttaagatttttctttaaaacagtcctaagcagtgtgcctaaagtcctattgactacctc

SEQ ID NO: 29791 - DNA, 378 bp, Glycine max
  unsure (1)..(378): unsure at all n locations
ntcttgttttggtgttgcataaaaaatgtacaatgtatgtcggctaggtttttttgtgcgagcccaaccgacgttttgtttcggccaaaactggcatgtttccatttattcggccacgaaaacattagcccatctcggcaaaaaaatatttttcaccgatattgattgaaaaaaatgccagtcgacgtccgccaagaaagataaccgatcgaggtctaaaaaagaagcatcaccgcatgacgccgatcgaacatttccttaccgacatcataaatatttcattaagggattgaatagaaaactcaatagccgacatcggtcgtgaagtagcccgactgatatttttcagttgacattgcgcaatttctttttaaaaac

SEQ ID NO: 29792 - DNA, 496 bp, Glycine max
  unsure (1)..(496): unsure at all n locations
cggggcagcacgggaggggnatgatacttgatngctggaatctcgngacactatcgacttgagcagcttgccacgaccataactatgccaggggtgtcgatttgttcagcaacagcttctgaagaacttaatggaatgtccaagctgggctgaaagctatttcgaccccccgttttctctcgacagcccgtgcgagtcctggcttatatcgtgaccgtccagatacgaataactaaccaattatgccaccgaaacctacaatcttcttgtcatgctgatgaaccattgagttcacggatatatccatattttggctttggagaattgatggtacgttccggattgcggcactaacactttctactaagttgcggcatgtcacgaacctttacagattgagcttcggtgctttattttgactcttggcatgtatccgaacgtcacaaactttctaactaggagggccgcatgagttccagggggtatacaaaggccg

SEQ ID NO: 29793 - DNA, 480 bp, Glycine max
  unsure (1)..(480): unsure at all n locations
tgcanaacacgaagaatattgaaaccttgtagacctgcaagtccgcgagatttcgtgaaggcacgcccgcgccgagcaacacgccagctctcttgtctgggcttattaggtaagctatgacagcagggatgcttgctttgtaagaaacagaccctcggaagaataaaatggaaaggacaatagggcctgagtggaatatggccccctttattactgaatgcaccaccctgtacctggttttggtaaattttgttgcggacggttcaagcaaaaacgaattacgttgcgacgcatgtatttcaatcacggggctgcggacactaatggaggatatgatacattttttgtaggtttggaggaggtaacgaaactccatcgagtgtgaatacacctacttgctattagcctcatgttagcaaaattcacagggacacgttggacggtttcattgtaaataaggacactactgggaattgaaag

SEQ ID NO: 29794 - DNA, 408 bp, Glycine max
  unsure (1)..(408): unsure at all n locations
agcttcatgatgaatcaatattgattcatagatgttntgatgataacaaagatgatgacaaaggtgatgacaaaaagctcaaaggtcaatcaaagaatgagttcaagatgttcaagatagaatcaagaacacttcaagattcaagaggaaagttgaattcaagaatcaagaatcaagattcaaggatcaagcttccaagaatcaagatcaagattcaagaatcaagagaagacttaatcaagataagtatgaaaaagtttttttttcaaaaactgagtagcacatggatttttctcaaaacatgtttaccaaagagtttttactctctggtaatcgattaccagattgttgtaatcgattaccagtagcaaaatggatttgaaaaagttttcaaatgaaattacaacg

SEQ ID NO: 29795 - DNA, 363 bp, Glycine max
  unsure (1)..(363): unsure at all n locations
ngcacaatggaagcagagatgtctntctatttaggcatgataaccctcatcaattctgtcttaacagccctccctatctaccttctctctttttttagaatccctaaacaagtggtgcataaggtagtttctattcagaggaactttttgtggggaggaggttctgaggcagccaagataccgtgggtaaatcgggatattgtttgtcttcccaagaataaaggagggctggggattaaagatatgtccaagtttaatgaggccttgattggtaaatggggatgggacttggcaaataaccagaatcagctgtgggctacagttttgatgtccacatatggtgggtggaatgctttatgttat

SEQ ID NO: 29796 - DNA, 408 bp, Glycine max
  unsure (1)..(408): unsure at all n locations
agctntgcgggattggtcttcaccgactaaaggatcaaagtgggtctggaaaaaggcaaatctgatcatcctgctttgatgaatgcaaaaactggggcaaatgaagaggatgggaatgagggagaaacccttgctatgactgccattcctacacggtcaaatttcccatcagcccaacaatgtcattactcagccaataacaatccctctcacccaatcatccacaaaagccatccccaaatcagccacaaggcctacttgcttaccacacgcctaatgcccaaacaccatcttcagtgcaaaccaaaaaagaattttgcagcaaaaagcctgtaggattcaccccaaattttggtttcatatgctaacttgctcccatatctacttgataatgcaatggtagccata

SEQ ID NO: 29797 - DNA, 425 bp, Glycine max
  unsure (1)..(425): unsure at all n locations
tgtagaatggccagacatgatacatgtcatggtttggtttggttcaagggtaaaagggatgccccacattatttccatgacacaaatgcaaaaatgatgatttggaaactttatgcaaaactggtcatgcatgcacctatgtggacactcaagtgtcaaatttttatggtcatgtgatgctagggctcaggattcatttcctctatttttagtcaacccaatgtttccaaaatatgttcttttatcaatttgtgcattcatccgagtccattttgggtactccggaaaatttcacagcattcacccttcaggtgtacacacattttttcaaaaactagttacgatcagtgaatttttttcaaagaaaagttggaagtcatctcttttcaaaagcatgttggttnttcagctagacaacttatttt

SEQ ID NO: 29798 - DNA, 383 bp, Glycine max
  unsure (1)..(383): unsure at all n locations
agcttccacaatatccaatcaattcaatacccaaacatcatgaactaccctaaaccaagaaaatagggtagaggcagaaaactctgcccaaaacacattccaataccacagctttccctactcaaataccccagtaacattctctttgttccgattcgttaaccgttggatagactcgaaaattttactggaggttcctagtacataagtctacattttgaccgttgggatcttctagaaaatgtccagaacccaatatgtactacctttcccataaccagcaatgcacaagcattttctgcacaagaacaaaaattctgttgcacaattcaacaacaatnttctgcataataaggcagatttcgaaatccctcttgccctca

SEQ ID NO: 29799 - DNA, 347 bp, Glycine max
  unsure (1)..(347): unsure at all n locations
gtgtgaaaaccattntgctactggtaatctattacaatatatctggtaatcgattaccagagagtaaaaactctttggtaaaaggtttggagaaaaattcatgtgctactcagtttttgaaaaaaactttttaatacttatcttgattgagtcttctcttgattcttgaatcttaagtcttgaatcttgatcttgattcttggaactttaatcttgaaactcgattcaatcttgaactcattctttgattcttggaaacatcatccttttgtcttgacccttgaagtgtacttgattcaatcttgaactcattctttgattcttgagaccatcatctttgttatcat

SEQ ID NO: 29800 - DNA, 372 bp, Glycine max
  unsure (1)..(372): unsure at all n locations
agcttaataaatctatatatggtttaaaacaagcttctcattagtggtaccttaagtttcatgggataatttcttcatttggttttgatgaaaaccccatggatcaatgcatataccacaaggttagtgagagtaaaatatgttttcttgttttatatgtagatgatattttacttgcagccaacgatcggggtttgctacataaggtgaaacaatttctctctaagaattttgacatgaaggatatgggtgatgcattttatgtcatcggcattaagattcatagagatagatctcgaggtattttgggtctatcacangaaacctatattaacaaaattctagagagattttggatgaaagattgctcac

SEQ ID NO: 29801 - DNA, 410 bp, Glycine max
tgccacccagctcgcccaggcgaggtaggttgcttcctccagaatgcaccgccttctggagaacttcctggaaggcccaagtgggcctggttgctatttgcaccccctgtttactaaatacaccccttgcctttttttgctaattccttttccgtaacgttacgaaaacttacgaattatgtaacgatacttgttttctttctgtaatgttatggaaccttacggattacgtaatcatcccttttttgacttccggaatattatggaactttacggattgcgcactaacacttccttttaacttccggcatgtcacgaaacttcacggattgtgctacaatgctttcttttgacttctggcatggtctcggaacttcacaaatgcctaacgatgggtgccaagtacctcg

SEQ ID NO: 29802 - DNA, 350 bp, Glycine max
agcttgcctcgaagaggtccaggaaggacatggcagccgaaggaactagttccgctccggagtatgatagtcaccgctttaggagtgctgtacaccagcagcgcttcgaggccatcaagggatggtcgtttctccgggagcgacgcgtccagctcagggacgacgagtatactgatttccaggaggaaatagggcgccggcggtgggcatcactggttactcccatggccaagtttgatccagaaatagtccttgagttttatgccaatgcttggccaacagaggagggcgtgcgtgacatgagatcctgggtaaggggtcagtggatccctgttgatgccgacgctatc

SEQ ID NO: 29803 - DNA, 395 bp, Glycine max
  unsure (1)..(395): unsure at all n locations
ntaacctcatcgtctctcacagtctttagatttgggagccaatccattccttgtgttcggactctcagccacttatgatagccgccgatgatcccattactgcttcccctaagctctctgtcctttcttcacgccgcatcccatgccttgcgaactccttggagtaccctcgcgttgtggtcactgaaacctcatgcgatgaaaggcgtgatgctttcgtctgatggcactcctctcatgggacatccttcgcatgaagatagaatcctgattcttccttccttctagcgagggaaccatttaacagacgcccctccatgctagccaagagttggtgcacaaaanacaattcttgcgccgctcttttcacatccccggtcgaacgtgtcatacat

SEQ ID NO: 29804 - DNA, 556 bp, Glycine max
  unsure (1)..(556): unsure at all n locations
cactcacacacctcaactattcctaccgataacctgtgcatatactatatcgtgcactaaatcacactctataatccacaagtgcacttgaaacacttgttgacgccgtagttacaccaancacctncgagcaagcaaactatgcggaatagagtctttatacgacttattggaccacaaattggttccgggaacacacgcacatatngaaacatcctgcttctcatgcaatgcctaaaaccggggcaaacgacgacgatgggacagagggagaacccttggtatgacagaccttcctacacggtcaaatatcccatcaacccaccaatgtcattactcagccaaaaacaaacccttctactccagcatccacaaaagccatccccatatcaaccacaaggcctacttgcttaccacacgcctgatgcccaaacaccatcttcagtgcgaacgcaaaaagaaatttgcagcaaaaagcctgtacgattcaccccaaatgttgggtgtatatgctgacctgctccctatctacttgaaatgcacaggtagccaaacg

SEQ ID NO: 29805 - DNA, 246 bp, Glycine max
aaaggacgcccccaaattcgaacaagccaagaagggaatagcaaaggctgctgcccaggacctccacgaaacttagggcagcacgctcggctcagaacagaccacaccaagtaacccaatggtcacaaaacatgggctatgatcaaggtgagcattcactcgagtccattgtgggtactacggaaaattaaaaaacattcacactggacgtggacacacactactacacaaactagcgacaatcag

SEQ ID NO: 29806 - DNA, 288 bp, Glycine max
agttgaaaccttcagattgtccgcctagccaacaaattatgcgcaaggccccatggccatcaatgcagaccgcaccgaatagcacttggcgacatacgggtgtgcttatccaaaggaagccatcgttacgcaaccaaatcgtagctaagcggaatcgaacccgaatcgattttggctaagccaaaccacggctagcttaacaaaaataatcaacctcaggcgccagggaggtgcactaaccactcgaactggtggctaacagcatgagtgaacatgagcttagcgaga

SEQ ID NO: 29807 - DNA, 384 bp, Glycine max
agcttagcaaatggacctgggtgttgcctagtttcatcatatcttccataatactcatcacctctatcatatctaataattttcacatttatctctaattgcccttttacttcattgtagtaaatttctaaagcatccattgcctaagaaatctcgggcagtaagtagacataactgtaacgtgaataatcatcaataatggtgataaagtatcattcctttccgaaagaactaacatcaaaaggtccacaaatatcagtatgcacaatttcaagaagctgagtgcttcttgtagctcctttctttgtatggtttgtttggtttcctttaatacaacccacacaaatatttagatcccgtaaatctagataaggaagaaattca

SEQ ID NO: 29808 - DNA, 459 bp, Glycine max
  unsure (1)..(459): unsure at all n locations
ggacactatgaaactcagcttttatccaggcaattcttggtggtgaagctccttctttcttggcttattccctagtggatggtgcctcccctctcctcttctcctttgccttccgctgcatctccatggtgaaaaatcaccattgaaggacctcattgaagctcaaagatccagcctccatagaagctccacaagcaagcttccatcagatatttattagggatcacaaacacattttagccaaactagtatttagcttgggctagggccatggccaacactaacttttttcactttcccattcaaatttaattttaaaaaatgtttagaatggaccatgagtgactctactatctaatattgtgtcaacttgactaatgttatgtaattaattattataaaataaaataaaataccacttaaaagggtacatccacttggcagactatngagatatta

SEQ ID NO: 29809 - DNA, 419 bp, Glycine max
agctttttcttaagcttttgctacaacctttttctccccctttggcaacatcaaaaagccaaagaactcggaaatcaacacagttagaacaattgagtagcaagatataagcattagagtattaaatataataagccaaactcataatcaagaaataatcaaaccagaatgcaaataacataaaatgtcaacaaccacaaaatatccaagactgaaatttaaaaacacaagataaataagcaaagtacttagcataataatgtaaattctaagaaactaaaagccaaaatacacggcttataaaagataaataatcagaacctaaaatctaagaagacggaggaggtggtggaagatcgaaactctgacgaatgtttccgacatcctcttcaagctgtgtaagacgaatgtccataccg

SEQ ID NO: 29810 - DNA, 438 bp, Glycine max
  unsure (1)..(438): unsure at all n locations
ntgtgtaatcgattacacttatttggtaatcgattactagtgattgtttctgaataaatcaaaagatataactcttcaaaaaggttttgactttttcaaattggttttaagtttttctataagttataactcttctaaatggtcttcttgaccagacatgaagagtctataaaagcaaggctttgttttgcattttaaatttaatccattcattcaatcttgaatactttctcaatcaatctcttacaatcctttacaagctttgaatctctttgaacttcttcttcttctttgtaccaaaagctttatgaagttttctggttttccaaaccttgaaaacttgtactattcatcctttcattctcttctccctttgccaaaaagaattcgccaaggactaaccgcctaaattctttttgtgtctctcttctccctttt

SEQ ID NO: 29811 - DNA, 415 bp, Glycine max
caagcttgcagaattggtctttgccagtgaaaggatcaatgtgggtccgaaaagaggcaaatttgatcatcctactaggacgactgagaaaactggggcaaataaagagggtgagaaagagggagaaacccatgctgtgactgccattcctatacgaccaagtttcccaccaacccaacaatgtcattactcagccaataacaaacctccttacccaccacccagttatccacaaaggccatccctaaatcaaccacaaagcctgtctaccgcacttccaatgatgaagaccacctttagcacaaaccaaaaaacaccaacaaaaaggaattttgcagcaaaaagcctgtagggttcaccccaaattccgttgtcatatgctaaacttgatcccatatccactcgataattcaat

SEQ ID NO: 29812 - DNA, 367 bp, Glycine max
  unsure (1)..(367): unsure at all n locations
tagcagatatgaatggcgctaagctaaatcaaatccagtttaaaccacaagaatatccgcttagccaacagattatgcgctcagccccatggccatcaattcagaccgcaatgaatagcacttggcgacatagggttgtgcttagccaagggaagccatcgctaagcaatcagtttgtcgcttagcggaattgaactcgaattgattttggcttagccaaaccttggctagcttagcaaaaataatcaacctcaggtgccagggtggtgcactaagcacttgaactcgtggcttagtgcatgagtgnatatgagcttagcgagaagcagacgcttagcgaaaggactaattttcaaaaagatttttt

SEQ ID NO: 29813 - DNA, 382 bp, Glycine max
agcttgaaagaagaaaattagtaattaatgtaagtaatgtgagaaattaagtggggataattaaggttgattgatggtgatctatatttcatagaattagaaaatgggtaattaagtcataagagtttaaagtggatggcattttcataaatgactatacaattagtttaaaaatagaattttagtttaattagttgttgactaattaaagtttctaattatatgatgtaggataattaaaatatgttagttttagtaagattaggataagatttattagttttagtaaaagtagaatttccatttttggcaaaactctactttagtctttttaagtgaaaatttcaaaaatgaagcacactggatttggtagtgatgtgca

SEQ ID NO: 29814 - DNA, 480 bp, Glycine max
  unsure (1)..(480): unsure at all n locations
attgtccttagcatcactngacactctagaatactcaacgctttgactattgggggaaagatttcattggtccattcctatcatcttactcaaatcaatacattctattggttgtagactatgtaaccaaatgggtggaagcaataattgttcaacatgcagatgcaaaggatggtatttgctttcttaagaaaaacatcttttcaagggttgggcaaaccaaggaaaatctggtccctaacttatggggctttgaaatttctgaattttgattgaatgtagctggtgaatatagaaagctccaacttcataaattggaggaattgagattttaagcttatgagaattccaagctttataagaaaagagttaaagtttatcatgataaaaagcttttgaaaaggaaatttcagcctggtcaacaggtgttgttatttaattctagattgagatttgttttcggtaagctgaaatctaagt

SEQ ID NO: 29815 - DNA, 431 bp, Glycine max
ctgcaggcacgcaagcttccttaagaagattcctaaagaagctagagcttatctacacacacctctctaataactaagctcacctccttgagaagcttccttaagaagattcctaaagaagctagagcttagctacacatacctttctaatagctaagctcacctccttgagatgagaagctagaacttagctacacaccccctataatagctaagctcacccccatgacaaaaaaaacatgaaagtacaaaaaaaaagtccttactacaaagactactcagaatgccccgaaatacaaggctaaaaccctatactactagaatggccaaaatacaaggcccaaacgaaggaaaaacctattataatatttacaaagatgagcgggctcatacttagcccatgggctcgaaatctaccctaaggctcatga

SEQ ID NO: 29816 - DNA, 449 bp, Glycine max
  unsure (1)..(449): unsure at all n locations
ctcaagcattgcataccccaaggatccattaggaaattacttgtgatagagagccattanggtgggctcatgggccactttgggatagaaaagacccttgtcttactcaaagaaaagttttattggccccatatgaagaaagatgtccataagcattgcactaggtgtgtggcttgtttacaagccaagtctagggtgatgcctcatgggctgtacacacccttacccatcccctctgcaccttgggtagacattagtatggactttgtctttgggcttcctagaacccaaagaggtgtagactctatctttgtgttggtggataggtttagcaagatggcacactttataccatgccacaaggtggatgatgcttcccacatctcanaactcttttttagggaagttgtgagactccatggtttgcctaggaccattgtatctgatag

SEQ ID NO: 29817 - DNA, 400 bp, Glycine max
agctttatatcataggattttaagtgattatgataattcctaataagcgagaacgtttagagtcagtgatcccagcctccctaatgaatggcacatataagttgggcttagtaaacgggtaacaggcacaatggaacattgatcactaatttttttcttttccattaatgctacaatcaacagtaacttatgcggcatatgacaaagagatccatacctgaatggctagaaatgcagccatgcaaatgcagttccctatcaagcacagaactccaagatgaaaatggtcaaaccaaagggtctgttaaccaccaattaatcattcacatggctctggctgacctttagcacttatttcatttgtgttacatgaatgaatttagcatattctatcaaagct

SEQ ID NO: 29818 - DNA, 415 bp, Glycine max
  unsure (1)..(415): unsure at all n locations
tctatccgcttaactagctacttcagtctataaaaagattcagcttaaattaagtgttaaacaaagtcaacattcaaatacgtctagaacaactaatgacaagatatttacaatgtatttaagtacagaggaaacaacctcaattcgattctgatagagtaacattataaaaggtctgagaagatggtatctatatgagaagggaaatcttgatattcatagacaaggatgattgcgctaaagacataagttattgatactaactttggtaggttagtatctatttatagtcacatctagacatgaaatacaaaaatccatttaaagtaagctactctaatcaaaatcaattgtcaagtttaacttaacaatnttttatggaactcaataacaagacaaagctaatgtgatggga

SEQ ID NO: 29819 - DNA, 391 bp, Glycine max
  unsure (1)..(391): unsure at all n locations
agctntagaactagcatgatatgccatgtattcttcatacacactttcaagatcaggagctctttcttcttcataattgaaattctgataccaggggacagatgtcgtaccggatgtcacgacatcacgcttcagaacatgcagattatatgtgtccgtatgaacagattaaacaagttaataacaccagagaattgtttacccagttcggtgcaacctcacctacatctgggggctaccaagccagggaggaaatccactctcaatagtgttagttcaaggtctaacagcccctgtttacaaccttctcacctaaccactacccgtgcgatctctacctaagagccactcttagatatgagaacctgcgctcactccctctcactcacac

SEQ ID NO: 29820 - DNA, 428 bp, Glycine max
gggagtcatattcacaaatgatgcttgtaacacccttatcccacgcaatctgcaacccttgagcaatggcaagcaacttcgcattcagactcattgtgaagcggcaacaaccaaaaaaactgagaaatcaattacccaaattatcacgaatcaatctgtcaattccagcctgactcggattgcctaaggagcttctatcagtgttgagtttgtaatcaaaatcaaccggaggagaccaacacaccatacgactaggaagacttgagatattgtgatgagttgtttctgcatgaatggttcgaaggagagacttagtcttgtcaatttgacaagccagggtggccacgcttcatcattgaagatttcaatattccttgaaagccaaataaactggcagtaaatagcgaacttttgaccttgaggagctc

SEQ ID NO: 29821 - DNA, 349 bp, Glycine max
agcttgttgcagacactattctacatctatacctcattaaccttgtacccagagatagaattatcataagcacaaatataaaatccacagcaataattaatgtaagctgctaattatacaccactatacacatgcgatctttataatatatttgacaaaacactatgcaagtaataaaaaaatgggctttatgacatactaaagccaaaaaaaaaacacatacatggataaatcgtcttgaaaacatagttccatgaccattgttctgtctatttaagtacgacattccttctttccaagctgatatggaatgtgattcaagctcctttcttgtcagattatatacatg

SEQ ID NO: 29822 - DNA, 251 bp, Glycine max
tggttgtttaattaaataaataaatctattcttcagattgaatacgattatttaaataaatcaaactcacagtttaacattaataactcatgaattactcgtttatatataaaaagaaaattaaagttacatacaatctacaaagatatatatatataacaaaaattacatacattttacaagtatcttactgcaagttgaatacagcttaatcagaagctgggtatatattattaaaatatgaaccttac

SEQ ID NO: 29823 - DNA, 552 bp, Glycine max
  unsure (1)..(552): unsure at all n locations
cacgccgcacactacacaccgtccgtactcgttcgantagacagacactcttnantcacnncacacgcnncnnnccnccggggtgaccatgagnctgctgacctccggaaactgnggcaatnggcaaaaggcagaanagaggagaagacagacgagagatgccnccttgaaaatccacgccgagaagcgagagcagagcaacacacgccccgcgagaacgaagctcaccgccatgagaacgcagcacaggaagatactcaagaagcaaacgcaacccgccaaccgacgaaagcaaacgcaccccgtgacatgagaagcgagagctcaaccacacaccccgcaacaaaactgaggcgccccccatgacacagaccctgaatcggcaacaggaaggaccgactactgagactagccgaaatgccgcgaatagcaaagcataaacaccatcctactagaatggccaacatacaaggcccagacgaaggaacaacctatccaatagttacagagatatgcaggctcatacgtagcccatggacgcaaaactacccg

SEQ ID NO: 29824 - DNA, 377 bp, Glycine max
agcttcgttttgggaaatatcaccccatctgacgtccccaaggtctcttgacccccgcgacatatctccaggtaccactctgtggtcaacgaataaaagtaggaagactgactcttccacactttctcacttcaagcttgtaagattatggggtacccgtcatatgtggtactaggtggcgatcaggcgatggtgcaagtcgactctccacatccacaaatcacacataaatccaccatccccagttgcccaccttcaactgagctcacgtactcccatgtagccctcatcctcgttcctctcaacaccgggtccccatcaatccctccaaagcttcacaacatccaagagattcaacattcaaacatcatgaacta

SEQ ID NO: 29825 - DNA, 418 bp, Glycine max
  unsure (1)..(418): unsure at all n locations
aaaaaggaaattaagttagtattatatactacaagttagtattttatatatatatatatatatatatatgaccttaatagccaaaaaagaaaaagcaaattaaccacttattttttggagcaagtgtgctacaaatccaagccgaaattgcttgcatcaatgccaaattaaccacttattttttgtgttcttatcaagtagactttacatgctttattaggctggtaatagaatcacatatcccaacaattctacagttcaacacaaattcatccacttagaataatcgaaaacaaataatcttgagaactatttgaaatttggaagtattgaagtggaaggggcttacatatggtaaaatagtatattgatataagcataacctcgtattatataattaaatngagcttacaacagt

SEQ ID NO: 29826 - DNA, 396 bp, Glycine max
agctttctactatgttgtcacataagtctgcaatgcaatcagatttgaaaaaattatgaaaagtgaatagtagatcgagtgaatcttaaactgtataaactagctgattgcctagaaaactacaacaaagaaagcaaatatataatcctggcaggtcatgaaaacttgatcttgcaacaaatttgagaaaaagtaaatagctataatcatttgatgaagcactagaaaatttaacttgcttgaaaatcatgacacattaacttgctggaaaatcatgacacattaacttgctttttagacacacatcttggtttgcagtgcaatataatcagtagcctaattataataattcctaggagtccaatacctagaaaccaacaaagagggacgagttct

SEQ ID NO: 29827 - DNA, 425 bp, Glycine max
  unsure (1)..(425): unsure at all n locations
tgagtcttagtataattgttgcataacgcctatgaattgcttattatgaaatttgtgagtgttgttaggtcttgactcgagtgtgtgattcgtgtataatgtgattgatgatttctataatgaattttaaatgataaagtggtgaagtaacgtggattatagtaggttgagctatgctataaatacttctataatttattttgattacgactttgtttatctgtattttatttagaaatgtgataactcactcattgtgtgatgtttgtgtttgaatcatgtgatgatctcgaaccttgtgtttgtgggaccagatgactaagtggatgactntaaagaacatcgtgctagaggacgctgagacacaatgctctgatatgatgtgacattggngcatgagtttttatttaaattgcatgatatta

SEQ ID NO: 29828 - DNA, 365 bp, Glycine max
agcttccaaattagtgtaccacactactgtagctccggccaagctatcctgaaagaagtgtatcaacagcttttcatctttagaatgggcgcccatcttacggcagtacattttgagatggtttttgggacaagtcgtccctttatacttgtcgaagtccggcactttgaacttcgggggaataacaacatcgggtactaagcaaagatccgtcatgtctgcaaatggatagtccccaaatccttccacagccctcaatctttcctcaaggagatctagcttcctcctttcttcagttgccgggggcggcccttacatagacaaaactattggcgatgctgcgaggttgggttgaggcaacgtgc

SEQ ID NO: 29829 - DNA, 380 bp, Glycine max
cttccttgagaagcttctttgagatatcttcgttgagagtctagagcttagctacacacgcccctctcataactaagctcaccgccctgagaagcttacttaagaagattcctaaagaagctagagcttagctgcacatgcccctttaataggtaagctcacctgcttgagatgagaagctagagctctgctacacaccccgtgtcatagctaaggtcacccccatgacacaaaacatgaatagacaacatgaaagtccttactacagagactagctcgaatgccgcgaaatacaaggctaataccctatactactagaatgggtcaaatacaatggccagacgatagactacctatttaatattacagagatagcgggc

SEQ ID NO: 29830 - DNA, 411 bp, Glycine max
agcttctgttttcaatttcgagcgtctttatatattacaggactcaatcggacctctgactcaaaagttattgtcgtttgaatttgctcagagcttctgttctaaattttgagtgtctcgatatgttacgtgactaaatcagacattcaagtgaaaagttatttcggtttaactttgcaacgagcttccgttttcacttacgagcgtctcaatttattacgggactaaatctgacatccgagtaaaaattaattgtcgttagaattttcttaaagcttcagttttcaattttgagcatctcgatttattacgggactcaatcagacgtccaagtaaaaagttattgttgtctgaatatgcactgagattctgttttcaattctgagaatctcgatatattacgagactcaa

SEQ ID NO: 29831 - DNA, 355 bp, Glycine max
  unsure (1)..(355): unsure at all n locations
ntacagcagaatttagtaatgacccactaacctagaattaaaataacttaatgccattaacctagggaattaaaaaaacttaatggctgaatgtaactgaaattgtggcaaccaaaagtcacccccaacaacccacaagtcaacccccatttggtcttcccaaaaggttattcctagggtggccattgggcccttattaacactttgaactaacctaaactaagcccttttagttgataaccccaaacatattttggtcagccaacttacaaggattggccattattagacaactaacactctaaaatgaaacaagtggtgcatttagtcctctcatttggccatgatcaactac

SEQ ID NO: 29832 - DNA, 403 bp, Glycine max
agcttctataagctgaatcattttatcaataaacacatgttgagttttattcagaaaattagagtttatctcttttatcttagtgagagtgattctcctaaattcttgagtgattcaagaacaccctggctgtatcaaaggactttcacaacctttgtgtgttgccctcgctgaaaagagggattctttccttcctttcatcttcacccttgttctttcaaaccacaattccagaaaatccaccacctctgcccagaattatctcgtggccataactcccattttacgcactcaaattaagtgattcttgagcctaaattgaatttcaaaacgagacctttcacctcgttttggaatcacctcatttggagccctgtagcttccgttatttccatttctatat

SEQ ID NO: 29833 - DNA, 386 bp, Glycine max
ctcaagcttgcctcaaagaggtccaggaaggacaaggcggccgaatgaactagttccgctcctgagtatgacagtcaccgctttaggagcgttgtacaccagcagcgcttcgaggccatcaagggatggtcatttctccgggagcgacgcgtccagctcagggacgacgagtatactgatttccaggaggaaatagggcaccggcggtggacatcactggttactcccatggccaagtttgatccagaaatagtccttgagttttatgccaatgcttggccaacagaggagggcgtgcgtgacatgagatcttgggtaaggggtcagtggatcccgtttgatgccgacgctatcggccagctcctgggatatccgttggtgttgga

SEQ ID NO: 29834 - DNA, 412 bp, Glycine max
agcttaatgtgacatttgatgtctatgctctacaaatctccgtgagggcttattttgaatatggatgatagagtggccagagcatcacccatttggttttcctctctaggaatgtgatgaaatgatatatcatcaaagagttccatcaattccttgatgtaagcctgataaggtatcaacttatggtctctagtttctcattcacctttcaactgatgaattaccaacgccaaatcctagtacactttgagcaacttaaccctaaagtcgattgccgctcggattcctagggcacatgctttgtaccccggtatattatttgtacaattgaaacacaatctagttgtgaaaggcaaacattgtttatctggtgaaaccaacactgccccaattccatgacccaatgcactag

SEQ ID NO: 29835 - DNA, 432 bp, Glycine max
ggaccttaaaactcagcttctcaggaagttttctcaagaaagcttctcaaggaagctagctagtctataaatagaagcatgtgtaacacttgtggtaactttgatgaataagagtcttgtgagacacaactcaaagttcaacttctctacctttttcttccttcaatttcgtgctcccccctctctctttctctccctctttcttttcctccattgaagcatccttccaagcttcttatccaaggctcatcttggtggtgaagctcttttttccatggcttattccttaatggatggcgcctcctctcacctcttctcctttgtcttccgctgcatctccatggtgaaaaatcaccattgaaggacctcattgaagctcaaagatccagcctccatagaagctccacaagcaagcttccatcagaaagaccc

SEQ ID NO: 29836 - DNA, 408 bp, Glycine max
agcttttgaatgtttagagatttctagagagagaaaggtccaagttctagcgaattttgagagttttgttgtgtgaagacaggcagagagctgagcttgaagaggaagccatcctaagagtatgagatgagtctgtgagtgattgtgaggttctagaggtggaggagacatccccactacttgtatttcatcaatccttcatttttctcttctctttgttgcaaaggaagcttcccagatatagagagctaaatcctctgttggttcttccatgtaggtacttgatgtaaatacatgtatatctatttaatgatgttttatatgttatctgtgctatcagtacatcatttcagtgtgcttttgccttgatcatgtagatgcatggcttgttagcatcattcaatagtg

SEQ ID NO: 29837 - DNA, 416 bp, Glycine max
ttagcctttcatttcttggaagccatctacatcaaaataatcaaagtcacaaaattagacaggtatttattcaaattagaaagcaaaaaaaaatctgaaatttaaactaggcgcttagcgagatggattcgcttagcacgacttatgaaaattaactcatacacttagcgcgatcgaggtgcgtttagcgagttaacacagaaaactactctactgcataattggctcgctaagcccaattccaaaacagaaaacaatttgcgcttagcgcatacggtgcccttagcgcgacaacaatactagagaataattggcttagcgagcaggctcgataagcccaattccaaaaattacaaaacaggaaagaaattgcgcttagcgcggtaaggcgtgcttagcgcatgacaaaacattca

SEQ ID NO: 29838 - DNA, 336 bp, Glycine max
cccagctgggatgtggttattgcattatatgttaacatatgttacactacaaccaaatttgtgtattatatcatatatggaaaccggcttgctatcaactttacaatccgaacgcgttggttggaatggaccactatgttacgtctgtgtattgcattcaccacattgcatcaaaattcaacaaacagtttaaaaatgatgacttagaaaaacaagtcatcaatatggcgatgtacctatctattcaatgtatcatattgttgctctattacatgttcactaaacgtattactcattgttctatcttttcgcataggggatgagatgaggaaacca

SEQ ID NO: 29839 - DNA, 442 bp, Glycine max
gtcactttattatttgattaatctagcttcaatttctttgaattctaccataccatatgaatacatcacagaacttggtcaaattatgcacgatggatttgattttgcctttccatcttttaggaaacaatttgaaaggatatgatcttatttctaaaataaaaattatgtgaattcttagacaattttttttaaaaaaaaattccttctgacatcttagttggcatattttccaaatttccaatataacaaatcaaatttgatcatggccatcatggtatatctttgacagcctgtatattcttctgcttgatgatgttaaaaaataatattaagttccttgatttgcaggaatctaaatctcttaaaaacataccagttgtgattatgtcctcagagaatgtaccatcaaggatcaacaggtgaggaatcctaaactcct

SEQ ID NO: 29840 - DNA, 360 bp, Glycine max
agcttcaccggagagaatatcgcaaacctctacaggaactctgctcgtggattcgaggttattgacaacattaaatcagccgtggagaaagtgtgtccaggagttgtttcctgcgcagatatccttgccatcgctgccagagactctgttcagattgtaagtggtcaaacaaccaacaaaaacacattaaactaaatcattaaattgtacatatcaaaattaattaccaatttagtaccacacatgcaattaaagagaacattttgttgattttgatcaatatagcttggaggccctacatggaatgttaaacttggaagaagagacgctagaactgctagccaatctgctgctaacaat

SEQ ID NO: 29841 - DNA, 409 bp, Glycine max
  unsure (1)..(409): unsure at all n locations
agagaaaacagggaccaatggctctctcctaatgtttgttggatttaagaaacagctttatgtttcgtctaagttgcagagagcaaaaccttctgcgaatatacggcgaaggacagcatctttggtggctgcatgttcgcataataatattccaggttgttgtaaaaaccatgcatactttgacaatttgcaaacaatgattgttttctttttttatttccttgagttttcatacctacgtacgtatatatatctgatgcatatgctattcgtatatgtctttatcacagtatgatatgtgatataataatagaaccagatttgtgtcaatttatccaaatcaatatcaatctttagagtgtgatgtttgtattctccgggtgcccncaccccaccgtgtagagattaa

SEQ ID NO: 29842 - DNA, 362 bp, Glycine max
agcttgactatgcgggttgtttttagctcttagtgtcactattagtaaaagtcaatgcaattaagaaagagatatcccaaataaaaactctcgattgatgtttgattgctttaattcactgaaaggtttttatggattattatatcattatgtgacctccttgcttataaccaacgtggttaccgtacgaccgaacggtcagatgttatttcaacacaaattaacggataatacaaatcaaatgatcgaagaaaattgatttcattttctgaatatgcaagacatgacttaaatgaatgactgatgcacgtcgaaatatggtacggaaagtaaatgaaacgagaaatataagttcactaaac

SEQ ID NO: 29843 - DNA, 454 bp, Glycine max
gctattacggacctatgaaactcagcttacaaggaggtgagcttagttattagaggggtgtgtgtagctaatctctagcttctcaagaaagttttctcatagaagcttctcaaggaagttttctcaagaaagcttctcaaggaagctacctagtctataaatagaagcatgtgtaacacttgttgtaactttgatgaatgagagttttgtgagacacaactcaaagttcaacttctctgtccctttttcttcttcaattttgtgctcccccctctctcttttcctccattgaatcatcctctccaagcttcttatccaaggcacattcttgatggcgaagctccttcttccatggcttattccctagcggatggtgcctcctttctcctcttctgctttatcttccacttcatctccatggtggaaaatcaccattgaaggacctcattgaagc

SEQ ID NO: 29844 - DNA, 296 bp, Glycine max
agcttgccaagcatttatttccaattccactcgcatatagtcatcatcagtccatagttccaatcaatcatgcatcagttgatgcatgcacctgacctcaactctcaaatgcaatgaggttccatccctaaggaaaagcctaatcgtgtacacacgacactctcacttatgaaaactatgcagtcagagtcgaggttaccctgtggtgcacaggcaacttcccccacctcacggtgatcagcctgagtctaatggagatgtataccctgtgacttgcccccaagttcaagtattcc

SEQ ID NO: 29845 - DNA, 394 bp, Glycine max
  unsure (1)..(394): unsure at all n locations
tcatggtgatgaatcaagtagttntgatgatgacaaagatgatgacaaaaagcccaagagaatgatttcaagattgagtcaacaagttcaagatcaagattaatttcaagtttcatgaaaagaaatcaagaagattcaagaatcaagagaagtttgatttcaagattcaagagaagacaaattcaagattcaagagaagaaatcaagaagacttcacaagggaagtattgaaaacatttttcaaaaaacaaacatagcacaattttgtttttcaaaagagtttttctcacaattttctaagttaccagagtttttactctctggtaatcgattactagtttcctgtaatcgattaccagtgggcaaagttgatttcaaagatttaactgaattg

SEQ ID NO: 29846 - DNA, 343 bp, Glycine max
agcttgacattggtctcataattaggactactcttattttgatgtggattcaattatacaaagtttggcatgatgtcccacgtatttgttccaagggacaaaaaaattgcaggcgtcattttttcattgcatgatgaaagagatattcacattgttctcacggataaacttaagaactattttaatcggcattgggatatattcttggaattcctccttaagtaccttctattaattatgccattaagtctatggagatttttattggagataactctgataatgatggatttttttcttctgagttttattataataccattggaattattactggtacact

SEQ ID NO: 29847 - DNA, 426 bp, Glycine max
tatagaatatataataaaagaacaatgacaattgaagagtctatacatgcttcctttgatgagtctaatgccattcttacaaggaaggattttttagatgatatttcagattccttagaagatacacatattcatggaaatgactctaaagaaaaagatgaaggaagcaatgaggattctcaagataatggggctagagcaaataatgaacttccaagagaatggaaagcctcaagagatcatcccctcgacaacattattggtgatatatctaaaggggtaacaactagacattctcttaaaggtttatgcaataatatggcttttgtatctatgattgaacctaaaaatataaaagaagccatagtagatgataaatggatcattgccatgcaagaagaactgaatcaatttgaagaaacaagt

SEQ ID NO: 29848 - DNA, 131 bp, Glycine max
tgaactttaccggacttgaaagtattgacgttacccgaatatagcagggatgggaagaaaggctatcaatcaattaacgccgttccggatagtcggagccatttgtaggttattggaacagcaaaccgacg

SEQ ID NO: 29849 - DNA, 390 bp, Glycine max
  unsure (1)..(390): unsure at all n locations
agcttgtattggatgccacgatgcangtggaaacataatacaaccggtagggcatccccttatgaatgacatgcatctctttatgtccttgcaaactaaaattaatttgttctttgttcctttttcttttccactattttaacttacagggggcaactctatttgcaaaggatttacagaggtaaatggagtaaattaaacctaagcaccctcatgctgtgaattgaagatatggaatagaaagcactgaaatttttaaaggatacatttcaagtcttagttgcaactaaaaatttcagagctcatttctttcatacttaatgaagaatgaaaataatctatcaagtatcaactatttccaatgcaagttgcaaactcatcttgcttaaa

SEQ ID NO: 29850 - DNA, 407 bp, Glycine max
  unsure (1)..(407): unsure at all n locations
ntctacagccacacccttgatttaaataaattcaccatttcaagctctttaaactttaaagagcttttggtcgttggtcatgtagtttgtgttgccactgccaatcagccatgaatcacccgagctattacatgtggtcaagcttttgcaagttgtgacttgcaaatttgtgtccaagcttaccacattttctgcactcaacattaggcctccacctacacttttttgtaggtgattcctctgtttgtagtatgcacatggtgaatgtatcccatccctgtttttgtttttgttagccttgttactattcttctcattgttcttcttccttcctcctgaaacttttgtctgtgcttggagaggaccctctttagatggttcttttcacatctatctcctttgttctc

SEQ ID NO: 29851 - DNA, 352 bp, Glycine max
  unsure (1)..(352): unsure at all n locations
agcttaacaatagcctccattaatgactttttatcaatattatgtcaagaaggtgtaggaaaaataacaatgtatagaaatcatatattacattggatgtggccatacttgtaacaattatttcaaccggtttaattattattctttntattacataaccaataatcatattttcttttaatttcattctcaaaaacaattctttaaaaaataatcattaaaaaataagaaaccaaaacaaaatcaatcaagcccaattttatactccttaattgtataatatttgagatagaggtagaccacaaatgacactcgttgagtggtcttcaacactacagtatatatatgggtg

SEQ ID NO: 29852 - DNA, 111 bp, Glycine max
aaacaatggggcagaacacaccaaatgatcatcatgatggtgtggctcactcttcacaaaaggaaaatcgacactttcaagatgatctttataaactgtgctgacctgtat

SEQ ID NO: 29853 - DNA, 163 bp, Glycine max
actgcccatcaggcatgaatcacgcgagctattacatgggaggaagcttttgcaaatggtgactcgcaaaatgagggcaagcttaccacattttatgcactcaacattaagcctgcacctacactttgttgtaggagagtcctctgcttgtaatatgcacatg

SEQ ID NO: 29854 - DNA, 400 bp, Glycine max
gcttctaggttggtccaaaatacaaattttacgcttttgttaaatatcgaatttatttctttttcttcctaaaagttaaacatcaaaacagaaaagtcaaggttttcccgatattaacgggctgaacttaaattattgatattcaaactacggataagatatctctgtctccattacatcatttatttacttataaaatgagaaggttagtgaatcccaaaaacttcaattattactaaatattatatatggatgattaggacagccacctaatttgtacgagaagatcgagcgaatctataaagatcatacctatctcactgattaaatattctatattctactatgatgatgtttaaccaaaacaaatcccacggcaatctaaaatatcaccactttt

SEQ ID NO: 29855 - DNA, 426 bp, Glycine max
  unsure (1)..(426): unsure at all n locations
acctgctntatatctcccgacccaaggctgttctgnatttattttttagctttggtttggcctgacttattagtctgtataaactttaaaggcctatttcatagtaagttgtaaataggttgatcaggctatcctaaacagatcaattggcttacaagttaatagactatactaaacaagtcaataatcagcttactagttagcaaacatacgaaaacagattgcattttatagccattgcaaccagctcaagtctgaaacaaaatgctatagttgataaaataatgatataatattacatgttaaatattaaaacgatataatattacatgttaaatatcaaaatgatactaattacaaataagtcagttcgttaagcccaacaggttttcttaaaagttcacaacttgacctgcttaaccagag

SEQ ID NO: 29856 - DNA, 176 bp, Glycine max
agtgctcgcacatgtgcaaacgcattgttagtcctataaatcatctcacttgataactataaccccgcgccgtgtttctagtctttatgatttgaaagtcgagtctttagactataaacgttacataataataatctaaaccgagtagatcaaacccccgctttctactctttata

SEQ ID NO: 29857 - DNA, 308 bp, Glycine max
agattacatctatacaaaggaaccctttatggggcttcctcctagactccatgaagattccttggatgatgagggacatagattgactacctcctagtaagagaggattaggcatcaacgatctgactaccatcagcaaccctgtgcttgatcaaagagggtgagagttggcatataatcagaatcagatatgggccaccataatatagtcctcatatgatggcagaacggagtagactactcttaagaacagcagattagactctacttgctcgcaagacctctatgtattctctaagcgtcacaca

SEQ ID NO: 29858 - DNA, 298 bp, Glycine max
agcttcccagttatggaaggctaaatcctctgttggttcttccttgtaggtacttgatgtaaatacctgtatatctatttaatgatgttttgtgtgttcattatgttatcagaacttcattctaacatgctttttccttgatcacgtagatgcatgtgttgttaggatcattcaacagtggaaactggtctgattcttagaacttgataggacagagctagtttatcgtattatcacgagggatcagggtacggtaacctagttgtttgtatgtttgtcttaatgcagttctggttga

SEQ ID NO: 29859 - DNA, 384 bp, Glycine max
tacattgtgaccgttgcgatctactagcaaacatccagaactcattctgtactactctttccacagccaaccacacacaagcagtttctgcaccaagctaaaatcctgctgcacctattttgacagcaaaattctgcataagtgcagatttcgaagatcacacttcccctcatccaatcttgctcaaatcagatactacaagtgctaaatcatgtatcaaacatgtctaaaccaaagccaagcttcaaaccacagcaacacagaatctaggtgtccaaaacccctcaattcaatgggttttctaggcttgaaaagcgaaatttataatgaggtaaatgtgaagcaaactctcacctcacaccagtccataacatccatttagac

SEQ ID NO: 29860 - DNA, 334 bp, Glycine max
ggatccttaatcacctgcagcatgcaagcttgctttcattaataggtctatcctgatgtccatcccttattttgagacattgaccatctcgcagctctttctcaaacctttgcacgtgacgtgggatgctactgtctatgtggtgtctaattataatatccccttgtacataaactatcaagatattctttaaataacacacggcggtcaatgtctcaacatctctgttatataactatggattctatcactcactttacattattctatatcaacaaactaatcgttttagattcatgcgtaatctacttctatttatcaacattatgcatat

SEQ ID NO: 29861 - DNA, 343 bp, Glycine max
agctttgagaaaaatcaaactacaatatgttttaactcggatgtcctattaagccctgtaatatatcgagacgctcgaagttgaaaacggaagctctaagaaaagttcaacaacaataacttttaactcgaatgtccgattgagtcccgtaatatatcgaaacgctcgtaatttataacagaagctctgagcaaattcaaacgacaaaaacttttaactcggatgtccgattgagtcctataatatattgagacgctcgaaattgaaaacggaagctctaaaaaaagtcaaacgacaataactgttgactcggatgttcgattgtgtccccgttgatattaag

SEQ ID NO: 29862 - DNA, 396 bp, Glycine max
tctgttttcaattacgagcgtctcgatctttacgagactcaatcggacatccgagtcaaaagttattgtcgtttgacttttctcagagcttccgttttcaatttcgatcgtctcgatatattacagggctcaatcggacatccgagtgaaaagttattgtcgtttgatttttctcagagcttccgttttcaattacgagcgtctcgatatcctacgggacacaatcggacatccgagtgaaaagttattatcgtttgaatttgctcagagcttcagttttaaattacgagcgtttcgatatattacgggactcaatcggacatccgagttaaaagttattgtccgttgacttttcttagagcttccgttttcaatttcgagcgtctcgatatatta

SEQ ID NO: 29863 - DNA, 350 bp, Glycine max
  unsure (1)..(350): unsure at all n locations
gttcaattttactggaacctttggagctgtcttcctttttattattgacnaccccatgctactgttgtaattataggtcgcgcctttacgctcctaagaccttaacaacctccattactccatgactttgaaaaagcaacaggtcattggtccttttcacttaattactctccatagacttgccccataaaagattcaagtgaatgacatttcgccaattaatggattaaccgaacacttttaaaatctttgggaactaaaatgcctgagacaccccttgctacctccctttaatatatctatgacacaaatcgaataaatgtaccgcttgtttacccactctgagatat

SEQ ID NO: 29864 - DNA, 380 bp, Glycine max
  unsure (1)..(380): unsure at all n locations
agcttgtagaatggctagacatgatacatgtcacggtttggtttggttcaaggataaaagggatgccccacattatttccatgacacaaatgcaaaaatgatgatttggaaactttatgcaaaactggtcatgcatgcgcttatgcggacgctcaagtgtcaaatttttatggtcaggtgatgctagggttcaggattcatttcctctattttaaatcaacccaatgtttccaaaatatgttcttttatcaatttgtgcattcctccaagtccatttcgggcgtccggggaaatttttacagcattcacccttcaggtgtagacacgttttttcttcaaaaatcggttatgatcacatgaatttttttcanagaaaagtt

SEQ ID NO: 29865 - DNA, 415 bp, Glycine max
tgtagggccttgatcttcttcattaatagagtcttttgcttcttgaagatcaatggaagtggaatagagaaggaggaaaggtgattggagatgccacttcaaggagaagatgagtcaagaacaagctcactaccataggaagccatggataagagcttgaaggtaggagaaaatgagtggagggagaggcagagaggggggaacaaaatttatgcctcaaatgaggtcagaactttgaagtctaatttctcaaatgatcaaagttgaaaaaattcacacacaaggcctctatttatagcctaagtgtcacacaaaattggagggaaatttgaatttctattcaaatttatcttgaatttgaatttgaatttttggaagccaaattggagccaaaatttcactaattatgattagt

SEQ ID NO: 29866 - DNA, 400 bp, Glycine max
agctttaggtaatcatattgttcacaacatgaacatcttaattcaaatatgctattgaaatgcttaaacatataaaatatatttgttatttatgtataacgcgaatttatggtttttcttttttttatttatgtccattggttctgataaaaaaatgttcacaggtttagaattaatgccataaaaaaatagtccataattgttgctatcaaacatttttacatgatggttatttattattatgagtaagaattgaacaataatttatgtattttacacaacaaattaaattagatctccttaattttatacacgatgatgtaaatatgtgtacattattaaaaaaatatttagcgttattattattattattattattattattattattttcatttta

SEQ ID NO: 29867 - DNA, 432 bp, Glycine max
  unsure (1)..(432): unsure at all n locations
ttcatacaagcaatagtaggatnttcttccaatagcggtgtatcaactntggagattacaacgttccataaactttgagatcttaaggaaaaaaaaactttaattatcttcactactcaaacgtgatagttttcccaattaaacattagaatgacagatgaagaattatctgaagtggacatatttgcaccacaactgcctggaaattggatcactcagcaacgtttgcactcaacctcattgtgtttagcactcaatcaaaatttgcctcagcccataagaagtaagctcagatatcgctgttggaaatatttagtgaaacatagaaacattagaacttgcagagaagatgcagatgttaaaattaaatctaataattaccatggaaattcataaaatgagaatgtatatgtatatataggcttacattca

SEQ ID NO: 29868 - DNA, 230 bp, Glycine max
agctttgagataattcaaacgacaatatttttttactcggatgtctgattgagtcccgaaatatatcgagacgctcgaaattgaataccgaagtcgctaagcatattcaaacgacaaaaactttttactccgatgtctgattgagtcccgcaatatatcgaaacgctcgaatgagaatgaagaagctctgagcagattcaaacaacaataactttttactcggatgtgtg

SEQ ID NO: 29869 - DNA, 321 bp, Glycine max
tctacattcaagttcgagcttttctatatattacgggatctctatcggacatccgagttaaaagttatagtagtttgaatttgctcacggcttccgtattccatttcgagcgtctcgatatattacgggactcaatcgtgcatccgaagaaaaagttattgccgtttgaatgtgctcacagcttcggcattccatttcgagcatctcgatatattacgggactcaatcatacatccgagcaaaaagttattgaaatttgaatctgctcacggccttggtattccatttcgagcgtctcgatgtattacgggactccatcag

SEQ ID NO: 29870 - DNA, 395 bp, Glycine max
  unsure (1)..(395): unsure at all n locations
cgcttattccatgcaactaatataatatgatagatttgacatatcaatatgataccaataaatatgcaaaataacaatatgatagcaatacatgatagatctgacataataatatgagtttgttagcacaaacacaggaataaagagaattctctcaaacaaaaagtaattggtacaaaaattcttatacatgtaacttccaaactaataaaggcttctctaatataatatgatagatttgacataacaaaatgataccaataaatctgcaaaacaacaatacgatacanatacatgatagatttgacataataatatgagtttgttagcacagacacaggaataaagaagaattctctaaacaaaaggtgattggcactgaaattcttatacat

SEQ ID NO: 29871 - DNA, 395 bp, Glycine max
  unsure (1)..(395): unsure at all n locations
tctatagaaggttcgttcctaatttctctacaattgcatcacctctcaatgagctggtgaagaagaatgtggcatttacctgnggtgaaaaacaagagcaagcctttactttgctcaaagaaaagcttactaaggcacctgttctagctcttcctgacttttctaaaacttttgagctagaatgtgatgcctctggagtgggagttggagctgtattgttacaaggtgggcaccctattgcttattttagtgaaaaacttcatagtgccaccctcaactaccccacctatgataaagagctgtacgccttaataagagccctccaaacttgggaacattaccttgtttccaagggaattgtcattcatagtgatcatcaatcacttangtacatt

SEQ ID NO: 29872 - DNA, 375 bp, Glycine max
agcttctatgatttctcttggagaaaattaagaatagaaacagagactcacttacaaatgcaaatttaaattgtgagggttaggaaagggtttatgactcttacatgcaactctcttttccacaccgaggttgtctctgagcacactcatcccttaacatacatcaaggcccattttctcaggcccaaactcactaacacaacaaacatatgcacgacatcaccacacaaataattaatttacttcaagtacttaatttaaatttaattacacttgctaattaattgcaatcactaaatcatgcattatgaaaatcacagtgttacataatgaactcagaattgcgatattgggatccctttggtggagatcaac

SEQ ID NO: 29873 - DNA, 486 bp, Glycine max
  unsure (1)..(486): unsure at all n locations
gtgacacgctgaagctccgtcgaccttttgaaaactanacctcgctncagattntcatcgacgcaaacgagttacttcggttgtttgagtgtgtctctcaatagatcaagacgctcgacgattattactgaagctctaagcaacagcaaaccgtaataacttttatactggacgagtgatagtgtaccataatatatcgagacgcttgaacttgaataatcagattctgagcaaattggaaccacaatcactgtatactcggatgtgtgatcgagtcctgtaatatatttaggagctccaaattgagatcagaagctctgtaccttcctcaaccaaagtcgctttatactccggtttgcgaatgagtgcggtaatatatgcagacgctctctgatgaaaactgatatctctgaaatcatcaaacgacagtatctttgtacttggttgctgatggtgccccgtttttttgtgacgctccgatagctc

SEQ ID NO: 29874 - DNA, 405 bp, Glycine max
agctttagcctttagggtgttcatcatgttgatccccctatctctaacatcaatcttttttttcgtaggttctctgaggtaatcttgacttctatatctttctccaggttaagctgagcttttcttagtgtcttgtgtttttggtatcgcaatagggtatttttacacttcctttgaaaaaaccttgaaaatgagacgttgtaaaagttatatatgtatacaattgaggttatttttgtgatcttcgctcaacctcgatcacatgggcctggtctgaatttccaaaagagatctcctttgtatacaacttgaaacatcccttaccccattttgttttgatagacggaattgacccccaatgctatcgataaccgtatttcttttaaatgtatatgaaattccttt

SEQ ID NO: 29875 - DNA, 505 bp, Glycine max
tttcaattcattctatgtacccgtggtggtccacatttggtttcatgtatttttattctcgacttcatttactttttatacccccttttgacgtgcttaagccatttatttaagtcatttctcgcttaacctaaaaataaaataaatttccaccgatcgtttgaattgtatcatccgttaactttggttgaaatgaatttcgaccgatcggtcgtgccgcaaccacgttggaaataaaaaaagaggtaaaaaataatataataataaaaaaataccttttagtaaaataaagcgaaaaatcaatcgaacgttttctctttgggatttctcattcttaattgaattgactaaataactaaagtgaaactaaggctaaaatcgactcgcctaatcaagctcgtccacaaaaaataggattttgaaagtttatcatttatgtttcttacttaattaaaaaggatcattttcaaagtccaacgccttaaaaaaaatcaccttttaagta

SEQ ID NO: 29876 - DNA, 626 bp, Glycine max
  unsure (1)..(626): unsure at all n locations
gcctgcgcaacgggaatgatgcttttgagcacccgggancncttatagatcacctggagagctgcaaacttgctcgcacagggtattactatcttgtttttgggccatacaacacgttgctagaggagaaagccccaattgaagagaccagcggctgttctttggtcgggaattaatacaaccattgaggaagcggtttgtgcctgctattaacctacaggacttggatttccgcctccaaaatacttactcctgggatctagggggttgaggagtaatacaaggaaatggatgtgctcattgatcccgcatatattgaagaagattatggaggaactttggctctatttcttaatggttcgtcatatgagtagccgagatattgttagcctgccgagtatgtagaaaaggttgatttgctttacctatctatacccagggagcacacatttaaaagggaggggattggttttgagagagtcttaccatcatcttgtccttcagtgtgtaaagacaaatggttagaaggaagggggtctgtccctttctaataatgtctccaccatttcccgtcaaatacttgtgtttaaagtcccccaaagggaaccttttgtatacgcgggggc

SEQ ID NO: 29877 - DNA, 145 bp, Glycine max
tatataatctcggcttgcctgtccgatgaatcactaatttttgtttttttttatgccggggaactgttacgaacccgtcaagggttttacgacaatactacggcggcataaaccagactggaatgcgcctaaggagatcccggga

SEQ ID NO: 29878 - DNA, 499 bp, Glycine max
ttgtatggtaggaggtgtaggacacctctatgttggttagagcccaaagaaggccttaccttagggccagaagtggtacaacaaaccaccgagaaagtcaagttaatccaggaaaggatgaggaccgctcagagtaggcaggaaatttatcatgataagaggaggaaagatctggaattcgaggttggtgatcatgtattcttgagagtcactccgtggactggggttggtcgagcattgaaatcccgaaaactcacaccttgctttattggtcctttccaaattcttaagagagttggccctgtggcataccaaattgcattgcccccgtctctttctaatcttcacaatgtctttcatgtgtctcaattccgtaagtatatccatgatccatcccatgtgattgaatgggatgatgtacaagtgaaggagaatttgacatatgaaacattgcctttgaggatcgaggataggcgaacaaaacacctatgagggaaag

SEQ ID NO: 29879 - DNA, 788 bp, Glycine max
  unsure (1)..(788): unsure at all n locations
acgcgtacacggaacgcctctatccaatagcacccacggtgatgtatganatggatcanttacttccttattaaccagcccacancggcccaatgattggacctgtggagccccgggagatcctatagagacgacctgcgcgcgtgcaagctggtaagatatggaagatcattctttcttgtcagactccatgagaataaccggtcatcctgggcgcaagagaggacaactgcagacgagtgacccacacacctcccacaaggggtatgccactagagagttaattaatgggagcgacctgagagtatcccacaagcatgaacagttttccgaaatgatacttggatggagcactcaccaccttaacgaacgccgcgacaaaacctagccctcgttaaatgtaattgagaaagacccgaatcatcgatcgaatcacgatcgcgctgcaaagttcgcgagacctcccaaactgccacgtcgctgcgcatccccctacgcacaccactcacgcagcaagtaattcntttataaagtaagacttaaacccgatcgaggtcgagttttggagaagacgatataaaaccccatttccacctaaagtttgccgcagtattaagccaacagaagttggataagtgtttctcctcaaattagaatgttttggagcaaatccagtgaccaacaaggagagagcgcaaatttggcccatgggcattaggacaatagttccccacggtaaactggttcgttcccataacgtttaccaggagacctgcaagaaaaaaaag

SEQ ID NO: 29880 - DNA, 518 bp, Glycine max
agcttgctaggcttcaggaattctggtactttctgtccaggaaagccttcaagatgcaactttttcaatgttggaggcaaatcactgtaccttgtttcagacactccccatgatattttgagatgtttaagtgccgacaactctcccaagctttcaaactccccatctttgataacagcctcacttcctatatgtatgctgagtctccttagttctttcaaattctaaagatcagatattctgcagggagtctttctagaagtacttatgacaaatcccttgagaacttggagatttgtgagcttttcaatcccctttggcatgccctccaaaaagtaacactgggatacaatgagatgtgtgagatgtttcattgatgaaatataattaggcagtgtttccaagttgtggcaagctttgagatcaagaatttctatgctctcaagttgagcaatggacggtggaagctcagatattcttgatatcccacgaaggctaagataaaacaacgtctttag

SEQ ID NO: 29881 - DNA, 379 bp, Glycine max
ttaaatacttaatcttttgccattgaatcattttgactgagttaccatgccttttttggttggtgggtacttatgggagaaaatgttggcttcaaacagggctgacctaacatttatttatgtctaaagcaaattttaagataagacctctataaaccaatttttttggttacccctttttaaaccaattaaaataatttattaaaactattaaaatttgatttaaaattgatctgtcaaactttttgaaatgcaaaatttcgtatcaaattatcgtaatcaatttcattttaaatcctaataagcaagctgcaatctttttacccaccaaaaaaaaagattggggaaaataaagaaacacccgtgtgtacagggggaa

SEQ ID NO: 29882 - DNA, 499 bp, Glycine max
agcttatgcgcatatttccttacgaacgttctcttgcacaagacattctattaactaagaaaaatgcacccatatacaatcaaggcagcttcgttacctagattatttatacgtacttccaaggtgtatttgttacttacatcacacacatctccttggctaaatttacatacatgcatactcaaagcattttggggtaccaaaaattgcacatgtgcacatcttggtatttctaatacctatacatacacaaacttcatgatgaatcttgactatctacacaataaggtgctacattccatgctcttttcaagtttttgctacctaaagccgcatgcaaattcaagtatattttcctttgctgactaaaattgtattcaaattaaagggtatacatttttttgtaatgtattttctttacataacatgcaacatatttatgtatatttttttgggagacattttgactaccaaaaattatatgcacatacatcccaag

SEQ ID NO: 29883 - DNA, 489 bp, Glycine max
tgcctgtccgatgcagcagtaatgatggcccgagttatgttggggaacggttacgaacccgtaatgggtttaggcaaagacaacggcggcataactagcctgataaatgccaaaggaaatcgtgggaagtatgttttaggctataagcccactcaggcagatgtaaagggaagcatcgtgggaaggaagggcggtggtcaaagctcgcggttgagacaagaaagtgaaggaagcccgccctgccacataagtagaagctttataagcgcgggtctgggagacgaaggtcaagtggtcgcaatatacgaagatgatgttccgagtacattggatttggtacgaccttgccctcctgatttccagttggggaattggcgagtggaggaaccccccggcatttacgcagcgagcataatgtaaacctttacggttttaaaagctctataattgggcctaagctttagagtttttcttttggttaaagctttg

SEQ ID NO: 29884 - DNA, 541 bp, Glycine max
  unsure (1)..(541): unsure at all n locations
agcttgccgccacggagtttccgactatgtttttgtggggnggaacaagctacaaaaggagagagcaagaaatgaagagccaatggttgatacatggacggagatgaaaaagatcatgaggaagcggtatgtgccggctagttactcaagggacttgaaattcaagctccaaaaactaacccaaggcaacaagggggttgaggagtatttcaaggaaatggatgtgctcatgattcaagcaaatattgaagaagatgaggaggtaactatggctcgatttcttaatggtttgactaatgatatccgtgatattgttgagctgcaggagtttgttgaaatggatgatttgcttcacaaagcaatccaagtggagcaacaattaaaaaggaagggagtggctaagaggagttttaccaactttggttcttctagttggaaagacaaaggtaagaaagatggggctgctacttctagtagttccacacctatcccatcaaaaactcgcttagagtcccaagaggaaccctttaaaagggggggg

SEQ ID NO: 29885 - DNA, 487 bp, Glycine max
tgccgccacggagttttccgactatgctcttgtgtggtggaacaagctacaaaaggagagagcaagaaatgaagagccaatggttgatacatggacagagatgaaaaagatcatgaggaagcggtatgtgccggctagttactcaagggacttgaaattcaagctccaaaaactaacccaaggcaacaagggggttgaggagtatttcaaggaaatggatgtgctcatgattcaagcaaatattgaagaagatgaggaggtaactatggctcgatttcttaatggtttgactaatgatatccgcgatattgttgagctgcaggagtttgttgaaatggatgatttgctttacaaagcaatccaagtggagcaacaattaaaaaggaaaggagtggcttacaggagttttaccaactttggttcttctagttggaaagacaaaggtaagaaagatgggggctggtacttctagtagtttcacacctta

SEQ ID NO: 29886 - DNA, 661 bp, Glycine max
  unsure (1)..(661): unsure at all n locations
cctaccgcgacactagacancccctactccgcgtagctattagtaggaccattgcactactcntctatctctagtcccccggcntgtgttgaccttgcagccccgaatctaaagaccccggcggcaaccctaccggacaccaggacaccttcttttatacgccgctaaaaaatgccaccacatccggagacgaggttaaggagtgccccattggagcaaccggaggggcacggttctgttattcaacagagagacatcgcatgacgatgaaaacatgggaaaccaacctgaagaaacaaaacagcaaggggatgcccaggaattaacacggggaaaccctaccaaaccgcagaataaaacggagaaatagcccggagaatcagaacaacaaaacagcgaggggggccacctaacaggacacacaaggaggggcccaagtttaatgaaaagaacaacccagtcggtgaaaaagccacatctaaaaaaacgccgggccccaggagccacataagaagcccacagctgagccaggaaaaactccgtagatcccagtggggccaataagccaaaaccctggagaaaaaaaattctccagaccctcggaaacacacccccgaacaaagaagcaaacaaaaaagacccgggagcggaagacaaaaag

SEQ ID NO: 29887 - DNA, 305 bp, Glycine max
tataataagagagtgaagtcaaaaattttttttgttggagaatttagattggaaggttattctgcccatagataggaagggaccgagccttgggcaaatggtccccaaaatgggaaggaccgtttaaaaataattcagatctattcgaatggggcttatgagttagaggagctaacccctcaaaaacgtactttgagcataaatggtaagtatttgaaaaaaaataaaccaacactgcttgaagttaaaataagcatagaataagagaaatacgggaaacataaaaatggcgataacagtaaatt

SEQ ID NO: 29888 - DNA, 307 bp, Glycine max
tgtagggttaaagtctcacgattgtttcgtgctcatgccacaattgttagttgtggctatacgagacgtcttgccaaacaaagtcaggttaacgataactcgcctatgctttttcttccattctatatgtagcaaagtcattgatccagtcatgtttgatgagttggaaaatgaggcccaaattatactgtgccagttggagatgtattttccccctgctttttttgacatcatgattcacttgattgtgcatctgatcagagaaatcaaatgtttgtggtcctgtttatctaccgtggatgtacct

SEQ ID NO: 29889 - DNA, 429 bp, Glycine max
ctccttttttctgcacggaagggcaaaggtctgtatggtggtcagcagaggagcacaaaccatagacccttgctataggaacaaacttttgattcaaggccagttgggttaccaaattaaccaatgcattcagttagccttcaagcttcttaatttcagatgatgcagataggtttgtagctacctcatgcactcctctaatgactatggcatcatttctggtgctgaactgctgggagttggaagccatcttctccattaaatttctggctacagcaggagtcatgtttccaagggctccaccactggcaacatctatcatacttctctccatattactgagtccttcacaaaaatattgaagaatatgctgctcttgaatctgatgggggggacaactagcacaaaatttctttaatctctcccaga

SEQ ID NO: 29890 - DNA, 508 bp, Glycine max
ttccgattcattctgtgtacccgtggtggtccacattgggcttcgcgtatttttattctcatttcatttactttttatacccccttttgatgtgcttaagccgttttatttaagtcatttgtcgcttaaactaaaaataaaataaatttccaccgatcgtttgaattgtattatctgttaacttcggttaaaaggaattccgaccgttcggtcgtgccggaaccacgttggaaataaaaaaagaggtcaaataataatataataatcaaaaaaacgtcttttagtaaaataaagcggaaaatcaatcggacactttctctttgggatttctcattcttaattgaattgactaataactaaagtgaaactaaggcttaaatcaacttcgcctggtcaagttcgtccataaaaataggtttttgaaggttgtcatttcaatttcttactaagtaaaatggatcattttcaaggttccaccccctaaaatgatccccttttaagtaaaaag

SEQ ID NO: 29891 - DNA, 495 bp, Glycine max
agctttatgttctaacttctatatatgttttttttggtgttagaatattacacagattctaactactaagagaatgtgaagttctcccaaatatgcaaaaaaagaaaaggagaaaaacttaggttatatattcttacttcttaggaattctatattttgctgtttgccaatctaaaactctaaatggctgtttgaaagaatagagtatgcgatagtgaagaacaattatggatgatttatacaaacttattgcttgggaatcttgaatttatatcataatttatcttgaaaaaaattatttttgatttttttaaaaaaaaatagttattgtgcaggattattgcacagtaccattttggagagtctacgatgcatctggttcaaccgtacagaggcaaaggatcgggaaatactagccaggaagtgattattaataaaaatgttggaaaatctattgtggatctaattcattattacctacaccaatttttcatg

SEQ ID NO: 29892 - DNA, 309 bp, Glycine max
ttaacttaaggagggttaaaatatgttttattattagttattcatatcttcatagacagaaacataacatgctatggagattaatagaatgttggaaagccaccttaattgccatcacccctagcctgccttaattgtgattgttagagttggttgtcaatgtggggatatctattaactaaagaaaggctaagtcaagcattgtgtagtgggcatccattcaaaagtcaactcttgggaattatgatcccacatgaaccaaatataaaggctaaatagtgcttatacaacttgggcagcccttacctt

SEQ ID NO: 29893 - DNA, 492 bp, Glycine max
agcttgattcagatttaattgccacttttgtagtaggtacgtattttatgtgcatgttatgctacttttgcgttaattgtcatttaaattttcttattttattgacaggcataatcagagaagatccatcaataaaagtgtctttgattcaagagaggattaacagtaaatttacgtacaaggtgtcgtacaaaaaagcttggttggcgaaacaaaaatccattgcacttgaatatggcgattgggaagactcatatgcaaaattgtcgtcgtggctaacacacatgcaaaatcattctcctggatcatatttttaatatggcgtgaagcttggttagtcgcgaacaccgtcagtttcatagagtattttggacttttggtcaatgtaaagaggctttcaagtattgtaagccaatcatacaagttgatggcacacatttgtacggcaaataccgtgacaccctcttaatagccacatcacaagatggaaat

SEQ ID NO: 29894 - DNA, 337 bp, Glycine max
catacccattctgttttagggtttttgtgatgatgtttgtgatgtttatatgctgaaattgctaatggaaatctgttagagaccaaaggtataactaacccaaggttagaaagtgagaatgtgatgttatgagtggaaaaagagtgaaactttgaaagttggaaggcttagtcggaattctgtggtaaatggaggttagagtgagtcaatactagcttgaaatgtaatttagaacatgtgagaaaggttaggctgagctagagagaaaaataaatgaccaaagtggaacaagaaccatttttagggcaaaattgggtgttgaaaagtcaaattttga

SEQ ID NO: 29895 - DNA, 503 bp, Glycine max
agcttactcctttggaactacgactagtattatttgaggttccacaaagaaaaaagagataccactagacttgttagcaaggccttcaaccaggttgaaatcaaactcgagatgattgcctaccattgaattttctatttcatacaaatccatcaaggattcaaacccattgaggactcgctctttattccaccaagaccttacaggcggtctatccccactaccacatgcaatagagaattgtataaacaaggtgcaacaacatacaagacaaggcaaaattccaacataaaagtaaagcagttgcaaaattccaacatgcaagacaaggaaatattgtcaaggttacaaagccattacgacccaaaatccagtaaagaagaaatttagaaagggcaggctaaacattggccccaacatcttgcttcttggcgacgtccttttttgtggaaactatttattgcttatcaatttgttcaccatccttcaagtccttaaatggg

SEQ ID NO: 29896 - DNA, 511 bp, Glycine max
ttgagccaaaatcctgactcaccataaaccttgactccattgtgagaatgtcaattcttaccctcggaagcaaaaaaaggggagagggaaaatttccaatcaaagaggaagcaaaaaaggagagaaggaaaatttccaatcaaaggaaaaaaagagaggaaagggaattgtcaatcaaagagtgggagaaagcaaaaagaaaagaaagaaaattcccaatcaaagaatgggagaaagaaaaagagaagaagaaagggaagaaagttcccgatcaaaaaaataatatgcagaaaggtctttggaccggacaatatctgaacaatacagaattgtcaccaaatgaataaaaagaaggaaagggaaccctgacctaaaatggtcttccccctttagttgccaggcaaaatcttgtgcgctagcaaccttttttcgccccgcactaaaccagaacaggaaaggaaaaagccagaaaaatcaaaagccaaaaacacacaaaagccgaaaaaaaaaa

SEQ ID NO: 29897 - DNA, 369 bp, Glycine max
caaagtatgcccgagtcattcatccctattttattctcttttaagtatcggcgatcagaattgcctttccttggattatagggttgaaccaagctcatgcttttacaaaaaggtgcatcaagtcaagtttaaatatggaagttaaccttcttgcaaaattgtggcaaaagatgaatcgagtcacatcactgcttcttctactgccaaatatatttaggattattgatgtccttgttactcccagtttcaccttgacaaaaatgtcatggaccttgttgaaaatctaaattgattcaactccatattttgcgttaagattccctatactttaactgttcatcatttccatgcatctcatgcttttcattg

SEQ ID NO: 29898 - DNA, 373 bp, Glycine max
agctttaacggtaggaagaagattttatatgttggccatcatcaaaaagagggagaatgtgaatgtatgtatacacgattttgatgatgccaaaagaagaatcaaacaaggctcattttgcttcaagattaatacaagattgtttcaacaaacaaagccttgattcaagatttcttcaagatcaagccttgcctcacaatgaaaggtttcaagtcattcaaggcacatgtaatcgattaccaatacatgtaatcaatcaccaatggtgagaaagtgtgtaatcaaatacacataatatgtaatagattaccaaaaactctgaacgctgggaattcaaattttaaaagaagggtgcacaactgttcaaaaaaaa

SEQ ID NO: 29899 - DNA, 875 bp, Glycine max
  unsure (1)..(875): unsure at all n locations
gaaaaaaaaggaaaagaaaaagaagagagagtaaaaaagaaaaataatagggaaaagggaaaaaataaataaaaattccaaggaaagaagaaaaannnttgaatcgtgaatagcaagcgcaanntaaaaccaaaaagcaggaaaagaanaagcgaggggagagaaaatttttattttatacaaaagagaaagaaaaaagaaggaaaaaagaaaaagagagaaggggaaaaaaaagaagagaagggagaaaaagaagaaagagaaaaaaaataaaagaaagaaatgaagaaagggggaaaaaggaaaaagaagataaagaagaagaaagagagagaaagaagaaaggaaaggaaaaaataaaggaaaaaaggagaagaaagaggaataaaagaaaagatagagaagagaaaatatagaaaaggaaaagaaaaaaagaaaaaaaagagaggaaaagaaggaaaaaaaagaggaaggagaataaaaagaaaagagaaaggtagaaggaagaaaagattaaaagagggaataggagagggaaagaagggaaaaaaagaaagtaagaaaaaaaaaggagaaagggaagaataggagaagaaagaagaaaaaaagagaaagaaagagagaaagggggggaaaaagagagaaaagacgaaagaagaggaagaataagaagggaaataaggaataagaagaatagggaataaaagaaataaaaaaaagaaaatagtagaagagaaaagaaaagaaaaagaaagaaataaaataaagtaaagaatagaaagaagaaaaagaggagaaaggaaaataacgaaagaaataagatagtaaagagaaataaaaaagagagttgagagaataagaaggataagaaaaag

SEQ ID NO: 29900 - DNA, 507 bp, Glycine max
agcttgtaggattatggggtacccttctcatgtggtactaggtggcggtcgggcgatggtgcacaacaaattttccacatccacaaatcgcgcataaacccaccatcccctgttgcccacctccaactgagctcatgtactcccaagtagcccatatcctcgtttttctcaacaccgagtccccatcaatcctcccaagcttccccaacatccaagtaattcaacattcaaacaacacaaactatcacagccaagaaaacacggcaaaggtagaaaactctgcccaaaacaccaaccaaaatcacagcttttctcacttaaagaccccagtaacaattccttctttccaatttgttaaccgctggatcgactcaaaaatttcactggaagtctcttgtacataaacctacattttgaccgttgggatctactagaaaacacccataactcattctgcatcaatcttttcacacccagcaaattcatagcaattttttctgcacttat

SEQ ID NO: 29901 - DNA, 477 bp, Glycine max
taggctaaattacgctaaactttcgtaagctatttattctaagtctaatccaacaagagggatatgagggagaagcttagtttaagttagtctaaacctaggagggttgtctaaattgaccttagtccaacaagagggatctgaggacgaagcttggattgattcagtccaactagggatcgaggtttagtaatttaggataccacatataacacaaaagcatgattgattagaaaaacatccttatttgcattatctggcctggtcaaaaaaccccaccctttttaactacggctggcaattttacttacatgcatttttactatttttaacctaaacctaagttaattctattttaaatcatcaattattaatgtttctttcaacaatgccttatttctgaatttaacctggtcttaaactagtttccctggattccatacccggattcatctgttttaatttttaaatacttga

SEQ ID NO: 29902 - DNA, 129 bp, Glycine max
atacaagcgctgggcatgatgcgatgatcctgtggtgcctaacagagtgatctaactaacattaattagcgacatctataatgcctggaatggatgaatgcatactgaaatgcctactagcattaatga

SEQ ID NO: 29903 - DNA, 524 bp, Glycine max
aagcttctggtgggacagtctagacttgcgttttctatctgacattcaccacagattctgccttcttctattttcagattgggaatgcctctaacagcacttttgtcaaggattttcttcatgcctcttaagtgcagatgtccaaacctttgatgccatattctgacttcatcttctatggtggatagacatgtggaggagtagctggtttcttggggtgtccataggtaacaattgtcctttgatctgctgcccttcattagaacttcactcttttcatttgtcaccaagcattctgactttgtgaagattacattgaaaccttcatacacagctgactgaagctatatatgtttgcagtctgttccctttaccagcactactttgttcatactatgaagtccatcctcaactagcttttccattccaatgaactttttctttatagccatctccaaatgtcacattactagtgtgaccgggctcaatgtttataaaggaatcttttgactccctgtctgtgt

SEQ ID NO: 29904 - DNA, 832 bp, Glycine max
  unsure (1)..(832): unsure at all n locations
tggcnntancatgtncncnnnaatnnggggnnnttttgaattccgattgacagattcgtctatangaccccacaccttaattanatatcacctacatagcctccttagtagtcnccaaaagatctcctgtgcttctaccacactaaaatttttttgtttttttttgctgagtaaaagtcaaatgtctttacccctgtggtgaggcattagaaaaggtggcagtacgtgaggcccttttcctgattctttagaatggaaggctcggccacattgtagaaccaagggaaacaattttttctaactgaattagagaaattacatttgtatgagggaaatagggtagatttgttcaaattcacaagcaattgcgtgacgagtcagcctcatttcggaaatattaaaagcagaaatattcgcaacttccaaacgtaatgtggtagtaaatgattcacaagatgaattaattatataggggtaaaaaaagtttctcccgaatccaagaataacatatattattgcctcagaagggtcctttttgtgacgcgcgatcaatttttgcttgtaaacaaattacaagcaaatttggtctcccctagatggattataaacacgaaatgggaaagggtgaaacccctgcacccttaaatatgggcctttcccccctctttattttgcccattccaaaaaatttttggtgccccttagccacacctttttttttttcccccgccccttaaccccccgaaaccagggaaaggggaaaaaagcccccggaataaattctttatgtccctaaaaacacacccattagcccggataaaaaaaaaaacct

SEQ ID NO: 29905 - DNA, 775 bp, Glycine max
  unsure (1)..(775): unsure at all n locations
ccccccccagcgaccagacacaccccgagaccgcacacaccaaacctccaccccaccacaccnaccccgcacccccagacgttgagcacgcatagcccaccctggacacaaaccncaccagcagcagcaagcccggaaagagaacaaccaaacatgtgatcgagccccacgcccccggcgccccaccgacagaacaacaaaccaccaacacccgcaccaacaacacagaaacacccccgagcaacacagcggcaacgcgcgcgaacgaaacaccacgacacagcacacaagcgcgcaccaccccccgaagcaccagggaacacccaccccagaacaaacgaagaaggcacgacgaccgaaccaacgagcgaaggaagaaggaccaaaccacccccccacgacggcacgaaccacagagccacgcgcacacgcggcgaaccaccaacgcaacaagaacagactccacgccgccaccacacgacacaccaaacgaaggaacgaacgagccgaccagcgcaacagagacaggaacgcaccacgacaccaaaaacgcaggaagcccacaccccacgaccacagagaaccgaaccacccacaacccacccgcacaggcaccaagccccaagacgcagacagcaccaaaccaagcgcagcaccaccgacggcgggaacgcgaacgacgacctcacaaggaacccagcaggcaacgaacccagccaccaacagcaccaagccgaaccacgcacgaaccaccacccacaaacaaacccccccg

SEQ ID NO: 29906 - DNA, 444 bp, Glycine max
agcttgaaggtaaactagaggccacggtttatctggtgagccaactggccatgaaacaaaaatctgcacctgacgccacactctgcggattatgcccctctgccaaccaccacacagatctttgcccatttgggcaacaatctgaaacaattgaacagcctgaagcttatgctgcaaacatctaaaacaaacctcctcaacctcagcaaccaaatcagccacaacacaacaataatgacctctccagcagcagggacaatcccggggggaggaatcatcccaaccttaaaagggcaaatccttcacaacaacagcgacaacaacaaccacaacaccaaccctattttcagaatgttgctggcgcccagcagaccatacgatcctccaccaaaccagcaacaacaacaaccacagcctcaaaaacagcaaacagctgagagctcc

SEQ ID NO: 29907 - DNA, 376 bp, Glycine max
gcactcttatcagctatctggttgttttctacctcttccatggcccattccctaatggatggcgcctcctctcccctattctcctttgtcatacgctgcatctccatggaggaaaatcacccttacaggacctcattgtagcttcaagatccagccatcataaaatccacactagctaccttctatctattggtaatcagagcacacgagctacaagtaagtgctccttacacctccattaatctttctgctttaacttctcttacatcgccgaaacttcatgcttctacatgtttctactcacatgtcctgtgctaaatgtcgataacaaggatactttatattttccaccgactaaacttgccgtacaagctct

SEQ ID NO: 29908 - DNA, 433 bp, Glycine max
tcagacctaagcaacacaaaatctaggtattctaaatccctcaatttaatggattttcaaggtttgagaagtgaaattgagaatgaagtaaatttggagcaaactctcacctcacacaagtctataacatcaatttaaacttgctcaaactggatttacacctaaaattccaccgaatcaaaatttgactcatcaacacccaattttaccctagaaatggctctttgttcactttggtcatttgtttttctctcttgcacagcccaagctttctcataagtcctaaatgacatttcaaactaggattaactcactttaacctccaaataccactaaatccagatttgaccttccaactctcaaaaactcactctttttccactcataacaccatattctcactttctaaccctaggttaactctacccttcat

SEQ ID NO: 29909 - DNA, 490 bp, Glycine max
agcttgccgctggagctgccccattttttttcctaactcttttaaactggtgattcctatgcttttgaccttgacttgatagaacctctttttaaccgaatgcgttcgacttgatcccatgttttactaaagggaaacaaaatctagcgcgaaacaaaactacgacatctatcatgggtggaatggatgaatgcataaagaaatgcatatgacacacatgcaatttatgaataccggatcccgatgaattgtctccttcttacatacaacgtcttggggtagcaaagtgcccgatgtatgtatttaagaaggtggtacggaccctccgttggtttgataaaaagaggggacccttcgaaaggcgcaacacgggagtgtacagtatgacaatattcacaaaatataagcaaaagggtacatgacacttatgcatggcagtgtgaaaaaatgggacgcagcgtgtccgcttcgtgcccctattcaagggacc

SEQ ID NO: 29910 - DNA, 474 bp, Glycine max
tcatccctagttagtaaattaagatgtggccccaaaatcataaataccttgtcctgtcctcccacatgccatacggtgaagctgacatttttgtactccacagtctccacattgaagcctaatccatcgaaggtatgtgtacaaaatttcaattattttcatttaacactgggattgtacaaaatagtcatatcggaatgatttaaattaaaagataactatatatatatatatatgtatatatatatatatatatatatatatacatacatatgggtattttacataatcatgtgagctctaactgcacaaggacaagatgacagttctaatctgtggacaagacacatgacgatataactagtcccaattccagtggcaccacacaaaacttccaaaattcaatacatttaatgacgaaagagttaggatctgcttataaacgaaaacgatggtttaaagaatgcatggaaa

SEQ ID NO: 29911 - DNA, 417 bp, Glycine max
ttcaaaaaacgtcgatgccaagtgtatactttttttcttccatgttttagttgtacatagcttgtgtcttcttcatagatagggcatgcacaatggcccttaacactgtatccactcaaattctcacatgctggaaagacattaatggtacaaaataacattgcacacaactcgaatgtcacattttaatacccatcaaacacagcaaccccctcgtcccacaactttgtcaagtctttaatcaagggactgagataaaaatcaatgacattttctggttgtcttgggcccgatatcatcatagacaacataatgtatttttgcttcatgcacaaccaaagaggtaagttgtaaattactaacaaaaaaagccccaaactgtgatgagtgtttaaactcccataccgattctttcca

SEQ ID NO: 29912 - DNA, 525 bp, Glycine max
agcttctttgagaaaacttccttgagtttctagagcttagctacacacacccctctcataactaagctcacctccttgagaagcttccttaagaagattcataaacaagttagagcttagctacacatacctgtctaatagctaagctcacctccttgagatgagaagctagagcttagctacacaccccctataatagctaagctcacccccatgacaaaaaacatgaaaatacaaaaaaaaagtccttactacaaagactactcaaaatgccccaaaatacaaggctaaaacattatactactagaatggccaaaatacaaggcccagaggaaggaaaaacctattctaatatttacaaagataagcgggctcatacttagcccatgggctcgaaatctaccctaaggctcatgagaaccctaggaccttcccttggatctctagcccaatcgacttggagtcttctacccaatgcccttgcggggtaggattgcatcaaataggtaaaaagcgttgggtctt

SEQ ID NO: 29913 - DNA, 406 bp, Glycine max
tcggtatgcaattttgagagtctcgatattttacgggactcaatcagaaatccgagcagaaaagttactgtcatttgaatttactcagagcttcgataatcaatttcgagcctctcgatatattacaggactccatcagacacccaagtaaaaaagttattgtcgtttgaatttgctcagagcttcagtattcaatttcgagcgtctcgacatattacgggactcaatcaaacatccaattaaaaagtaatggtcattggaattggctaaaaccttgggccttaaattccaagcgtttcaataattaacggaattaatcctaccatccgagtaaaaacttattttcgtttgaatttgttcaaagcttcggtttttatttccaaagagttggatatattatggggct

SEQ ID NO: 29914 - DNA, 826 bp, Glycine max
  unsure (1)..(826): unsure at all n locations
ccacacacacagagcaacgcacaggaatagcgacacaagcgaacggcagagacccaaatgagaccgcatgaacgactcnaccccaccgccnnccncggggaagtgatgactcaatagccccacacgggcaccacaaaaaaccacccgcgagcacgcaagcggggacagcgaacaaccaatttatgtgtatcgacgncgngcgcccncggaccgcccgaacgcanatcacacgagaacgccaacgaaaaccacgcgaacaacccagcngaacgaaacaccgcacaagacacgacgacccagagcacagagacaggacaanatgaccgcccgcggacgacacacgacgtgcgaaagaacacacacggcataaagagaacccacaagaacacggcacaccagcactgccaacggatacccacaacgacgccggatagaaacgaaagacacaagagaatagagacgggaaagcggcccaaacacaacaaaaaggccagaaaacacgcgccgacaagcagaacccacgcaccacaaagggcaccccccgagggaacacacaacaagaacgggcgtacctatgaaagcgcgaaccaggccacgcaacacaaaaaggaacaaggccgcacaacaccaacaaacacccaaaccgggggaaaaaaaagacaaaccccccccaccgaagtaaccccaccatggaaccgcacaacgccgggaggcgaccacccaaaccaaagcccccccgaccaaaaggaaacacagaagcccgcaaggacaaacgaacgaccgacggggcagggacaaacccaaacaacctccaaccaaccccccg

SEQ ID NO: 29915 - DNA, 925 bp, Glycine max
  unsure (1)..(925): unsure at all n locations
agaattgaattcttagcaaattcctctgaaacgaccnctantngnaatacctgcaagacatcgcgtggaagactctatccataaaggaagagaggaacaacggccccatttgtgtgataatttttgtttgaangcaaacgcaaggttttgagtttatttacagtaaaaatcgcttagctaaccttacatgccaatgtaaggcttatattagcacaaagtggcccattaagaagtcgtttgttccaacccccaaatattttttaacgattgccttgtgccaacagaacaatttgtgctgggtggctaaaaatttccttttagatacccaattcctcaaatggtcttcagagggcaataatccccccattcaatagcccacaatataaacacagcggcttttcgttcaccaataacatcttttttgacaaaagatcctctataatttcacaccgttgccctccgccatataaaaaaatctcaaacacacacactctttttattactgggttgggggttttgagagacccccataaattttcttaaaatataaacaccaaacaaagggtggtgattttgcgttttttgcttccacccaccccacaagggggggtaaacgctttgtatattgtggcccccacaacaaaagatggctcccaaatacaatcttgttgttttagaacgcgcgtctgaaatcgccccccctcccctccgcgtggatgaataagaatcccccactcctctctatcacaacaatctttctatacaacaaacaatatataaaaatatcgtggcggcgggcgcttctcttctgtacgtgccctaccatcttctcttgagatatataaatcgcngcgagagggtgtacgatataagagtattctcttctctgcgtcatactatatacatatacacaaccacgcaccgn

SEQ ID NO: 29916 - DNA, 497 bp, Glycine max
  unsure (1)..(497): unsure at all n locations
agcacgnatgcgtccattatgtcgaatttttttatagacaaaatattaacgatcaaattggcagttctacaatacaaatggcaattcattcattcgttttcaattcaatcaaattaaaaaaagggaaaatgtgtatataaaaataaattttttagtatgtcataaaaataaattgtatttgttaaaaggggtataagatacaactctataaaaagattttaccgcgccataaactattattttgataacaaagaacagatgaatactaattttcattacctttacggcaaggagcagcattttgatactcttaacctgctgagatttattgcgtttcggttgcttccacaagaagataactccaacgcttaaactctattctatgggggagagcttaattattccaacgagcaaaattttaggcgcaattgatctgcaaaagaaataaacaaaaacacatgtcatagttatatgataacaacaaaatagtatgaaaa

SEQ ID NO: 29917 - DNA, 304 bp, Glycine max
taactgaaatatacgtaaagtctgacaaattttttgtttctgccaagaatcaaacttaggtagtacccgaactattcaactttaatttcagcacattaatcacttgtaatcaatcacttgatttacctttcataacttcatatgatatgatcatgttttaaaggaaattagaatataattatctccgatgaaaaatacctatggtttaaacaaaaaaataataataattgaaactctacccgtgtcactatgcatacaaaaaggctagttcatttggttgaataaagtgcgaaaattattataa

SEQ ID NO: 29918 - DNA, 279 bp, Glycine max
gagagagaaccaccaacaagcctgagcgaagccacaacaccctggctgaaagccaagaccaccacccccagaggggaaggcccagcctggaaacacagaccctatactaactaacctcacccccctggcacatacaaaccacaatcccagaaaaagcacctccgcccaaaaataccccaaaggccccacaaccaaggggcgcaccctaaacaagcaaaacgggacccaaaacaggcccccaaaaagggaccacccaccccgatatggaaacacaaaaac

SEQ ID NO: 29919 - DNA, 260 bp, Glycine max
tcttacaaagcatacggctttctggatgtagatgatgtatatctatacagatggatcttatatatctatatatctatagatagatatatagatatagatatatagatatagatcatacaatgaagtaccgcacgagtgggtatataggaatccaaatctgccgaatcactcatgttatgatcttctacatcctaagtctttccgttccttcatctggcttatgttcttcatggagcattcaaacggaatgactctatgaa

SEQ ID NO: 29920 - DNA, 499 bp, Glycine max
agcttcaagagtatttaattataagattttgatcaataatttcattttttatttcactggtaagtaatttcatagttgattaaaaacattaagatttcataaagtatactaaattaaatattgaataatataagttgtgtacgtctaaaaccttagagttgttgtcacggctttgcacttaaaaaagataaagataatggatgcaagtaaggagatataggtacccaacaagtaaagaaatggaaattggagttattacgtgcaaaaattactggtcggatagttattttttctttccaaatgcgagtacaaaaataaatactatggtactttattcaaacctttttcatgttctatccagcttattttaggaattacaaatttgtgatcaattataaatagaagatcaatgtgaaccagacagaaataaatagaacatcatgaaaaaaatcgaaatctatagaggatcaatattttagagtaattttgattactagat

SEQ ID NO: 29921 - DNA, 505 bp, Glycine max
ttgttaaagcaaaagtaatagccatggacaactatcccccaatgaaaacacccaaagtggacttaaccctgggtgttttccctaaaaaggcccccaaaacagcatcatacagaaactatatatgcatgcttatctatatgttaatatgcacaaaggcattagtgtatcctctccccaaaaccttaaggactcaaaatcatgagaaacaaattaccttaaacaagttgctaagaaaattaaagcactagaccaatcaaatacaatggaaaaaattataacttaactatgagtagcttgcagcaagtccattggtgttacttcatgatatacctacttaccaataaaatatttaaattgtaggcactatttatctagttctttgcaccatcatcacgacattcattgttggacactatattgctcatcatcacaggtatgaaagtttgcaatcaattttgatgcttaattttggtatgaatatttttggatggtggatgtgaataat

SEQ ID NO: 29922 - DNA, 354 bp, Glycine max
agcttgcttctacaggcctcacaccttttattgtatgaggtttcagtagccccaacgcagaggtgctgcaaggagtccgcaaggcatgggaaatggtgcaaaagaaagacaaagaacttatgggaagtagcaacggggccgtcgacagctaccataggtggttgaaagcctatgcacaaggtctgagttggcttctgaagctgagagctgctaaagaggaggaggccgaaacaccggaagaaagcgaaaaggtgcaagccctaaaaacggagcttgagaaagcccaagcagtcaaggaaaagttcaagtcaacagtcgtcaggatccgaaaggagaacgacaaactgagagacg

SEQ ID NO: 29923 - DNA, 407 bp, Glycine max
tgagcttggttcaaccccgtaatccaaggaatggaatttctgattgccaatacttcaacaacatctcatagggatgaatgactcgggcatactttaagcttatgcacggaaaatgtaatttgagatgcccgaagaaacaccatttcctagttaaccatgcattaggtaccatgttcaattattttgttttgttgttgtgtgtttttttttagaaatgggtttatgatcccaacatggttggctcatggtgcctaacacatgcaactaaaaatgtagtgtgaagtttcacgcttccccctttttgtttttgttttgtagaggaaaacgcaaggatgagcaaacatgaaaacaaatggtatgcaaatttgcaaatcaaaaagtttgttgaacgcatatgcatgatgatg

SEQ ID NO: 29924 - DNA, 513 bp, Glycine max
agctggtgcatagacaagtacctcattttttttatccacataaccaccaactcaacgaaacaaaaaaatgaaaaccaaaaaaaaagagagaaggaaaatctaacctttgaaacagcaaagagactatatgggattattgtgtgtgaaagagagagacagagatctgggatgagagtggattttgggtacaaatgaaggaaaaagaagagttttttattttagacagaagattatactgatgggcaaagacaaagaagggagagaaagtcacgagagcattattaatcaccaaggctttttgggaactcaaatcactttcaacagtctagcgacttcgacttcactcaaaaaaacaaacttcacaacacaaaaactatgagaagggggagaggaatgagatacatacccactcgtattaaataaacatttacaaatgactccttgagtttccttaaacaaaggccactggtgaaataaaaaaataattaaaaaatttaatagaaatttgggggg

SEQ ID NO: 29925 - DNA, 189 bp, Glycine max
tattgtttctactgtagtggatatttttttttttatatagacaacaatgctcggagtcagccacatgcaggtgtggttgactacagacaaaggcttattacatgtcactttcttttggcagagaaacttgtatctacaaaacatgactacaagaaagacaatgtttcacttaaccatgcgtgcttacct

SEQ ID NO: 29926 - DNA, 800 bp, Glycine max
  unsure (1)..(800): unsure at all n locations
accccaccgaaccacgagcggcataccgacgccacctacgcaaacaacggcaggacacccaccaaacccaacacccccagccccncnggncnnaagtgaacctggaaacgcnccgacacctaccagaaaaacctgcacgcacgcacgcaaccggcgggagaaggagacctgttttttccaccggacggcaccacagagaccgccaccatcaatagacaaaccgggaaagcccccgacaacacaccacggaaaagcgagaaccccatgccccccaggagcagacggccaaaccgccaaggccacgagcgaacatcaacagcatcggcggaaagagaagggggggagcaacgggatactagggggggccagacgaaacacaaagagcttggaaacagctgcaccaccaaggagaacagacacagcatcgacaacttgagcaccagggcaaatccagaacaagagggaaagcgaacacacaccgaaggactaccaccaacgacaggcccgaacgcggatgccacaaaagcaaaggacaaggcaacggacaccgacgcccgaacacactaaacaggaaaacagggcggcaacggacaaaaagaaagaacgcacgcgagcaacacgagcgcctaggcccacacgccgagaggacacatagcgcccagcgcgaacgcaagacccgcaacgaagggcgacaaaaaagccaacgagagacccaatgggcgcacaaagggatcaaagcaagggacactacctcnggcactacacatgaaaactaggcagaccacggacaagcaccaccg

SEQ ID NO: 29927 - DNA, 706 bp, Glycine max
  unsure (1)..(706): unsure at all n locations
caccccctcccacccagacagaagaagataaactatcactccatcaccggacaaaccaaccgcgacccctctcctaaaacctaacttccaacacatancaagagcgaagcnccnccnnnnnccagttgatgcatgcaatcgcaaaacccagngacactataaaatacacaagccgcaatgtnaacgacagcagcagcaattggcttttaccgcatcaaaccatggagatcgcggaatgggatggcaagtgacaatacttggccaaagtggatctgagtgggatggcactaaacccatgatcacagtggagaaggaaaatgctcggaaagaaaatagcattgaaagaatcctctacaaaggggctatatgtaatacaaaaaaaaatggaacagaccggttctgtagcttccacccgcccaaaacggctaaacccggccgaaaacaaggaggtttcaaaaccgggaagaaaaaggggaaaggagcgctaaaaaaataaacccccccggccatgggaacaaaaaaccgcctcgaaaagtctgcgaaacccctggaccaaagaaacaacaaaaagggggaacccacgggggcaagaggtaacccccaaaaatttaaaaaaaaaaaaggcctatatccctacgcggaaaaaagaagaagggggccattaaaaagagggcccaaaccgcccccacagaaagaaggggaaaaa

SEQ ID NO: 29928 - DNA, 455 bp, Glycine max
agccaaatctagatatacctcagaacaatatatttttgtcaccacgagatatattgacagcggcggatcatctgattggaacgaaattcggaaagggtatacttgacgatataaatcatttgaaaaataaacgtattcgttcggcaacaaatctattacaagatcaatttggattggccctggttcgtttagaaaatatggttagaggaactatatgtggagcaattagacataaattgataccgactcctcagaatttggtgactacaactccattaacaactacttatgaatctttttttggaatacatccattatctcaagttttggatcaaactaatccattgacccaaatagttcaatgggagaaaattgagttattcgggccccggaggaatgaccgggcgaaccgctagtttctggatacgaaatatccaccctaatcactatggacg

SEQ ID NO: 29929 - DNA, 317 bp, Glycine max
tcgtgaagcaagctccaatgatgcaagtttcgtgaatctaagtgagatgcttatgtccacatctaataatattgtgtggaagtgtgctcttggaaagaactttacaagaaaatggtacaacagtgtgaaaaatttagcgagggaggctatgattcatcttacagctttcacagtgagagattacttcccatggttgggttggattgatgttcttactggaaaaattcagaaatacaaggcccctgcttgagcaatggatgctttgtttgatacggcaattgcagaacatttggcttgaaaaaaggaaaggtcaacac

SEQ ID NO: 29930 - DNA, 488 bp, Glycine max
taaaatacttttttttttccaacttcaaaaattcctacactgaacaactttataacatagcttatttgcaacaaaaaaagatctgggggattaacctattccgcatgactagagatcttttcagtgcatctattgcgtctttactgttggccccgttacccacagtggcaagcttcaaaacctgctctctatcaatgtccagaacgaaccctccacgatgcaggccataaaccagcttaactacgaagcaaaaaaaacagatgggtactcaatcaaaatgaagctccactcacaattttaatgctgcaagttctttagccaaagccctattcatttgttttaatgctccaaccttaagagattcccagcggcgacctacactatcttaatgaatttgtgaagcctgccaactgcaagaatagcacccccaatactagcatatgctttatggcaaaaaaactatagggcattcatgtagtcgtcatttt

SEQ ID NO: 29931 - DNA, 500 bp, Glycine max
tgctatagaagctagatttgattttctatggttcaaatttcttgttcttgttcttgaaccatgaattgtgttgagtttaggttcctttgatttttgtcttgttattttttgtggctgaaacctaaaccataaaattcttacaaaaatattaaagtagaagaaaacctcaaaaatctagagtgacttgttcacgtattgtagttttgtcatagaagtcatgtctagtcatgaaacttgtcacataagatttcttatgttgtgctgaattttattttcttgtttctttgtctaactcatttgttcatgagtgtatgaaattattttagcctattatttgatttgagtcaaatctttcatgttaattagtgcttaacatgttcatgcaaaattcttagagagtctttgattgtgaaccttttcttgaactgttaggtttccttatgattgtgtctattgtgaatttgagttttggtgattgaattgatggctgaaatgttgat

SEQ ID NO: 29932 - DNA, 686 bp, Glycine max
  unsure (1)..(686): unsure at all n locations
caaccaacacgagatgcaccacacgccaccagctnacgaagggatgcacgacagcaaaaaacnacccccncagccccccgggaagtgagcctgagaccccagagacnccagaacccgcggcgcgcacaaacaagacacagaacgcaaaaatgtatccataaccganaaanaaaaccccaccagcgccaggaccgcagggaaccaaacagcccgagaggggagcaaacaggaaaggagcgcagagaacacccccagcgccacacacaaccacagcgggcaaaacaaagcacaacgcccgagggcgcttcggaagccgaacaccccctagaagaagaagacgccgaaacaacggaacaaacccaaaaggtgcgccccccaaaaacagagcgagggaacgcccaatcagaccaagaaaaagccaaggaaacagacgaacagaggcgaaaggagaaccacccccagagagaccgcaaaacaacccccaaccagggccgcgagaccaaaaaaaaaaggcccgcaaggaaaaaacacgggccaacaacacagctcgaagaggcctcccacgggggcacccaagaagcaagaccccaagacaccaggggcaaaacaaaacagcacccaaagcggcgaaccaggaacccgaggaactcgggaggagaggacaatagaaacaacccacccccccg

SEQ ID NO: 29933 - DNA, 519 bp, Glycine max
tgccttgccccttgatatattagttggactcttttttcactatgaatgacaaattccttgggataaaggtagtgttgccatgtttttaaaatccgtactaaggcataccaactccttatcataagttgaattagttaagggtaagaccacttaacttttcactaaaataagcaattggatggccttcttgcatcaacacagccccaatcccaacatttgaagcatcacactccatttcaaaagaatttttgaaagtttggcaacgcaagtatgggggcattaattagcttttgcttaaaaacattgaaagcttcttcttgtttctctccccatttgaaacccacatttttcttgagcacttcattgagaggtgctgccaatgtgcttaaaaccttcacaaaatctttataaaaactttcttaaccatgaaaaacttctcaccctcggtcacagactttaggtgtaagccattttttgaataagcccctaaccttcttcttattaaacttgcacttcctt

SEQ ID NO: 29934 - DNA, 531 bp, Glycine max
gcgcgtgcaagcttccttggggccattacttttgtttcaaacatgtggaagttaattttacaagatgatgcttattttaccacaaaaaagacatgctaatccctccgatttagaacgaactcatgcgcacgtttaaagtaacatatttatgcacatgcgtacgtgtaaaaatatcctactatttatgtcaacatacaaggacacccaacacattctaattgctatacatctatgtgcatcttgaaaagaacacacattcccatgctcaaggcgttgcgtcaaactttacacctaattatatcctaaatatttgctatttacaaactacttacacatatttgaaatatatatcatacaaattttattgtttcactcacatttatttatatgcatattggaaagctaattatatcctacacacccttgcattcaaaagggaattccacgctatcatatattcatttaggaagataatccctcacattttgctaggaaattcatggccccttatacttacatatatatgcacac

SEQ ID NO: 29935 - DNA, 438 bp, Glycine max
tcttatctaaagtactctctgtttgttattcttcttcttccatggcttattctctagtggatggcacctcctctcacctcttctcttttatcttccgttgcaactccatggctgaaaatcatcattgaagggccttattgatgctcaaagatccatcttccataaaagcttctcaagcaagctttcataaaaaatacacaaatttcttgttgttaggtatggatctagggattatcggagttagatactccaatgcaaaatcaaaccttttcgtcattcaaacactaaatttagggaaaaacttttctatttcatctttgcccaaattaagaaagaaaccctccaaataaccggaccaagtgatgatagggaggaaaagaaagtgtggtccttgcgcaaaaacaatcgcaacacaacttaaacttcaccatggtagtg

SEQ ID NO: 29936 - DNA, 529 bp, Glycine max
agcttccttggggccatttcctgctattacttacatttggaagttagttttacaagataatgcttattttaccacaaaaatgacatgctaatccctccggtttagaacgaactcatgcgcacgtttaaagtaacacatttatgcacatgcgtacgtgtaaaaatatcctactatttatgtcaacatacaaagacacccaacacattctaattgccatacatctatgtgcatcttgaaaagaacacacattctcatgctcaaggcgttgcgtcaaactttacacctaattatatcctaaatttttgctatttacaaactacttacacatatttgaaatatatatcatacaaattgtattggctcactcacatttatttatatgcatattggaaaacttattatattatgcacacacacttgcattcaaaagggaattccacgctatcatatatttatttttgaagataatccctcacattttgcttggaattttcatgacccttatatttacctttttttgcaccccccc

SEQ ID NO: 29937 - DNA, 398 bp, Glycine max
tggttcgaggtacattacaccgttttaagtatctttagagagagaagtgcctaaggggctgaacccttttcttcttcacttcctcccctatttatagcaaaataggggaggtggttgccgcccagctcgcccaggcgagccaggttgcttcctccagaagcaacagccttctggaggaatatactggagggcccaagtgggcctgggtgctatttgcacccccatttttactaaatacaccccctctgctgttttttggtgattcttttttcgtaaagttacggaaacttacgaatttcgtaacgatacttgttttctttccgtaatggtacggaaccttgccgattacataatcatccccccttttgacttaccgaatgttaccgaacctaacttaa

SEQ ID NO: 29938 - DNA, 548 bp, Glycine max
ttataggcacatgctgtgcaaaccactgtgagggagagaagaccccaggcatccccccccaaagaaaggcctaatgcccgcacgaatggaaaaggaacgcatggcgccccgttgaagggaaaacgataagtatgcacacggcggcacgcgtaagaaaaaaccctacctgttttatgtcgaacatgacacaggacagcccaacacataccgaaagtgctgtaccaactatgcgcactcctgaaaagaacacaccattcccatgctcaagggcgtagcggtaaactttacacctaaatatatcccaaaaatgggctgtttacaaaaccacttacccgaatttggaagatatagcatacccagtggatgggggcgaccacgtccaattactagccctttggaaaacaaaataaggccgacgcaccactagcctccaaaagggggatcacccccgagcataattcaaattcaggacgaaaaacccccaccatgttggaagggaagattacggccccctatgctggaccaatataaggcgcccgccgcccccg

SEQ ID NO: 29939 - DNA, 105 bp, Glycine max
taacctaacaaccttattaacgtaacctggtttcttcgaagtgagattaatgttgttcttcacgaactggcagttcgagccgacaactccgaaccttgttcactc

SEQ ID NO: 29940 - DNA, 223 bp, Glycine max
tctcccccaattttctataaatagcgggagtaattgtagtgaaaaagggttcagcccttcaggcgctcctgtcatttcagaggatcagacgcccaccaggcttgggactggacacctcttctccaggtactccagtactttacttgacagatgaggaggatgcttagacccagggatccacacggtctatctcaagacttttacattcctgattatttcgctt

SEQ ID NO: 29941 - DNA, 471 bp, Glycine max
gcgcgtgctggcttggttttctagcattgtttatttttttgtgtgacattcagggggttgactctgataccctggtttttgagtcactcagtcttgtgattaaccttgcttatatttgaaagaactgttggaaccccaccgacccatctatcacattcccaagggtccgccgcacatgcaccagagccccagcatcaacatcagaggctcctctccctcctcagcctccttctcagccttcctctccggcacctattcctctgccggcatccactttaacaccgctggatatgcatggacagatgctcaggtctttgtatcagggccaatagatcattattcaggacctacatcgattgtccctacacctgaagatggatccgtctctcatgactccagaggcctattttcagcaagtcgcctgtccatgagcccagccctttattgataggaggagagccttctggagcc

SEQ ID NO: 29942 - DNA, 153 bp, Glycine max
tgtaacttggcttggctaacaaggaataatggtttttctcataattcaaatatctaggttctaggagtgcattctctattccctatctacctgaagaatcaatttttgctcatgaccactaaacctttgcgtcaagtcactattcacagcaca

SEQ ID NO: 29943 - DNA, 102 bp, Glycine max
gcttttctttggggaacgaagaattgtggtgtccagcacgacaacctccccaagggagacactatgaaggaagacaccccccccacccggcagacccacacc

SEQ ID NO: 29944 - DNA, 121 bp, Glycine max
tgttgtccgtgtacacggttccggtaatggtggcatcgacggcaccggtggtcatgctcaccttggctgccaccataagtggcgacattaagctgcagccttctagagcccatcaccccct

SEQ ID NO: 29945 - DNA, 754 bp, Glycine max
  unsure (1)..(754): unsure at all n locations
cagatagccttgcacgaaaancgaacancctntagagnncgaccccgcacggcacgcacagcccggaactgtnacgggaagcggaggaaanngaatanaaatatttaccggaggcgacggnaaccccacggcggcgccggcaggagaaaacacagaaacacccacccccccaccaccgcaagcgaaagaaacaaagacgacggagggggagggagggggaagaaggcacgaacaggagggacgccaggaaagacaacacaaagcgcacaccccccacggaagaaaagaaaanacgagacagagaaagaagcgacacgggaggaacaagcgacgagaggaagaagggangcaagcaagaacggacaagagggagaggcggcgacgagacggacgcagcaacccgacgaccaccgcgaggacggcacgcgaacagaaggacgcgaggacggaaggacacgaagaagccanagcggagaaaaggaccgcacacacaccgacccaaacgggacgccaaacgagcacaaaggacaccacaacaggccgacgaacccagaacacacgggacagaacgcacaaagccgaggaggagggggaggcgaccagcgcacggacagcgcacaaaacggaaagacaaaagcacaacggaaaaaacggaaacaacaggcaaacacggggaagcgcgagacacaggggagcgcaaacagcacagaaccgacaaccagagccagacagcacggacaaagacccccccccc

SEQ ID NO: 29946 - DNA, 738 bp, Glycine max
  unsure (1)..(738): unsure at all n locations
cgccggggttgactttggagctaggngacttatagaatactcagagccttctaattcctccacagatgggggacggaccngtgctaatatttccccggccagcccccccaccaatcctctatatctcacacctctgaggccttacctttttttttatttgccgcccgccccatcccccttgatcggatcccattacccttcctcaacccccgtccagccctccgcccctcttccaccgcctccacctctcctaccctcccccctcttgcccctctccctcgctcctctttctccctcctctgctgtcccctcctcctctcccactcccctactcccctgcctctcctcaccctttcccccatcctctactccaccctcgcccccccggctgcccacgctctcacctccctctccccttcccgctctcatcaccgctacaccctccccttctcttttctcccctctcactcccctccccctccttcacgcgcgccgtcttctcttctacaccctagccctctccctccccgctctcctctctcgccccctactttccccccactcctctactttcctccccatcgcgtttctttctcacccccccccgccctcatcctcccgcctctcccacaccccgcctcgcttcatcccttcggcctctcctctatcctctctcctcatccacccccatccctccccttcttctcccctcagtcctccttgctcgcctggcctccc

SEQ ID NO: 29947 - DNA, 69 bp, Glycine max
agcttgcctagagaaggaatccactggatagatatgcttaccaccttgaaagactggaaagcggtttct

SEQ ID NO: 29948 - DNA, 299 bp, Glycine max
tcctactccagtagtagacctctctttattatagcctgcagctgacccttccactcctgtacttgacattccagaggatcagaccacaccagtcttggcactgaacacctctcctccagctactccagtacttcacttgacagatgaggaggatgctcagacttaggatacacaggatctatctcaggacttttacattcctgattattttgctttttggataataattataactatattggtttcagcacattgttttgagtaattttggtttccgctcataattatatacctatact

SEQ ID NO: 29949 - DNA, 610 bp, Glycine max
  unsure (1)..(610): unsure at all n locations
ttgtacattgaggaacgaccgatcctcagagtcgacctgaggcatgcaagcntttggtgaggacagagagacttgttcttttttagagagagccccaacacgggcgggctatttcgtctctgtaaactacgcaccccccaaccaaattacgatattaaaggagcgggagtagggaagaggtggtgaatacagcggaacgatactcgtcgtaagttaagagcagaaagaacgaaagagatttaacagatagggaagaggcccgatgatatccgcccaaaagtaaaagacatcaacgagaccagcataaataacacgagaggcgcggagcgtaaccgctccactcgttcaacgtccgtgcaccaggcgccgcacgttgggaaacgttatatttccccgacaactgatggccaccaaggccacgctcgaaaaagtgagcgattagaaaccagattcagcacgcctaatacgcaagaggaacgattacaccggttacatgaaaaaccacaaccccccacagcgaaatcattctacgaggagagtacccgacacaggatactagctcgcgtcaagtccttaagaaccaccggacgatacacagaactcccccccc

SEQ ID NO: 29950 - DNA, 511 bp, Glycine max
  unsure (1)..(511): unsure at all n locations
tccatataaggggggcgncccggggggggacggtttttcccaggccggcaacccgcacccgcatgggaattaactcgcttatgtttgagagaaacgttgggaatcccatcgacccatttatcacatttcccaggggttcgccgtacaagtcccagaaccccagcataaatatcgagatgctcctctccctcctcagcctactatttagcctttctctccgggacctatttctttgccggcattcaccttaatcaccggtggatatgcatgggaagatgcccgaggctatgtattaagggcagtacatcatttttaggaccttcgctgattgttccctccacctggaaatggatccgtctttttagaattccaaaggccatttttagctgggtgcctttgccggagccccatcctttattggtaagaggagaacctttttggatccctaacccgataggatgccgctttcgataaaaaccttttttggtgatttgggcgtacccaacacaac

SEQ ID NO: 29951 - DNA, 107 bp, Glycine max
tagctcaggcttgtagagagatccttgctctggttttattgtttatcgattacataatttagctgagaccatgtatggctttctcccgccccccctcctttctcccc

SEQ ID NO: 29952 - DNA, 559 bp, Glycine max
  unsure (1)..(559): unsure at all n locations
nttcgcccaggcaaacacccaacagggggagactattatagacgaaagaaccccccaacaccgcaccacgccaacaccacacaggggcgaaccaggaaaccaccaacgaattaagaagtaaccacaatggaagaacgtgtaattgaggaaagagcaacaacgaacacagacgccagaacaagcgacgcacaaaaacgaccaaaaaacacgacagaccaacaacgaggaccaccagaaccaaacacccacagacgatgaaaaaccaggcgaaccaacacgacacacgaccacaacaacgcaaaccggaccaagaaaacacgagaacgagcacaaagaacaccacaacgaccgaacccggagaacgacgacacgcgacgaccaggaacaccacccaacgaaagcaggacagagaagaaaggcaaaccaccactacacctacgagctacaacgaaggatcgaaccaccacccgacgaccgaacgtccaccaaaccagcacgccctcacaaaagaaagacgtagaagcaaacacgaacgcaacgatgccccacccaccacccc

SEQ ID NO: 29953 - DNA, 677 bp, Glycine max
  unsure (1)..(677): unsure at all n locations
accaccacgacccgataaaacccatagacgaacccaccaccgaaacacaccacaacccctcccccccccagcacnncnnggnnnntcatgaacctagagcaggcgngannnnnanannanaccaccnngcagcangcaagcaacaaagccaaagcccgttttgttgtgcaagccacgncaaccaacgcccagacccgagaggaaggagccaccccccaccccgacaccactgccgaccaccgcaacggcacgggggaaaaaccaccaagaacgaccccaacgaagctcaaaaaggcagcccccacagaagcaccaaaagcaagccaccaccaagcggaaaacacagcacaaaaagcgcatggaggtgcgcccaaaaccgccaagaaacagccacggaaccagcacgtccagcggagagcccacacaaaccccaagaaccaccccacacggccgcggccaaaagacgccaacacgaaacacaagaggtgccaccgacaaaacaagccacaaaagccagaaaccaaacacaacaggacacaaaccaggcacccggacaagaaccacgaaacagggcgagccaaagaaccaccgaagacgaagccagaaaaagaacgggggcggaagcccaaaaacaaagaaagtccaacaaaaaaacacgaaaggaagaaagacacaac

SEQ ID NO: 29954 - DNA, 849 bp, Glycine max
  unsure (1)..(849): unsure at all n locations
ttgatctggcacttgaacgcagagnannnannaccnaancccccttgattccttanaggggtgatgggagaggccagcggttcactccttctgtaggcancgggagcgtaccccccaggaggcggcatgtcctaaggtacgacccatcgagcatatgaaggttaaacatattgggttccccgacattaggttgccggccatccctattacgaaagaaccttttaccacatgggaagggcttatagctctaaccacttctaagtaattaattcctttaattcggtggatttgcgtcggaacgccatcggacttgcctccgacattcagaggaaattaggacttccactttaaaagcatgaacgttacctacaaacaagctgtagtttcatacaaagcccttcgcttgtcaccctgcggatgtaaatttctttttaaacaaaatatccttctgacccacatagaagttttagaaacttcctttctggcgggattctgtatataactcgaggtctggcgacaggtctttctgttaggtctcctttatctttcccccgacctcaatttgccccgcaatctcgccctttcttactaatatagcaatatatggagagtttttcacgggtataccgagtgccgcaataacattntccattgttaccctcttggcccccattgggcggggccactctatcatccccctggagataaatacccctatcccaggcatcacccgaggagatgtctatagcttgttttggaaagacaggtgcgaatggctcttctctcttggggagtgcacctctgctgaagcgttcttatagttgagaggtctctcggttgattcaaacc

SEQ ID NO: 29955 - DNA, 357 bp, Glycine max
agcttccttttagtgcgtcacggttattttttttttctgagggggggcgagcctttgatggtactcggcgggaagtgatgggggaaatcgacatttccattcaaataggcccccacacttgcaacgtggtggttcaagtaatgaatataaatcccgcctatagctgcctcttgggaaaaccgtggattcatgccctgggagagggccctttaatgcttcaccagaaattgaaattcgcagaggggggacttttagtgatagtgtcgggtgaagaagacatgttagtgagctgccccctcctccgcaccatacgtagaaacggcggaagaatcattggaaacggcttttcaatccttt

SEQ ID NO: 29956 - DNA, 884 bp, Glycine max
  unsure (1)..(884): unsure at all n locations
cgtttggagtcagacaatcgttcnnagacngccnacnnantannaantactncaaagctcacagtgattgaaatcgaagattgtacttcaaggcattttttttttttttttttacccaacgatgaatgcacacaatggtggatgtaaataaaaggctcaaaaggcgccattccaaaggaaatgaggtttcaaagtaatgtcaatgagcttctaaagatttcaaacgaaatccacagaagaaggaactttaaattcacaagaatataggtacttgaaataacgggtgttttctcttcacatatacaccttatatgttcatgccaccacatgtggagtatctttctttcctccaacagaaccaatggttntatacccaaaaagaagagttttttttaccctcttcatggggtggatatcgagatttacaccacgaaattggtgtttggtaaatccgcatattaccccaccgctagcgcaaaattaccaaatattttgaaaaaaaaacggtttctcacaaatggaaatttttaccaaacccgctttctcccaatttgtaattttgcaataaaaaaaagtttggtataatcctcacataaaccaacatgcagtttggtgggtgataattcagattttacaccacatggggcctttgtggataaccctctggtaaaaatttccaacaaatttcccaaataggtgggaaagaggatcatccatctccctttttcacattaaataagaacttcnttgttggttgaatatcccattttacacacccggaatttttgggtggacataccgaaattttacccccacatcgcagtcttgctgtgtctctcgtttctttataattccaactacagatatgttttcaacctcctctt

SEQ ID NO: 29957 - DNA, 903 bp, Glycine max
  unsure (1)..(903): unsure at all n locations
accccacaccgacggccgcgaccaactgaacgaacacacccgcgcacgcccacgacacatcaccacaatggntntgaacaccaaccctacaccagacaccccaaggcncagggttggaccccctcgaacagacggcnanccnanaaccacccccaggcacgcaaccacccacccagaaaggggagaagagacttttttttatccgaacgaagaccaccgccccaggcgccacaccgacacaaagatacataccgacccccaacgccgccgggagaacaaccacggaacccaagggagggaggcacgccgggacgccggaccaaacaacgacaaaacaccccgggcgcggagaaagagacgagagacaaaggccgaccgtgccacgaaaaagcacagaacgagcgacacagaagcacgcaccaacgaagaacaggagaaagacgcaacgaccccgaaccgagcaagacgcaaacaagaggaccgagagggcgcacaccacagaccgcggaaagggcaacgcacgaacagcacgcgagcaggcaagacgcgagcgaaagaacgcccccgaccgaggaacggcgccgaagaaccacacgacgacgacgaaaggacgccaaccgacgcgaccaacggcacgaatgcacacccacagaaatcaacaggacggcgaacgcgaaggaccggacacccgaaaatagacacacgcaacctcacgcaatacacaacgaccacgccacacaaacagcaaagacaaccgccgtcaaccgcgcgcgagacgccacgagaccccacgcgacacgccaccgcgagcggcaacagcaatcgacagacaacgaggatgcgcaccgtaagacgcacgcgacgacgcacgagacacgcactcgacaccagcccactacgccg

SEQ ID NO: 29958 - DNA, 485 bp, Glycine max
agcttccttttagtgcgtcacgtttaaatccaatctcgatgggggggccaacctttgatggtactcggcgggaagtgatgggggaaatcgacattcccattcaaataagcccccacacttgcaacgtggtgtttcaagtaatgaatataaatcccgcctatagctgcctcttgggaagaccgtggattcatgccctgggagtggtcccttcaatgcttcaccagaaattgaagttcgcagtgggtggacttttagtgatagtgtcgggtgaagaggacatgttagtgagctgcccctcctccgcaccatacgtagaagcggcggaagaatcattggaaacggctttccaatcctttgaagtggtgagctgcgcctctgtggaacggatttgagcccggaatgggtctaggcaaggactgccttgggaaatgccacgtggtctatatcaagggaaatccatacaagtatggattagggtatgaacc

SEQ ID NO: 29959 - DNA, 492 bp, Glycine max
tcatgatgaatcaagattgattcaaagatgttttgatgataacaaagatgatgacaaaggtgatgaaaaaaagctcaaaggtcaatcaaagaatgagttcaagattcaagactcaagattcaagaatcaagagaagacttaatcaagataagtatgaaaaggttttttcaaaaactaagtagcacatggattttttctcaaaacatgtttaccaaagagtttttactctctggtaatcgattaccagattgttgtaatcgattaccagtagcaaaatcaatttgaaaaagttttcaaatgaatttacaacgttccaattgatttcaaaaaagttgtaatcgattacaatgttttggtaatcgattaccagtgtctttgaacgttgaaattcaaattcaaatgtgaagagtcacatcctttcacataaaagctttgtgtaatcgattacactgatttggtaatcgattaccaatgattgcttctgaataaatc

SEQ ID NO: 29960 - DNA, 713 bp, Glycine max
  unsure (1)..(713): unsure at all n locations
ccccgcaaccatgtcattcccaaccacaccgcccgaccctcgatgtaacatctcacacccccccccggcagatgaacttgccccccnggacccaaaatacagcgccgccacctcccctaagaaggccgtaatatttttctcaaggaaggcgccaacaccaaagctggacctcgggaggctaactacgggcggaacataccaacactcgccctatacacattggtcgcacccccctgtagaacggagagactttatgagataccctatcaaagctcccacttatttccgtcttttgggacaccactgacaagctccccccgactaggtctccttaccgccataacaccaagtcgaaataagcagcaggatggccctgcaaacgcattagagggcggatgcaaccacgcactccttgagcagaaagacccaataggaaggaaccaccccgtataactcggatgccgaagccattgcgatgcgtcttccacggggcccaaaaacagccgacagccaggagccctcactggaaaaactacaatataaccccccgcacatgggataaacggcccacgaaccagagccttgcctacacgcggatagagcacaacctccagaaggcatcagcatcgcacggccccccaaagagcgacattacaatccctgttccccctaacctccgcaaaaccaccgacggaaagtcctctcgccccccg

SEQ ID NO: 29961 - DNA, 843 bp, Glycine max
  unsure (1)..(843): unsure at all n locations
cggacatttgattcgattaccatctgcanancccnnttttngttntaaaaanaccgccccacttcaaggctttgtatatcgcgagcctggagatgaagaaaaatttttttggtcttattttagaacaaaccctcccaccggggtcattagttttgttctaaaagttcgcaagcttctacagaactatagctattgaccgcaatgaaatgcaaatcggtgccgaagttggaaatacgattactgcaccacctattagaagtgtttccttcgcagaaggcctccaccgtggggtgataagttacccgagagccatgctgcccatcagtatccactattctcgacagtagaggctcgaaacctactagcgcccgaaaagacgtttattgaacgacattagggaaaattcncgtcgctagcaggcttaccctgagaggaggataacataataacaagccggtctctaatgtaaacgaccctattacgccccctgaacctcgtggggcgtgctcgaggtgaaaaaaatcttcactgaactcccatatgtttaactgaccatgcagaatagtccgtttctttggccgtgatgacctctctgacgctatgtatatgaaccattatatgtttgtttctctctccaatacagcgaccctctcagtttagtagaaacaacgcctatccatgcagagtgacaaactggtactatgtgcagaaccattactatattggatcggaatattcacgtcaacaagcgctcaaagtttttcttaaacgctccacatttcgattcgttgagcgctcattacccctcatacacttgttctgtgctacccggcgtttgcaacg

SEQ ID NO: 29962 - DNA, 453 bp, Glycine max
tggagaggattcttcaatggaggaaaatattatggttagaaagagagaggggggagcacgaaattgaaggaagaaaaagagagagaagttgaactttgagttgtgtctcacaagactctcattcatcaaagttacaacaagtgttacacgtgcttctatttatagactaggtagcttccttgagaagctttcttgagaaaacttccttgagaagcttctttaagaaaacttccttgagaagctagagcttaacttcacacacccctctcataactaagctcacctccttgagaaacttccttaaaaagattccttaagaagctagagcttagctacacatacctctctaatagctaaactcactttcttgagatgagaatctagagcttagctttacacaccctattatagcttagcttacccccatgacaaaaaacattaaattccaaaaaa

SEQ ID NO: 29963 - DNA, 509 bp, Glycine max
agcttttcatttgatccagcagaggaggtttatacaacctatttcactcaagtcacacccacggaactctggcacaagagacttggccattgccatcttgaaagaatgctaaacatgaaaaaaaaggaaatatgcgaaagaaaatttgaagaagtttcaaatggaggaatgcaaatctattatcacaccaatgaatcataaggagaagtttaccaaggaagaaggtgtttataacattgatgaggatattatgggagctcgattggatgtctaatgtatctcactacaacaaggccaaacattctattttctcaaaagaacaaaactagaatttttgttgacaatcaagtagccattgctattgcaaacaatcccgtgtgtcatgggaagactaaacatttcaatatcacggtctattatttgataaaaatgcaacaaagtggagaagggaacttaatttactgcaagtctaaagatcaactggctgacttgtttacaaagtcactacc

SEQ ID NO: 29964 - DNA, 457 bp, Glycine max
tgaacaaaaggaagtggcagcatgtaacaaaacgtgaaacaatactacgagatgcttgcattacctttgacttacccttatctcaaattggtgtggtattgaccatcactcaaaatgactcttcattcatcctccgattcgtaggatcccaaatgacaagatgtgaatgcatgcatgcttatggttgaacattaaatgcaacaattaaacaggtgttatcgtgttcaattttacttaacgcctacgacaccccgttgtcgagccaaatggctccaaatttagtgggcaagatcgagagtgtatgttcttaaggacaatatgaagtaacgacacaacacaggaggttaaaatgcaaatcattaatccatatttattaatgttgcgatcttgtttacaaaagattttaaaactttggagatccccatgagtccttggagaatagtcatgcgttgaccct

SEQ ID NO: 29965 - DNA, 366 bp, Glycine max
agcttggtgaattttctctacctttattttttgcactgttgcctttttaaatacatgcaacttggaagttaacataataaccactacattgaagttaatatgataaccactacatgccactacatgctataataaccactacattaactacttctagaatgataactacccctatggaagtgggaccggagattggcagccaagagggggtcgaaggagagtgtctggtgcttgttaacgagaaggtgggaagctgccatgggaagagaaggtggcgtggtttctgctgttggtggaggtggcttggtttctactggtgatggtggcttagcaaaagaagaagataggttggttaccttgggaagc

SEQ ID NO: 29966 - DNA, 437 bp, Glycine max
tttaatcctaatgtttgaggagattagggacatgtttaaagatgggtttcccgaggacacttccaatgtcatcctcgtcttcaaggaagctctccaatctactagggaactcctcatattcgaaagctttacttggtttgcttttcttactctctattattattattattgttgttgttgttgttttctgctttctattaaactcactaacaaaagtagttttagcagtaatgattttaaagctacatacactggattattttttaagaattttttgaatttttttataaatttattttggtttttgaactgtttttgtttttttttgctcttttatatgatgattgttgattgcatttaaaaagaaaaatagtcacggaaatggctgaccaagcagtgtctgctcaagaaaaggatctatatattggttttaccaa

SEQ ID NO: 29967 - DNA, 246 bp, Glycine max
agggggaaaatgactgtgccatgcgaataggcccccccacttgcaacgaggtgtttctagcaatgaatgtaaatgccgcctatcgctgcctcttgggaacaccgtggattcgtgcgctgggaatggtgcccttcaatgctttaccaaaagttggagataccagtgggtggacttttaacgagatgagaccggtgacaatgacaagttagagaaccgctcctactacgcaccatacgtggagacggc

SEQ ID NO: 29968 - DNA, 462 bp, Glycine max
ttgtgtggagcttcaatggagaatttttttttattgaaaaagcatcgtgaggaagagggagagagagagctgttctgaaattgggctgagtgaatagagagagggttgcttttttttgggttttaataaaagggttttccctttttctattattttattcaagctctgccacatgtccctatttgattggagcaaaagggcccactttctctttttgactgtgacccatactcagtcacaaaagtgagaaaaatctgacctttgaaacgctaaaatcctgcctcaggttgcgagtaatttctctgatttccaattcttgcgtaaactctgcgtccgccggggccagtttttggaatcaatcaatatttattttagaacgcttaaaaataaattcccaaacgtggtttaataagtttgtttttcttaaatttttagttgcacccataaccaggattttttaac

SEQ ID NO: 29969 - DNA, 505 bp, Glycine max
agcttctcaaggaagttttcttaagaaagcttttcaaggaagttttcttaagaaagcttctcaaggaagctacctaatctataaatagaagcatgtgtaacacttgttggaactttgatgaatgaaagtcttatgagatacacttcaaagttccacttcttttcttcttttattccttcaatttcgtgctcccgccttctctctttcttttcctccattaaagcatcctcttcaagcttcttatccaagggaattcttggtggtgaagctccttcttccttggcttattgcctagtggatggtgcctcccctatcctcttctcctttgccttccgctgcatctccatggtgaaaaatcaccattgaaggacctcattgaagctcaaagatccagcctccgtagaagctccacaagcaagcttccatcaagtggtaatcagagcacaagagctttcagtaggtgcctccttaaacctccatttaatttttttctttaccttctctt

SEQ ID NO: 29970 - DNA, 269 bp, Glycine max
tgaatcggacctgagtgtgaaaagttatgtccatttgaatttctcgaaagctttcgttgttcaatgtcgagcatctcgacatattatgcgctcgaatcgaacatccgagtgaaaagatatgaccatttgagtttctcgagagcttccggggttcaattccgagcctttcgacatattatgtgcccgaatctgaccttcgtgtgaaaagttatgaccatttgaatttctcgagagcttccgatggttaatttcgagcgtctcaatatatt

SEQ ID NO: 29971 - DNA, 446 bp, Glycine max
agcttttcgctgcaaaattcattttttgtttggtgtttttggtttgtgctgaaggtggtgttcgtcattggaagtgcggtagacagactttgtggttgatttatggatggcctttgtggataactgggtggtgggtaaggagaaggtttgttattggctgagtaaagacattgttgggttggtgggaaacttggtcgtacaggaatgacagtcacagcatgggtttctccctcatcctcaccctctttatttgccccagttttctcattcggtcaagcaggatgattaaatttgccttttttcagatccacttcaatctttttgctggcgaagaccaaatctgtaaaacttgaaggtgtgtaacccaccattttttccatagtagaacaccggtcacgtgtttactttcattgtgataatctctttctctgtttttgggggagcta

SEQ ID NO: 29972 - DNA, 391 bp, Glycine max
ttgtaagggtaaagtctcaccaatgttacctgctcatgccacaattggtagccgggggtatacgaaacattttgcccaacaaagtcagggtagcgataactcgcctgtgctttttcttccatgctatatgtagcaaagtcattgatcctgtcaagtttgatgagttggaaaatgaagccgcaattatactgggccagttggatatgtattttccccctgctttctttgacatcatgattcacttgattgtgcctctggtcagagaaatcaaatgttgtgggcctgtttatctacgggggatgtacccggttgagcgatacataaagattttaaaagggtataccaagaatctatatcattcagaaacttttattgttgagaggtacatttg

SEQ ID NO: 29973 - DNA, 488 bp, Glycine max
agcttgactaggctagttgattttagttttattttcaccttagttattagtcaattcggttaagaatgagaaatcccaaagagaaaatgtccggttgattttccgctttattttactaaaaggtatatttttgttattatattattattttatctctttttgatttccaacgtggttacggcacgaccgaacggtcggaatttattttaaccaaagtttacggatcatacaattcaaacgttcggtggaaatttattttatttttaagttaagcgagaaatgacttaagtaaaatggcttaagcacgtcaacagggggtataaaaagtaaatgaaatgagaataaaaatacacgaaacacaatgtggacccccacgggtacatagaacgaatcgaaaagcttggttcaaggtacttacctgttgaagatcgaagaacgatgaataacgaatgaagaacgtcgaagaatggttgaaaacctttgcggaa

SEQ ID NO: 29974 - DNA, 506 bp, Glycine max
agatagatgtataaattaagataccactctgtaagagctagaattctaaccttgtgccaggacctacgggctgggggacagtctcatgtagacagtttctatggggcgtatgcttgtcatatggatgatgtatgatgggcattatatgtgtgtgtgtgtgtgtgtgtgtgtgtgtgtgtgtgtgtgtacatatttaagtattttgagcattgtttggcgaatgatatcgcaaaaaattcaatcttgttttcataatcaaattaatggagttttcatttaaaatgtaaattatgcgctttagagtagtgatatcggatcgaccagacgagtcgttacaacaaccacctcaagcaaatggaagctccacattagatggaagctcaaagtagattctttatgtccttttattttcacccttttgtatgaccaactcttagagtaaaaaatttgtaatgtaaaagaaaggaggttggggattcaatactaaaattcattaactgtccctt

SEQ ID NO: 29975 - DNA, 497 bp, Glycine max
agctttgcagtagatgccactctactctaaattttttaaagatatgttaacaaggaagcataaatatattcatcaggaaaacatcatagtggaaggaaactgcagtgttgtaatctagaagatccttccactcaagcataaagatcctgggagtgtaactattccttgttcaattggagaagttaatgtgggaaaatctcttattgacctcggagccagtatcaatttgatgccactctccatgtgcagaagattgggagagttggaaataatgcccactcgaatgactttacaattagctgaccgctccattaccaggccatatggagtaattgaagatgttttggtcagagtaaaacattttatcttcccggtagactttatggtaatggatatctctaaagatactgacatccctgtaatattgggaaggccattcatgttgaccgcaagttgcatatttgatatggggaaaaagaagctggatgtatgttttg

SEQ ID NO: 29976 - DNA, 487 bp, Glycine max
  unsure (1)..(487): unsure at all n locations
tctagccaaatggacttaccttgaattaattcctttgatagcccttttgagccttgtttccctttccttgttttgaagctcactacaagccttaagtgaaaaaccatgatatcaccatatccttaaggaattttggagctttggaattgttttgggaatatgtgtggggggtttttgtttcattggataacatgttttgttggctatgcttcatgatgtattttgggccatacttgatgtacattgtatattggttaaatgttggacatgctgaatgagatgttgtttctcaaaggctacagagcaaaataaaaaaatcgaaaaagaaaaagaaaagcaataaagttgagtgaataagatcttaaatggcaaaagaatgatgagactcttggttctactcttttatgtttaaattttatctttagntcctttttttttttttttcttaatatgcatttattccccatttctcatctattcctttggg

SEQ ID NO: 29977 - DNA, 452 bp, Glycine max
agcttgccacccagctcgccatgcgtttatgttgcttcctccaaaagcaacagccttctggaggaatcttctggagggcccaagtgggcctggttgctatttgcacccccatttttactaaatacaccccctaccccctttttttggtgattcttttttcgtaaagttacggaaacttacaaatttcgtaacgatgcttgttttctttccgtaatgttacggaaccttgcggattacataatcatcccctttttgacttacggaatgttatggaacctcactatttgtgcaacgatgcttccttttgatttccgatgtgtcacggaaccttacggattgtgcatcaatattttcttttgatttccaccacgtcacggaatttcacaaattgcctaatgatgggtgccaagcacctcaaaatgaccaaacacaagttgcatgccaccaagcaa

SEQ ID NO: 29978 - DNA, 374 bp, Glycine max
tcttatccaaggctcatcttggtggtgtattctccttcttccatggcttattccctagtggatggtgcctcctctcacctcttttcctttttcttccgctgcatccccatggtggaaaatcaccattaaaggacctcattgaagctcaaagatccagcctccatagaagccccacaagcaagcttccatcagaatgttcgaatgcggcccataataaattgaaacactcaaaattgaacacgaatgctccaagaaaattcaaatggccatgacttctaacttcgtatccgattgcaacccataatatatttagacgctcaaaattgaacatgaaaggttcgagcaaattcaaatgaccataactcttactttcg

SEQ ID NO: 29979 - DNA, 274 bp, Glycine max
cagcaagctcgctctgaaaggctcctaaatttattataaaagctagaatgaaatagaatcgtttaggaaatgaaattacaactatcagatccacaagttgaaagtccccctctctctcgctgagggactaatattgtatacagagcttgaaggttctgtaatggacgattcaaatgcaccacctacgactccaccgtccttaactacttctgaccacgctaaaccgagcatacaagctagacgttaggcggaaactcactgtatctaaaaatga

SEQ ID NO: 29980 - DNA, 98 bp, Glycine max
tgaacaactatcttggatgagtcctttttttttgctaattatacttagcgtgggcctggaactatggggcggggggacgtggtaaatgaactgttctt

SEQ ID NO: 29981 - DNA, 444 bp, Glycine max
agcttttcttttagcaaagcaaaggcttgctcttgtttttcaccccaggtaaatgccacattcttcttcactagctcattaagaggttatgcaattgtagagaaattatgaacgaaccttctatataagcttgctaacccatggaggctcctaatatctcccacactttttggggtgggccattcttggatggccttgattttctcaggatccacttggaccccatttctaccaactacaaaccctaagaaaactatattatctacacaaaaagtacatttctctatatatgcatagagggtgtttttcctaaggactgaaagaactttcctgagatgtccctagtgatcatctaagctcctactggacactaaaatatcatcaaaataaaacactacgaatctacctatgaaatcccttagacatgatgcataacccccataa

SEQ ID NO: 29982 - DNA, 248 bp, Glycine max
tgtagatatttgggaagtaggttgtatgacttttcccaattactatataccttctcgagcgcccattgttttgctagccatgcatttcaatatgtgatggtgtatccaaactcttgtctaatggatgcgatgaatgtaggaacaattagttgctcgttttctttaaccattgcaaggatattttttcctatgagtgtggaatctatcttattatgaacttgtgaaatggtaagcatgaaccatgtgcc

SEQ ID NO: 29983 - DNA, 367 bp, Glycine max
agctttgatggtgttgagaagaaatacttgtttgtcatcatcaaaaagggagagaatgtgaatgtatgtatacatgattttgatgatgtcaaaagaagaatcaaacaaggctcagaagaatcaaacaaggctcattttgctttaagattaatacaagattgtttcaacaaacaaagccttgattcaagatttcttcaagatcaaaccttgcctcaaaatgaaaggttttaagtcattcaaggcacatgtaatcgattaccaatacatgtaatcgattaccaatggtttgaaagtgtgtaatccattacacatcatatgtaatcgattaccacaaactctgaacgttgagaattcaatttttaaatga

SEQ ID NO: 29984 - DNA, 335 bp, Glycine max
tgtgcaaatcaaatcactactacatttcatctctttcatgcattttctttctttacccactcctcacgtttggttttttagggaaaaacaccataactaaacgcgtcgcaagggatccctatcgcaccagatccaaatctataacgatgggtgatcaagaggagacgcaggaacagatgaaagccgacatgtcggctctgaaagaacaaatggcctccatgatagaggccatgttaagtatgaagcacctcatagagaagaacgcggtcaccgccgccgctgccagttcggctgccgaagcaaacccgactcttttggaactacgcaccatcctc

SEQ ID NO: 29985 - DNA, 436 bp, Glycine max
ttgcagatttggtcttcgccagtgaaaggatcaatgtttgtccgaaaagaggcaaatttgatcatcctactaggacgactgaaaaaaaatggggcaaatgaagaaggtgaggaagagggagaaacccatgctgtgactgccattcctatacggccaaatttcccaccacccagttatccacaaaggccatccctaaatcaaccacaaagcctgtctatcgcacttccaatgacgaacaccaccttttgcacaaaccaaaaacaccaaccaagaaatgaattttgcagcgagaaagcctgtagaattcaccccaattccagtgtcctatgctgacttgctcccacatctacttgataaattcaatgggagccataaccctagccaaagtttattaacctccatttctccgagaataccactcgaacgcaacgtgtgc

SEQ ID NO: 29986 - DNA, 426 bp, Glycine max
agctttaacctcatcatcggtcatattttttttatttgggagccaatccaatccttgagtccggactctcagccacttatgatagccgccgatgctcccattactgcttcccctaagctctcatgactttcttcacaccgcatcacatgccttgtgaactccttagagaaccctcgcattggggtcactgaaaccccgagcgatgaaaggcgtgatgctttcgtctgatggcactcctctcatggggtagccaagctgtctttatggcgaggacgggattatacataatacaaccccttgttccatcaagggaacatttggacatccttcgcatgaaaaaagaatcctgattcttccttccttctacgagggaacaaattagcagacgcccctccatgctaaccaagagcagggcccaattcgcct

SEQ ID NO: 29987 - DNA, 496 bp, Glycine max
cccttatcataatcgattatgtaacaccctgaattattattagtaattataattgatgtttaattttatttattgtgttttttaatcatgttttatttcaaggaggtgagtagttattagaagggtatgggtagttaaaactttagcttctcaaagaagcctcatgaggaagcttttcaaggaagtctcacgagagcttctcaaggaagctgtctgagctgtctcggtaaaagcgccctcctgcattcgttaaccgttggatcttctcgaaatgtggtctggaggttcataggataaatgtccacaatctgaccgttgcgatcttggatatatcttctggtgtgtgagaaacgcttcttttcccgagagcagaaacacttgagtgtttcaagtcttattttttcgtgtagccttggaaaacagccattccttttctccttcttttcttccaaaaccctttccccaacattcccaactttttttttcaccaacccac

SEQ ID NO: 29988 - DNA, 508 bp, Glycine max
  unsure (1)..(508): unsure at all n locations
agctttgccgtagatgccactctacttttttttttttaaagatatgataacaaggaagcataattctattcatcaggaaaacatcatagtggaaggaaactgcagtgttgtaatctacaagatccttccactcaagcataaagatcctgggagtgtaactattccttgttcaattggagaagttaatgtgggaaaatctcttattgacctcggagccagtatcaatttgatgccactctccatgtgcagaagattgggagagttggaaataatgcccactcgaatgactttacaattagctgaccgctccattaccaggccatatggagnnattgaagatgttttggtcagagtaaaacattgtatcttcccggtagactttatgggaatggatatctctaaagataccgacatccctgtaatattgggaaggccattcattgtgaccgcaaggtgcataattgatatggggaaaaagaaactggatgtctgttttgaagaataaaaa

SEQ ID NO: 29989 - DNA, 811 bp, Glycine max
  unsure (1)..(811): unsure at all n locations
gccacccangacgtggatgaatcctgtaagaacncccgagactctaaagtagacccgctggacgtgcaacactgcttgcctaagtaaagcagaagcttttttttgtgataaaccacaagggcaaagccgggaagtctctcatgcacttacaatgacctaatgagggaacccgcaaaaacacctatataaacatctacggaacgataacctgttaaattacggaacgagcctttgccgccaaggtggcctcactgacttatacttcgacacaacattttagcgcggtggtgcccacgacctagaacaaagccctccgcaaatttctactatggatttcgacttctgtgcctcgaaggcattacatagtacgaatcacaccgccatctctaatgacatacagcgttgtacttattaaaccacaggcaaaatgagacctcatctgttactgcgtatgtcgtgtatggccatagcaaagaaggggttatcttgactctaccagagaactaaaagaggaaatgttaactctagaaaacggcccctacaatcgacgattgttctctttagacaaacgggtaatggagacccttataccaaaagtaggaaagcaataaaaaaatcggaacctcctggaaaccaattctgaaggggaagttcattcactaaccaccagaccattaaaggcatcagtacgccgtaatcaccgcacgacctttatgggagcatcttgtgtttagatctcaaactcatgaaagtgggtctacaccatcttgcctctatggtaaccagtctaagccgagggagagggggcccc

SEQ ID NO: 29990 - DNA, 308 bp, Glycine max
tgccacccagctcgcccaggcgatcttggttgcttcctccagaagcaacagccttctggaggaatctcctggtgcccaagtgggcctggttgctatttgcacccccatttttactaagtacaccccctgccttttttttggtgaattcttttttcgtaaagttacggaaacttatgaatttcgaaacaattcttgttttctttccgaaatgttacggaaccttgcggattgcttaatcattccccttttttgactaacggaatgttacggaaccttacggattgtgcctaattatttctttttaattt

SEQ ID NO: 29991 - DNA, 702 bp, Glycine max
ccagcccgaggcgagaaaccccccgagacccaaacccggactagattgccctcaccataccacagcagcacggggggttggaccccgtagcccaccccttggaaaaaaccccccgcagcagcaaggggaggagtgaaagcaattttttttaaagaaacacaaagcgaggagcgaacaacaagaacaaaggagtcagaaaaatcccaaaactagaaggagaagaggtccacagaccacgacaccggacgtcggagcgacaagaatgacccaggacgagcccacatcaggcacagaggacgaaagcgcgagaccacgaggaacaacgcctagccggcaaaaggaacaaaatgtccccgacatacaagcgggatgaaacagaatcaaccagtccgccccaatggggaaaacagaaggccaggcacgagacgaaagccagtgccacagcgcacgggggaggatgaacaaacacacggtccacgcagagaaaaacaaatgcaaaacgcgcggggcgcaaacgccccaaagataagcaccctagggcaagaaaatgaaaccaaaggcgccaaaccccacacccgaagagggatcgcacccggagaaaacaccaacaacaggaacagacaacgataccaccaaacaccagtgggaacgtgcaacctaccgggccgcacaacaaaagtgagaaacgggggccgccccccc

SEQ ID NO: 29992 - DNA, 226 bp, Glycine max
tgatttgtgagttgattttagccttattttctttttggcgactagtcaattcattcaaggaaacttccaaagagaaaagtctggttgattttttttgattattttattcaaagatattttgattattttataattattcagccttctttggtttaaccgtggctacagtgtgaacgacccgttagattttgctttaaccggtattaaaagacgtctgaacaccaaa

SEQ ID NO: 29993 - DNA, 379 bp, Glycine max
agcttcggttgttcaacttcgagaatttcaatatattatgtccctaaatcgaacatccgtctgaaaggttaagaccattcgaatttctcgagagcttccgttgttcaattttgagcgtctcgatatattatgtccccaattcggacatccgtgtgaaaaggtatgaccattcgaatttctcgaaagcttcatctgttcaattttgagcatctcgatatattatgtccatgaatcgggcttccgtgtgaaaagtcttgaccattcgagtgaaaagttatgaccatgggaatttctcgagagctttcattgttcaatttccaaccgtttgatttattattgttcctgaataggcattctacgcgaaatgttattaccattt

SEQ ID NO: 29994 - DNA, 866 bp, Glycine max
  unsure (1)..(866): unsure at all n locations
cgaagntacncaggcncaagtgcagannnatttgatncctaaagcaatcgccaaanaccccangnngattacggaaaaaanatccactcataggcgttttcgaacaagggggcggtaatggcgcaatattcttttttttattatggcatcgtcatcaaccacagcggcagactgcgattttattcgaaggtccccttagcaacattttaacgatattggttcgtctacgtccaagtaaaacttctcgatagtgtctcagaaagctttctgacgaaccgagtaatcaaccgtaatcctgggcgttttattaaggctgtttatgatcaccattatccgactattaagtatgcgccagtgaacgtctattcggtatatcctataaacgatggcatactattggatctagcgtccgggatggaccaatcgatcccccggtcgacttacgccttgatggtgcatccggagttcttcccctatcatccggcggaatttggctcatgaataaacaaagtctctacaccgtagatccaatccccttgacaccacattaccgtcacttgtgcacattgatgtgctaatgtctttccgatcaagaacatcagccgttgacttatgctttttacaggaggggccaactccgccgttcgcctaccacgtttgcatagacgcttaatccccatagactatattgttgcagcgatcgtggcgtctagtctcgttcactatatttcatatgccagttttatcgcacgacaatataacaactctctgccagctatggctacatattagtggacaatttgtatcatctgtctgtactcactaacaacattaatcgtctcttcggacgatctctcttctccacc

SEQ ID NO: 29995 - DNA, 470 bp, Glycine max
agcttgctaacccatggaagctcctttttttttccacactttatggggggggccattcttggatagccatgattttctagggcccacttggaccccatttctaccaactacacacacctaagaaaactatataatctacacagaaggtgcatttctctatattagcaaacagggtgtgttttcctaggactgaaagaacttgtctgagaatgcctaagtgatcatctaggctcctactatacactaaaatatcatcaaaattaacagactacaaatctacctatgacatcccttatgacatgatgcatacgcctcataaacgtgcttggtgcattagtgagcccaaaaggcatcactagccattcttacaaaccaaacttggtcttgacagcattttttcactcatcaacctgtttcatcctgagttgggcgataaccacttttaagaacagatttttgaaaagaaattg

SEQ ID NO: 29996 - DNA, 451 bp, Glycine max
tcaaggctaatgttagagatagggggaactttttgaagactaaagcttgaagcttggagaaaaggttgaagatgttgtcttttacacgcttaactcccttgagtggcatttgtattggttgttatattgaatgttgcatcttagccaatataatatcttttttacatcatgcattatcatgagtaagtgataagaaaattttctaagttagaaaaatttcttcagaaggaaaaactctttgttttaatcgattacaacctgtcacaatctgtcgttcgatgggagggcgaggcgagactcaacgggtgcgtcttccaaaaaggaaaatgcgcccgagtcactattagtcggttaatatgactaacttttgtgtaaaaagctgtgtaaaatgtattcgacttcttccatttacagttctttttgtagtattgggaaaactttttgttaaata

SEQ ID NO: 29997 - DNA, 240 bp, Glycine max
agcaccaataagggccctcaatggggattatacaccatggagacgcccacgaaggcaaaagagaagaggacaggggaggcaccctccactagggaaaatgccaaggaagaaggagccccaccaccaagaaaagccgtggaaaaaaaacaggaagacgacgccctcacggaggaaaagaaagagagaaggggggagcaccaaaatgaaggaataaaagagggagagaaggggaaccttgaa

SEQ ID NO: 29998 - DNA, 606 bp, Glycine max
  unsure (1)..(606): unsure at all n locations
aggccccggcccnctcggcctcgaatacantccgttaggacacgacaggaanncacannagaaacccctcccgccccaagcagactgggggctngaggaacacccttttcatttgtattcaccgggacaacccggctggtgttgttttgaaacgagtctacttcgccaaacaatctacaaatcccctacgcaattgacttcccctgtgacactggtaagcgtgtaaactccaccacaacaaccccttcctgccctaccccgtattaccacccccgtcccccaggcccccctcaccgtgaccgggctactcccgcctcccgcaaatctcacacgtctgctcatactcctctccctcctccacacacccctacgtcttcaatgcgaacccgcctccctataaccatgcccttaccacttgactgtctttcccaccggtgccctggtcctcttcaccccatcgcaagcacttccccccctccctggaacaaccaagccccctggtcgattatcctataccccaccttttccgcgctgccccttcggtctcacgtccttccccaaaccctttaccacccttcttccccccctggtgcgccccctacaacg

SEQ ID NO: 29999 - DNA, 487 bp, Glycine max
agcttaatgtattttgtgagcatcaaatgtctaaatgattcttataacttcaagtctagcaacatgaacaaaggtttcagagaaatctataactttttgttgattatatcctcaagctactaacctagctttgttgcatactacttttccttgttcatccaacttgtttctgaagattcatcttgttccaatggtgctcttgttttctggcattggaacaaatgtccagacatcatttttgttaaactgattcagtttttcttccattgtgattatttagtcattttctatcaaagctttgtctatagttttaggtttgatttcaaacacatggtctttgaatgatgatctaaatttaactccttcagtctaatctcagatgatatgatcttatggatgaaatgaaccaaattccaaaccttcatttgaagtggttgatctgatgattcttaaatcaaaatgaaatattcttcagactatttgactt

SEQ ID NO: 30000 - DNA, 360 bp, Glycine max
tttgcattgcattgcttgatacaaagccttttttttactgcatttcaagacgaaatttgcacccctctgcattccataactcatgcaccatatcaaggctataagtgcatagatttctctttatatgtcagtttccaaaatccaatgtcctatcttttgagtttgggatgagtgaccctttcaaagagtcaacatcttgccttcttatatgagtgaccctttcaaagactcaacgtcctcgcctttatgtttcataggactaaacgtcttctacctttatgtttccttggactcaacatcctctacctttatgtttccttggactcaacggcctctgtctttatgttttcataggacaaa

SEQ ID NO: 30001 - DNA, 331 bp, Glycine max
agcttactatgttctacgactttttattttagagactccttggtcgcctcgctctgttcttattacatgtgactgtctggtctacaccattgttttgctctctttcacaaccttcttatagaactggacaatggcccctgccgatgctaaccgggccaatagtctacgtgctttgtttgacgagaatatattctacggcatcgtgcctactactctatgataagaccgcggagaatgatatctgactttgtccctaactacacttatgaatgatgaccgatccaacactttttcaattggaacttctacatttgttcatagctttttttga

SEQ ID NO: 30002 - DNA, 486 bp, Glycine max
tgcggatgctctagggagaatcgctgatttattatagcgcaagagcaatcagaatacagtgtacataacagttgaagtcctgtaaataatagtggtttctgttatttatctcagcaggtcttctagaaaatgactgccacacttgttccccgtttgtttttctttctggatatgccatatttttgtggtttattactgccattttaggattatatagacacctttggattactactctttctctcttactgttatattaatatacatgcggtcatacgaatctttctctgggaagtaaagctggttgtatggacgacattcatgtttatatgcacttttatttgttgcgggtttcatttatggttcataataaatttattcctcagccagctggctcacaaagtcgtcttccccttttgggcatgaaaaaattgggcttaaattataaatttggtcctataaatatcccatttttggtttttagcc

SEQ ID NO: 30003 - DNA, 385 bp, Glycine max
agcttttttaaaaaaatattgcgcaatttttgtttttaaatatcagtctaagctacttcacgaccgatgtcgcctattgagtgttctattcaatcccttaatgaaatatgcatgatgtcggtatggaaatgttcgatcggtgtcatgcggtgacgcttcctttttaacctcgatcggtcatctttcctggcccacggcgactgtcgtttttttcgatcaatatcggtgaaaattattttttggccgagatgggctaaatttttcgttgcacgaataaatgggaacatgccactttccgcccaaataaaatggcggtagagcttgaacaaaacaccctatccgacctacattgataaatttttcattccctaccaactcacgaaaa

SEQ ID NO: 30004 - DNA, 445 bp, Glycine max
taacaaaaggcatgcgaagtgggtggaattcctatagcaattcccttatgttatcaaacataaaaagggaaaaggtaatattgtagccgatgctctttctcggcgtcatgcattactttctatgcttgaaacaaaattgattggtcttgaatgtttgaaaagcatgtatgaaaatgatgaaacttttggagaaatttttaaaaattgtgaaaatttttcagaaaatggtttctttagacatgaaggctttcttttcaaagaaaacaaattgtgtgtgcctaaatgttctactagaaaattgcttgtttgtgaagcacatgaaagaggtttaatggggcattttggggtccaaaaaactctagaaacattacaagaacatttttattggcctcatatgaaaaaaaaagtgcaaaaaatttgtgaacattgcattggatgtaaaaag

SEQ ID NO: 30005 - DNA, 517 bp, Glycine max
agctttgagggtgcgcagcccaccatcttttcatagtagagtatcgataatgtgtctaccatcatgattatcgtctccctttccatcattgggggtaccacctgggccgccagatccctccactttttgggcgtgttctttgaaagattcgtcccccttttgcacatgttctgtggttgcatcctatccgaagacattatactgacactgcctaacgaaggcaaccactaggtccttccaagaatggactcgggaaggttccaagttagtgtaccaggtaacagctacccagtaagactttcttggaaggaatgtatcagtaattcctcatcttttgcgtattcccccatcttctgacaatacatctttagatggttcttgggacaagtagtccccttgtacttgtcaaagtccagcactttgaacttgggaggggtgatgatattgggtactaggaacaactcttctatgttagcaaaggaataatcttcacctccttcaatggccctgagccttt

SEQ ID NO: 30006 - DNA, 506 bp, Glycine max
taacaaacttagaaatcaagtgatcatgtattccgaaatatagggggagaaaacggatgcacattttatctatatacaattgtttgttgcttgcttgaatcttgatttcaggtattgtattgtcatcatcaaaaagggggagattgtagttgcaattggctttgatgttttgatgatgatcatgatgatgtgttgcaattgatgcaaatgggcttttcaagattaaaattcaagacaatacttcaagattacaagtcacaacatcaagatgatcactagaatattaggaagggaattcctaattgaattagcaaaggtttggccaagtgatttaaaataaaaagtgtttttcaaaggttttactctctggtaatcgattaccagaagatgtaatcgattaccagtggccaaatacgttttataacagctataaaaatttgaattcgaaattttaaaagctgtaatcgattacacaattgtggtaatcgattaccagcagttagtaa

SEQ ID NO: 30007 - DNA, 494 bp, Glycine max
aaaaacttcatggattgcagcttttaacttagaatcacctgactcaccaggcactgtccatcttgaaagtgactgaaggctgaatccactgtattcactagcagcaacgtttgtcttctgggaagtaacaagggccttctccaaatctaactgggacaaaagtctaagtgcctgaaatgtgaaaaatagaccaaacagcatagtagcacttactatatgagaaagccacggagaagactattaatcagtttctttaaaaagacttaataatgaaatcatatctaacacagccacaaattgatcttgcacattaagtaatagctttcattgaccaaagatgtcactttaaagcatgcaaatataaccttgggtgcatacaatggttttatataaaatagacatgctcaattgaattgttcctttctagttaacagaaactgaaattgatatggaattctagtcaactcaacagtaggtaacataattattgggaa

SEQ ID NO: 30008 - DNA, 340 bp, Glycine max
tgtaattgctactttatttccctttctctttgtgagatgtttcctctcccagcgaaggtgtccctatgagcttttgaacctattttttgtgagagatcttgtttaggtccttatcccctttttttttttgtacttagtttcatcttcaaaccttttcttgaaattttttccttgacacttgattttcatggagggtctaaccattgaagatggagtgtggaggttgaaatcccagttgagaactcaaatgaaaaatccataaacatgagttcgtgtctagtgggcccatttcatacaagtagaattatcaaaacccaacttggaggccattacaagggga

SEQ ID NO: 30009 - DNA, 747 bp, Glycine max
  unsure (1)..(747): unsure at all n locations
ctcagccacacgtcatntactcagcttcccgctacccacgtaaacgtaaatatcgtacagaacggaaggctaacccccacctacagccccccgggacgcatggtgagacctgacaagccccgccaggnaacctaatagaccacccggcaggctaccaaccttttccgtgaggagggcgagagaatttttttgtcccctccacaagccactaacaccgaaacgcaagttcatgagcgcgtaagaagaaatagtgaccgtgattggccactgccacaagaggacacttatccccacaacagggggaagaaaagcgaagattttgaactaccatactgggcagaactatatgcgcaccgactaaacgtacgcctgcggagaaaaaatgtgtgtagacaggatcaaacagggacttccccgtaacattagacggaaaaaccaaggatgggcttgaaatttcactcaaaactagggtagacaaggggaagaccaaaacacgttgccataccataatcaccagggacggcgaaacaaatacaccccccgccatgcccccaccccgggcgaacaacatagaagaaaaagtcatgcggcaaaggacggggggaattcccaaagatatcaccagggagactgatggacaaaaataggaaggacctgggacgccctcacagggaatatctaaagacgggtcggggcgacgaaagtaacaaagcaaagggtgcgggaacacaaaaagaccaccacccc

SEQ ID NO: 30010 - DNA, 641 bp, Glycine max
  unsure (1)..(641): unsure at all n locations
ntttgatcatgcatggcaaacccacantttgtggaaaaaacccctaatgtttgtaatggggcatcaggaccctttttttttttttaaacactggggaacgacttctcactgttccaatcttgaacccacattcccagaaaagacaaatttgattagaaggcttccaattaaaaagtcccttcttataacacatttaatctatgcacttcttatgttggacgaacataattctttggatgcacttaacaaaaatgtgctttggccaagatttttgcgcgccaagatattaaagagagattcgaaagtctcaatggattggcaaagctcaatttaccttttcttggggcattatcactgcaaacactcgtggtcgcggaaacactttttccatttaatcaatatactggccgggtaacattcctatagcagtccccagatcatgtgcagcaaacacaaactgagggtaggctggccccccccctagggggtcctagattgctaccctttaccgcgcaatgtaaaaagggctaagtccacctcctacccatacatggataagtgggcatctttcggctaccccacttataacttaacggccacgatatattgggtacaatcatgggctcacctggcagccctcc

SEQ ID NO: 30011 - DNA, 364 bp, Glycine max
agctttttgactcttgattctttggcatttgcttaactcttgattctttggcatcatcaaaataatcttggaagtcattgcttccacacaacggaggtgacagaggtgtcgttggtctgccaacaccatcgccatcgctttggtcatcactttggtcatcgctttggtgattgatgtgatcaaagaactgttgatcctcatcgtcactaaaatcatccatgttttcctcatgaaatcatataatgaaatctttattagcgatgggatgttcatttcggtttgatgtttgtgtttgtagttgtcgtgagagtgatgtaaaaggggatgaaggatggttttgtttgccaaaggaggtttgttggac

SEQ ID NO: 30012 - DNA, 320 bp, Glycine max
gctagatgaaaaatatttattttgctacgcgcaggacccaccagagcacactaatcactatatccccgaagattggaaatgctgagatgcatccttaactgagccctgatcacaagttacagtccttcactacactcatctccgtgacgaattaagcccacttttatctaggacccataaaaaatgcattgatgatgaaagaatggaagacaatatgaaacggcaaaacgtggatgctagtattgcccgagtggacccaatctataatctcgtatgggttatgagacgtaaatatacactgaaatctaagagggttgctg

SEQ ID NO: 30013 - DNA, 498 bp, Glycine max
tctccagcttctcttgccatcatcttgcacaaacctctactgatgtagataaacactaccaagaaagctagcatctctctctacaataattgagagaattggcaaaaaaatatggatgtatactttcttttatatttttaccaacagtacatgaagatgttgaagttgaacaacaatctattttctaggcaagcgaggcagactaaaattgaagactaccagagcacaaaagtgaaaaataattgtgtccatatgttagctgatagaacctaaggcaatccgtttgcccaaattcataagcaactgtttccgtatgtgaacattatcaatgcatactataagcaattctccacaagcacttatttcaacatagattctaagcacgtttcagaagcgtataagatattgtatctgcataaaaacttatcatactaaccttcccttcatctcaaactatttttttcctaataacctttcatcatctccttctcatatttt

SEQ ID NO: 30014 - DNA, 693 bp, Glycine max
  unsure (1)..(693): unsure at all n locations
ccccacccacgcacgcacagacacccacacgacacaactgaccccaacccacagctacccgcccccctccttcacaacnaagcacnnnnnnnnnnnnttcatactcgagtacccgcgacacctanaganccaccgcggcgcgcgcgcactgaggngcgcaggacaccaatttttctaatacgagcatcgaaaatgagggcaccatcaggataatcgacaaccgacccaacaaggagggaaacaactgagacgccgcaatcccgccatataatgagcaaggatattgaaagattccgccaccattttacacaaggaactgtgggtgcaaaccacaaccctaanncgaaatataacgaccacagcacaacaaagggcggccgcacggatccaacccaataggagcatccgatagggtaaaagaaatcgaacgccgattcgcacacacagcaagaccgtcgatgtgaggaaaaaaaagcaaataacaataggtaagcgatgtcaacatgtcgcagacatgaccagtgtaaaaagaaatgagaacaattcgctcacaaaacattggagagaccatcaagcaagagcgcggataaaagaccaagaggggaacctatgacacacacatctaagggaaaaaaaaaaaaaataccggacaaaattccagggaggctagaccgctaaaaaaaaaaaaaaaag

SEQ ID NO: 30015 - DNA, 394 bp, Glycine max
tggagaggatgcttcaatgtaggattagaatgagggagggaaagagagaggggggagcacgaaattgaaggaataaaagaggtagagaagttgaactttgagttgtgtctcacaagactctcattcatcaaagttacaacaagtgttacacatgcttctatttatagactaggtagcttccttgagaagctttcttgagaaaacttccttgagaagcttctttgagaaaacttccttgagaagctagagcttagctacacacacccctctcataactaagctcacctccttgagaagcttccttaagaagattcctaaagaagctagagcttaactacacatacctctctaatagctaagctcaccttcttgagatgagaagctagagcttagc

SEQ ID NO: 30016 - DNA, 435 bp, Glycine max
agcttttaatggaagtcatgaaaattatggcccctcagaagcattaactggaaaccaagttcatgatcgcgtaaaggaaattgtaaccgtgtttggcaagtcccagaagaagacatcatctcccaacaacatgtggaagaaatgctcaatatttttgatcttccatactggtctgatctatatgtgcactgtctagatgttatgcatgtggagaaaaatgtgtgtgatagtttaattggtactcttcttaacattaaagggaagacaaaggatggtttgaaatttcgtcaagacttggttgacatgggaatacgagagcagttgcatcccatatcacaaggtcggcgaacatatttacccccagcatgccacacactgtcaacaacagagaagataagtttttgtccatgtctgtggaatctcaaagttccacaa

SEQ ID NO: 30017 - DNA, 510 bp, Glycine max
tcagaaagctttttatggacttaaacaagctccaaagcaatggtgtaggacttagccacttccttcttgaacaaaatttcgagagaggacaagttgataaaatgttttccattaagaagtcctctcataacactctactcatgcaagtttatgtggatgacataatttttggttgcactaacaaatctctttgtcaagattttgtgcacaagatataaggagagtttgaaatctcaatgatgggaaagctaaattactttcttggtctttaagtgaaacaaatggaccgtggaacatttctccatcaagcaaatactgcaagtaacctctcaagaagtttgagatggaaaaaaaaaagcaaggaggctgcaactcctatggttactagttgttaccttagtgtggatgaaaaaggaaagccaatcaatcaaataaggtatagaggtatcattggctccctactttacttaactgcaagtagtttggacatcatgtttaatgtttgcatgt

SEQ ID NO: 30018 - DNA, 516 bp, Glycine max
agcttcttatccaaggcccgtctttttttcaaagctcctttttcctaggcttattcccttgtggatggtgcctcctctctccttttctcctttgccttccgctgcatctccatggtggaaaatcaccattgaaggacctcattgaagctcaaatattcagcctccatagaagctccataagcaagcttccatcaagtggtaatcagagcacaagagcttcatgtaggtgctccttaaacctccattaattttttactttaccttctcttccattgttgtttcttcattttctccatgtatctcctcacatgtcttctgctaaatgttgttaacatgattctttagagtttccaccgattaaacttgctatagaagctagattttattttctattgttcaaatttcttgttcttgttcttgaaccatgaattgtgttgagtttaagttccttttgagttttgtcttgttattttttgtggctgaagcctaaattataaaattcttacaaaaatatta

SEQ ID NO: 30019 - DNA, 458 bp, Glycine max
tcatgatgatgaatcaagattgattcattgagttttgatgataacaaaggtgatgacaaaaagcccaagagaatgagttcaagattgagtcaagaataattcaagaatcaagagaaagattcaagaatcaagtttcaagtcaagaatcaagaataatcaagatcaagattcaagactcaagattcaagaatcaagaaaagactcattaaagataagtactaaaaagtttttcaaaaacattgagtagcacatgaagttttcacaaaatcttttaccaaagagtttttactctctggtaatcgattaccagtggcaagttttgttttcttacttcccacttattccccattgctcctctattcctttgggttttagctaccatcccatactttcatctaccttgtccttggccccattacacccttaaaataccttttgatcctcatgtgcatgtgttt

SEQ ID NO: 30020 - DNA, 704 bp, Glycine max
  unsure (1)..(704): unsure at all n locations
ttagccttgacnaacggancannnntagagnanacctcgaggagcgagcagcaaactgagcggacgaggagaaattcttttttgacggggcggagaaaagggcgaaagaaggtagccagggcgaaaaagccaccccgctccacaataccgaacaacgaagcgagggcggaaggcaggaaagatggaagagcccagggggggcccaagagagaggggccgaaccaccgagtgaaggagcggnggagggtccaaagaatcagacaatgcacggacagggaaacacccgtggggggccagcacggaaaaaaatagagagcgggcgcaacgcggaaccacacaagcggaacgggcggggacaaacgaaccaaagaggaaacagggcagaaagacacagacaaaaggagatgcagggaggagaaaaccgccggagaggaaaacatgaaggagggcaggaggcaacaacgagcgcgcagagtgggcgccactggagccgaccccaaaaaaaacatacgacccctcccacagacaagacgaggagaagaactagtgggcatatacacaccacgaaaaacaacgcacgacgggggaagaactcaagacacgaaacagggcccgaggagaacgatggnacaaaacgaagctgagcgatcagaaacacctaagcggcgacggcaagcgggcggacaaacgcagcagccacccca

SEQ ID NO: 30021 - DNA, 711 bp, Glycine max
  unsure (1)..(711): unsure at all n locations
accccgaaacgcgagcaatgccccacacacacgccccacacttctcaacacactcagacacccaacccccagcnnnnnnnnnnnnnntataactgcagtcgcgggnnannaannanaanaacgccgcagcagcagcaagaccaccgacctttagccctaaaaagggaccaaccaacctggggtcggaccctcaagcacccaaggaaacgcgcccgagaaccccaaaaagaggacaccaagccccccggcctgtctaacaccggataaaagccttgcgaacccctcggagaaccctcgacgaggcggacactcaaaacccccgtgcgaagaaaaggacacgaaggcgtttcgaccaaaggcgcgccccccatggggcaagaccaagcggacgataagggcggagaacccggaaatataaatcaaaaacaacccctgtggtcgcaacaagggaacaataggacatccctcgcacgaagacaaaaaaacctgaatccctcccctccttccacgcgagggaaaccaaaataaccaaacagaccccccccatgccgaaaccaaagaagaggggtgcccaaaaccggcccttcccttttttcgacgcaccgaacgggaaaccctcggtaaccgggaaaaaacacggccccacccctccctttggagagaaaaaagggggggaaaaacacaccccccccctatgaagaaagaaggcct

SEQ ID NO: 30022 - DNA, 424 bp, Glycine max
tcttatccaaggctcatcttggtggtgattctccttcttccatggcttattccctaatggatggcgcctcctctcacctcttctcctttgtcttccgctgcatctccatggtggaaaaccaccattagaggacctcattgaagctcaaagatccagcctccatagaagctccacaagcaagcttccatcaagtggtaatcagagcacaagagcttcaagtaggtgctccttaaacctccattaattttttgctttaccttctcttctattgttgattcttcatttttctccatgtatctcctcacatgtcttgtgctaaatgttgttaacatgattctttagagtttccaccgattaaacttgttatagaagctagatttgattttctatgggtcaaatttcttgtccttgttcttgaaccatg

SEQ ID NO: 30023 - DNA, 586 bp, Glycine max
attttttaaaggaggaaggaaaagacgaagagttgtgtttagataactggcaaccacccaccatgtaccaactttagcaaaaacgggagaggaataggtcactaacgagtgcttcaaagacgaacggagctcctacgtcgaaggtttattcaaaagtagcttgatcataagagtaaacagacatctgcaacaactaggccgagagtcacacagacgggcgaaactaggacaggagaacgtgcccgatgaatcttatacgcgaccacacacctactcgaacacgacatagatggcaactgaatgaatagttaaataatgaacatcgcagtggacgtttgatgcaccgcgcatatagaggttggcttacgaatgagctatacgatctcatcaagtcctgtcagttatacctcgaacgctagcgacacggggtggcatccatcaaccattatctcggaatgaactctcaaggtaagaacgatagaactaagtagactgctgtcctaacaacaggagacaagcacgactctactgactacaatcccattacgacatgaccactgtaacgtagcaagcgcaccaccgcccg

SEQ ID NO: 30024 - DNA, 744 bp, Glycine max
  unsure (1)..(744): unsure at all n locations
ttatgcnctgcacnaatcaacaanannnnnaagagannanacngcagcccgtcnngacccgccanattctcaacacccaagcggcccaatacattcctttagaagagcgggagcccacnccgagggctctgtgttacggacttctcaaaccacctcatgataacccggctgaagaataccccttaagtgcgtttcccttagagtctttggaccctttcttcacgcccgcaaataaaatggcccttggagaaactcacctgagagatacccatacgcgtgttcgggcgctctattaaaccccccgcggcgatagaaaaggcggctggtagcttttctctcttaaagagccgctacccacttcactgggtggaaaccacagcctggtctttattggcgaagaacccggaattaatccattaaataccaaacccccctttggctccccattccatagggaaacatataagagacacttccttctgccatgacaaaacaacaaacttacgagctacatccccttccttcccaatcagcgggtaaccaacaataatctaaacgatcgtccccaccgtagcgcaaagtcgaaaatgatgacttccccaataatgtcacctatcgtctacatccacacccacacaacgggataaaccacgtcattccgaatagacagcgcacctaccgtatctttagaacaaaacaagggattatatccacaactcccacactaacgtacacgcacccccc

SEQ ID NO: 30025 - DNA, 207 bp, Glycine max
  unsure (1)..(207): unsure at all n locations
ttgagccaattcaaacgacaataaccnctttttttttattgtcccgacgagccccgccatatatcgatacgctcgaaattgaatgttgaagctttgtagccattcaagcgacattaactttttactcggatgtctgcttgagtccctttatattccgagacgctcgaaacttgcatgttgcacctctgtgcccaatttaaacgacaa

SEQ ID NO: 30026 - DNA, 809 bp, Glycine max
  unsure (1)..(809): unsure at all n locations
accacgaaggacaagagagcaaaaacgaaaacggaggaaagaaagaacgagacgttcacaaccaaaacacgcaagccnnnnnnnnnnntacagcctgtagtagacgaganntnngngnnncgagggaagaagcaaanagaagaaagggaaaggangangtatttatttaacgaaagaggagaagggaaggaaggagggaggaagagaaagagaaggaggaaacgaaaaggagacggaaggaagagaaggaaagaagggagacgggggagaagagaagcgagagagatagcgagaaacgaaagaagggagcgaacgagaggaagaaggaaagatagaaaggcaggacagaaagaaggaaagaacgaaaaaaagagagaaaacaagaagggacaaagaacgaacgagaggaagaagaaacaaggaagaaaccaagaagaagaggaacgacgaaggaaggaaggaagaagaaagaaagaaaggagacagaaaacagacgaagaaacaaaggaagagacgcaagagaaaaggaggagagaaacgaaggagagaggaaggaaggagagacaagaaaaagaaaacaccaaagaaagaacgaaagaaagaagggagaaggaaacgacaaataacggaaggagggagggaaggaggaccgaaaaaatacagcgcagaacgaagaaagcaaggaagacgaaagagaaaagaggaaacacgaaagagacaacgaacgaaagagagaagaaagaaggaaaagaagagaggagagagacgaaaagaacgcaaggacggaacgagaagacagcaaccccccg

SEQ ID NO: 30027 - DNA, 70 bp, Glycine max
agcttcccatgtgctaagctaaataattttcatgtgtaacacttgtcataactttgatgaatgagaaact

SEQ ID NO: 30028 - DNA, 67 bp, Glycine max
tctagccaaatggacttaccttgaattaatcccttggaaagcccttttgagccttgtttccctttcc

SEQ ID NO: 30029 - DNA, 909 bp, Glycine max
  unsure (1)..(909): unsure at all n locations
cacccaacaccgcaccgacaaccgcgcgctacgacaaaacaccaacgacctantgcgaccnacgctnctcccaagcacagacccnnnggnnnnnntgagagcctgcacgtgcccgnngannnnnannnnncncngnnnncaaacacacaaccaacaaaacgaaaacaccttatatattcccacaggagaaagaggacaagcgagacaaaaacaaacaacgacaaaagcacacacccccacaccaacaggaacaccaaccgcacacgacaaaggagaaggaaaaagcacggaaaacaaacaaacaacgacacaacccaaccacacaaacaggaacaagcaaaacaaagaagagaaaatgacaaacacaacaccaaccgaacgcaacacaaccacaaacaaccgacaagacaccaagcaggcacgagaaccgcaacacacacaccacaacccacaccgaccgagcacacacaatcccacacagaccaaccgaaccacaacacaagcacagcagcgacaccacaaagcacaaccaccgacaaccacgagagaataccgacacgcacgagacagaaaaaggagaacgaaacaaaaccgccacgcgccacatacacgaaacacgccagaccgcgaatacgcacacacacacaacaaacaacagcactgtaacacaaagcaccgaacgacaccgaaggcagcgcacgcacccaacgatacagaccagacaaaagagaactaccgacactccacaacccaacgacacgcaaccaaccacacaaaacaaccacccgaggccaaaccaccacacagacaaagaaacgactcacaaccaccacacacacacgaaaacacagcaaccgaccaaaccacacacaccacaagacacacaagagacgcccacgaccacacccc

SEQ ID NO: 30030 - DNA, 849 bp, Glycine max
  unsure (1)..(849): unsure at all n locations
cccccaccaccacagaacgagacgaaccacggacacgaatcgaacgatgagcatctactctaccccactacaacagtaccacccggcgnncaaggtgagactccgaanacagcggccgannnagagnagaccagcaggaacgaagganagaagccccgaaaggagacccgttatttatataaaacggagagaaaanagaggaagaggcatgagcacagaaacagaaaacaaaagaccccaccacagccgcaccacccacaaaaagggagggaacacagagcgcaagcaccaccaaaacaccaacaagacacaacacacacagtgcaaagggaaaacagaaagagacaaaccaacaagaacacgaccgaacacgaacgcacaaagcgcacgaagcagcacggaacaccgcacgccacaacccagaacgacacaacacaggccggcgaagacacgcacacacaacgcacaacaccagacaccaaggacacccacacccaacgatgacgcaacaacagacagggagaacgagagcaaacaagaagcaagaaagaacccacgcacgacagacacaacggaccgccagaacaaccgccaagaacgaacaaccgaagcgaacaacaacccacacgacagcacagacgggaaggaacgagggaaccgaacgccacgacacgaaccagcgaaacaccaccaagcaacgaccccacacaaacagacaccagaaacagacaacacagcaacgcacacgaaaaggacaccagagagacagaaccaaccgcgacgacagcgagaggcaataagagacacacagcagcgaacgcaaacgagacaacgcgccacccccacccg

SEQ ID NO: 30031 - DNA, 611 bp, Glycine max
  unsure (1)..(611): unsure at all n locations
tttgcagagtctacggagcattttctattgttccaggccaaacccacaggcgggggggaacttctgaaaacaccacccccccccccacggcaaaacaaccgcacagagggaagggaaaacccccacaaccccaccccgacaaaaccacaagacaacacacacacaacaaccacgaaacaacccaccacaaaagaacccaaacccacacccaccaacacccccaaaccccaccacaccaaaccccacacaccaacacacccacaaccaacccaacacgacacccccaacgcccaccaccaacccgcccccgacaaccacccacgcccacaaacacaccaaaaacacaaccccacaaccccaccccacacccccacccccacaccgaagcgaaaacaaaacgacaacccccacccacaacagacccacgacccaagcccaccccacggaacagaacaacaacaccccaaaacacccaccacacagcagacgaaccaacccccacaaacaacaaaaacgcccgcaaacaagcaacacccaccccccagccacaacaaccaaaacacnaaccagccaccgacaaacacacccgccacaccacaaacaacccgccc

SEQ ID NO: 30032 - DNA, 54 bp, Glycine max
agcttggagatagttactttcttgtattatttttagctaccactagctagttac

SEQ ID NO: 30033 - DNA, 553 bp, Glycine max
tagcctgaggagtggtagaatatttgattttaatcccaaaaatgaacttggattatatttttagaataacttacgagcccccagaatctccctccccgggcgggggggggcgcccccgtcccccctcccgcccctccgccccggccccccccgccccccccccctccgtccaccgccccgcccccctccccctccccctccccaccctccgccccccgtcgcctccccccccccccccccccccccagcccccccccggcacccctccccctccccccccccgcgcccccccgccccccccctccccctcccccgcccccccctctccccccccgcccccccccccctcccgcccgccggcctcgcccccgctcccccccccccccccctccccccccatcgccctcaggcccctcccccccctctcgccccccgtccccacgccgcccccccctcccggcccccgcctcgccgcccctccgccctccccccttccttctcgtctcgcctctcggtctccgctcggcccccccccccgtcccctccccccgcc

SEQ ID NO: 30034 - DNA, 537 bp, Glycine max
gtattttggaacaaggagccccaacgcagaggtgtttttattgatcccgcaaagcactggggaatggtgcacacagaaagtattgggaacttatgggaaccttccactgtggcctgcagatgctgccagagtggctgaaacttgatgcacaggggacagatttgggggaaaaactcttatcggcctccgagcgcagagcaatttgatgccccctatccctgtgcagagcaagcgcttaaatcggaacaagggcaaatccaagcactcaacgataagtctaccgctccatttttcaggactctagaggagaacgacaatcgtgtgagacacaataataccttccatccttctcccgccggagtctatggaccatggaagatctcgtaggaaaaaacacatgccctgacaattttgcgaggggctcttctgggggcacccgccagtgggccttatactttacgggggaagaagaaggctccaactccggtttactaaggcatcaattactcgagagctgacttgcagacgtccctcgcc

SEQ ID NO: 30035 - DNA, 582 bp, Glycine max
  unsure (1)..(582): unsure at all n locations
ttcgattgattctatgcacccgnagtggtcntttaccgcccccccgggccccgggggcctttttcactgcccgcccccccctacctgtaagcgccctgcacccgaagagcggccctccgccacccccgggcactccactggcctccggcaatgcccttgcgcactctgccggggggggccactcgcctccctgggatcaccgcggcttgcgtggcctcgccctccccgcaggtctcctgcggccccctcccgtgcctaccctccgctttttggcgcacaacctacgacccacgccgccataagacaacgccggtcctcccaacggtctcctaatccctaacctcacccgcccccccccccgcactctccaacaccctctactacggggcgcggcctccgtaccttccacggccaatcccctcgcacgcaccgctccgagcctccccctttcacgttctcacttccccccctccgcgctacgtccatccttgtgcacccccaaccgcccgatctcgcccccccgtctcccacacgcctccctccggggaatccaatccccattattcccacattttcccctcc

SEQ ID NO: 30036 - DNA, 849 bp, Glycine max
  unsure (1)..(849): unsure at all n locations
cacgcgaacccagaccacgaagacgatacacacacacgcgcgcgccncacgacgcctgcaacgcgaangcagccccataacattacaacaacaccaacggaccaaccgcgcnccacgcgattgagactccgttggacagggcgcggnnnnnnngagaggnacnccaaggcganacagcaccgcgccggcgatgagagaaacaacccattatttatatcatccgcgggaggcccaaccgacacgacggaacgccgacaaacgaacggacgcgccgaacaccccgcacacacagacggcacgacaccgccccccaggaagaggcaatcgacacagggcaacgcagcccggacaacacctccccgaagcggaaggaaagcacgccccgaagaaggagccacaagccccccacaacaccgaaagagagaaagcgggagacaaccacaaaaccacagtcgcagacaccgaaagaagcaaaaaaaccaaccgcagaggaagcgcgttccgagaaagacacgccaggaacgacagacccacgcagcaagcacgcgagaacgtggggagcacccagcaacacccccggcaggcgggcccccccagaaagcagacaccggggacacaaaggaaaaagggcggacaaacgcgcacacgaacgaaaaagcaccaacgaccgaggcacgcaacgaagaagggggcgaagccggcaggaacaaacaaaagaacgacagaggaacgcaacgaacgaaccacgcggggcgggaggggaaggcgcacaagaaccacgacagcagccccgcgggaggagcggaaaaaaagaacgacgcgacgaggaaagcacgccgagcccccccg

SEQ ID NO: 30037 - DNA, 784 bp, Glycine max
  unsure (1)..(784): unsure at all n locations
ngttgggttccatagnnatcatgtaaagaccnngcncnnnnttnnnntancancanattancntctacaggcgcttctaagnccctaggagggatggtgggggcaggaaacnnatattctctctagactanncttttcacgcgccacncggcgcgcgcgccgagcacgagtangaggatttaacaaaataaaaaccgtccatccacgccccccgcgccgcaatcactccaaacccataccctgggtgggggggcaagcccacatccttttctcattaaacaccccccgcccaatacttaccccaagtcctttgttcgcggccaccaccctccttctccatccccccacttcccccaacacactcttttctctcaaataccccagtcacacacacatctgaactcttccaaacaattggatgctgggtcacaccccctctcgaaaagccgcaaataccgccacaacaaaatcttccaaccaaaaccccctatcttaaaaccctacaaaaggcaaagccggcacattttttttcccccccccaagaaaaaataggggggaaaaaagaaacaccacacggtgccaagggaaagaaaaaaatggcctttaccaaaggagggaagaaaggaccccaaattcaaagaccccaatattatgccccccccccccgggggaaaggaaaaaaaaaaaaatccaccggcccttaaataatttttttttttgaaaaaaaaaaaaaaaaggaatgttttggggcagggcttcccaaaagggggtatttaaacattcn

SEQ ID NO: 30038 - DNA, 415 bp, Glycine max
  unsure (1)..(415): unsure at all n locations
acgtgcctcatgcaacaattgatattcgtggctatacgaaacatcttgccaaacaaagtcaggttagcgataactcgcctgagctctttcgtccatgctatatgtagacagtcattggtccagtcgtgtttgatgaaatggaaaatgaggccgcaattatacaaagccagctggagatgtattctccccctactttctttgacatcatgattcacttgattgtgcatctggtcagagaaatcaaatgttgtggtcctgtttatctacgatggatgtacnccggtgatcgatacaataagatcttaaaagggtatacaaagaatctatatcgtccagaagcatctattggtgagaggtacattgcagaagaangccatggaatttgttcataatacttagagaaggctaaacatgt

SEQ ID NO: 30039 - DNA, 388 bp, Glycine max
cccatcacatgtggtactaggtggcggtcgggttatggtgcaagaaaattctccacatccacaaatcacgtataaacccaccatcccctggtggccacctccaactgagctcatgtactcccacgtagcccttatcctcgttcctctcaacgacgggtccccatcaatcctcccaagcttccacaacatccaagtaattcaacatccaatcatcacaaactaacacagccaagaaaacagggcaaaggcagaaaactctgcccaaagcacaaaccaatatcacagcttttcacattcaaataccccagtaacattctcttcgttccaattcgttaaccgttggatcgactcgaaaaatttactgggagtctctagtacataagtctac

SEQ ID NO: 30040 - DNA, 410 bp, Glycine max
  unsure (1)..(410): unsure at all n locations
agctttgatggcaagtcctctgcattaagaactaattccctccctgggatacacaatcaggcagctatcttctgagggtctgggcgtgtgccgcagaacctggaatatgcattaaactttatcaagtgccctctaaacctgacctgctttggagatttatcctttgggtcatgtagatttgcgtaaaattctttcactagagccacgtcgatgctcccctccatgaggttagtcagctgcttatgccagnttcttcactcaatctcccttctgaagtcaccatactccatcacaaataacttcacattcctttccagaaggatgttctgggtcagaacgttatcagcataacgatcccaggcattttccaagacaaattgatgagtgtcataattaggttggggcatgga

SEQ ID NO: 30041 - DNA, 328 bp, Glycine max
  unsure (1)..(328): unsure at all n locations
aacagctttttgtttcgtctaagttgcagagtgcaaaaccttctgcgaatatacggcgaaggacagcatctttggtgggtgcatgttcgcataataatattccaggttgttgtaaaaaccatgcatactnntgacaattgcaaacaatgattggtttctttttttatttccttgagttttcatacctacgtacgtatatatatctgatgcatatgctattcgtatatgtctttatcaaagtatgatatgtgatataataatagaaccagatttgtgtcaatttatccaaatcaatatcaatctttagagtgtgnattttttattctcc

SEQ ID NO: 30042 - DNA, 375 bp, Glycine max
  unsure (1)..(375): unsure at all n locations
agcttgtctctcaacactacanagctattcacctttaaatcctttgtaaaaatatctgccagctgcatttcagtgctgcaatacctcaaatccagctgcttcttgctcaccttttccctcagaaaatgaaatctagtctcaatatgttttgatcttccatgtgctactggattcatggccaaactgatagtagatttgttgtctacatacaatctaactggcctctgaatntccaccttcaattcttcaagcaaggagtccaaccacaaggcttgacatgcagcatagcaagctgctatgtactctgcctcacatgaggataaagccaccacttgctgtttctttgaacaccagcttattgatgtacccagaaac

SEQ ID NO: 30043 - DNA, 271 bp, Glycine max
tgacattcatgctatgaccctattggagaagatttcataccatttacatagtttcctcgtgcccctaaattttatactaacttattacttggctgtgagcctgtgacatgggatacatttcctgtttgtttgctttctgacagttggctataaatatctaactatgcttgatttagaggttaatatgacatacatgtttatttcatttggatatttcctatttgcaaaatatcccgaaattatatcagatattgtgcctttagtactatgc

SEQ ID NO: 30044 - DNA, 313 bp, Glycine max
ataactgaatcttagttctcttagacttattttttatcagctggctgatcattataattaatgaactcagtggcaatctctttggacagtagcttctctcgaataaagtgacagtcaatctctatgtgcttggtcctctcatggaagactgggtttgaagcaatgtgaagagcagcctgattatcacaatataacttcatttgcaccactttgcagaatttcaactcttccagaatttgtttaacccacataagttcacatgtaaccatagccatagatctgtatacagcctgtgctctagatctagcaacaa

SEQ ID NO: 30045 - DNA, 397 bp, Glycine max
  unsure (1)..(397): unsure at all n locations
ctgcagctggggtattgctccgcactatatttaacagagcgttaactaanaactctatgtttgttctctgtaaatccaaaaaaactctttgttttaagtgaaattaaaaattgtgaatatataatcataaataagaaattcatttaaaaacgtcaaaatactaaaattatatatagcgccgttatttaacaacgaattgacaatcgacgattcctaaggatatactgaaacctgcggcaaacaactgaggcaaaccacgtgaaattaaggaatataattctcgaagaattaaggaatttctgctatgtagcagtagtaattaacctagttttttatgtataaaagtagtaattaactagtagctaagaagttgtttgtgagagtgtttgattaatat

SEQ ID NO: 30046 - DNA, 407 bp, Glycine max
  unsure (1)..(407): unsure at all n locations
acctgtgaggatcatcatgtttgggacttaagtttgacgagtcttatgtgcaacgcatgtgttgagctcttgcatacatatcactcatcatgggtggcatgtactggagacatcgcgccgtgaatcagtatgactaaccaacggcggaccttgggttttgcaagccctttggaggattgactacggaattgtctaaactgggttttgggcgccatgctgttgcatacatgtcactcaccatgggtggcacatactgcagacttagtggcgtgctcttgcgtacatgtcactcgttgtgggtggcatgtactagagacgtagaggcgtgctcttgcatacatgccactngttgtgggtggaatctactagagacttacaggtgtgctcttgcgtacatgtcacttgct

SEQ ID NO: 30047 - DNA, 276 bp, Glycine max
tcattttctataggttactactgtgatgaacgtttatgttatataatccctatggaagcagggcacatttttgtgggtagaccatggctatttgacaagaaaagtatccaccatggtctccccatgaaatacccttacccatggaagcaaaaagttctaccttgttcccttgacaccttcacaagtggctagggatcaagtacaaataaaactcatataggatgaggtatagaatagaataaaaaagaagacctactctatggagaggaggagtgt

SEQ ID NO: 30048 - DNA, 440 bp, Glycine max
  unsure (1)..(440): unsure at all n locations
acaattgaaaaggctgcatattgcatgtgaaaaanaattcattgaatattaaatagaatggaataaaagagggggaaaaagacatggggaaaaaaatgaaaacaaaacaaaataggaggaagcaatgtcttttccttcttcacccaacagcttaaaaattggtgctctatgattgaattactaaaagcatggagtgcaagtgggctatgactttgaagtgctcctatactaatttaaaagaagcttgggtggagccatcaccataaatattattccttaacaaacaagacacaataatcactcacatccatatccttcttggtgatatatatatactctnttgtattaatgtgtgaaattgccctctattcgtgtattgattggttgagctagtaaaatgttgcaatggctggagctagggtttacaattagttaccctt

SEQ ID NO: 30049 - DNA, 433 bp, Glycine max
  unsure (1)..(433): unsure at all n locations
aatccaatggtggttctctccgtccttcgctcactccttctggtagtgatcctttcaacaaaatatttcattnttggaatttatttttgacattgacttttgagtttcaatggtgtaatactaaaatttgcatttattattaatgcgttcttttgtgcattcagttgaaggaagttcccagaatggtagaaagcaggggacagatganacggcgacagctaagaatagtgaatcttatatcangaagagattgttagaaagtttggttgcagttgcagggctttctaattggctntcatgagcttaactcaaatactacctatatattaccattttcatatcacgttgaaatgtaaaccattgattagttgatagtgtaaaaatatctacactcgagtgtattaaatctctgacagactcacaatagatatta

SEQ ID NO: 30050 - DNA, 177 bp, Glycine max
agctgaaacatacagttctacgattttattatgggcctcagcttatatgctgcataccgaaacccataattttcgggggagagtgctgcatcgcttggctggtataacggaagtctgatccgtcagaagacaaccgccatcactgtgctttggaaaagcacaccttcttcctttttc

SEQ ID NO: 30051 - DNA, 367 bp, Glycine max
agcttgtttgcagacatagcctttttggtgtttatgccaccaccggagacatcatcggcagcggcagcggtagcggagagcaccatatccgggtggatggagccatccatggagaggctgtgttggtgtccaaccctagtaggcctttcattattattattattattcttattattattattattattattattagcaatgctgttgtgttgaggtggaggaggaagaggaagtggagaggaatcgagttgatcgaattgaaggtagatggaaagcaagtcgttgtcatcggggagatcaacgtcgaatgtgaggtcggctggtaaggttataatctccgaatgggcgcgcctgtgccctctgttct

SEQ ID NO: 30052 - DNA, 389 bp, Glycine max
  unsure (1)..(389): unsure at all n locations
ttaagtatgtatggcaaaactttattactggtgttcaagacatacaagtgagcttgtaacaaatgttctacacttggagtgatcacatgccagccttttgaacctttaccacgcactctatcatcatgccgagactcaggaagaccaacaggtttagtcttctctaagtattctgaacaaaattcaatggcttcttctgtaatgtacctctcaacaatagatgcttctggacgatatagattctntgtgtacccttttaagatcttcatgtatcgctcaatcgggtacatccaccgtagataaataagaccacaacatttgttttctctgaccagatgcacaatcaagtgaatcatgatgtcacagaaagcagggggataatacatcta

SEQ ID NO: 30053 - DNA, 298 bp, Glycine max
  unsure (1)..(298): unsure at all n locations
tattgtttaccacagagtggtacctggagatatgtcgcggnggtcaagagaccttggggacatcaggtgggctgctattgcccaaaaccaagcttgaccaatcccgacccaacctcggcatagtcagtcagtgagaacctgtgatgtacctaagcaggcgagctcctggctgtcaacagataaaaggaacaaagaccacaaagcaaggaggcttgtgtggtggctggctggctgtgaatcttgcgtgatatatgggttatggcctctggtaatcgactactaagggtgggtaatcgat

SEQ ID NO: 30054 - DNA, 439 bp, Glycine max
  unsure (1)..(439): unsure at all n locations
agcttataataacannaatgccttaatcatttccaaatatgcatgtgaattaggacgcatcaacaagaatcaagccaaggctattgtgcaagaaatcaatggggcaaaacacaccaaatgattataatgatggatggctcaaattctcacaaaggtaaaatcatcactttcaaattgagctttcaaaactatcatgacatgtagagaagaatcaaggatttcaagtcacaaaatgtcaagaacttttattttcaaaacaattacccatttcttgaacatatcctataattcaaagaaaaacatgcaaagtcgtacgtgcacacgaaattgacccanaatattaaactgaaaatncgacgaaactaacaacattaataaattaacacaactaacanattaacaaaaccaacataactagcaaaaccaaagaacactcccc

SEQ ID NO: 30055 - DNA, 392 bp, Glycine max
agcttctattacatgagtacttgtgtcatatatatacttatcaaacttattgaaataagttttaacaaatattttatctaataaattctaattaaaataagtttataattcctttaaacttatttaaattcaaggcattagaattagtttgtaagaattataagctatttttacaagttcaagtaataaatcaatggccttctgtatttgaatgaccaattcaattttggaaacatcgggtcaaagtatttattcatatatatatatatatatatatatatatatatatatataaatatatataaactcaataatttttttttattttgtatactccgctctttacaaaataaaaaatgctatttggtgtctatctaattatattcacatat

SEQ ID NO: 30056 - DNA, 415 bp, Glycine max
  unsure (1)..(415): unsure at all n locations
gcttatgcacggaaaatgtaattatgaaatttagatgcccgaagaaacaccatttnctagttaaccatgcattaggtaccatgttcaattattttggtttggtggtgagtgtgttttttttttttttttttagaaatgggtttatgatcccaacatggttggctcatggtgcctaacacatgcaactaagaatgtagtgtgaagtttcacgcttccccttttttgtttttgtagaggaaaacacaaggatgagcaaacatgaaaacaaatggtatgcaattttgcagatcaaaaagtttgttgaacgcatatgcatgatgatgccatgactcatgccaaatgtgaggctggaatatgataacggacaaatgcaagaacgatatgttcattatgatgttatgaagagatgcttatg

SEQ ID NO: 30057 - DNA, 184 bp, Glycine max
atacgaccaatccatgttgctatggctagactcagctgacgaaatgtttctaaattttgatcaaaaatatgtttgcaaggaatatagcctgcatgaaattagttagcaagaacaattctaagtatatatgaaacttgaattagcgtgaccatgaataaataaatcttatccaatttcttcaaca

SEQ ID NO: 30058 - DNA, 401 bp, Glycine max
agcttaattactaacacgtcatcactctctttgcactcactcttccattttcccacaacaccaccaccaccaccaccatgctctcttccatttccccacaaaaaacagcattcacctgattttccctcactttctcggcggccaaacactattctctgccgcgctccagttctcttcgtcacaatcaacggtctttagcgtagatctaggctccgaagtgaaggtggtggtgacgaaccttaatcctcagtgaggaggtcgcatgccttgccgtacactacctgcataaggtctattcccgaatgtgcgacctcatcgccaaaccctacgcctctgcgcaaaggacttttgactcaatgtacttgccattcaatgcaaaggaagattcatgaggcgacgtg

SEQ ID NO: 30059 - DNA, 422 bp, Glycine max
  unsure (1)..(422): unsure at all n locations
actttgatgacattattgggacttatgtatggataatgcacgtcaagatatgtaaaattcacgtcagaaaatgaaatccgggaccataacaaacaagctttgtccttggagacaattctgagctcaaaacttattcatcatcttggttctctccaaaaaatcgatatctcgcatgctcataacatatcacttcaactttaggcaatatacatatactacctggtagctcattaagcctttntcatcccttcagggacaatagttgaagcccaacaaaatttccaattgaaaatggcaatgtgtctatggctgtgttgctaaatatatttctcttattttctccatctttcccaacacttcttngaagctcttcagacacgagcacccctgaagatccccaaattccagagatatcaacatga

SEQ ID NO: 30060 - DNA, 426 bp, Glycine max
tatgctgcaaacatttacaatagaccttctcaacctcagtagcaaaatcaaccacaacagaactattacgacctctccagcaacagatacaaccctggatggaggaatcaccctaatctcagatggtctagccctcagcaacaacaatagaagcctgctccttccttccaaaatgctgctggcccaagcagaccatacattcctccaccaatccaacaacaacaatagccctagaaacagccaacagttgaaggtcctccacaaccttccctcgaagaacttgtgaggcaaatgactatgcagaacacgcagtttaaccaagagaccatagcctccattcagagcttaaccaatcagatgggaacaatggctacacaattgaatcaataacagtcccagaattctgacaagctgccttcccaagct

SEQ ID NO: 30061 - DNA, 400 bp, Glycine max
  unsure (1)..(400): unsure at all n locations
agcttgtataacggctggacatgatatatgtcanggtgttggtttatccagcggttcagggataaaggaatatcccacattatttccatgacacgcgtgcgacaatgatgattcagaaagtttatgcaaaacttgtcatgcatgcacctatgtggacactcaagcatcaagttntgtggtcatgtgacactagggctcaagattcatttttcctatttaagtcaatccagtgtttccaaaacatgctcttttatcaattcatgcattcatgcgagtccattttgggtgttcgggaaaattttcacagcattcacccttcaggtgtatacantatttttcaacaaaacactcttgtgttntgatcagtgaatctttttcaaagaaagagttggagattatt

SEQ ID NO: 30062 - DNA, 316 bp, Glycine max
gtcaacagaggaacccaaaccacaaacccttgcgacaggtacaaaattttgattcaaggccagctgggttaccaagttgatcaacgcatccagtttgccttcaagcttcttaatttcagatgatgcaaatgggtttgtagctacctgtcgcaacctacccttcagcgggaaggcgacgcgtgactcgcgggatgcgtgttccacgaaaggaatactcgcggagtcgccaccaacgtttatttgacgaaaacgtcggaaaaaccggaaagacgcgatctactaacctttaagtgaaaaggttcaggagttgtattta

SEQ ID NO: 30063 - DNA, 332 bp, Glycine max
gatgagtcattgtctcacttgatttgttggtcattgcgctttttttttgttggatctttcacttctgaaagtcctagaaggaaaagcctatatgacctctttgaaagaggtaaatgaaaagaagacaactatgggtttgagggcttgtttttggtgttgtggagtttgtgtaaaggtttatagggttcatgtatggcgttgtgggtgtggtttgtcctattgagccaggtgcttgagaaattgctgttgggtttagtgtaagaaataaatttgttgtggctggaggtgtacggtttactataggaactgcatccaacttggtatcaaattca

SEQ ID NO: 30064 - DNA, 71 bp, Glycine max
aattttatcgaggccaggttgctattgaaataccaagaaaatactcttttcccagttgacattttattttg

SEQ ID NO: 30065 - DNA, 183 bp, Glycine max
  unsure (1)..(183): unsure at all n locations
cttttgattccgctggtaaaaaactaaaacgtctataataatccttattattctctttaaaccaaaccataaagtagaggaaatctaaccattcttattngattagatatcaattagacctaaacctcgcagttatcaacaatatgtatctatttttttgtatgtactatcaatgagaaatac

SEQ ID NO: 30066 - DNA, 445 bp, Glycine max
  unsure (1)..(445): unsure at all n locations
gcttgagccaaaatcccaacttatcataaaccttgacccagggtgagaatgtcaatccttgccctcggaagaaaacaaaaaaagagaaaaggaaaattcccaatcaaagagtgggagaaagtaaaaaaaagaaagtccccgatcaaagatcgaaagaaaacataagaaacatgcagaaaggtctttggaccagacaatatctgaacaatacagaattgtcaccaaataaacaagaaaaaaggaaaccacgacctaaagtggccctctccctttgattgccaaccaaaatcctttgcgctagcgactttctcgccccgcactaaacaaaaacagaaaaggaaaaggcaaaaacactcanagccaaattccccacctaaaaatcattctcaaaaaagtcctattgatccatgatcacgcatgtaatctttgatttgataggaaatga

SEQ ID NO: 30067 - DNA, 414 bp, Glycine max
  unsure (1)..(414): unsure at all n locations
aagcaagaaattaggtgcatatagagttacatacgtcttggaattgatacatacggacatttgtgggtcatttcatacatcttcatggaatggtcatcaatattttatatcattcatagacgattactccaaatatgcatactntatttcttatacatgaaaagtcacaatctttggatgtgttcaaaacatttaaagttgaagttgaaaatcaactcaacaaaagaatcaagagtgttagatctgaccgtggtggtgaatactatggttgatatgatggttcangtgaacaacgtccggngccttttgccaagtacctagaggaatgtggaatcgtcccacagtacaccatgtcagggtcacctagcatgaatgatgtggctaaatgacgaaacaaaactcttaaggatatgg

SEQ ID NO: 30068 - DNA, 416 bp, Glycine max
agcttgagatgaggaagtgttgaagggtgaatcttcctgcttttattgttgaccacagagtggtacctggagatatgtcgcgggggtcaggagaccttggggacgtcaggtggggtgctattgcccaaaaccaagcttgaccaatcccgacccaacccgggcatagtcggtcagtgagaacctgtgatgtacctaagcaggcgagctcctggcagtcaacagataaaaggaaaacaagaccacaaagtaaggaggcttgtggtggctggccagctgtgaattttgtgtaatatgtggatggtggcctctggtaatcgattactaagggtgggtaatcgaatacaaggcttaaaaatgaagacaggaggctaagatggtctctggtaatcgattaccacggggtgtaatcgattacc

SEQ ID NO: 30069 - DNA, 367 bp, Glycine max
  unsure (1)..(367): unsure at all n locations
gctttntacaaacgctggccgataatatttctttaccgtaaaggaagtattgttgtcggcgtcgcctataaaatcttcaatgtaagtcggctatgttttttcgtgtgaactcaactgaagttctgtttccgccaacatcgacatgttttcaattgcttggaagggaaaacgttggccaactcgggaaaaaaattttgattctctgatactaatccaacaaaatgttaaccaacgtcggccacgaaagatgactgatcgaggtttaaacaagaagcatcacctggtgacgccgatcaaacatttcctaatagacatcatccaaataatattcagggatattatagaaattaccatttgatgagaatca

SEQ ID NO: 30070 - DNA, 330 bp, Glycine max
  unsure (1)..(330): unsure at all n locations
ctatataacagctctcaggttttagtttagagaggtttttcaaggggaggagaataattttacggttttggaaattccaatatttattactgttcatgcacactgttcacgtataataaaattaattttctgcaatttcgtttctgcttctatctacaatttcattttctgctgattaatggaaggctaantctccagcgttgttttctcttgagaatcaagcacaattttctttgagggtttgctattactattgaatactgaacagtttttcctcttcaccaatttctctgtatttgttgctattagaacatgcatgcttaatgcttg

SEQ ID NO: 30071 - DNA, 410 bp, Glycine max
agcttacttggaaatcattaggtggaacctcttaagttgtgtgagcactatgtctataggaagaaccatcagatgaaactcccaacagttgtgcacactataaaagccatattgggctatgtccattctgattactaggggccttcgagagttccatcactaggcagagcaaggcacttcttctccagcaacgatggttactccaggatgacatgtgtatttacgataaaacaaaaatctgaagctttcaaatgttttaagcattggacgattgttatgaagaatcaaacaggaatgacaatgaagtttcttaggatggacaatggcttggaattttgttctacaaaaatcaatgagttatgtaaagatgaaggcatggcaagataatgtatcgtatactatactccaca

SEQ ID NO: 30072 - DNA, 339 bp, Glycine max
cacatcgttcgcgtgtttgatatccactccacaaggtttgaagtagaggaaaccttctatcctataacgcaacgtggcggacaaaagtgggcagttaacttgaatgacctctattgtccatgcggaaggtattctgcgctatactatccatgttcacacattattgcaacttgtggttacgtgagcatgaactactaccaatatatagatgttgtttacacgaatgagcacatcttagaagcatactccgcacagtggtggcctcttgggaatgaagcggcaactcctccttctgatgaggcatggacactaatccctgacccaactacaattcgtgcg

SEQ ID NO: 30073 - DNA, 342 bp, Glycine max
gtgatggagcagacacacgtgttgttattagcattgagtgttggtggtgggctgggtgtgggacttggattgaccacaagacaagctggataaaaatgggttgtccggagttgcgagtccgatgagatttctggggagcaaattgtgttggagctcaacaacagattcattgatgggaagaacagcgaagtcacatttgatgactgtccatattacgtaagggaatttatctataggtgcattcattatcattgtttccattttaaaatgaagtgtaacgtatatgcatttcttattaaataattctgaacggtcaaagagttttcgagacttctaccaatt

SEQ ID NO: 30074 - DNA, 375 bp, Glycine max
atgaaagcttatatctaagagacgggagagtagtggtaaggaaatatataatataaaatgcttgtagtttgggggaaaaaaaccaagttggcaaaactgagttatattaataatgttattagtataaatattcttgaactcgctaattttgtcttttttgacacatttcatgagtgtgtgtggatgagaaattttaaattctaatatttcaaatactttaattgaaattattttattttcaaaattttgtatttggataaaaaaaactaaaattgtttgagtgaaagaaaatgaatgctaagagaagagaatatattcttggtgtgcttttaaagagaataatattgatacgtcatgaaaagtacaggggaactg

SEQ ID NO: 30075 - DNA, 311 bp, Glycine max
agcttatagatgaactacatctgtatgactcttacggatgaagttcatccgtatgaagcatacagatgtagtacatccatatgcattggttttcttccagaatatttattaaattttgaaaacattagatgtaataacattattaatatgtttaattcttattacatatttttgaaattgtggataatttatctattacaaattatttatagtgtaagtaaaagattaaattatttaggtacaataattgaatttattttaactagtaaaatgtctaattacgtgttagttatagttttctatgttttttt

SEQ ID NO: 30076 - DNA, 265 bp, Glycine max
  unsure (1)..(265): unsure at all n locations
agctntaacctcatcgtctctcacagtctttattattgggagccaatccagtccttgtgttcggactctcagccacttgtgatagtcgccgatgatcccattactgcttcccctaagctctttgtcctttcttcacgccgcatcccatgccttgcaaactccttggagtaccctcgccgtgtggtcactaaaaccccgcgcgatgaaaggcgtgatgcttttgtctaatggcgctcctctcatggggtagccaagctgtcttatg

SEQ ID NO: 30077 - DNA, 409 bp, Glycine max
  unsure (1)..(409): unsure at all n locations
acttagttaaaatatctgttggctggtcanttataatgatgaactcagtgataatctccttggacaatagtttctctcgaatgaaatgacaatcaatctctatatgtttagtcctctcatggaagactgaatttgaggcaatgtgaagagctgcctgattatcacagtacaacttcatttgcaccacctcacaaaatctcaactcttggagaaagtgtttaatccacataagttcgcatgtaaccatagccatagatcgatattcagcctctgcactggatcgagcaacaacggtttgtttcttgctcttcctatagataacatttcccccaataaaaatacaatatcctgaggtagatctcctgtctatgggacaagcagcccaatctgcatcacaatatccagagac

SEQ ID NO: 30078 - DNA, 424 bp, Glycine max
atatggttggagcattctcgcaaaacaacgtgaacctaactggtctccatatgatgttacctagtgagagtgacctgacttaccagtgtatggtctgtcttgtcatgtactcctaggcactcgatgaggttttttactgacctggtaccacattgcatataggattgagtcttaatatttgttgcataacgcttgtgtattgatcgatattgattggttgagtgctattgttttttatccttgagtacgtgaatgatgtgaaaatgtgagatgtgtagtgttgagatgtgatgtcacacgataagaggtggaatgacgtgaacattgtttaagtaagttgtatttcatttatgttatatgtatatctatgctggtttgcttctctctattaagtaggaatgtgataactcactctctatgtgat

SEQ ID NO: 30079 - DNA, 444 bp, Glycine max
  unsure (1)..(444): unsure at all n locations
gagcttctatggaggctggatctttgagcttcaatgaagtccttcaatggtgattnttttccatggagatgcagcggaagacaaaggagaagaggtgagagccagcaccatccactagggaataagccatggaagaaggagcttccccaccaagaatgtgccttggataagaagcttggagaggatgcttcaatggaggaaaagaaagagaggggggagcgcaaaattgaaggaggaaaagggggagagaagttgaactttgagttgtgtctcacaagattctcattcatcaaagttacaacaagtgttacacatgcttctatttatagactaagtagcttccttgagaaagctttgtgagaaaacttccttgagaagtntctttgagaaaacttccttgagaagctagagcttagctacccacacccctctaataactaagct

SEQ ID NO: 30080 - DNA, 469 bp, Glycine max
  unsure (1)..(469): unsure at all n locations
ctcgacccggatctgtaacctcctgacgctgcagcttacaaggacccgaaatctttaaggagcctcagagtacaatcatgtattgaccccccctcctagctgctccaagtactaagcataatatcgtttgacaatatcaacgttcatgggtgaagtcaactcttcatcatccatgctggcaagcaccagtgctcctcctgagaatgctttctttacgatgaaaggccctttatagttnggagcccactttcccctattgtcctttagggcttgggatactttcttcagaacgaggtccccctagttgaatttgcataggcataccttcttgttgaaagcattcttcacccatctctggtacagatgcccgtggctcatagccgccagacgcttgccttctataagattgagctgattaaagcgtgcttgggctcactctgattcttccaacccggactcttgcagaatc

SEQ ID NO: 30081 - DNA, 455 bp, Glycine max
agcttctccctttatttgctataaatagggggagaagtgaagaagaaaggggttcatcttcttaggcacttctctctctctcaaaattgctgaggaaaattatttccgtgaagaaaatccaagccgaggcgcttccgtaacgtttctgtaacatttccgtgagtaataacgcgaagattttcgaccgttcttcaagaatcatcgttcgttcttcgttttcttcagtattcaacgggtaagtacctcaaaccgagcttttcaattcattctatgtacccgttgtggtccacattttgtttcatgtatttttattctcgttttcatttgctttttatacccccttttgatgtgcttaagccatttatttaagtcatttctcgcttaatctaaaaataaaataaatttccaccgatcgtttgaattgtatcatctggttaatttgggtaaaatgaatt

SEQ ID NO: 30082 - DNA, 317 bp, Glycine max
agcttattttatagaactctatatctaggattacgtatgatcttgtggtaaaccttatttttctcagataaaaacgcgcgaaatgttcctagcttggggaataaatcttgttttcatttatcttaaaattagtgctattaaacctagctctcctcaatcgatttgaaccaattttgagtgagatcaatctggtacataactagttcggttgaattattagaatcgatatgtgtcattaactcaatagtgacatcattaaaccaaccttaaattatggtaacctatgagcaaactggcagttacaaccgtgctgaact

SEQ ID NO: 30083 - DNA, 426 bp, Glycine max
  unsure (1)..(426): unsure at all n locations
agcttgtttaccccatgtttgagttgcttacaatagagttgttcatagcaccactaattattctccttttgaagttatttatggttntaacccactaactcctcttgatcttttgcctatgcataatgtttctgtttttaaggataaagatggtcaagcaaaggcagactatgtgaagaagcttcatgagagagtcaaaaatcaaatttagaggagaaataaaagttatgctaaacaagccaacaaagggagaaagaaggttgtcttctaacctggagattgagtttgggtgcacatgagaaaagaaaggtttccagaacaaaagatatcaaagcttcaaccaaggggagatggaccatntcaagtgcttgaaagaatcaatgacaatgcttacaaagttgagctctccggtgagtataatgttag

SEQ ID NO: 30084 - DNA, 353 bp, Glycine max
  unsure (1)..(353): unsure at all n locations
ctgagagtcaaaatctaacattacttgttagaaagtttaagaagnttctaaacaataccaatcccaaagaagatccttccggcgcaagaaaaaattaagaagaatgacttaacctcccctaactttaagtgtttcaagtgtggcaagccgggccacataaaatctgaatgcttcatctttcaacacttcaagtgactcaagcaatgaagaagacacaaatttctatcttatggtggatggtgaagttgaaagcattgtaaattcttccaaatccaaaactgaacttgatgaanactatgacaagctttttgatggattcaatgagatgcatgaagaggcttagaaattatctc

SEQ ID NO: 30085 - DNA, 392 bp, Glycine max
  unsure (1)..(392): unsure at all n locations
agctntataattacctataaatcctaggcgaattcatgaaataatccaaaaagaaaatcgaacaatatcaacacgcaatagaaagcataaggcataaaattaaagagcaaagtttagagatactaggttaccttctaggagcacttctttaacgtctttagttggacacgtgggtgtagtcaaggctttgccatctcacacttcctaattcttttcttcgatcgngagcaaatccgattgtggacttagcacctgttggcacctgctctaatgccttgacaaagagaatgtttacatgcaaatgtttaaaatgctatgaaattcttgtatcacctttcccatttgaccctaggtttacccaagttggtgtggcaccaaccataaccaaaaat

SEQ ID NO: 30086 - DNA, 428 bp, Glycine max
  unsure (1)..(428): unsure at all n locations
agctntcataagtgaaatcaggtgcaaccatcttcctaagagtcctctcccgaggtggagggtgatccatgttctcagtatgaaaattagtagtcgaatgctcaaaatcagaatgttcagaatcaccagcaacagaatactcaaaatgctcaaaatgcacaaaatgatcaggatgcacactatgcctaagtaatctatgaaaggttctatctatttcaggatcaaagggttgtaaatcacctagattgcccctagtcatgcactatatgcagcaaatcatgtgtttctcanacaagcaccaggggagggtcaaaactacaactatagttaaacaatatccaaatgagctgaaattntgtgagcaacaccctacaatcatgaagaggtagcacanaaattttcagacaaaaattcatagtctaagtatg

SEQ ID NO: 30087 - DNA, 417 bp, Glycine max
  unsure (1)..(417): unsure at all n locations
agctttctcaagctggattctagattgtagcatagctgcattaagaaatagtaataaataagcaacatttagtattgttcccatggttccagtaggcagcctatatatgatattatatcaaattatacctcttcccaagcggaattttctagacggagatatatagttaatatgatacagcctggccttatatagctctctatctctgtgggactgtgggataaccagttaaggatctggtaatcaaagaaaaacataaataaaacaccattcaaaaaacagtgtagtgaaatagtttatagcaatttcaaggcagcaatgaagtacctgtgatcggagagcatggnggaaatcatttggagccttgccaaatagtttgaaaacaattcgatctgtacgactctgtaaacagaaagc

SEQ ID NO: 30088 - DNA, 450 bp, Glycine max
  unsure (1)..(450): unsure at all n locations
gcttcaacgtacttactattcaccacctcgttttattagactaatgtctacgtaaatcttaaaaaatcaaaacgggaagttaaacaattgtttattcttctttaattaaaatcattttcaatgttttaaaattaaaaatgttttttacattgatttcatttagaaatatatttatttaaaaaaatactgaacaaccccttatgaatttaagtgtggataatttttggacatataaaagatgttttcataaattattgatngtggttaattttcaaatacaatatatgtattaaagttgataggtatatatttgttaaatgaaacttatgtatttttcatatatttgtcttccttttaccaaaatctagtttccctcgcattaaaaataattntattcgaacgaaatagaatctttaaggacggtgaaaaactttcttcanacatttaaca

SEQ ID NO: 30089 - DNA, 438 bp, Glycine max
taagtctacctgcggcatgcaagcttctattttaattacgagcgtctcgatatattacgggactcaatcggacatccgagtaaaaagttattgtcgtttgaatttgcttagtgcttctgttttcaatttcgtgcgtctcgatatactacgggacacaatcggacacccgagttaaaagttattgtcgtttgaatttgctcagagcttctattttaaattacgagcgtctcgatatattacgggactcaatcggacaaccgagtaaaaagttattgtcgtttgaatttgcttagagcttctgttttcaatttcctgcgtctcgatatactacgggacacaatcggacacccgagttaaaagttattggtcgttgaatttgctcagagcttctgttttcaattacgagcgtctcgatatattacgggactcaatcggaca

SEQ ID NO: 30090 - DNA, 375 bp, Glycine max
tcatcctcagatccctcatgttggacttgactggaccaagcagcagtatgctgacagcatatgaagaaaactaaaacttaatcctcacatcccgctggttggactaaagatataatcctgcttatatcaagttctgaggcaacggtacattttccaatgctgaagtcacgtagctagacatacagaggggtgggtagaccaagagcatgcataaattaagcattgaacacatgaaacacgagtgattagatattagagtatatacgtcggctggttcttataaattcccaacaagagtggttaggtagccatacagacaaccctatacaaatgagataaaaagtgagaataattgcctcttacacaagaaggggg

SEQ ID NO: 30091 - DNA, 446 bp, Glycine max
  unsure (1)..(446): unsure at all n locations
atcatcattcacatgaattgcataagaattgtaatcattataaatcttaaaccactaaaatatcacaatttaatgtagatcagcgctatatatatatatatatattaaaagtaggctccatttcaaataaatnttatctaaatattgactgtgtgatattaagaaaatcccacatgtaattatcatttttggcttatcccaaaaattaattttataattagttaattatattttttgtgaatttagtttcagtcaaattaagataaccatgacttgagaaatcaatgttctggtatcactattgggttcaactctcccataaataaaattactcacatccacaaaggatcgtgagaacacacaaagattataccttagaaaanataataacaaacacaagaattgaacatggttcgatatctcttgtctacattcacagaatcgtc

SEQ ID NO: 30092 - DNA, 402 bp, Glycine max
tcaaccttgttgggatgggtggtgctgcttgttttacagctattgatcttgcgagagaccttctggatgcttatccaagaacttatgcacttggagtgagcacagaagcatgtagctcaacatggtacagtggccatgataatggcatgctgcttcccaatggcttgttcagaatgggagctgcaaccatcatgctctgaaactttcacctatatagatggtgcgccaagtatgaactcaaacacgcatttctcgatcgaatttgactcctctaaagtgaaatgagaaagcaattatatgtggactgtacttcctactccaatttaaaggaaaaaaacttatcagcagttctttgtgttggtattctctaattagaagaggagtgttatcttactaatctat

SEQ ID NO: 30093 - DNA, 412 bp, Glycine max
  unsure (1)..(412): unsure at all n locations
tcatacctcacaaatatatatgnatgtgtgtttaggtagcaagataccttggatatgcatgtatatagcaaaaatacctcacaaaaatatacatgtttaggttgcaaaatacctaatataaaacaaaaaccaacaagaaaaataatatatctttcggctgaaaagccaacacattgttgaaaagaaataacttctagcttttttttaaaaaaagattcaccgatcaaaacaaagggtttttttttgaaaaaaatgtgtatacacctgaagggtgaatgctgtgaatattntcccaacacccaaaatggactcgaatgaatgcatgaattgataaaagaacatgtnttgcaaacactggttttaactaatcgggaaaattaatcttgagccctagtgtcatgtgaccataaaa

SEQ ID NO: 30094 - DNA, 377 bp, Glycine max
cactcattttaaatcattcatgctgtccctatacatataaaacagtcccacaacccaaagctcacaaaaccatgctcatatctcattgaggcatttcaccgagcacttggtgggcgcatgtttaggcacgaatatcaagagaatggggacaatgtggcatgcgccatcacttcaaaatacaccctaggccaaggccatcccttacaacccctcaatttaacaaaaacaagcaacaatttgaggataaatccctcacgtttcttagcaaacacatgcaatttaaagcaccaaaatacattaatggaaagctagaagcccaagatgatgacttacttgttgagacgaatatagtgcaaacggaatcaaaacgcaaaaat

SEQ ID NO: 30095 - DNA, 472 bp, Glycine max
  unsure (1)..(472): unsure at all n locations
attgagcattgaaaccgngattgaatccttgagccccggtacttatatcaccgcaggcgcagctatttctcctgttgacctgctcataggctacctgggattgacccaaattgactcataatgtggagcgagttaacccattgtctggttgagttgggatcaaacctgccaaatatcatatggacccttctttcccaagaagagcttacgttccacaacacccaagattccccttgaatttaaattccgataccatcatattcaggcaaccgctttgggtctagcactaccagccccttagtggtggctatctgaaaaaggctgctgcaggcatacaagttagcccgcatgctcaaattggaatatctttatagacctccaccttacaataacctgcagtggggttgcttcgataacgtcaccacataatttgcacctgggattcgtatggaacctccccaccatggtagag

SEQ ID NO: 30096 - DNA, 394 bp, Glycine max
  unsure (1)..(394): unsure at all n locations
gtcttagcataactgctgcatatgcttgcttattatttattatgaaattgatgtgttattatgtcttgatcggagtgtgtgattcatgtgtaatgtgattgatgattaaaaagtgaattttaaatgaccgagtggtgaaattacgtgagttatgcttaagcaagcccgatctcatttatatgacatgtattatctaggtgccttgtttctctattagctaggaatgtgataactcactccctgtgtgttgtttgcgtttgaatcctatgatgatcttgaactctgtgttcgggggagcagatgactaggtgaattgctttaatgaaccttatgctgaaggacgtccggacacaatgctctgatangatgtgacatcggagtataagtctctata

SEQ ID NO: 30097 - DNA, 442 bp, Glycine max
  unsure (1)..(442): unsure at all n locations
agctntctcccaagtcctaaatgacatttcttgctagtattaactcactttaacctccattcaccacagaattcagacttagccttccaactctcaaagcctcactctttttccactcataacatcacattctcactttctaaccctaggttaactctacctttcatctctaacagttttccaaaagtaatttcagcatataaacatcacaaacatcatcacaaaaaccctaaaacagaatgggtatgtctaactcatccaacatggcaatttcaacaagctttcagcaaatgtcttcacaaataatcatcacacagcagaaacctagcaagactacccgtcatatctccccaaaccccatacccacgannaataaaggagaaagaagttcacccaacacctgaaattcgaagtcccacttgtagccacgcacttcacgact

SEQ ID NO: 30098 - DNA, 378 bp, Glycine max
  unsure (1)..(378): unsure at all n locations
acacaactatatattaattgagtcattggttcttacttttcaacttttttatgaaaaaacatcatattactctgcttgtattntaaaaataatgaatgataataaggtatcccaaaaatataaacaatataattatctaaatatttagatacctcatttaacctatgttaatattaaaggaggaaaataactttttttttatagtttgaaacatcttcctaatttattgagtgaacaaaaatgataatagcagaaacaattaaaaatatcctttttttaataatccaaataaagggttaaagtgcaagtaaagagattttacacaaaaagtaaaaaaaatatttacccaaataatatattaaaaaaaatacaattttt

SEQ ID NO: 30099 - DNA, 420 bp, Glycine max
agcttgaaaccaagagacttatttatgatgagagcaatagaaagaagaactaatggcttcatgctaggagagacttattaatatacttagccaactgtcaattaagcatgttacctaggcttcatttagaacaacaaagaataagaaaaaacctggcaccatcttgccttgagacttttatttcttggtgtgtttccaaacatgaaagccaccccaccttttgcaggcaattcgccttaaatcaccaaatgggtcatcgccatctgcatcagactgtgcaaatcctgaaggaaagaatccaggcctaccattctgacaaatcagttgcattcacagccagttagaaaagaaaataatatatatatatatatatattcatgaccacagtagagacacttcactaatctattatgattcatg

SEQ ID NO: 30100 - DNA, 252 bp, Glycine max
  unsure (1)..(252): unsure at all n locations
gacttgaaatggtattagccttttcatttaagttaaatctgcacttgtgattgctttcttgatgattgttgaggaaaaaacattcaaccgtgtatgtgaatcttctaagtttgttggttcattctccaactatttggaggttttgttagctacatttcatcatgtcatcaaggagttgatttggattctatttacaggatattgggaggtgttnngtgtatagcaacaaatactggtggtgcatggagtcgt

SEQ ID NO: 30101 - DNA, 377 bp, Glycine max
  unsure (1)..(377): unsure at all n locations
atggagatgcagcggaagacaaaggagaagaggtgagagcaagcaccatccactagggaataagccatggaaagaagagcttccccaccaagaatgtgccttggataagaaagctggagaggatgcttcaatggaggaaaagaaagagaggggggagcgcataattgaaggaggaaaagggggagagaagttgaactttgagttgtgtctcacaagattctcattcatcaaagttacaacaagtgttacacatgcttctatttatagactangtagcttccttgagaagctntgttgagaaaacttccttgagaagtttctttgagaaaacttccttgagaagctagagcttagctacccacacccctctaataact

SEQ ID NO: 30102 - DNA, 401 bp, Glycine max
  unsure (1)..(401): unsure at all n locations
agcttattccattatcgatattaacatcaatctgatcatcaacgtcatccatatcaccgtcactcagatcaatttttatttaaatgatttaaatctatttgtaaaggcattaacgaataatgagttattttattttaaaatcgtctaacttggttaagttattttttagtataattcgtctacttagttgacaaaagctgtnntttttttttttttgcgtaaaaatacctaataattaaatcttaaaaacaatgatgataaactacctcctaaaagtcacgaaacacttttcccataaacacacatgcaaataaacattggtgtccatgagtctcgatgctacatgaattgcagctcttgggctagcaccaagtttgcggggatcctaacagatcatagag

SEQ ID NO: 30103 - DNA, 441 bp, Glycine max
  unsure (1)..(441): unsure at all n locations
taagttttatgcaaacaactatgcttgacattgttcatttctaatttgtaaattgggttttatatttgtttttcatattggtgttttcaggattcctagtgaggatgaagagtctcaactcttaaaaggcagaaaaaagtgcagtggaagcttttgaggcagcccangctatgggtgttattatgtttgacttgccaaattgcccttaaaacattgtcaactagagacatcctctgttaatggagaaggatcatctacccatactgttactgcatcttttgaaactgccctgaggtgggcagagaagtagttgttgcagtcaaaactgcatttataaggcttgcaaattgtccttcttttagtaatggtgaattcaacgatctactaagaaaanttggaattggatgacagtgctaaaaaattntaaaatgtctacatgta

SEQ ID NO: 30104 - DNA, 441 bp, Glycine max
  unsure (1)..(441): unsure at all n locations
tgcaagcttgacacaacactctgagcataaaagtgtgttttctttnttagaatgtatataggtgtatggcaattagaatatattagatgttcttgtatgttgacatgggtaataggatactttctacacatgcgcgtgtgcataaatggattacatgagtttggtctaaatcagaggggctagcacgacattnttgcgttaatataagcattatcttgtaaaactaacttctaaatgtttgttctcgcaggaaatggccccgaggaaacttgcctcatagagatccaggaaggataaagcggccgaaggaactagttctgctcccgagtatgatagtcaccgctttaggagcgctgaacaccagcagcgcttcaaggccatcaagggatggtcatttctccgggagcgacgcgtccagctcacggacgacgagtataccga

SEQ ID NO: 30105 - DNA, 427 bp, Glycine max
  unsure (1)..(427): unsure at all n locations
agcttgctctacataataaccaaatatcttttatattgtatagnctctgataaatgaatgaaactcttttattttagttttttctcctactttcgcagcagaagacatgcttcataggttaagcagatgctgcttttgcatcgttactccacgcccttggcttttcatgggcttgggcaaccctagcgacaagtttaaaggaaccaaacacaatgtacctttctttctttatacttttatttctgcttcttcttattcaacatatgttagcgtcttgttgttcatttcagttaccgctttgtttggtaggagttagtttcggtggttacaggctntagttatcaaccatcaaattgcataaaaagtggtttgtagtgtatagggggcatagttggtgtgtgaattagcaattctgtgatgaaatatg

SEQ ID NO: 30106 - DNA, 400 bp, Glycine max
agcttgaataccacgtaaagcacaatcaacttccacaacaaaatgaaaccccacattacaattcttattgatacttttatatggttagccaagtggacaaaatgacccaataatttgataagaaccttcggacattgccaccgcactgattaaaaacttaataagaagagcaacaaactaaggtagagctcataccttgttaactggcagcgtagaaagctttgagctttgagcacccatgactgttccaagagcagtgtagggttttctttgacccacagttccaacagcaatgtagggttttcttcgacttttctttgataggaggttctgtgggttccagtgagcggtttccgacagtattgaaatgaatgtggggcaatgtgggtgtcaaccgagc

SEQ ID NO: 30107 - DNA, 411 bp, Glycine max
  unsure (1)..(411): unsure at all n locations
agcttctataatgagattaactngatgttctatgcttcttgaaggtggttgtccatgaggaatctccttgggaaagacatctttaaattcctgcaataagggttgaacactangaaaaacataaatggttaactgattaaaattatcactctctctctcttgtgtatcactcttctttttcatattcctctgtggcgcctcactattttctttctcttgctctctcttttctctcattctgatttggttatcacacacttctctaggggatagaagtttaatagtaaacgaggaagatttggctattcgtttgtagggctcttctttgttacggttcaacaaacgttgcatttgtgtagtccacgcgtccacaaataagcgctgagattcgtccacgtgatgatatacacc

SEQ ID NO: 30108 - DNA, 142 bp, Glycine max
ctgcagcttgacgttggataataattcttattggtttagttttttaaaaagtggctctaattctttatactttctcttttatctttaatatattatcaattttttaatatttaaaatagatataattatttttctgtgattt

SEQ ID NO: 30109 - DNA, 378 bp, Glycine max
gcttattaacgtattggatcaaaagaatgtttcatataaaactaataaaaggccttcttcacagctgaattttaattggtatgagttatttatatcaacctaatcccattctcttaatttgattcctctgaattcaaggttatttttatgctctcacaattcaaggtagcatcttcacaagcttcttgaatctaaagttaacaattttaaggaataattaattttaagtccttgaatttttctaaattttaaatttcagttcctaaataaataatgaacttgtaaaagtcctcaaaaatatatttagttacaacttttagttcctgccgtcattagatgatgaagtggtgtcctgtgacctcggctgtgccctggtgg

SEQ ID NO: 30110 - DNA, 397 bp, Glycine max
gcttagctctagaggggatggaccttttattgtttggagaggatcaataacaatgcctataggttggatctcccagaagagtttggagtcagcaccacttttaacatttctgatttaattccttttgtaggtggagctgatattgaggaggaggaactaacagatttgatgtaaaatccttttcaggggaaggggataatgcaatgctccctaggaaaggaccagtcactagagccatgagcaagaggctccaagaggattgggctagagctgctgaagaaggccctagggttgtcatgaacctcagggtagatttctgagcccatgggccaagtttgggtccaattctctttgtacatattagactaggatgtcattatatttgatcattgtattt

SEQ ID NO: 30111 - DNA, 252 bp, Glycine max
  unsure (1)..(252): unsure at all n locations
atgagaaaatagacaattgatagaaactgctcgaacattattactacatgcaaacagtcctcttcattcatcattgcggtgatgcagttttaactgtctgttatctaataaacttaatgccttcttcatctcttgataataaagttctgtattccatttttcccctgaagaaccattctttcataatgtctctctaacaacatctccctttcttctaatcgttctttcatanggtgaaattttttgacattt

SEQ ID NO: 30112 - DNA, 654 bp, Glycine max
  unsure (1)..(654): unsure at all n locations
cccccaccaaccgcgaaatctcgcaacatcactcgcgtctttacaacctatcttctacgtacataccagtanaacggannanttttgaagcccttgnagaaccgcggantttgtagacactacctgcacgcatgcaagcttctagtaccttgtggatcttcttccctcttacttcttgaacgtgcaccctgtttggtttaacgttgaactctcacacggtaactatcactcagcagttctgggttcactacaatcggtatctagtgtatactcaatgcactcaattgtgctttcttggcttgtgatcaatgctctgtcccttcattccatggtgtgtcaagctcaatcaaaatatgctacaatcccctaactatacaaactactnntgaatccgtctcttgggatttaaagagnattgtgatgactccttgtgaagaattgtacgccaaccaaaagatcattgagctcatctcttgtcaatccaatcttcttcccttgggggatcaagaatatgtctataacatgttgaaccaaaaactctcatatgcttcacaaatggtgttctccctgaccatacagctctttggtacttgattattaaagttgttgggtggcgcacctatccacaacataatgttgntgtgacaactgccg

SEQ ID NO: 30113 - DNA, 412 bp, Glycine max
attcaatggttctcttgagataatatcattttctcttcgagttcttgacttgaatacttttctcttcttttttttctctcatcttttttctccgtggtctaaaatgttgaaatgagtggccatgtgtagctattgaaggaacatatcttcattgggatcaacacattcaatatttgatagttatcagtctttatggcataatgataagtgaaggtgtgaatatttctaaataagacatgctctgtatgattccgataacagatcattcttgaataaattctttctaaatctgtctcaatcatgctagattcaaacgttagtttaaatcaagtaataaagaagaatctaaaacaaacaaattatagtatgaacgaatccactcgtaatcggactacacttataaaagatagaa

SEQ ID NO: 30114 - DNA, 385 bp, Glycine max
  unsure (1)..(385): unsure at all n locations
agcttgccaccacggagttntccgactatgctcttgtgtggtggaacaagctacaaaaggagagagcaagaaatgaagagccaatggttgatacatggacggagatgaaaaagatcatgaggaagcggtatgtgccggctagttactcaagggacttgaaattcaagctccaaaaactaacccaaggcaacaagggggttgaggagtatttcaaggaaatggatgtgctcatgattcaagcaaatattgaagaagatgaggaggtaactatggctcgatttcttaatggtttgactaatgatatccgtgatattgttgagctgcaggagtttgttgaaatggatgatttgcttcacaaagcaatccaagtggagcaacaattaaa

SEQ ID NO: 30115 - DNA, 332 bp, Glycine max
  unsure (1)..(332): unsure at all n locations
agctntcaaacctgtccaatcttcccaattctgctcttcactcatcatctccccctgacgagaggagtgggaagattggaaagtaaagaaattctctgattcaataaaggtgacattcatggttgtataaagacgccttgtgactggatcgtaacagcaatattctttcttatgagctccatgaccaaggagaacacaacgaacaacacatagatctaactccattcggtgattnttgggaatgtgaacatatgtaacacaacacaactttctttgaggaagcatgaaacatatggtatgtacatgttttgctaaacttgaagggagtctat

SEQ ID NO: 30116 - DNA, 287 bp, Glycine max
aatacaagattatttcaaccaacaaagtcttgattcaagatttcttcatgatcaagccttgccgcaaaatgaaaagaattcaagtcatccaaagcacatgtaatcgattaccaatacatgtaatcgattaccaaagaggattttcaaggaatatcgccaacagtcacatcttatcattcggattttaatggccatcaaaggcctatatatatgtgtgacttgggacgaaattacagagagtttgcttggcaaaatgtttatcctctctcaaagaaatgaagagattc

SEQ ID NO: 30117 - DNA, 374 bp, Glycine max
cgatagagcacaacaagtttttcacatcctctaatcgcgcataagcccaccatcctctgttgcccaccttcaactgagctcacgtactcctacgtagctcatattctgattctttcaacatcgggtacccatcaatcctcccaagctttcccaacatccaggtaattcaacattcaaacagcccaaactatcacagccaagaaaatagggcaaaagcagaaaactctgcctaaaacaccaaccaaaatcacagtttttctcacttaaagaacccaattacaatttcttctttccaattcgttgaccggtggatcgactcgaaattttactgaaggctctagtacatagcctacatttgaccgtgagatctacta

SEQ ID NO: 30118 - DNA, 413 bp, Glycine max
  unsure (1)..(413): unsure at all n locations
gcttaacctcatcgtctctcacagtctttagatttgggagccaatccaatccttgtgttcggactctcagccacttatgatagccgccgatgatcccattactgcttcccctaagctctctgtcctttcttcatgccgcatcccatgccttgcgaactccttggagtaccctcgcgtttgtggtcactgaaacctcgtgcgatgaaaggcgtgatgctttcgtctgatggcactcctctcatgggacatccttcgcatgaagatagaatcctgattcttccttccttctagcgagggaaccatntaacagacgcccctccatgctagccaagagttggtgcacaacaaacaattcttgcgccgctcgtttcacatccccggtcgaacgtgtcatacatggccaaaatggcgac

SEQ ID NO: 30119 - DNA, 395 bp, Glycine max
agtctcatgattgtctctgtgctcatgcaacaattgttagctgtggctatacgagacatcttgccaaacaaagtcaggttagcgataactcgcctgtgctttttcttccatgctatatgtagcaaagtcattgatccagtcatgtttgatgacttggaaaatgaggccgcaattatactgtgccagttggagatgtattttccccctgctttctttgacatcatgattcacttgattgtgcatctagtcagagaaatcaaatgttgtggtcctgtttatctacggtggatgtacccggttgagcgatacatgaagatcttaaaagggtatacaaagaatctatatcgtccagaagcatctattgttgagaggtacattgcagaagaagccattga

SEQ ID NO: 30120 - DNA, 256 bp, Glycine max
  unsure (1)..(256): unsure at all n locations
ttcccaagtaaaatattagaatgtctaaagttgatataacggtcatatattatgtcatggattatacataacactcaatatntattatttatcagataatataaacactacccatagatcttaatttaccgcggtaagatcaaaattataaaatatttgatatactttatatatattaaagaaaaatcaatttgcataccaaactctcgcaataattaaacttattagggaacttatttttacagaactttctata

SEQ ID NO: 30121 - DNA, 277 bp, Glycine max
ctttacctcaattttttaccccagcgctaggatgcagtttgttttcctgttgcaagacaaattgtacacaacacatgtcttgaacatctttttctgtggtctgtacttgcattatatggatggcataggccatcttcaatactgccatggtactctatcccatctgcggatatcaagcgaaaccactgccccttaactgcttcaaattactttcattggtcttataaatatcctgtcaccaacaatggggttttactcttaacatcctgttgatgga

SEQ ID NO: 30122 - DNA, 393 bp, Glycine max
  unsure (1)..(393): unsure at all n locations
ctgcagcttggatgaggaagtgtagaaggtgannacttctgcttttattcgttgaccacagagtggtaccctggagatatgttgcgggggtcaaggatacctttggggacatcaggtggggtgctatctgccaaaaccaagcttgaccaattccgacccaacccaggcatagtctgtcagtgagaacctgtgatgtacctaaacaggcgagctcctggcagtcaacagtatataggaacaaagaccacaaagcaaggaggcttatggtggctggccagctatgaactttgattgatatgtgggttatggcctctggtaatcgatcaccaagggggggttatcgatacaatgcttagaatgaagacaganggctagatggtctctgtaatcgat

SEQ ID NO: 30123 - DNA, 452 bp, Glycine max
  unsure (1)..(452): unsure at all n locations
agctttnttttgtccacccacacgtgaatacaaattacttgaattagtacctatgcaaacactaactattatttttaagacattgattaataaattaaaagaaaaaaaatatatttttttgaaatgcataaaattgaattttttatgattttttttacgttttcatatgatttttataataaatatcttttccttttaattccttagtcaatatcctaagatgcaagacccataaaacattttcttcattccattataattatcatgtaaaagaaatagaattatcttaaaataattgttattttaattntttaatataaaattaattacttttttctacttatattttttatattattaatagtgannaaataacattataaataaattaataataatataagattaatnttataatatcactattaattttattaatattaatatgctat

SEQ ID NO: 30124 - DNA, 335 bp, Glycine max
  unsure (1)..(335): unsure at all n locations
gcctacctcgacatgaagacatgggttccattcttgtttcctctntatgagtatgtatagtgtttattagctcagaatttaggtagtttatcattatagacttatttaagcttatatgcatgtnttgagaagatttgaagtgctctgatgttgtatatgatcatgttatgttggagtgtcatanggcacatggtatgttgtgtatatttatcaattttgatggtttatctggatatatggcccttttagccgttggtcccttaaaatgcagaaagtttgcaagcattttcataatggaaataatagaagaggtttaaagagattaaaataatgtc

SEQ ID NO: 30125 - DNA, 83 bp, Glycine max
gagcatgctgcttctgagaggtggatgatccactaaacatacttgcattttgatggccctgttggctctgctgctgtgactga

SEQ ID NO: 30126 - DNA, 482 bp, Glycine max
  unsure (1)..(482): unsure at all n locations
ttctgtntggagccttataaagatatctcanactataaggggtngatataataataccaacatcaagtagtgtcaatatattctttttggcgttgttataatgtgtttgtcagttctaactggtagcagtaacctaaggagatgaaatatgcagggatagatatacattaaagtgacaatgaacttgttacgagggagaagtgaaatttgagagggggaacaagcaagatcaaatgcttaaaataaattctctttaacccncggatattcctcanatggaagttaaggagtaatcctttgaggtactagaattcatttaagataatcaaacctccattatgtgctagaggaacaaggttatttatcaattatgtcaaaccaagttacttttttatctttctttatgcaactaaaaaataaacagacaaattcaataaatgatatatatntntagctatctgatatgttgaanatcacgagtc

SEQ ID NO: 30127 - DNA, 455 bp, Glycine max
  unsure (1)..(455): unsure at all n locations
agcttctancatataggtcttcttcaatcctgtatctattgtctttaaacatacatatttcctttcttaagcttgcgtctaaagaatgtggtcgttagagcattaaatgcatatacttcttcattctaagaaaccactcttttttgttgccatgttgaacactacagtaggaaaccacttcctttttctttagagtcggtctgtgcaacaaagctcttttttttatggcgattaaggaatttcagagcttgaattcatttattcttcataggattcatcaaatcctaggagaatgtctctgcaaaatagatcccacacacagagtattaaacgaagtcttanatgtcatctntaatattggatcagatcatgattctatcttgctattgtctgagacattagatatagacttcgtgaaatatgtttngatagcgcataagatgcaacttaacatt

SEQ ID NO: 30128 - DNA, 369 bp, Glycine max
  unsure (1)..(369): unsure at all n locations
gcaagcttctcaaggaagctacctagtctataaatagaagcatgtgntaacacttgtgtaactntgatgaatgagagtcttatgagacacacttcaaagttccacttctctccctcttttattcctttaagttcgcgctccccccttctctctttcttttcctccattaaagcatcctctttaagcttcttatccaaggcacgttcttggtggagaagcttcttcttccatggcttattccctagtggatggtgcctcccctctcctcttctcctttgccttccgctgcatctccatggtggaaaatcatcattgaagctcagagatctagcctncatagaagctncacaagcaagcttgcatcaacat

SEQ ID NO: 30129 - DNA, 476 bp, Glycine max
  unsure (1)..(476): unsure at all n locations
ggagatgatgaagcattgtaangcacctttgaacattgcatacgaccttgnaatctcagctatatgtgtnnataaacttgttgtagctctccnggttgagtattcatgagctctagaatcgatttagatcatctcaaattgggccattcttttttggatatgcagattgaaaatatatggtctctcccaccattctggggttcagttcatgacttttccggccactgaagccaaccattccttttactaactacccaattaatacaggcgataaaggcaaagagggatggtggtaagcctaacatgttatcaacttgtgctgcacttacctagttcagttttttgagttacaaggtttgctgatcattactttgagaaaatatttgttgtattttcctatatatgtaattttttgaaagattatgtatcgtatgatttgattagactgtttattctatcttcttaattcacactgc

SEQ ID NO: 30130 - DNA, 410 bp, Glycine max
agcttatatatcaaagatctgataaattataagttgtttgttactcaaactcggatttgctggttgcgttgactctcgcatgtcaacatctggatacatcttcatgatggctatcacaacaatatcttggagaagtgcaaaacaatcattagttgctacttaccatggaggctgagtttatttcattatttgaagcgacatcacaagggatttggttaaaaaagttcatggtcgatctacaagtgattgattatgttcctagaccattaaagatatattgtgataattcagctgcttgtcttttgactaataaaaataacagtggaagttgaagcacacacgtcgacatttagtatttagtcttgaaggaacatgtctaagcaaattatttcatcatttgaaacatcagt

SEQ ID NO: 30131 - DNA, 84 bp, Glycine max
ttttggagggctgatttctcagggcacctggcccctttttacactacaacctataaaacttttatctccaaaagtccatctcta

SEQ ID NO: 30132 - DNA, 351 bp, Glycine max
  unsure (1)..(351): unsure at all n locations
acaacaagcatgataccttttgatttgattgttcacccaacttgatattgtacaggtttcccttcctcttagtagaagagagttaagaaacatatctttgttgtggacgatgcactcattcttgtcaaaggaaagataatatccactatcacactgtcataccctaatttcatctagagactatcgtttggtgatcttttgatcctccgtagttgacttatggtgtgagacgccagttatagtgagaaataaatgatcattcaatgttttgatcaagaatacgaanataccaaaggggaggggcacananggtcattcaggcatttttctgaaccctggctcgcccatgct

SEQ ID NO: 30133 - DNA, 128 bp, Glycine max
cactactttgatagatacttccaaactgttagtctacattatggtatttgtagaattgtaataatctgtttactgttaagtatctctgaatacttcatgaataatgagaatctgtcattcaggtaatg

SEQ ID NO: 30134 - DNA, 349 bp, Glycine max
  unsure (1)..(349): unsure at all n locations
ctctttctttgtgtatagtcaaaacttctaatgctcttaatctcttctcatctaaatcaaacaactcatctgacatcattntcccataatgggcgaatggaatgtccatttgtttttgtacccctgcctgatngcatatgtatctcgaccggaagtacagcatcatgcccataagtcaatcgaaatggggtagtattaagtcgattcttaagagaatttctacatgcccatagaacttgatctaacgttntattccaatttcttggtttttgggcaatgtgttttttaatcaaattaattacaattntattggctgcttcgacctgaccatttgcttgcgcgtaatatg

SEQ ID NO: 30135 - DNA, 375 bp, Glycine max
  unsure (1)..(375): unsure at all n locations
tctttctattcgatcccacggatattaatggttctgggtttcaaaacccattggatctcagtgtcctttttgggccatttgtgctacggtccgctttattgctaatctttttggaagttactatttccactctccttattactaatacactcttctttgtaattnttttccccaaagtaccatgtgtttcagaaactaatacactccccttttacaaaatggtgattntgtacataggagttagcttaagggagaggactgctggaaaccattatgccttcaaaccttcatagacgaagcatgggaacatgaattgatcatgtgntttatttaaaataatacactcccccttatttaaataaaaccctttattaa

SEQ ID NO: 30136 - DNA, 300 bp, Glycine max
  unsure (1)..(300): unsure at all n locations
tgtccttgttatgtgatacagtaaaatnncctatactacaagacattgaaatttggtaacttcccattaatatntttttcagaacatatccaaaataacaagggcgtagcttttatctcccgtatcaaaattcttcatatagaaactgaacttacaacctacaggttgtgtttgattctagagaccaaaataaattatcatttatgaatgagaagaaatacatgatacaaacattgatcattttagtcaattccaagacgacatactggatttttctctataaacccaagatccacctgc

SEQ ID NO: 30137 - DNA, 480 bp, Glycine max
  unsure (1)..(480): unsure at all n locations
atcctctgagtcacctgcggcatgaagcttctaaggaagttttctcaagaaagcttctcaatgaagctacctagtctataaatagaagcatgtgtaacacttgttgtaaccttgatgaatgagagtcttgtgagacatacttcaaagntccacttctctccctcttatattccttcaatttcgtgctcccccctctctctttctctccctctttcttttcctccattgaagcatccttccaagcttcttatccaaggctcatcttggtggtgaagctccttcttccatggcttattccctagtggatggcgcctcctctcacctcttctcctttgtcttccgctgcatctccatgggtggaaatcaccattanaggaccctcactgagctcanagatccagcctccatagaagccccacatgcaagccttcatcacctatggaggctagccatctcttactctgatgggcatggagtatg

SEQ ID NO: 30138 - DNA, 323 bp, Glycine max
  unsure (1)..(323): unsure at all n locations
gcttatactntataatcattcctgctagaacaattgtttcactagtcaactgagtccagtgaaccttgggttagagagagaaacagagaatagactgagaaaaatgtttaaaactganatgatgcatttgatcattaatttttgtgggctcatagtcctgtatagtgaaacttagcttgcacttcaataacccagcctatcactttgaaatatagcctaactgaatactatgctgagtctgacgcagcttactacacgttagtgacagccatataactgcaggacnnatagatacagttactctggtactagcaaatatgata

SEQ ID NO: 30139 - DNA, 427 bp, Glycine max
  unsure (1)..(427): unsure at all n locations
agctgccacccagctcgcccaggcgagcttttctagttcatgcgagcacggttgctttctccacacgcaacagccttctggaggaatcttctggaggccccaagtgggcctggttgctatntgcacccgcatttttactaagtacaccccccttttctatttttttgtaactctttttccgtaacgatacgaaactttacgaacttcgtaacgatacttattttttcttccgcaagggtatgaacccttacgacttatgtatttactcttttttagctgtcgaagaagtacggaaacttacggattgcgcaaaaacacctctttatgacttccgccacattacggaatttcacggatcgcacaagcctgcttncttttgatttctgagacgtctcggaacttcatctattgcatgtcatcaagtaat

SEQ ID NO: 30140 - DNA, 350 bp, Glycine max
  unsure (1)..(350): unsure at all n locations
agctntatgtgaataccttattcacacacgttggttttttctataatgtttaataagggtaagcaccttgatgacatggatcactaagactctagaagaaaaagaatagctgaataagggagatgttgacgtgacttcaataatactcacataggagcttcattccagaattcagcaagaaaaaccttcatgaattgaaaagaaaaatatactgagaatganctcatatggtatgggaatataatgangaagtgacgaagccaataaatgattaagtgagagagatgaaatgatagaccaacatgtaacctagatgaacaatacaaataatggagcgtgattacagaatg

SEQ ID NO: 30141 - DNA, 279 bp, Glycine max
  unsure (1)..(279): unsure at all n locations
agagagtggatcacagagaaacaactagagagaacataaagttgtttattgtgtgaatgaaaatttactctgaaagcactggtattccagagacctgnactctcctattgttctctaattttctgattacactggtatacgagaattttgtaatatgtagtgattctattcagaaatattgtctatcgtggactggtagatgatacttgtggcccaagtcaaaataatataattctcttaatttaaatgtatcttattagcgaattctatatgtcagat

SEQ ID NO: 30142 - DNA, 530 bp, Glycine max
  unsure (1)..(530): unsure at all n locations
cgaagagatgaaccattgataagcgcccnatgatactaggattacggacactatgaatactaagctcataaaatcccaaccttttttatttgagaataataaatatatgataccgataaagaaagataaatctactctatgaaaggtagatatggaatgcttgtgaaccagctaacaaagaaaccaaatttttttggcaatgcgtaaccatgctctcttctgttgtttacaagagcaccattgacatagcgctcaatgaatgatattattatatcttactctgcaaagcattatcgacgtgtaaaattttgcttgaatggcaacatttccaattatttgttcctttctcacactcacacataataattgattcctnatcaacattttcaactaataccattcctagagatagagaataagggaattcaagtatgtatgttgccatgtttttgaacaactagcattgaaattggttaggattaagggttataattatatacaatttatattgtgataacactnttgtgatg

SEQ ID NO: 30143 - DNA, 290 bp, Glycine max
  unsure (1)..(290): unsure at all n locations
tacagcgtataatgccctgtaatccatgcaacaccgtccaaaaccaatcttcttttttaccatgaggatangggatgaaaaaggtgagtgactggggtggatgacgttagccgccaacatggctgatatctgcctttcaatttcacccttttgaaaatgggggtatcggtacggtctaacattgaccggagtcgtttggagaagaacgtgtatatgatgctggatgttgccgttggggggaagttgcgtgggttctgcaaatatgagacgaaatctcgcaagcactgatg

SEQ ID NO: 30144 - DNA, 379 bp, Glycine max
  unsure (1)..(379): unsure at all n locations
agcttccttaattggcaaacaaaataatgcatgcattttatgatgacgnttaacttccctacattacaagaaccatatcaatgtgagaaatcatatcaataaaataataaatattaaatttgaagagtttctttttaccattcaaggattcttcttaattctttgtagaatatagcttccatangttttttgggttcgaaaaactacaaaataagtcacacaatgtcatgtatttgttgggtggtgattctcatgtaaattaaaagtaattaattaaagaactaattataacctcaagaattgagatgtttgttctgaatgagagttattaatatgacatgtgtcacttgatattgtattntcaagtttcctaatttga

SEQ ID NO: 30145 - DNA, 230 bp, Glycine max
  unsure (1)..(230): unsure at all n locations
ctgcagcttgatgattacattctnccnctttctcaagcaaattcttcttgacatcatcaaaatctgcatgatttacatgcttgtttgtttggctcaaaatttgttctataattggtgcctagtttataccaatcttagttttgaaatttcaattgaaaattagtgtgaaaacaagtgccaaaactagatgtttcttgagtcttttttttntggtttttttttttacttta

SEQ ID NO: 30146 - DNA, 381 bp, Glycine max
  unsure (1)..(381): unsure at all n locations
gcagctgttgttgcagtaaaagcctacaaatatactgttaatggaactctgtttgcaaagacaacagagatgctgacagatcttttgttttggattttatcagtaaactaatcttagtgggataacttttcacaactattagaagaanatcacaagataaaataagttaaaagttttctcataatacaaaatcaacttatatacctcaattctgtaaaagcttccaatattaaggtgcataatttgaatttaaatttttacctcttattttcttttcgtatttgactaaatagtaaataccaacatcatacgataattggtagccttatcttgattnanactactaacgtncgtagtcttctcgtccaatttattgatact

SEQ ID NO: 30147 - DNA, 438 bp, Glycine max
  unsure (1)..(438): unsure at all n locations
gcactggttgagcattgagngcaccaatgaaccatcgaaactgcaggtgattgcacttacaccaaattagagtttcttctgttgggaagggattttaccttcttactcttgacctccttggatctttacaactggctcccacactctaaccaaatggtgggttgaaaaaacataactatagtcactgggtctcattgtgcatatgcctttcccttgatttgggatatgccttactcagcgtttcctataacagtttcacacttcctaaattctatcctttgtccttgttaataaatccgatattatttctatacattgatggccttttccttatggaccatcaaccaaaactgatttcatctaaatttattctagcttttccccaggatcaatctatctattggaaggacttttaagtgtttgcaaaataagtcttac

SEQ ID NO: 30148 - DNA, 489 bp, Glycine max
  unsure (1)..(489): unsure at all n locations
gatccttaagcaccgcggctgcagcttaacatcagaccacttncagggtgctggaactacttcacatggacttgatggggcctatgcaagtngaaagccttggaggaaagaagtatgcctatgtttgtgtggatgatttctccagattcacctgggtcaactttatcagagaaaaatcagacacctttgaagtattcaaggagttgagtctaagacttcaaagagaaaaagactgtgtgatcaagagaatcaggagtgaccatggcagagagtttgaaaacagcaagtttactgaatactgcacatctgaaggcatcactcatgagttctctgcagccattacaccacagcanaatggcatagttgagaggaanaacaggactttgcaagaggctgctanggtcatgcttcatgccaaagaacttncctataatctctgggctgaagccatgaacacagcatgttatatccacaacagagtcacactta

SEQ ID NO: 30149 - DNA, 178 bp, Glycine max
  unsure (1)..(178): unsure at all n locations
atagtagaatactggtaatgtgtctgctattattggcatcatntttttctncgtcattgaggtgccactngagctgccangtctctacacctttgggcgtattnctttgaaggattcgtgcctcctttttgcacatgttttgtagttgcatcctatccgaagccattatactgacact

SEQ ID NO: 30150 - DNA, 278 bp, Glycine max
  unsure (1)..(278): unsure at all n locations
atgccccacattatttccatgacacaaatgcaaaaatgatgatttggacactttatgcanaactggtcatgcatgcacctatgtggacactcaagtgtcaaattcttatggtcatgtgatgctagggctcaagattcattccctctattctagtcaacccaatgttgtcaaaatatgttnttttatccatttgtgctttcatccgagtccattatgggcgtgcggagaaaattcatagcgctcacccttctggtggcacacacatnttttccaaaact

SEQ ID NO: 30151 - DNA, 474 bp, Glycine max
tatacaagaatgaagctccgataccactagttaaacatgtggccttagatatcttaagaatatggggttgaattaagatatcaaagactactcccctattaaaattgtaactatctatctgaattattaatgcacccttaatttgaattactaaaaagacaattcaaagtaaacttctttaatgcaaaagataaataacaataaatgaaagaagtttaatggaagagagaatgcaaacttagttcttatactagttcggccacgccctgtgcctacgtccagtctccgagcaacccgcttgagatctccactatcttataaaatgtcttttacaaagtctgaaccacacaggaataacccttcccttgagtatagaattccttagaacttaagagatcctcggtcccttaatcaatctcttgaatatgaagaagaagaagaagaagaattctctccttaagagaaagatattac

SEQ ID NO: 30152 - DNA, 225 bp, Glycine max
aaaaattgcagctgatcgatagtttttccctgaagcaaaacatgtgtgacgaacatcttaatgtctgagggaaagcttggtgcttctactttaagccatgaccaacggctatgttaaatgtggcgtgtcactcaaataaaacatataaatctcatggccaataatacttaactgctatatgatttgttgtgatgctagaaaaatctgagaaaactgagtgtattt

SEQ ID NO: 30153 - DNA, 336 bp, Glycine max
  unsure (1)..(336): unsure at all n locations
acatccacaaatcacgcataaagtcaccatgctctgttgcccacctgcaactgagctcacgtactctcacgtagcccatatcctcgtttctctcaacaccgggtccccatcaatcctcccaagcttccccaacatccaggtaattcaaaatccaaatcatcacagactaacaaaccaagcataatagggcagaggcagaaaactctgcccaaaactcaaaccagaatcacagctgtgtctcacttaaagaccacacgaacatttccttccgttccaattcgtaaccgttggatcaactcgaacattntactggaagtctctagtacataagtctac

SEQ ID NO: 30154 - DNA, 409 bp, Glycine max
  unsure (1)..(409): unsure at all n locations
caccacttgacaccaatcataaacaaagggagttatgtttgcaccaaacacactgttaaataatactgggaactggactgctaataatacagtagaaaaatctgttatacagcatattttgttaaattcttgaaatcggctaagtatatcacatagcatgttaatgtttgagacaagaagacatggaattgggggatataagagagttacattattttgtttctaattgaattgctttttggttacaacatacatgtgactcgtgaatgacaactctggtgattntaagtttgaagcggacataattctttgcatgcccgtaaggttgtaaccatgcaccttgatgatgaacatttggaacaattaatcgagcaatgctttcagaaacctgacatggtataatcataac

SEQ ID NO: 30155 - DNA, 451 bp, Glycine max
  unsure (1)..(451): unsure at all n locations
agctngacaagagttaggccttgtttaaactttcaatttagtgatatgagagacaaaaatgtgttgaccttgaattctattatatttctgttgcttttgttcaattgctttctaacattaatactagttgttggaaatttctagtttggtatacaaatttctactcttactagttatggttactatggattgtgtggttgactataaatttttcgattaaagtccttgtttgctaaaattatgaaatagtcaggaaaatgttcatggtgttgagaaatttgtctaactctagaataaatgctaaacttatactttctcacactatnttatcaacaaatcttgtactattagatggacctcacatactgtaagtcctactaaacaataaatgacaacaaataagaaatgaaaattagcggactcccttatttttcttataaagatattatgc

SEQ ID NO: 30156 - DNA, 303 bp, Glycine max
  unsure (1)..(303): unsure at all n locations
tgaactgatgcagccatgccctggatcaaaacctgtgaccatgagataaatagttgccatcataccactaagctatcataactatctgatgaataaatgcataaattaatatatatcatacatggaagctatggcattagacatactcccttatactagncaatcactgagctatgaggacgagctttgattcagtacctcaatcgaattaatgactaatttgagtctaacaactatgatggtcacaacagagatcaggtggtgggaatcgcttctacactaccctaaatattattgatagta

SEQ ID NO: 30157 - DNA, 347 bp, Glycine max
cggacatagttaaactcgctatttattcttaccatacactcaactatgctatgaaaaatctgttaaaaataagttctgtctcaataaatttcttttaaaacgaaatataattccatcaaaacattctaacagatccattgggctagtaaattctatggggtggtgtgaaaaggtggggaccaattgagccagaagatagagcgttgatgatatagcaacccttattttaagaacaaaatgggaagaaacttttgagtcgggaccattgtttgtttccttgaagttggtaagaaaataattgttgatggacaccttgattacagtacatacattactatgctttcttc

SEQ ID NO: 30158 - DNA, 411 bp, Glycine max
  unsure (1)..(411): unsure at all n locations
gtttgtaatccgtgtctttccaaagcagccaatggggacatcattatacatttagtacattacccacttttaattntaaattgggtccagatgtggataagaacaactaaactaagtcatttaatgtatcgcttttatttaatgtatttaaactattagctattgatttgagaaaaaatattatatcttactaacaaatttaatgtggatagcatagactgccagtttaaaagtttttacattgtcaatgatcaattaaaaatattctttcgcatgactntcaaggtagttatcatcaaaacaaacaaacttatcatatatatatatatatatatatatatatatatatatatatatatatgtgggagttgatgactctataaaacatatctacactactgtgaatacata

SEQ ID NO: 30159 - DNA, 426 bp, Glycine max
  unsure (1)..(426): unsure at all n locations
ataaacatgtgaccatggcatgaatttaaaaaataatctatctttcaatcttctctcaacatcattcaatatctttcaattctttctacagaatctttcagatntatttctcttcatctttctaaaaggttttcttcaagcactttctcttccaagaaaagttctttgttcaaaaacttgtgctattcatttttttcattcacttctccctttgccaaaagaacgaaggactaactgccagaattcttttgtgtctctcttctcccttacaaaagattcaaaggactaaccgcctgagaattcttttgattcttcccttccncttaagcaaaatatttcaaaggacctaaccgctgagacatcttttgttccccttacaaagattcaaaggactaaccgnctaagaattctttgtctcaacacatt

SEQ ID NO: 30160 - DNA, 537 bp, Glycine max
  unsure (1)..(537): unsure at all n locations
cggatgtgatggaaccattgtanancccgcctattgtactcatctttttgaaggcatatgacatcgttcgcgcatgctacaatacctatgatattaaagttcgatcgcgcgcaactcttcaaaattattgttctggatgggtggtttctgctaaaagctttcatatgtggatcaacccaattagaccaacgggttaaggtgaccttagatgaaccttatacccgagctggttcattaaaagagaaaacggtcttgtcggattttgacgatgatggaaaacacaaactcctctcatagttcttcaaaggatctttggaatactttttcccaaatttgtcagacggtgtacaacaaattgttcaaatcttgcaccttcatattggctcaaccttccgattccgattcaagcctttatttactcaagttgttaacacgattgaggagtcatagcagtgagaattccattccaacattgaaacaaatctcagccctcgctactagcttaaccactgtgttcaattgacctctctagccaac

SEQ ID NO: 30161 - DNA, 401 bp, Glycine max
  unsure (1)..(401): unsure at all n locations
tgcagttgaggctacatgctctcagttaccacagtttagctttactatttagagagtatttcaatgatatgtcacttgtaatttagttcctttttgtatgggatttgtacttattggtccatctacttaagttgagagattaagttgttaaatgaatatactttcatgtttctaagttttggtccactctttctttctctctacttttatgctcttgaactactaaagttgagtattggttcaatgaaaactctaatgggacattatgatgttgatttatagcaataaagtgggttcctttntggtgccttggttcacagatgaagattttgtagaaatatagaactttagtcaatttactttataaagtgacaactagtcatagcatcctcttttatctt

SEQ ID NO: 30162 - DNA, 485 bp, Glycine max
  unsure (1)..(485): unsure at all n locations
ttagatcgactgcagcatgcaagcttctttggagccatttcttggtggagatgaatgataatgatataatgaaagcaaaagtgcacaaatagaggcttggggctactanaaataagagctcccgtaagcttttggtggttttgaatgttggggaaaaaatggggtgaaaaatggcttcacccccctctttttaaatttccacgttagacatgctcacccaggcgagctaattaattnttttttgcaaaaaaaaacattgcaaaattggattattccttgttatgtatatattttctaaaatcctatagttgcatataagcttaggtgaattcaagatataattcaagaaaacacacaagtaaaaagcaggaattttaatgagcaaaattagagatactanggtgcctnctaggagcgcttctttaatgtctttagtcggacgcggggatgatgatagctgatcctgggcctagcacttgtctata

SEQ ID NO: 30163 - DNA, 176 bp, Glycine max
cggtgtcaagagagttcaagtcctagccatctattttgtatagagtatgatgaacttatggacgtcaatatggccaccgatgataccttggaatgagaaaccaagaatgtcctataggaataacacgaccaaaacaagttttgaggggctttatagggcagcaatagtgatgctca

SEQ ID NO: 30164 - DNA, 347 bp, Glycine max
  unsure (1)..(347): unsure at all n locations
agcttgcatttgtggtagctgtaatatctatcaccatcctgccgtgttcanaagagcacataccacaaacccttgcgacaggtacaaatctctgattcaaggccagctgggttaccaagttgaccaacgcatccagtttgccttcaagcttcttattttcagatgatgcagatgggtttgtagctacctcatgcactccgctaatgactatggcatcatttctggcactaaactgctgggagttggaggccatcttctcaattaaattctggcttagcangagtcatgtcttcaaaggcttcaccactggcagcatctatcatacttctctcatattactgagtcct

SEQ ID NO: 30165 - DNA, 260 bp, Glycine max
  unsure (1)..(260): unsure at all n locations
agaaaactntcaagggtgaccagagttacaaccttactatcaaaatgaagcatatagaggttccaatctggataaattgttgacgcaattcatggaaacaactaaatcaactcaatgagcactccaaagtgtagaaatccaggttggtgagctggcagaagcagtgactcaatttatgtccagatgagaaaaatactttgtagaggttgaagctcaggagaaaagccctgannaagagcatgagtcaagagataaagatg

SEQ ID NO: 30166 - DNA, 350 bp, Glycine max
ttttactatacgttggtaaaatatgtttataaataattaaattatgatcctacggtctcaacctgtgtactttcatgtattatcatacactctaatcactcatgaatacgcaatttgtaaaaaataatagcgtcgcttatatacaataaattttaagtatattaatacataataatttgaacaatatttcgactaatatggttttacatattaatttaaataaaatatcgttaatgaaattatatatgtaaaatcttattattaaactatatacaaattatattaactattggattaattactacaatttaggtatatgtatgcataatatttcacgcatgattatacta

SEQ ID NO: 30167 - DNA, 399 bp, Glycine max
  unsure (1)..(399): unsure at all n locations
agcttaacatcatttcttgcggtggccacatattgcatatccaccacaatatactcattacctacagataaaggaaagggacccatgaagtctataccccagcaatcaagaactgtaacttccataatgatttgaagaggcatttcattccttcaggaaattccccccattctttggcattgatcacacttcaagacatggtgatggtcatttttgaagggtgttggccaaaagaatcctggctgcaagaccttagccgttgttttgtctccaccataatgccctccacatggtgaattatgatagtgccacaatatacctttggattcctcacttgtcacacattntctaaggatattatctgaacctaccatgaacaagtgttgatcatcccatata

SEQ ID NO: 30168 - DNA, 378 bp, Glycine max
  unsure (1)..(378): unsure at all n locations
agcttgtggcaaatgaatctagggttgatgctttgcatttctgatatgctccaagtacacaggtcgatgttgcttaaaagcacttgctctcctcttttttgcactatatcttccattttcttggcaattagtgtgcattgatttgattccttgccgatctggaaaagctcaatatcctttgtaggtgttggtcgtcaatcttcgtaatttgatcgacgattaagatcttccaaagtggtgacgacagtgttgatactaaagatcggtgcctttcctttgtctatctcntttaccatgttagacatctcattcttgcaactttttacataacattcacaagcgtttactttggtagccctcataatgacaatttcccta

SEQ ID NO: 30169 - DNA, 584 bp, Glycine max
  unsure (1)..(584): unsure at all n locations
acgatgtgnttttgaaagccgctcganannnccccncncnnttttgataccccatgcgaanaacgncgacacttanaanactcaagccttgagatgcactcnatacagattcttgaatagatggggtgctaacattgttattataattttanaaataaatacgtgggagttcgttagncttacattgacgcgtcaacgaatctgtacttagaccatataaatggcttattgtgtaatccacgttttttcaataatattcatctcatgatatttggagcgcgtgtggattcactaatatttttcttgttctcaacgatcttacattgaatttgaaagtcatagggaagctttgatgatcttcacggttttattatcaaaactctttccactttatcttattaaaacgttgaaacatattcttcttaactattaatgatcctattattggtacactaattcatattctatatcctatctgggacattcggtagtcacattaaggaacaactctatcacatagaagcgctttaataaccattggtcttaaaggacagagcaccctatattttatattaagaatgtcg

SEQ ID NO: 30170 - DNA, 299 bp, Glycine max
  unsure (1)..(299): unsure at all n locations
ctgcaagcntttctttcttatcaatgtgtctactaaccatggttgtnnnnncnnaancgcncgcngnngggcctgcggctacgtacaaacaacagcatccctgtacatgaggtgagttaaacacgttgtgaagaaatggggtgaataatggcttcacccccctcttttgatattttcacagtagacatgctcgccgcgcccaactaattaatgtttctatgcagaacataacatgtgaaaatagaattaatccttgttatgtacatatttactaaaatcctatcattgcctataagctc

SEQ ID NO: 30171 - DNA, 441 bp, Glycine max
  unsure (1)..(441): unsure at all n locations
gtgtttgacgcattgnnnaccnntttgaacatgatgacaccttaatactcactgctaagagtcagaagacatgcgcataggactagttctctccgatttatatcaccgttagaacgcgtcccacaacctcgaacataagggggcgttctcggagcacctcactcagacacaattctattcaaagaattggcccgcgtggcacactggtactccattgccaagttcgactaaaaatagccttgagttttatgcaatgctggccaatacaggaggcgtgcgtacctaaattctggttaggggtagtggaaccgttcgatccgacgcttcgncagctcctggatttcgtcgtgtttaaaggccagagtccatttgccaaggagaaccggctgtggttcataagagccttccattgttttatacgggcagattcccaactgccct

SEQ ID NO: 30172 - DNA, 308 bp, Glycine max
  unsure (1)..(308): unsure at all n locations
cccccccccccctttcnttcaacanaaaaaaatgcttgcttgcccgtccaacacgcgctgcacgctaataggagaattcctttttcatcctgacggactgtaaccacacaatctaaccatgctgatggaaaaccaaactggctgaatgtgtctacgtgatactgatagcctcactaaggcgaaaaacaaatgtaaagctaccctactacggggattatggatttcgactaaccatgaatggcaaaccttaatacaggaggagtgaaaacacccggggcgacctattgagaaaagaaatgggcagagct

SEQ ID NO: 30173 - DNA, 406 bp, Glycine max
  unsure (1)..(406): unsure at all n locations
ggtgactcccgtttaaagtgtatagcaaccggtccatccacatcgtctgcttttgatgttatgagtcaatcactcttcctctagcctccttttctgcgtacacttgggcgtattcgtccgccactttgtgctcgtgggcggtggccaaaattaattcttctatgtactggctgatgatggccaacatgttttgttctgtctcacataactgctgagacaaactcctttttgaccttaggcaagtcttcaatttgtccttcagaaatatgccatctaatcgcaattggtctctgtcctctctttggagcttaaagtcgttgttactgccccactgagctcctcngaacttgttacggccatgttcttacttgctggcccctcttgactcttgctctaggccctggtg

SEQ ID NO: 30174 - DNA, 413 bp, Glycine max
agcttcttttggaccttgaacaggcaactaactcctctttcaaaaccatgctatgtgctcgcgactggtccctttcttcccttcgcaacttgagttcactattgctaccccatagagctccgcgaaatttgttccggccatactcttccttgcgagccctcttggtttcttgttcaacggctcttgcggtaattgcattctcttctcgtaatccggcacactccttccgaacgtgtgtagcggccaacttgaacttctacttggcaagttttgcctttcctaactcgcttttgagagaatggacttcttcgtcctctctcggtgcttcaaaatcctctttgctgacgacttttaacttggcgagccaatctaaacctcgtatatgaactttcagccattcgtggtacccacca

SEQ ID NO: 30175 - DNA, 264 bp, Glycine max
tacttttcagcattgggggagctcttctgttttccaagagggctcctttttttcttgctcgtgattctgggaaatacatgagactatgagctaatcacctctaactcacagactctatgttaatgctaattttcaaaacagtttgtcctcgtaatggaggtatgaatccttcaccgcttagtttatatggacacttcttcttagaaagtttcaactatggatggcacttagaaattctggaatgatggctgccagtttttttaa

SEQ ID NO: 30176 - DNA, 448 bp, Glycine max
  unsure (1)..(448): unsure at all n locations
agcttcatggggttggcgcgataatcgtgaacagagaaagatgcgattgggtgtgtanttacgtcgaggagctagtgattgattcacgggaaagagaaaacgtgaagcactacttgaagagagngaaaatatgaaagagggaaaacaagttagtgggtgtttgaagagagtggaaaaatgacggacccaagaagtttttgttgagaggtagaacattaaatgagtaatctaaattttgtattcttcatttgcagatagttattattatttttagttaaatcatgtaaagacgattgatgttaaatggtttataaaaaaatgagataaaaaacacgtattgagaatgagtattttttctttatctattgtcatggatatactcaaatttttaacacatttgttacaataaataaaataagaattcttttctttttcttttttctctaca

SEQ ID NO: 30177 - DNA, 174 bp, Glycine max
gctaggtaaacatttgctttgacaatatggaacaaaattttgtacacgagaccctgtcatgttcacacaccattcatccgaggctgctttctaagcggtctaatcatttagaagtctaacaatatttctgctttaagataagtgtgcatcttggactgtctgagtttagcgatg

SEQ ID NO: 30178 - DNA, 352 bp, Glycine max
  unsure (1)..(352): unsure at all n locations
atgttcatattatcctacttttgtgttatttggtattttaacttggaattctatttagttatttgaattaccggcatgatcagagaagatccatcaataaaaatttctttgattcaagaaagggataatagtgaattttcctataagggttcatacaaaaaagcatggatggcccaacaaaaggcgaatgcaattgaatatggcgattgggaagagtcgtatgcgaaactctcgtcatggctaacacacatgcaaaatcattctcctggctcttactttcanatactacatgancgatttattggtagtaatagggtgagtcgcgaacatcgtcaagttcatagagtatttt

SEQ ID NO: 30179 - DNA, 422 bp, Glycine max
  unsure (1)..(422): unsure at all n locations
agtcacctgcngctgcagctgcggctataccttcaccaaaacgggcgtgttttgttatgcccgtattcaacgcgggctgcagcaccggctccgcttacctaactgtactggaggcggatgcagaggctttatcctctatgggtntctagagtattaacatgacctccgagatggaagccatttgatcttttaaggccgatagatcggccttcatttgttcctgcacgcactcttcattatccatttttctggatcgagtgttataggggtgccttggtgttttcttagttatgatgaaattcctacagaaataaacaacggtgagtatgccaccaaaacatgagtatgcaaatggatgatctgagcacttggatccaccccaagattttagattacgtattgagtctaaactcctcttttat

SEQ ID NO: 30180 - DNA, 456 bp, Glycine max
  unsure (1)..(456): unsure at all n locations
gcttcttaggcnaagcgaattgtggcnaatgtaaagatcttgtaatattccaatatatcttcactctttntattcttcaaaaaanaaaacatcaactatgactatctaagtgatggcaacactaacaactcattggaataaataaatgatttcacatacaagtttctgagggttgacatattggtgacaacttcacacagtgttgtgcatctaacacataatattggttctttaattctacactcaagtttggactatatggacgattataactttatgactccacaagagaccaaacagtttgggctcattgatcacaggcattgatcactcaacatatttgttcactacctcttattcagtgtcccncgtgtgtacatttatcttagagtngagctttctgataaaatctcactgctatttcagctgtcaccaccagacacattgatttgtact

SEQ ID NO: 30181 - DNA, 448 bp, Glycine max
  unsure (1)..(448): unsure at all n locations
ttcagtactcctaacattcagaaagagaaacaatccttcactgttccaaacttataaattataatatttagctaacttataagataattttaccaatacatcctagattatttgtncttaatttttattaaacataagagaacccatatatatattgtcaaaaagactacatatatngacaaaaaatgcccaatatatatgactnttatctaaaataataataataatactgtttctttaaaattcactttaaatctcatatatttatcccacaattagatttcttcaaatctgatggaacttttgttaaacacagttgttggtttggttgtctcttaaaagatgaaaatgtagatataatatttaggtaatgaaacatagctacaactcactgtatctttattataaataaaagcaaaagttgagagtaagaatagtgggtctaaaa

SEQ ID NO: 30182 - DNA, 334 bp, Glycine max
catgaataataaatctgcacctgtcaccagactatgtggtttatgctcctctggcaaccaccacacagaccttgctctttatgcagattatgaaaaattgacaagcctgaggcttattctgcaaacatctacaatgggccgcctctacctgagtggctaaatcaaccacaagagaacgattatgaccttttcagcaacaagtacaattccgggtggaggaatcatcccaaccttagatggtcgaatccttcacaacagcagcaacaacaaccaccaccttattttcataatgctgttgagccaagcaaaccatacgatcctccaccaatccaac

SEQ ID NO: 30183 - DNA, 371 bp, Glycine max
  unsure (1)..(371): unsure at all n locations
acccgcgacctctgagtcacctgcngcatgcaagcttatgatgaatcaagaatgattcatagagtnttgatgataacaaagatgatgacaaaaagctcacaagtcaataacacttgatgataacaaagatgatgatctcaagaatcaaagaatgagttcaagaattgaatcaagtacacttcaaggatcaagaggaaagttgaattcaagaatcaagaatcaagaatcaagtttcaagattcaagtttcaagaatcaagatcaagatcaagattcaagactcaagattcaagaatcaagatgagactcgatcaagataagtattaaaaagtttttttcagaaactggagtagcacatgaattttcttaaaa

SEQ ID NO: 30184 - DNA, 354 bp, Glycine max
tcatcctcagatccctcttgttggactagacttagaccaaatagatttattgtaacaacatatttaaaaccaaaacttaatccatagatccctcatttaagactaagtttcaattctacttcattcaagttctaaggcaacaatacatttcccaatgcaaaagtcacctaaccaggcacacaaatggttaatcagaccaaaagcatacatagtttaagcactgaaagaagcattaaacacaagaaacacaatcaattagatatgaaagtaattacatcaattgttctttagaattccctaacaagggtgtttagccagccattacagaaaaaccctaacaataatgagattaca

SEQ ID NO: 30185 - DNA, 446 bp, Glycine max
  unsure (1)..(446): unsure at all n locations
agcttgaggctcatccactgtgtgatactattgagatgcttattggggaggtcaagatcaccccagctgatgttgctgaanaccttatgcctaagtccccactggatgatcctcacaagtgcctctcaaacttgattgtagcacttgaggaagctgcaaaagttgatgagatgaagcatagtagtcccatcaaggaggaacttncttaacaaaatgggtccattaaggaaaatggtgagcttcatggtgacaaagcaatgaatcagcgccagatgtggctcgttaatgatacataatgttgtgtagaagatattctggtatgagaggcacnatttctcactttactatgtatctatngctagcaactccatgagatgttaaaagggagggatatatactttacacgctctggtttcggtcagattgtatttagcgctgaatcttgg

SEQ ID NO: 30186 - DNA, 173 bp, Glycine max
tattaactccagtcactatgtaaagctctactgacagcttatacataagtcctattaaactgttagtgaaatgcccttttagtgtctacatttattgtcaagaccagaataatgatatacatttttaatccatcctcttcaaactattaaaaccataaatcatcttaatgaac

SEQ ID NO: 30187 - DNA, 418 bp, Glycine max
tgatattaattaatcacgcgttattatgcaacattattttataacgctttagaagtaattaaaattatctatcaaaaaaagccataaaaattattaattcttttaccatatggtatttaaattaatttatactaataaaaaattttggtttgaaatatatattaatttaagtttaaaattctattgatttaagttttgaaatatgtacaacaataatattttaaagcaataattgactttgtgatatatagagtgggtattaatcgatcaagattgatctaaaattatcttgcagtgtttttttttagtaaaagtactttaatattaacagtcaaataagaatttaaaaataaactgagatgtttgtcctatatgtaagagttttgttcatatagcccgataatgactatgtatttat

SEQ ID NO: 30188 - DNA, 411 bp, Glycine max
  unsure (1)..(411): unsure at all n locations
gcttctgatttcaattncgatcgtctcgatatattactggactctatctaacatcagagtaaaaatttattgtcgctagaatttgcttagagcttctattttcaataagagcgtctcgctatattaccggtctccatcggacatacgtgtaaaaaattattgtcgcttgaatttgcaacgagcttacattttcaaattcgagcgtctcgatatattacgggactcaatcggacattcgagtaaaaaattattgtcgtctgaatttgctacgagcttccgctttcaatttggagcgtctaatatattacgggactctattggacattcgacgtaaaagttattgtcgtttgaatatgctcagagcttcaattctcaatttcgagcatctcgatatattacggaactcaatcg

SEQ ID NO: 30189 - DNA, 354 bp, Glycine max
agcttataggagtgggttttgacatagtatcagagtgtgtctatatttactgaattatttaaaacatagactctatgtcgcgaacgagataacgacaacacatgacagtattcctaaaaagaataagatattaacggacagaaagagtccccacaacgcatacatgagaacagattctagcttggatactggtgagagatactacagatgatatagacgagactgttcatcccaatatgatgagctctatacaagagagaggtgactcttctctagcaggatttatcttactaataggtgcgtcaattgtcaataccacgagtagaagccctcataacatctcaatgcttatga

SEQ ID NO: 30190 - DNA, 205 bp, Glycine max
aaaaaacttttacattttttcaatattcttaacgcatctataaatcatggagttgcttacgcagatcctggaatcctgctactatgacattctgagatggatatggaggaatacatgtactcctgatcttatgcatgctccgtatggacactctctacagtttattgtattatataaccacattattgtaatcacttatatcata

SEQ ID NO: 30191 - DNA, 420 bp, Glycine max
  unsure (1)..(420): unsure at all n locations
agcttgcttctacanaccctacagaatatttggaataagatcctgctatatgcaaattanaaattataaatccagacctggtaataaaaactaatgatattcagtatgggaatttcgaacaagaggaatgtaaacaccacataaaatccctcttggatctaaaagttatagtatctagcactagtcctcatagaagtcctgctnttattgttaataaacattcagaacaaaaaagaggaagaactaaaatgggttacaattataaaaggcttaatgataacactcacatagatggatacactattccttctaaagatgtgttgataaacaggatacagaaagccaaatggttttccgaaattgatttaanattatgatttcatcaagatgcatcccaattcaatanactggattggcttt

SEQ ID NO: 30192 - DNA, 216 bp, Glycine max
cagcataaccatgtatgtcaagccttacatggttgtagttcagagtaacaatgtgtctgctgaccaaataggccttgcataaaaggttagctgcatttattcttcatgttggctatttttcagttcaattataggaaaccagtggattattattatctggaatgtagattgaaaagcatgagcttctaagataagacgtgttactactttatatta

SEQ ID NO: 30193 - DNA, 314 bp, Glycine max
  unsure (1)..(314): unsure at all n locations
atcgtgactcaccatagaccttgtattattgttttaatgncaatccttaccctcggaagcacaaaaaagaagggaaggaatatttccaatcaaaggaaaaaagagaggaaaggaaactcccaatcaaagagcgtgagatagcctaaagaaaatatagaaacttcccaactctagaatgcgagaaagaaaagaagagagaaggagaataatgaaagaaagctccttatcaaagatgcgaagataacataagagatgtgcacagaggtctttgtaccatacaatatctgaacaatactgaattgtcaccaaatgaa

SEQ ID NO: 30194 - DNA, 379 bp, Glycine max
  unsure (1)..(379): unsure at all n locations
ctcctagcctanacaagtgttgtctaagttgcttctgttattttatccaaagtggatgcactttttcgtttgcatgcaaggtcaaacgtgttgtgtagaaaagatgnttgtatttgaccaatttgcccttttctgaacgttggggaacgtattgcagacatacatgttgtatgtcttttgctgacgcgaatgtagcacacacacgttactcttgcatacgtgccacccgtggagtgtgtaagcacaagacacgtgatatgtgggtgagtggagatgcatcatggtgcaaaatnttagggcatcatttcagctctcgccaattaccgaagagtcgngcctctactttaaatggagattacatttggggttctttttatca

SEQ ID NO: 30195 - DNA, 328 bp, Glycine max
ggattctacttcattaattcgtgtataaaatcatttctatttgttaatccttatcatttattattgcacatctacattgcacttggtcataatgatatcagaaggtcaatactttacactatactactgctttatattatgaactttccgataatcctcgtatgttcacatgtaatcaatcgcattttgacttttttccattcaaataataatgctcgatttcgcggctatacttacctgacgagctgctttgtagaaacactaatcaacactgacctttattttctgcccaatcatcaatttcttgccagatacattttgcatctac

SEQ ID NO: 30196 - DNA, 421 bp, Glycine max
aaacattctgatactgctgtttatcgattaccatatatgtgtaatcgattacacagggcaaattttgaattataattttaatagctggtgtaaatcagttttggccactggtaatcgattacatcctctggtaatcgattaccagagagtaaatctcttgttacagacttttaacttaattttcttggccaaaccttttgctacttcaattggaattcccttcctatttaatataccctctctaagactctatagactgtcttgatcatacatcttgaatatctttaaatgctttgtcatgaataacgctttgagacgcatgtgattctttggatcattaaaacatcgggttgatcctatgtctacaatcctcccctttttgatgatgacaactcctcgaatcaagactaactatttacaa

SEQ ID NO: 30197 - DNA, 393 bp, Glycine max
  unsure (1)..(393): unsure at all n locations
agcttactcgtaagggtcaagtgtttgtatgtgatgctcattgtgagagtagtttccgtatccttaaggaaaggttgaccactgcaccagttntaatgttacctgaaccgagtgaaccctttatggtgtactgtgatgcatccaagatgggtttgggtggagtgcttatgcagcggggacaggtagtgacctatgcttctcaacagctagagatacatgaaaggaattaccccacacacgatctcgagttaacagtcatagttgttggtcttaagctgtggaggcattacctttatggatcttaattaaggtggtttgtgatcataagagccttatgatatttgttgatcaaaaaagtttaacatgacgcaggggagatggttatagtccctt

SEQ ID NO: 30198 - DNA, 470 bp, Glycine max
  unsure (1)..(470): unsure at all n locations
ctaagcttccaagttttaagttcttcctcataactgtcctaagcaaagttctcaaagtcctattaacaacttccgtttgcccatcggtttgtgggtgacaagtggttgaaaataacaatttagtgcccaacttgctccacaaagtcctccaaaaatgacttaggaacttagagtccctatcactaataatgctccttggcaaaccatggagtctcacaatctccttgaaaaacaaattagctacatgggaagcattatcaactnttttacatggaataaaatgagccattttagaaaacctatcaacaaccacaaaaatggaatctctaccattgcttngttttggcagccccaaaacaaaatccatggataaatcaatccaaggatactccggaattgcaatggagtatacaatccatgaggttntaccttannacttgccttnttacatacaatgcaatgttcacaaa

SEQ ID NO: 30199 - DNA, 527 bp, Glycine max
  unsure (1)..(527): unsure at all n locations
agatggtgaaacatngnnnacncnnatganncntgaatgataccatggattacggacacttgaaactcagcctgtggattttgggaccttcacattgtgtctatgtggccggttggtcatggtgcaaaataactctncacattcacaaatacgcataacccagcattcccaggttgccaactttactgagcttacgtactcccacggagcccttatcctcgttcctcttaacactgggtcccatcaaatctctccagctttcacaacattcaagagatcaacattcaatcatcatgaactatcaaagtcaagataatagggcaaaggagaaaactcttgccaaaaacaccaaccaatatcacagcttttcacactcanataccccagtaacattctcttcgcttcaattcgttaaccgttgggatcgactcgaaatttactggaagctctagtcataagttacattgtgaccgtggatctgtagaaacgtcagaacaatctgactacttttcacaccagaaatcact

SEQ ID NO: 30200 - DNA, 410 bp, Glycine max
  unsure (1)..(410): unsure at all n locations
tctatggaactgctagagatgccgctatcactaccggactacacacgtgagcccgcttagaagtaaaggatgagtttatttgcctcggggataaaatgaacatgtgtangaatctttaggggggatcatattgaggtttattatgggatatttattgtatttgaactcttcatgtataattatatttgtgagattgtatattggaatcatgaaactgtgattgaaaatgcgtgtaagtgataaattgaatatgtgatgaatagtgagataacatgttgcattgagatcataatattgctattgagattgagcctacatgtaaacgtgaacatgtgttaatttgtgagatacacgtgaacatatgatgatggattgcgacattactagatgtcacatgtgaacatgagatt

SEQ ID NO: 30201 - DNA, 480 bp, Glycine max
  unsure (1)..(480): unsure at all n locations
agtggtacatngaaacaatgccttagctgtcatttcctctaaacctccaacatatttaaccccacaagcagctcagtgatggcagcttctgtcttctcctttgttgcaaagaacaaagtctgcaacaacaacacattggtcnttggaaccaagttctgatgctcatagctcctctcactcttgccactttatcatgtatgtgccaaaggtcccaaccatcccaatatcctccccaatgcatcccttcactccccagccagcacgtgatcatcacatgctgaaaaccccacgtgcacccctctcaaccttgctctcaaacatgaccttatgctacttggccacatcccatacaaatcatcccttgcttccaccccaaccaactgggtgtgacttatcatcttctctaacaccatcaccaatgttgcatagtgcaaagccaaagctgaagcacccaaagtatcatcgtcactatcaacatca

SEQ ID NO: 30202 - DNA, 444 bp, Glycine max
gcttttatccaaagctcatcttggggagaagcttcttctctctgtttattccttaatggatggcgcctcctctcacctcttctcctttgccttccactgcatctccatggtggaaaatcaccattaaaggactccattgaagctcaaagatccagcctccatagaagccccacaagcaagcttccatcaacatggcacctccactacgaaaagtgacttggctcctgaaaaacgcaccattttctttaccaattgttagtgaatgtttgccttcttgcaacacagtgttaccgaaaaattagcaagaaatgtgtgtgtcttcttaccaaaatcggttgttgctctcacatgccattggtagttgtccctcaaattgcactattgtaaatggtaaaaaaaactgatacatatattgcatgtgatctattatgctaaagaatgaca

SEQ ID NO: 30203 - DNA, 426 bp, Glycine max
  unsure (1)..(426): unsure at all n locations
acacatatctaatatacgttgccaagtgtgagtatggatcttcatttggtaaaccatgattttaattgctctatattagttgtatcaatgaaggtgggcaagttaagttttgtgcctaaacctctggccgagcaacacttgagaaatattgcggcaccgaagtacttgagtaatcttccaaggtcactcatcgaggttgctcttcatccatgacttcngcttcaaattctgctgtttgagattccctggatgtaggtgaattataagatgttgactcagaaaagtgagcctcttcaatgattgatgctactattctatcgtgcaatagctttctttttctctccgtgttgtntcttcaaaaggtggcttcaaattctaaatccgatggaaccaattcacctgtagaagatctacacatgcaaacac

SEQ ID NO: 30204 - DNA, 386 bp, Glycine max
  unsure (1)..(386): unsure at all n locations
gcttgtgcgaatctttcccttttgttctagtgatctctcatggataaatcnncttccttagtcaaggcacgggtgtttggttttggcttcatcgggcacccaaattgtcgtcaaacgatgagtgggttgtagctaatttctgcacgcatacacaagagaggtacgttgggatatccaccacaactcactataatgtcttcaacatcactatctgcttggcaccaaacaatgtcaaaagggtcaagagtcatgattcggcgacgccagaaaagcttgtcattattggtcttgatagcaccggattgatgtaagtggaaggtaaaccattgatagattaaaggtgcacaacatgaaatggtccccggccagcctggtaccgtcaggat

SEQ ID NO: 30205 - DNA, 236 bp, Glycine max
ctttggaaaaattttttgaattgcatttcttgtatacctttccgattgtaacttgttagatagattatttaaactttttgtagttttttggaaataaataatataaataatttttttctcttagttatattaccttacactacttaactttttttaaaaaggaatagatataaagatttcttctacccatatttgaatgcacaagttgaatttaataatttatggtgagaaaatta

SEQ ID NO: 30206 - DNA, 376 bp, Glycine max
  unsure (1)..(376): unsure at all n locations
catcaagtcaagttgaagtatggaagtaaccatcttgcacaactgtggcaaaagatggatcgagttacatcgctgcttcgtctactaccaaacacatttaggactgtcgatgtccctgttacttccagtttcaccttgacaaagatgtcatggaccatgttgaaaatctaaattgaatcaaccccatgtcttgcataaaanattgcaatacttcaaattgtgcatcattcacatacatccatccttttcattgggtgcattgctcattgcattctttccttgaaaaaacaaatgaacttaaccattattatcaaaaagaaggaaaaacacgctgtacaacgcccttactgaacctgtgctagagctagagtaatgg

SEQ ID NO: 30207 - DNA, 439 bp, Glycine max
  unsure (1)..(439): unsure at all n locations
ctaatttctattnggagacctttatcaattattatatctaggtctttttaagcaattgatattgagttagtaaatgtaggtttgcatactagtggctcaatcatgtccagaatcactcacttttncgtattcttagaataattaatttaaagccaaaatacattattctatggcactataaggttataattcaatggattattactatactnccttatatagatttcaaaataccttgttgattttcttatgaaaaagatatcttcaattctaattaatggctaactcaaagattagaaaagatagagggatatttgacgaaatgaaactttcatttaatttcgtaaccatactgattacaaacgtcttgataaacgagaaccgcttacatgtaaacctgggtataagtaataaaattaataaccatctgtcaatatag

SEQ ID NO: 30208 - DNA, 297 bp, Glycine max
  unsure (1)..(297): unsure at all n locations
cccccccccaagataaattcaacacncacaaggtgtttgcatgcctattaaacgagtcactgctatggtgtctaatactaggggacccctctatgggcgacctagttacaattcttcaattctattattcccgctaagccctcatattgatgcatatgaaaggagggctttgtaaccggagaggtacattagacaactatttcttgccccctcttttactaaatgccttagcttttccatacactgacaattgttattactagtttagtctcccctttctagtgatgactatatttg

SEQ ID NO: 30209 - DNA, 474 bp, Glycine max
  unsure (1)..(474): unsure at all n locations
aaccacattcttcctcatttagatgatgaccagccattatctctatgatcgatctttttcgacatcattgacagcatcatgatctatagcatattctcatagcattaccatactgtaactaacacccacatttcatatcacatgacattctatgagctgcattggtcttgcacttctatctttctatcgtcatctcctcgtcatcattctctaagaattgatgtttattttcaaaagaatacaatcctaaatacatgtttgcgttgatctgctttcaacatataanagcactgacaatgcgtcttcaaagacaacgtattgttagattacgtaaaaatacattcattgtcaccgcgttgtgatattacccacaatgaggctcctgtctcaactgaacacgacatttattattttacttttggctcctgagaaatttttcactatatgtttcaaaatcccactacacattttatt

SEQ ID NO: 30210 - DNA, 412 bp, Glycine max
acaaaagttcatgggtaccactatggaacttacgaccctaattatgatggtaccacataaaacaaactatagaaaatagttcatacaagagttataccgtcatctaattattaaatcttcacatatattctcatgagcgctgatttattgataatatactatgttttatattgagagggatagaaattactctctggataaatcataatatgttgcttccatgacttgcaatataccaacacactacagagtcaatgactaagattagaagtaattttatcacgcacacatgtgctacctttctcaagtcacatatataatgcaaaactagaatactaatttaattatatatatacatattatcatcacactgaaaattaaggctctgcactacatgatatatatacacatt

SEQ ID NO: 30211 - DNA, 470 bp, Glycine max
  unsure (1)..(470): unsure at all n locations
taactccggagataaatgccatgataataataagaagaactatgatatggaggattctttgggctagaaacccttaataaagggaacaatacttctgaaaggttntattctcgaagcacgggaaagggtagggacaagaacaagaatatagtggaaacgggtgtgaacaatgtgattgaggaaacaaggaagaggccaatgctaaattggggtgaaggacttgctaagtttgacaaaaagaaaatngagggtgattgtgtaagtgttgctactccagcntttggtgcatgcagttccttcttaggtgtcttgttagattctatcgaatactctttattatggtcatttgaataaacttctcaagaaacatgtatagtaattgttggaaagatgtcttaattgcggtcacccctaacccaccttagctgtggcgagtaaccttgggcaaagagaggtgtgttgatgtcccc

SEQ ID NO: 30212 - DNA, 240 bp, Glycine max
  unsure (1)..(240): unsure at all n locations
cactgaagactatgacatgttcgttacgactacctatgttgttctattgaaatgaagaccgtgatcgcgctatggcttgttctataactcatggttaanccttnngacctattttgtgttctggtgcaaagattggcgaactggtggtcacctgacgtacatttgactggtagtacgcggtctttgtggtcagctgaagacatttcacctgaagtacacatttgctggcattgtcgctgt

SEQ ID NO: 30213 - DNA, 477 bp, Glycine max
  unsure (1)..(477): unsure at all n locations
taaattgttatgaattcgcgatattgtgctttatgccancctttttcttagcacgccttagtggatttgagcctaacgctagtcgtgcgcctgagctggctgaagaccactgctgcgccttatgcactgaactcacgcttaagcgcgcaacccttgatattgatgctctggcagattcttctgtcacactaaacttaactggcacttttagcacttcatgacttatgcctttttttacccgagattgcgcatatctcatcattaatatcaatggaaatattctagagacaactttaaccattatacaagaatttattatcaaaatcaaactaaataaccataaattatgggaactatacaangtttggaaaatggtttctatacaaaagatagtttgataagacgactgacagactcctctcaatatacaagtntgcttgtactgcagcaaagatagaacagatcagatgttctcag

SEQ ID NO: 30214 - DNA, 461 bp, Glycine max
  unsure (1)..(461): unsure at all n locations
agctnntatagccatataaagtgactggaaagcgaactatttctatgactttcctaatctatacatcatcctaataggactgtaattctaccataattaccttgaaattatataaaataacccaataatatccctgataatattcagcacaaaagttacatgaaatttccctagtctgaatatcttatatgaaaatcagaaggctaggaaaatactatgacaaaaacaaaccacatgtattccagaaagcagtaaggttgagttagaattgttacagcagggaagatcaagaaacactgcctgcctttttcctttctaatataataaccattactttccccacactatataaacagctcttagaattctgttcaatctatgttatgagtttaccaacacattatcattccatttcggagaaaatattcaaacanattgcttatgtttattacggctccata

SEQ ID NO: 30215 - DNA, 423 bp, Glycine max
gatctctgagtcacctgccgcatgcaagcttgattaccatattaagtttatggagatcagaatatcaaatttttgaagtgcacctttgttcttctcttgtacgacgcatgtacttattgagacaaactgaccgggataagtcattggagtgatgggataacatgatgtgaatggactccatattatatggcagccagtggtgtggccatgggaatattctcggcaccttcacctcatcaaatgaaatcccattgaatatcttatccagtgactttgcaacaccttgaggagaaggaacccaagcagcgcgagcatgtggagcaggaatgacattcttcgaaggaaatgaacttgaaaccacccacatgtttgaagcttaatagtatgggcaagagcagcaacaacaacaagaacaatatgaac

SEQ ID NO: 30216 - DNA, 390 bp, Glycine max
  unsure (1)..(390): unsure at all n locations
caggttcatcataaaacagaaccgacgtattgatgataaccaaaactaccagcatttacgcaaccagagctattacctgcataatccgaaactcttagcattactattattaccaatagcagtatgatctccattgatacacactattaccctatatatatcatgaatattccctcaagaaattaattaaccatgccagtacttcgtcacaacatgattgccgacgatgctactaagatcaaaaggaataaatatcattactacgctccttatgccatgggattgagctcaccatacaagaattaattccacatttataaaacatcangggtacagtttctattatacaacatgacgagaatagaccaccatatcctgctacaaaacccc

SEQ ID NO: 30217 - DNA, 306 bp, Glycine max
  unsure (1)..(306): unsure at all n locations
caatttagcaacttccgaatatatatgaattggcaagtttaagagactcatatttacaaggatgaaaattgatgtgcaagcttcttggtaaacattgcatgtgatttgggccgcgttcagtgtaacattgcatgttacgttaaataaatataacaaattcatttgataataaattaaattttagatatatgatgagacttttatgattaaatatataaaaatcaataactttattaattaaaataatggtttgaaagaaaatacaaatgatctcttatntattcattagatacgaaataaaataga

SEQ ID NO: 30218 - DNA, 365 bp, Glycine max
  unsure (1)..(365): unsure at all n locations
gctcgaaacatttagacatatgcaatatattcatttttgtacataaaaggttcattggagtatagttggtgtggcaatagtatcatttggcttttataagctctaattattctttatttttaataaattctatcgaatagaaaaatatgtgttagaaagattatattccttatactntttttaattaattnttttatctcaaaagatatgacccacaagagaaaaaagagagtgagtagacaaagaagagagataattctcttaanatcttcacctagctttttatataaaaaatacatgttcttctcttcttttttgaaataaaactacttactgacctatgaaattttaatatgatagagtgg

SEQ ID NO: 30219 - DNA, 494 bp, Glycine max
  unsure (1)..(494): unsure at all n locations
catatgaataatgtaaatctntgcacaatcatagagtatgctgcagaatggtgacantttccgtaagagttntaaaaataacctaagttgtgttggataatcaatgctctcacaaataanattactcacactcacaaaggatcgtgagaacacaacaaagattacatcatagaaaaataataacaaacacaaaaatttagtgtgattcgacacctcttacctacgtccacaaaatcgtcgaaaaaagtatttcactatcacaaaaatgattaanagattgtaacccaccctagatagtgtaccactctacaaactagagaaccccactcaatggttacaaaaaatgataacactctcacacaaagacacttttctcttaacaaagtgaacttggctcaccatctctcttctcactcactctctcttcatgtgttggttatccactaaatctcttatctatttatatngaagagtcaccaactataataaataag

SEQ ID NO: 30220 - DNA, 370 bp, Glycine max
  unsure (1)..(370): unsure at all n locations
ngacacaatatactatctcttctagaagtcgttattcaaacttgttatatgcggtcatcggcttcatcacttcatttaagatctccaaattccgaagtgatttgccatgatagttgatcgcaatgcaggtcatgtcacttatgcttatcgcacctgagagcaatacgatcaattgttcctctcgaggtttcagtccattatatctgcctcaatgcttcataaattttttggatgcacatagtcctggttgttgtaggataaaattcacaactactttcatgctcatacgaatgcatatgcgagacaactttgctctgatctttatcatatctctcttcaggataatttgtctttaatttcttcctatata

SEQ ID NO: 30221 - DNA, 433 bp, Glycine max
  unsure (1)..(433): unsure at all n locations
agcttaagaaatctatatagtggttaaaacaagtgccctgtcaatggtaccttaagtttcatgggataatttcttcatttggttttgataaaaccccatggatcaatgcatataccacaaggttaacgagagtaaaatatgttctcttgttttatatgtaaatgatattttacttgcagccaatgatcggagtttgctacatgaggagaaacaatttctctctaagaattttgacatgatgggtatgggtgatgcattgtatgtcattggtatntagattcatagagatagacctcaaggtattctaggttcatcataggaaacctatattaacaaaattttagagagattgcagatgaaagattgttcactaagtgtcgctcccattgtgaatggtgatatgtttaatcagaaccaatacccanagaatgac

SEQ ID NO: 30222 - DNA, 447 bp, Glycine max
agcttatgaaactatataaaacagatacatcatacataaattcattttaacacaatcacaaatgaaaaatcgaaatcacccaatagtaggggtggcaattggatgggtaaaaaaccaaccaaaatatttaatgaatagtcagtgaagattgttagtggatactacatgaactgatggattataaattatcgatccataatgatccaatccaaaatccatccatttgaaaacattattgaatgataaactgtaagtgttcttgaatgataaaactcatcaaaattagaagtgttattataaggataaggattaaaatcattatcaaaacaatcaccaaagtaattaagatgaacgatactaactcaacataggaacctatcagtcaaattgaaataaattaccagtgtcaaacttaaactggcatatataatcttaagggggatactg

SEQ ID NO: 30223 - DNA, 545 bp, Glycine max
  unsure (1)..(545): unsure at all n locations
ggagagatgaaccattgtaangcgaccnatgataccatcattacggaccttagatactcagctaggacccanactgtacttctatgcaagggaacatgcttatggttaggaatcccaaattnggttttagaattagaaaaacattgaaatttcgatttgctcgtgagaagttctgctccatttggggcctgcccatgtttgatactttacattgtggtagcgtggaaaataccttgcaatagtgtgtatacatanggtaatataaggagcatgaaattcctagcanagtgtgaatgattgtctctctaaatgaatgtatgatagtgtggaatgccttttcgaatgcaaatatgtgcaggatgtaattagctttccaatatgcatataaatagatatgagtgaaacaataaanatctgtatggtgtacttcanatgtatgtcagtagttcgtgatagcaaatggttacgatattaattatgtgttaagtctgacgccacactctgagcatgaaagtgtgtctcttttttagaatgatatacgtgtn

SEQ ID NO: 30224 - DNA, 173 bp, Glycine max
actgcatgctcatacagagcatatgagttatgcattccaattcactcacatcatacaattgatccatgcaaatcaatcaacaagcactgatatcgaaaatcaatcatcaaccactgattaatatcagcgcactgtgcaatcaagcgtatatacatgctaccaaacagaatata

SEQ ID NO: 30225 - DNA, 146 bp, Glycine max
aagggtttttttttaacaaacgtgcaaaatctgtgaactggcatatctacggcatttagctttggtctcccccacggaaccttcttgaacccagattttgtggattgaaacaacctgaacccatctggaagggggcactggctctg

SEQ ID NO: 30226 - DNA, 227 bp, Glycine max
  unsure (1)..(227): unsure at all n locations
atcgattacacatcaacagatgtgactctttttgaattttgaaaatcttaatgttttaaaacactggtaatcgattacatgaatatggtaatcgattacagctttgtaaatcaatttgaaaaacaatgctggctattggtaatcgattactaccttctggtaatngattacccgagagtaaaactctttggtaaaagaatttgtganaacttcatgtgctactcaat

SEQ ID NO: 30227 - DNA, 426 bp, Glycine max
  unsure (1)..(426): unsure at all n locations
aaatggtattttatcagtgaattgaaattaatatacaattgtgtagatntagaaatcattattaatgtttatttaacaattattcttttcatgttaaaatatcaagaatcaggcctgacgcgcacaacgcaagagcggggatgaccttctttaacatttattagtaagattacacgtgtataagattacacgctttttgtcatcaaatttccctctcccgtgtcttcttctctaaaaccaagaaccctaacttctgaacctttcaccgcatcgccatcgattcccaatctccactaatcagaggcgagcccctgtcatccaattacacaccttatggcttctttactctaactgctttgttccccttttgctgcgatatttttggtctattcagaattattaaattctcagtgattagctctactg

SEQ ID NO: 30228 - DNA, 87 bp, Glycine max
cctcactacgtatgactagcgaggagcgcggccaagaacaccactgaagcaatcgatagtatggacatacagacgtgctacttatta

SEQ ID NO: 30229 - DNA, 562 bp, Glycine max
  unsure (1)..(562): unsure at all n locations
atggccctgaccggatcttagcactgcgctgcagcttctaatccttgggataatcgttaatgcttcgaagttaaactattagcatagcattgtcctagatacctcatggtggactagacttagacccaaccacattattggaaccaccttattaaaaccaaaacttaatccgcgaatncctcggttaagaacttaggttcaatcctgcttcattcaangtttaagggcaacaatacatttccaatgtaaagtcacctaactatgcatacaactggntgatcagaccaagagaatacagaatttaagcattgatagatngcatgaacacaagaaacacaatcaattagatattagagtaattacatcagttggtctttagaaaatccctaacagggtggttagccagccattacagaaanaccctaactatantaagaatccnagtagagaatactgctcttacantagaaggggatccntctnnncttctagcattcataatactctacactactatctctctatacaaacctaagatctttgcaaagtgctctcttgctgg

SEQ ID NO: 30230 - DNA, 480 bp, Glycine max
  unsure (1)..(480): unsure at all n locations
gttctcttcacagttntcactagtctgtcatgtagagctnntctttcttgcaatcctagtttctctacatcaatttcattggtttcttctggagttcaattctttntgcaaaataatatcattaaaccttataaaagaaaaagataaaaaaaacttgatgtcaagaaataaagtgtattatatatgtaagtagaggatatatatagaaccatgtccaacaaggacgaatgtatcccatatgcctgtttttaccttatttcccatctttcatagatttgaataagaaaaacttccaagggaattcatggtttcatcctagtgctcttcanatggtggctntcaactatatccttggtagacaagcatgagagtgggagaccacttttgtattaagaatgctaacaacatattctttgacactacaacaacaacatattctttgcaacctactttcnactcatttattattgactaacatat

SEQ ID NO: 30231 - DNA, 581 bp, Glycine max
  unsure (1)..(581): unsure at all n locations
aatagtactcgttgtatcttatagatgtaataatggaaacggangaagttacctgaacctgacacgnacgagcagcaccgacagatagtactgcctggagttctatttatatatcattttngtctggcacacttatcgcattagtgcacttatcatgccaacatgacatttgagtttaatgcccatacgcttagcgccacctctagcgtcaagcctaattcaataattttaaattatatatatgtgttaacgataggcgaagatcgcgcctacactggctgcactcttgattggcctgcaatagtacttatcctgagatgttaggttagcactataacaagctctactacagtgatggtccagcgtagcgcaattccagtatttaaatatggaagattgcgcttacgtttctgctgtaacccaatcctgaagtcattacagagagaatttacttaagctatacatatatttcacagataagaatgatgagccattactcctttgagcaagtatangtttaatccgtaaagacttatgttacgcgatgtgggcctacgtgacatctatacactgtgaaagcn

SEQ ID NO: 30232 - DNA, 436 bp, Glycine max
gctccttcttccatggcttattccctagtgaatggtgcctcctctcacctcttctcctttgtcttccgctgcatctccatggtggagaaccacaattaaaggatctcattgaagctcaaagattcggcctccatagaagctccacaagcaagcttccataaaaaaggcaagctatctatgcggtttgacaatggaaggtaaaggaaataagctatgaaagtaagcaagaaatgtaaactatgcgaatcctaaaagtatttggatgaccacatttaaggttcccaacaaaacactcacaatcctaagggaaaattacctaaaattattacatataaatggaagtaggatgacctattggaggctcccaacttacttccaatgaaagacctttttgttacaaaattgaatgcaatgaaagtaagttaattctcaatta

SEQ ID NO: 30233 - DNA, 423 bp, Glycine max
  unsure (1)..(423): unsure at all n locations
ccttcctaatgtaaaagcacaatcattaatattaaccttgtaataaagcatgatgttatagttagtgagcagttattttattcttacctcttttattctaaataaatgtaatgtgattcttaaaatgacaagtggatatttatgtagtctctctaaaatctacaaaactatttagtattaaattaaaataaaagggcgagtttgatatgcaggttaacactataataattctatttgaaaatttattgctaattttctgaacgtggatgttttcaagacaatgtatttgaatcccaatttcagtcatatgtaacaaggaaatctacaagtgcatctacaagtatgaagaaaacatcatcatccactaatattgttgatgatctttcctcaattantggaggtacgtttgtgtcttcaagatat

SEQ ID NO: 30234 - DNA, 323 bp, Glycine max
  unsure (1)..(323): unsure at all n locations
gataactatgatgacaacanaagatgatgacaaaagtgatgaacaaaaagctcaagtgaatcaaagaacatccatctcaagagaatcaagaacaagtcatgagttcaagaatcaagaagaattcaagactcaagaagatagcctacaatcaagattcaagatctcaagaatcaagatcaagattcaagactcaagattctagaatgaagacaagactcaatcaagataagtattaagaagtgtcttcataactgtgaatagcacatgagttgttgacaaaacctgtaccagagagttttactctctggtantcgaatatcata

SEQ ID NO: 30235 - DNA, 385 bp, Glycine max
  unsure (1)..(385): unsure at all n locations
agatgaggaagtgtagaaggatgaaacttcctggctttattcgttgaccacagagtggtacctggagatatgtcgcggnggtcaggagaccttgtggacgtcaggtggggtgctattgcccaaaaccaagcttgaccaatcccgacccaacccgggcatagtcagtcagtgagagcatgtgatgtacctaagcaggcaagctcttggcaatcaacagataaaagaaacaaaaccacatagcaaagaggcttatgtggtggctggccagctgtgaactatgtttgatatgtgggttatggcctctggtaatcgattaccaagagtggataatcgattacaaggcttaaaaatgaagacaggaggctaagatggtctctggtaatcg

SEQ ID NO: 30236 - DNA, 303 bp, Glycine max
  unsure (1)..(303): unsure at all n locations
gcttcaatggaggaagaaaatgagagagagaagcggtgatatgaggagatatggagagaagttgaactttgaagtaagtctcannaagttttcattcaccaaagttatgacaagtgttacaccatgttttatttatagcctagcatatgggaaacttccttgagaagcaaggaaggtagcttccttgggaagctagaggaagaaagcttccttgagaagctagagaggggctatccacacccctccaatagctaagctcaccccatgccaaaatacataaaaatacaatgggaagcttctttg

SEQ ID NO: 30237 - DNA, 477 bp, Glycine max
  unsure (1)..(477): unsure at all n locations
cgtttcacccattcaatcaacccagtgtctccgaataatgctcctttatcaagtcacccatacatccgagtccatttaggcattcgggaaaatctttcattgcttcaccctttatgcgcacatatttttttttcaaaaaactttntatgtcatgatccgtgaattttccaaagaaaaactggcggtcactctctttcaaaaacgtgttggctttttagttttctttctcttagctntntatttcaatgaatctctttcaagcaattttttttcagaaaaggtttgtaacccaagcaaagttggtatcgaagattacactctatcgaaaggaataaaaggcgtgtgaataaaaataaaccaataccaagatccnctatttttttggttaaaaaaaccatcgcatagaaatactataatatgctagaagcnggtaagttaatcacaatgagacaacaaaataattgaatgcaataacat

SEQ ID NO: 30238 - DNA, 348 bp, Glycine max
  unsure (1)..(348): unsure at all n locations
agtcacctgcngctgcagcttgtgttaataatgctgcattggtgtataatggtttgacatatatatacttccaatccaggccatgccaaatcatacccatgttcatagctcttaattatgcttatatcagcccttttgggagtatgtcttgcattcacacctgtatgtataaatttgttggacatccttttctttacttttattgctggatctatggtatgagataattagagacaggtacatctttgccttctgcatgatacattcagattctttaattagccaatataatagataatcatgtatcgactaatatacaaagattgtggctacttattatgtgtaaat

SEQ ID NO: 30239 - DNA, 301 bp, Glycine max
  unsure (1)..(301): unsure at all n locations
tatctgagaatcacttanaattagtgagagaaattgtntccatgaagaacatctgagccgatgcgccttcgtatcgctttcgagacatttacgtgagtgatttcgcgaagatattccgtcgntctttgttcgatctttgtcgatgttcggtcttcaaccgtgtagttcccgaactcatacattccaattcattctatgtacccttagtgggcctcatttgtttcgcgtatatatattctatctcatgtacttttcgtacccctcttgacgtgctatagtaatntatttaagtcattttctc

SEQ ID NO: 30240 - DNA, 328 bp, Glycine max
  unsure (1)..(328): unsure at all n locations
gcttatacannttttttatatttaactatgataatagngattttagctatccgataaaatctatatattntcataaattgtaatctttgaatcaattataaaattaattgtcaatccaaaatgtagagggtcttaaagcttcatccaaatgtatgattatatgtaatttgatacaaggcacnagtgaatgagtactacaatattactatttctccatctatttctcacaattcacatagacctatcaattggcctctgacaaaanttcacgaacccgttaatagtgtatgactcgtcaattcaattaatgttagtgccttataatttc

SEQ ID NO: 30241 - DNA, 319 bp, Glycine max
  unsure (1)..(319): unsure at all n locations
cacactaatatataccttataatcaatcaaggaaacacatngacttcaccaacttggtctaagagaaaacaaaatatcacattttattctccttatattaattttctctagcattcaagcaggatggatgaaatggagaaaagcatctggggtgttatgtgatgcaaaggtaccgatcaagcataagggaaagatttatcggactgcggtaagaccggcgattatgtacggaacagaatgttgtgcggtcacaagccaacatgagaataaagtacgtgtagcggagatgaggatgttgctgtggatgtgtggaaagact

SEQ ID NO: 30242 - DNA, 550 bp, Glycine max
  unsure (1)..(550): unsure at all n locations
tggtatctataagttatcgttagtttggtatattcatccctttagncgtanagtggttgaccctcgacgcgatcctgagcactgagctgcactaacaaagtgcggttttctgtctgcgcgggcgaaaaggagtgttcgagcatagagacctctccggaacttgaaacgcctctgagcctgggggaacagtcggggacgccaagcactcgggaacttgactttgataaaacaaaaacttttgacttgctgatggtgctatgttgtttcccatcctttctgcctctcactatgtatcactaaagcgtgtcagatatggagatcaagaacaaagcctgcatttatattgtggactgacgatcagagagaacaacaagaacattcantattaaacagattaaaatgtcatactgtctaaggttaagaccgctactttacacagtggtgaatatagcatacaaataagcacgccacaaggtgcaaataatctatttagtaacttgtctgtgaacgatttgtctctacaaatgagatttgccaatcatcttagtcg

SEQ ID NO: 30243 - DNA, 609 bp, Glycine max
  unsure (1)..(609): unsure at all n locations
gcgcattctcatatattgacttttanattgtatnattcacatattacaaataaaannaggattgtgtattgagcctttgaggcatctttagtcacactttatactaagcttgtatatgatgtgaattngatgtcattacatataattactgactgtcatcatgcatgattgaaaatggatgtgaacaaatacttatatactgatcgtgtnaacaaacaatgaatatcttatcgttttcaaaaagaaacttctctttcatatgtggtcgtttcattatagagtgtacaacttaattattgatattttctatgcgcatgangaatagtaagaagacactaccacaatagtataaaatgacttctggtcggtataatcactgtatgtataaccggagatgaaacggaatactattcaacggaaacatatattagccgtatgggatgcatcttcaaagtgtgtgcaatattatagtacttcaaagtataagatgtatctcaatcataatgacggctggcctttaacactattgagactgatattaatttcatttgtaaagagcatagcatctaatggaaacaaaagtagaactttttgaaaagatctctgagg

SEQ ID NO: 30244 - DNA, 400 bp, Glycine max
  unsure (1)..(400): unsure at all n locations
agcttgtcattgtctctccgcctgctccttccaaaccatcttcgcaatcgtctatgccactgttgtctcgcccttgtggcttatgtccttcaaaagacacttcccctgtagttcttgtgcctccagctgagccttaatctgatgtggntcatactgttccagcaggtcaccctatggtgactcgtgctaaagctggtatctacaaaacctcgccactttgcatatataactacttatcgaccatcttctcttttacatgcattattcaccacttctaagcctaaagggtttaaatctgctgccaagcatcctagctggcttgctgccatgaatgacgaactcacagccttacactccaacaagacttgngaacttgttcctcaaccacctaacactaaca

SEQ ID NO: 30245 - DNA, 374 bp, Glycine max
  unsure (1)..(374): unsure at all n locations
agtcccacggtcaacanaatatttgtataacttctcatgcgtggttctgaccaatgctgtgattggannaatttgattnttctagcaccgagtttagtgactctgccaaattagtggtcatgtgtccccaccgttttctgtcatcccatgccaaggtccattgcttccttggtatttgatcaagccatgttgtgtcgtgcgggttgtcttcttgtaactcccggtaatggtgaaaaaactctggttgagtcatggcatacccggtagtttgaaaaaaaatgtaaatctgaatgttagtttaatgttaaataattaaatatcgtgtgttagaatatgaacaaaatatcttacccatacttaagacattttttctt

SEQ ID NO: 30246 - DNA, 309 bp, Glycine max
  unsure (1)..(309): unsure at all n locations
agcttctattataagctgaaccatttatcaataaacacatagttgagtttattcagaanattagagtttatctcttttatcttagtgagagtgattctcctaaattcttgagtgattcaagaacaccctggctgtatcaaaggactttcacaacctttgtgtgtttccctcgccggaaagagtgattantttcttcctttcatcttcaaccttgttctttcaaaccacaattctagaanatccacttctgcctagaatgatctcgtggccataactcctcgtttacgcactcaaattaagtgattcttg

SEQ ID NO: 30247 - DNA, 443 bp, Glycine max
  unsure (1)..(443): unsure at all n locations
cagctacgagcctaaacttgtagcttcaatacaaggaaacatgtgtatggctatgaatccaaaatatggttntaggattagaaaagtatgaaaatagggacttgtttgtaagaatttgtgctgccccatgattggcactntgcacctaagtaacatgggagatgctcttcaatggtgtgtagatatatgtgtaaatatatacggcataaaatatgttgcaaagtgtgtgaatatatggcataaaaataccttgcaaagtgaatgaatagtaaataatgcatatttgtggataagtagtatatgaagtctttcacaaaaaatgtacacgtgccacagatggcacgagaatgcttcccaaatgaatatatgatgtgggattgcctctcaagagtangtagatggcatgaaagtttcttttcaaatgcaagtgtgtgcgtgacgtg

SEQ ID NO: 30248 - DNA, 234 bp, Glycine max
  unsure (1)..(234): unsure at all n locations
ttaaaaattattcnaatagtgaatattatttaatggtatttgtaacatattatttatctataaaacaaattctaacatatagtatgtgaatggttataangacgtttaataagagataagaaataaaaagtattaattcatattactaagaataaattttaattaaaattaatgctaacaataaagatgaaataaattaattatattagttaacatttgtcacaaaaattattt

SEQ ID NO: 30249 - DNA, 290 bp, Glycine max
catctcttagtttcttaaatccatgactttggttattctacatattaattggtagacttgatcctctagtcttatacattgtcgattgtgatcatcttaatatattattaacacataattctgaacttactatccctcgagcacaacacacacggaatatatattccaatctgtgacatccgtatacataaagactccttatatttgtgagcgccaacgagatatgactttgatgctaacatattcaacattcccttcttgcacttcttctattatgcgcttcaattcac

SEQ ID NO: 30250 - DNA, 378 bp, Glycine max
  unsure (1)..(378): unsure at all n locations
agctntagatagggcatgtaacattctcatggccattttctggtctacacaaaccattacgatgagtcttatgttggatggaaatntcatcgctaagtgtggggtggacacaatagcttcgatggcattgattaatggtctaccaagtcaaatgttatgagaagtactagcatgcagaaccaaatacttgatgatgagatctttatatccagtcttcctagtaccaaaccttgtcattagttttatggaacccctggtgaggactcttccncgggataatccgaaggggggtcataccgtgataaagtgtcgattccagaatatccaactgcgtgaaggtattctggagtaaaaatattttcgaactcctatgatctc

SEQ ID NO: 30251 - DNA, 359 bp, Glycine max
  unsure (1)..(359): unsure at all n locations
cgaaccagagtagctctgataccaaattctatgatcataatcctagntgttattgggcctatcaggttatctgtatattgaaccacccacaaatattcagtcctgcagacttcacgctcaggatgtctagtctttgacatgaagggngaggatctcacattgactaatgatatggccaaattagcatatataaggggcatccctcactccataaagtagctttntgatactgagttagagccaaaccgaaattctaaaaatcagaagacaaatcaacctaatatactgtacagtatttcacatttcactaattactgtagaatatttcaacaactttaaaactactagaatttgcaact

SEQ ID NO: 30252 - DNA, 312 bp, Glycine max
  unsure (1)..(312): unsure at all n locations
gatatggctcccgatcgcactcagctgcagaatatgttcaagaaagagggcgaaacctntaaagaatacgcacagcggtggagagacctagcggcacaagtggctcctcccatggtagaaagagagatgatcactgtcataccctaatttcgtccggggacctttgcttgatgacatgcgacctttctttggtccttgtgaggtgcttggcacccatcattaggcaatttgtgaaattccaggacatgccgganaaccaaaaaatattgatgcacaatccgtaagtttccgtgacacaccgganatcaaatg

SEQ ID NO: 30253 - DNA, 76 bp, Glycine max
  unsure (1)..(76): unsure at all n locations
cttctatggaggctggatctntgagcttcaatgaggtcctntaatggtgatttccaccatgaagatgcatcggaag

SEQ ID NO: 30254 - DNA, 356 bp, Glycine max
  unsure (1)..(356): unsure at all n locations
aagacttcctgcntttattcgttgaccacagagtggtacctggagatatgtctgcggggtcaggagacctctgggacgtcaggtggngtgctattgcccaaaaccaagcttgaccaatcccaacccaacccgggcatagtcagtcagtgagaacctatgatgtacctaaacaggcgagctcctggcagtcaactgataaaaggaacaaagaccacaaagcacggagacttgtgtggtggctggccagctgtgaactatgattgatatatgggatatgggctctggtaatcgattaccaacggtgggtaatcgattacaaggcttaagaatgaagacaggaggctaagatagtttct

SEQ ID NO: 30255 - DNA, 399 bp, Glycine max
  unsure (1)..(399): unsure at all n locations
agcttagggtgctcattgactccagatagctgcanagaatgacaaagatctgtatggtgatctgcagaagaacatagaccatagaattaaaacatgatgtttccccttgattcacaagcaagtctcttatcctaggttacgaggatttatcctttatcagttcaaccacttaatccaaccctaaataaattactaagcaaaanttaacataagactgtcattatgtgattaaggaacacatacaccaattaatcatgaacaaaactgatcattaagcatgaacgcaaattaagcgtagagacaattaatcatgcactaagcatgcatggattaatagcaacanatatagagtaattggtgaagaggaanaactgatcagaattcaatagtaataataaa

SEQ ID NO: 30256 - DNA, 335 bp, Glycine max
  unsure (1)..(335): unsure at all n locations
tgattaggacttgtaggattcatattgngcaaaattggatgatggcaagtgtgatttcgaaaatctgcactttatgcagaattttgctgtcaaatatgtgcagcagaattttggctttgtgcagaaaatgttgtgtatttgctggttctggaaagagtagtacagattgggttctggacgttttctagcagatcccaacggtcacaatgtagacttatgtgctagagacttccagtaaaattttcgagtcgatccaacggttaacgaattggaacgaggagaatgttactgtggtttttaagtgagacaagttgtgatattggtttgtgttgggc

SEQ ID NO: 30257 - DNA, 469 bp, Glycine max
  unsure (1)..(469): unsure at all n locations
tacccatcacatgtggtactatgtggcggtcgggcgatggtgcacaacaagctntccacatccacaatgcgcgcataaacccaccatccnctgttgcccacctccaactgagctcacgtactcccacgtagcccatatcctcgtttctctcaataccgggtccccatcaatcctcccaagcttccacaacatccaagcaaaacaacattcaaacagcacaagctatcacaaccaagcataacagagcaaaggcagaagactctgctcaacacatcaaccanaatcacagcttttctcgcttaaagaccccagtaacaattccttcgatctaattcgttaaccgttggatcgaactccaaaatntactggaagtctctagtgcataagcctacattntgaccgttgggatctactggcaaacatccagaattcattctgcactagaactttcacagncaaccacacacac

SEQ ID NO: 30258 - DNA, 446 bp, Glycine max
  unsure (1)..(446): unsure at all n locations
tgcatcagacanagatgatagcaaatccatttcaggatatggtttcactttaaatggtggtgcagtaagttagaaaagttccaagcaagctacggtagcatattcaactactgaagcaaaatatatagtggcaagtgaagccgctaaagaagctgtttggatgaaaaagttcacctttgaacttggtgtggttccttcaatagaagagtcggtcccattattgtgcgacaataatggggctattgctcaagcaaaggaaccaagatcacaccagaagtccaaatatattttacgaaggtatcacttgattagagagataatagaacatggtgacgttaagaatgaaaaggtagatggaaaggagaatgcatcagatcccttcaccaaggcacttggcanaagagagttngacaagcacanataggaattatgaatgaagttcatga

SEQ ID NO: 30259 - DNA, 328 bp, Glycine max
  unsure (1)..(328): unsure at all n locations
actcggatgtccgattgtgtctcatagtatatcgagacgctcgttattgaanacagatgctcatagcaaattcaaacgacaataaattnttactcaaatggtcgatggtgtcttgtaatatatcgagacgctcannaatgaaaacgaaagctcgtagcanatgcaaaccacaataactnttaactcggatttccgattaagtcccgtaatatatagtgacgctcgaaattganaacataagctcttagaanatattaacgacaataactttttactcggatgtccgattgngacccgtaatatatcgagatgctcgtacttgaaaata

SEQ ID NO: 30260 - DNA, 333 bp, Glycine max
  unsure (1)..(333): unsure at all n locations
gctatgttntaatgtcgagcttcacgatatactacgggacactatcggacatccgagtaataagttattgtcattataattttctcggagcttgcgttttcaattacgagtggctcgatatattacgggactgaatcaggcatccgaggaaaacgtgtttgtcgttagaatttgctcagagcttttgttttcaatatcaagcgtctcgttatattacgggacttaatcgtacatctgtgttaaaatttaatgcggtttgaatattctacgagcttctgtttccaattacaagcgcctcaatatactacgggacacaatcggacatacgatata

SEQ ID NO: 30261 - DNA, 283 bp, Glycine max
  unsure (1)..(283): unsure at all n locations
caacatcaaaaaggccacagttcgtaatacatacataatttatagacatacacacagcatactnntgtaaacaaacataaaagattctaaatcattcatgaagcaagacatgaataaaccatattaaaatgcaaaccacatagtcatacatcacaatccataaatattcagtcatactaatcaaatattataaatactaagtgttcaaatgtcataagcatatagccaaatacaaggctgtagaaagaaaatataataataataataataaagtctaaactga

SEQ ID NO: 30262 - DNA, 375 bp, Glycine max
  unsure (1)..(375): unsure at all n locations
gatctctgagtcacctgcggcatgcaagctggtcctaggttagacatgantggtacatgatntgatacttgtangattcaatntgggcaaaattggatgaaggaaagagtgagtttcgaaatctgcactttatgcagaattttgctggtgaaatgtgcagcagaaatttgcataagtgcagaaaaatactatgtatttgctggttgtggaaagagtagtacagaatgagttcttgatgtttgctagtagatcccaacggtcaaaatgtagacttatgtactagagacttccagtaaatatttcgagtcgatccaacggttaacggattggaacgaaggaaatggtactgaggtctttaagtgagaaaaagctgtg

SEQ ID NO: 30263 - DNA, 421 bp, Glycine max
  unsure (1)..(421): unsure at all n locations
atatgcatgtgaattatgacgcatcaacaagaatcaagccaaggctattgtgcaagcaatcaatggtgcataacacaccaaatgattataatgatggatggctcanattctcacaaaggtaaaatcatcactttcaaattgagctttcaaaactatcatgacatgtagagaagaatcaaggatttcaagtcacaaaatgtcaagaacttntattttcaaaacaattccccatttcttgaacatatcctataattcaaagagaaacatgcaaagtcgtacgtgcacacgagatngacccaaaatattaaactgaagatccgacgatactaacaacattattaaattaacacaactaacaaattaacagaaccaacanaacaagccaaaccaaagaacacttccccccatacttaaacaacac

SEQ ID NO: 30264 - DNA, 413 bp, Glycine max
  unsure (1)..(413): unsure at all n locations
gatcctctgagtcacctgcggcatgaagcntgaatgaatcanatcatacatgaattgaagtgactcatttcttgcatgattgttcaagaaaacagaagaaataggaataatcgaagcanagagagagaaacaaaagcccttaatattatagcataaatatacaaaagttaataactcacctctntacccttcaactcctgagccttaattntcatcaactcagcctccccccaaatttctacctacaattcctagcaccatccttgctacacccagacctccaacatcgttntatanccgaaatgcaaattaggtcacaatgtgaaaataggaaaaaagaagaagaaaaacctaatattgtgattgtggaaggagccaacaaggatgacgaggagggagagaaaggtgagatt

SEQ ID NO: 30265 - DNA, 301 bp, Glycine max
  unsure (1)..(301): unsure at all n locations
ctacaaaaggagagagcaagagatgaagagccaatggttgatacatggacggagatganacagatcatgatgaagcaatatgtgccggctagttactcaagggacttgatattcaagctccatagactaacccaaggcaacaagggggttgaggagtatctcaaggatatggatgtgctcatgattcaatcatagattgaagaagatgaggaggtaactatggctcgatttcttaatggtatgactaatgatattcgtgatattgttgagctacaggagtttattgatatggatgatttgc

SEQ ID NO: 30266 - DNA, 496 bp, Glycine max
  unsure (1)..(496): unsure at all n locations
agcttctaagtgaagttcagcgtgtggaaagcacttcttgataacgtgtttcttttttgttggggttagggtaatntgngaaccattgngatttttagtgtgattggttttgagcggcgtgtttggatgcatgctgcactaactgagctcactcacgtttggtaactagtaggttctttcagtgagaggtaaaagtattattgcttccgttctgattgtacctactactaaatactaattatcgttctggtcttgaccgacgaanatgcgggttgttgacttgtttaaacggtttgacacttttggaagaagttcaacgtgaaaactactaataagtaattatgatntgctgctcttcatcgttaattaatgttggagtatatacaagagaaagttgcaaaactacaataagtgttcttcatttgtcgcacatgtttaaatatgattaatatatattttattttactgcattatttatctactataaatattatag

SEQ ID NO: 30267 - DNA, 363 bp, Glycine max
  unsure (1)..(363): unsure at all n locations
tgagccanaatcctgactcaccatanaccttgacccatggtgagaatgtcaatccttaccctcggaagccgaaagaatagaagggaaatttccaatcaaagaaagggaaagaaggaagatttccaatcatagagaaagcaaaaaaggaaaagaaggaatattccccaatcaaagagtgggagatagcaaaaagaaagaaaggaaattctccatcaaagaatgggagaaagtaaaaaaggaagaagaagaaggaaagaaagctcctgatcagggatcgaaggataaacagaagatatgtgcagagaggtctttagaccggacaatatctgaacaatacagaattgtcaccaaatgaacaaaaag

SEQ ID NO: 30268 - DNA, 395 bp, Glycine max
  unsure (1)..(395): unsure at all n locations
atctctgagtcacctgcggcatgcaagctagctcatccttggcctgagtggttccaactcatgtagtgctngctcgacaagggatacttctgtcgtgaagagggaaaaatgttatgcaatgctggtatgggcatgaaggatttcaacgtcattagaaccaagtgtgcctcaatttcggtagacaccactttcatcttttaaggtaaaatatacattttaaaagaaagtgttccttggattgcttatggcacatgatataatctggttgatgtttagttaatcattggtgtattctgtttgtacaaaggtttggcagtgcttcagaactctgtcagactgtgatattcaattgaacaagaacctangcttgatntatanccattttatattccata

SEQ ID NO: 30269 - DNA, 410 bp, Glycine max
atatgcatgtgaattatgaagcatcaacaagaatcaagccagggctattgtgcaagcaatcaatggggcaaaacacaccacatgattatgatgatggctcaaattctcacaaaggtaaacttatcacttccaaattgagctttcaaaattaccatgacatgtagaggaaaaacaaggacttcaaatcacaaaatgtcaagagacttttattttcaaaacaattacccatttcttgaacatatcctataattcatagaaaaacatgcagagttgtacatgcaaacaaaattgacctaaaatattaaactaggaacccaacacaattaacaaattaacacaactgacagaattaacataaccaacaaaactagcataaccagagaacactcccccatacttaacaacacatt

SEQ ID NO: 30270 - DNA, 70 bp, Glycine max
  unsure (1)..(70): unsure at all n locations
agcttcgtccatagatccctcttgaagactaggcttaacttanacagcattatcatcacagcatattcag

SEQ ID NO: 30271 - DNA, 267 bp, Glycine max
  unsure (1)..(267): unsure at all n locations
ctgaaaatgtggttgcagaccacctatccagattggtgaatgaagatgtcacttcataagaggctgaactaagagataaattctctgatgaatctttgatcttggatgcagggagaccctgattcactgatatggctaatttcaaggcagcaggggtcatatcgaaagatctcaattggcatctgtcataccctaatttcattcggggaccattgtttgtcagcatgcgacctttgtntgaccacctcataatgtntaacacccatc

SEQ ID NO: 30272 - DNA, 427 bp, Glycine max
  unsure (1)..(427): unsure at all n locations
agctntgaagggaagagagagaccaatctctagcacatatcatggtcttgaaacaggatntagctgcttgctcaaggtccanaagaaacttgtctcagcgtttatgcgagacagagaccaacatgttagctatcgtcagcaagtaccaagaagaactaaatctagccacggcccacgagcacaaagtggcggacgagtatgcccaagtgtacgcaaaaaaggaggctagaggaagggtgatcgacgcgttacatcaagaggcaacaatgtggatggaccgatttgctcttaccttgaacgagagtcaagagcttccctgattgctagccaaagccaaagcaatggcggacacctacttccgccncgaggagatccacagacttataagctattgtcagcatatgatagacttgatggcccatataat

SEQ ID NO: 30273 - DNA, 386 bp, Glycine max
  unsure (1)..(386): unsure at all n locations
tattcggttggacccagtgtttcttctaatgctctnttaaaaatgaaatgcaaatgtcttaaatctcattattggttatgaaattctatntgtatactttcattcctccttcgccgcattatttttgagaaaatgtgtgttgatctaatcagtttggggttntgtttctttaccaagcgtgttcacattntagtaaaagtttacatgacttcatgtcttcagtctttacttttcaagacttcaatgtcttcagtctttacattccaagacttcaacgtcttcagtctttacatttcaagacttcaatgtcttcaatcattacattntcaagacttcaatgtcttcagtctttacatttcaagacttcaatgtcttcagtctttaca

SEQ ID NO: 30274 - DNA, 184 bp, Glycine max
aagaatgcattaccgttcctcatagagtgtgatccttaatgttgaagatcaactatatctatactgattcttgatgaatctctaaggtatggactgtatgcatggaatcgaagatgatgaaagccatgtttgattgtgaatgccacttagccagaaagttgaccatgtgcttgaatgaatcatt

SEQ ID NO: 30275 - DNA, 430 bp, Glycine max
  unsure (1)..(430): unsure at all n locations
gcatgtatggtcgtcctaattaattttaaattagtatntaatttatcaattntaatctaactcaaatntaaacatactaatggagaaactaatattgtgaaggagaccataattgagaaatgttgtgaagatcggagaccactactatctatatactattcattaattattattgtgaaggagaccactgagttcagagtccatagaccagacattntattaagcaaattaaaagtgtgggcatggagggaaaagagtaatgatatcttgtattattgtacacatcanacactaatacacatctgctagcaaactcttggacatgacacactgattaaaataaactgcaccgttgttcgaggggtattcaaatgtgtcttataatttatcttcagtggtaatgaaacacccgaaagcaatattgaacact

SEQ ID NO: 30276 - DNA, 173 bp, Glycine max
ataagctgtatgctctttatatatattccgcatactatatcaccacttatattcttaggatataatgggtctaatgaataattgatcatgacatatattatggaatacaataagtgcttcaattctttcacaaatgaggaaatgaatattgggatttttttacggttcaacac

SEQ ID NO: 30277 - DNA, 592 bp, Glycine max
  unsure (1)..(592): unsure at all n locations
gtgaaccctctgatcgtccatctatagagtctcacgctggatcctcgatattatatatatatatatatatatatatatatatatatatatatatatatatatatatgtatatatatatatatacatatacatatatatagagagagagagagagagagagacagagagcatgtgcatttatcaccaatgaggccacgccaacacatatgagtcaataatctgctctcacaccagtcgtcgatatgataaaccggcacgcatatcaccaggaaaatacgagattgtagtttttaagacggtgtgccggacgcaccatttatgtcttctctgtctcttgcttgggcagggatagtgagtacacacttgtgtggactcgctcgtcgatggacccgcccttctttcgatacacacacgcgtgtgtaagcagtcgcaagcaaccttctctggtgcacaaagacacgagatgttgggggcaatctttgttcgccactatcgaaacacaggggacactataatcgccactctctctccaaaatcgtgataaccttgcctngatatctatgccacaaccctatactaagccgtcagtccg

SEQ ID NO: 30278 - DNA, 395 bp, Glycine max
  unsure (1)..(395): unsure at all n locations
atccgttactattataataaataccggttaacagcatgaacagtgttcccgcccaaattntcttaatttttatttgtttttctttctttgtctttttatcttaaaactttgctttgctttgcttggtttttaacatgttgaaaaaattcacacatgataagacctaattaataaatataagtttaagataattctcaccttacaaattaattttataagttgagttagattgaaatccatattcttaaaacaattagttgtcttcctcgaatttaatataattatatttaacatgctactaaacatnttaaagatcaatgttattgatgtacatatattntcaatataaatactaaatgtaaatagttaaagaaatattttaatagaacccatgt

SEQ ID NO: 30279 - DNA, 364 bp, Glycine max
  unsure (1)..(364): unsure at all n locations
ttcttagaagnttgagacatcaaggacctgagccncttgttcatctgatccatttcatgtaacttcatcaagttaaggtaggtctctctaactcttgaaccctatgattgttgttaaacttccttgaacatgttgtcttgaaattatcgtgcttgcttccctgtcttgaatttatgttctgaactattttccttgngttattatgccaaaaatgagttctttgcatgttaaagcatagggttaggcttanatttcacttanatcagaatttcctagcaaaggttacgatcaaaacaagtttaagtacctttgatagaaagaaaatatgtcacgaaattaaattgtgttacaatagcatgaacta

SEQ ID NO: 30280 - DNA, 457 bp, Glycine max
  unsure (1)..(457): unsure at all n locations
atctctgagtcacctgcngcatgcaagcttctgggagacatctngacttgctntccaatctgacattcaccacagattctgccttcttctattttcagaatgggaatgcctctaacagcacctttgtcaatgattntcttcatgcctcttaagtgcagatgtccaaatctttgatngccatatttgacttcatcttctttggagaatagacatgtggaggagtaactggtttcttgaggtgtccataggtaacagttgtcctttgatctgctgcccttcattangacttcactcttctcatttgtcaccaagcattctgactntgtgaagttacattgaatccttcatcacacaatngactgatgctgatcaagttcgcagtcagtcccttcaccagcagtactttgntcagactangaagtccatcatggactatgctttccattccagtgatctt

SEQ ID NO: 30281 - DNA, 423 bp, Glycine max
  unsure (1)..(423): unsure at all n locations
tatgcatgtgaattatgacgcatcgacaagaatcaagccaaggctattgtgcaagcaatcaatggggcaaaacacaccaaatgattatgatgatggatggctcaaattctcacaaaggtaaaatcatcactttcaaattgagctttcaaaactatcatgacatgtagagaagaatcaaggatttcgagtcacaaaatgtcaagaacttttattntcaaaacaattacccatttcttgaacatatcctataattcanagaanaacatgcaaagtcgtacgtgtacacaaaattgacccataatattaaactaaaaatccgacgaaactaacaacattaacaaattaacacaactaacaaattatcataaccaacagaactagcataaccgaagaacactccccccccatacctagacaacacat

SEQ ID NO: 30282 - DNA, 66 bp, Glycine max
  unsure (1)..(66): unsure at all n locations
agctntgtgtggacaaaggactaacataagtatcaatgagtgaatcatcatctttaacattatcac

SEQ ID NO: 30283 - DNA, 380 bp, Glycine max
  unsure (1)..(380): unsure at all n locations
ttctctcgttattcaagaggaaggacaagtcactaaatggaattgttgattagaaggttatggtcacttcatctgaaaaccagaactattattcatttgaaaaccaaaattacctttaataatggaagaggaagaggaagagatgcacctatcgaaacaatgtaagatgaagaggaagaggttcactcaatgaagaggaaatcacagtgaaacaatgtaccttatgtaatagaatgggaaacaatgtcataaaatgggaaataatgtcaggaaatttcatattgcctgcttcaatttcaggatcaacttnatatttgtggaaacttacttgggctaattggttaagctaatctacaaccatgtgctcaacatggttccac

SEQ ID NO: 30284 - DNA, 282 bp, Glycine max
gctcttatgtcttagaggtacttcctcatgacatcttttgcttgaatagattgccatgaccgtctgttgtactgtctatatattcggagttgaattggttctggaggaattccattgattactacctcctcacttgccatttgttgacattgttgcggacacctatgatgctgattcaaggtaatcatatcttttgatggataagctgaaccataaagaaagacataatttgctcgtcacaattcgaaactgcttgattgttttgttgccctgaatgtgaaa

SEQ ID NO: 30285 - DNA, 467 bp, Glycine max
  unsure (1)..(467): unsure at all n locations
gcttactcanactntctctttcagaaatcccacgttgtatacataaactattacatntatttaatntacatgaatgccgtgatcatttatgttaattagtatggtgttaactggtaccacagtttatagatagaagcacttattgtcagacgtctcaaaatatagctatttaggcttatctcattgaccatgccgaaaggttgaaaccttaaggataactacttcatnnttttaattttttttattataagaaaaatgatgcacgaacatttattagttactggatacttagaaggagatagagatataagaatgagacatattaattaagtatacatgttcctgcgtttatgcatccaatctatgttatgtatggattgcacgtaatactattctttggattattannaacatatatagtaatgatatatatatatatatcattactatatatatatatcattact

SEQ ID NO: 30286 - DNA, 292 bp, Glycine max
  unsure (1)..(292): unsure at all n locations
agcttctagccaaatggacttaccttgaattaattccttttgatagccctttgagnccttgttccctttccttgntntgaagctcactacaagccttaagtgaaaaaccatgatatcaccatatcctttaaggaatttggagctntggaattgtttgggaataagtgtggagggttttttgttcattggataacatangtttgtggctatgtttcatgatgtantttggtccatactngatgtacnattgtatattggtaaatgttggacatgctgaatgagatagctgttc

SEQ ID NO: 30287 - DNA, 469 bp, Glycine max
  unsure (1)..(469): unsure at all n locations
agctntgaagaatngcagtgcaagtcatgacacgtttaatagaatggttngatgaatgcaaacattntctatttcanatntcagtattaaattgtgctntgttatgacttaagttctcatgagctgtggatntatctcattntcctcactggaaaaaaatataagaattacgaaggtggatgctagttctgatcaaatgtattgaanatcatcttanaaagatttccttcattggagatatttgtaaaaaattaactatgaagaattgcagttcaagtcatggcttgctcaaaagaatgatttgcttgaaatacaaacatgttctattccaaatttcagtatattcttatgctctgttataaccttatgtcccatgagctatggacttatctcattctcctgattgananaataaataaattatcaanggtgtacttttgatcttattcagaatagtctcaatcattca

SEQ ID NO: 30288 - DNA, 343 bp, Glycine max
  unsure (1)..(343): unsure at all n locations
atgctccattgctaaacanagctntatacanacagagccatacgcattatttagaagaatntaggatatggatattctaatgcaggataagaatgcatacaactgataggatatgtgcatattgaccaactccctttcatattaacaaaacacaaaactctgagaataatctaacgcanaatatatacaacaatgagtaagaacaaagccaattgcccaaattaagcaaaaggaggttggcataacattatagatcatgtagatcctggtnttttcttgccagattgtcctctgatttggttagaagagaatctgaagaagagtcaacatgaggatgtggata

SEQ ID NO: 30289 - DNA, 300 bp, Glycine max
  unsure (1)..(300): unsure at all n locations
accaaaaggaaacaaacttcatgaattatacaaaacacttatccttngcatagatactacatgaatcacgtttgcatgcttgattctaaatgcaacaaggatttataaaactgcaaaacctatattctagctaggttcatcacatttatcagcatgtttttnttagattttaatctgacacattctattagtgatgggcaacacanatccatacatagtcatgtgacacgtaatgccaaatctggacaagaaaaataattttcacaagttaatattaacgataatatntatcttatccat

SEQ ID NO: 30290 - DNA, 326 bp, Glycine max
cctctccatcatgccagacaacagcatctatgacaggccctttatcatcatagctctaaaacataaaacagcatttccttttaaaagtaaggaatttcagttgacaaaattcacagagggagcgcaaacacaagtatacatatctctgttagtatgaatctttgagacgagtcagatggagattaaacaagaatttacattgttatgtgtggccaggtggaaaagatattctcaacattatttcatacagagacaatcattctatcaatatacttgttccaccacttatgagtgtcctataatgatataaattcaaatcaattatt

SEQ ID NO: 30291 - DNA, 549 bp, Glycine max
  unsure (1)..(549): unsure at all n locations
tgagactgannccnatgataaccgctggancnncngatcctctgagtcacctgccgcatgcaagcatagacatctcaagacctcntgtcttttgctttatatatntatatagnaacagacaggatagaaatagaggtgcccgccctgtttcctctgtttacgcttatntatnatnatcctttattcctctgggttcaaataaatatcataaataaaggttaacttagagaagtttaccatttgtgtacatgaacttgatttaaagctgagtgccggcatgttgtaagaactatcgagtgctctgttttgatccattcaagtctgattaacaaatgcctctaacttctggaagttctctagcttatctgaagctcttccaatgcatagctctttaaggtaatcctctggagttagtgcacctgttcagagaaccaaatctacacatcattcttatcagaacatagtctgatcaaagtctattaatctagcctaagttaatttagcatgctgtggtggttattaaaactgaaagtaaaaactaccatgatt

SEQ ID NO: 30292 - DNA, 437 bp, Glycine max
  unsure (1)..(437): unsure at all n locations
gctnagttagcacctcctcctatngatggctaatggctctctataagtgctgtctatgcattagttgatctaatagtagttgtatatgngcgcccaacaggactttctaaggagtgtgcaaaacgcatacagtctgggatgaatataattcaaggttgttcaccaacctatattgtgagtctgtgtaatattttcatcttttgagtttgatcacaatattttgcttggcatatatagccatagtcacttgacagcgctactttttactttaagtgcagaataataatgacttattatggtatgtgagatcaatatgtatgaattggctgtccaaatagccctgtgataatatntaatgttgtctgaagtattacctttcacctgcacttcaactgtctatcagtcagcagctattctatattgtccatcacattcat

SEQ ID NO: 30293 - DNA, 417 bp, Glycine max
  unsure (1)..(417): unsure at all n locations
agctagactctntccaaanactccanatacaaataggagcgtgcaagggtcctaaactaaactagttgcatagccataattaattcaaggaaaggtttgntgagtatgtngtcttatctttagttttctgtttagctaaatcagaattgcatttgatatgtnttcattatctttaattagctttagttatctcttggttaatcttatctttctgttattggtgctaacaaatgcttatatataaaggttggtctcctattcaataaatattcattctccaatntatntgagagacactttgcaatgtttacaagtaataatcctttcgttctgatgtaaacccatctgcacaaaggttgatgatgaatcttcaaggttntcttttttcttttttgttgaaattcaaaatggatggat

SEQ ID NO: 30294 - DNA, 374 bp, Glycine max
  unsure (1)..(374): unsure at all n locations
gagcgattcctttcttcttatcattntcttcatgttgattcaatctcattaattccatttcatgttcctgtaactttccaaacaaagtggcaagagacatgttagatagatctcgtgattcagtaatgattgttaccttaggttgtcattccctgcttaagcatctcaaaactntatttataagatcttcatttggaaagaattttcctaaagatgtaagatgattaattatatgagtgaacctctttcgcatgtcttgtatggtttcacttggattcattctaaataattcatattcatgaatcattttatntatcctatatctttntacatctgttgtaccttcatgtgttacttgtagggtatcccacata

SEQ ID NO: 30295 - DNA, 609 bp, Glycine max
  unsure (1)..(609): unsure at all n locations
gttgtncccttttnnccnccttgtnnncnctgtcnncctgcncgcctcaannctgntccacgaccatcagatgctagaggagaaacgctcaaccgcactcggtnctcttcnnnancnnncnnttgatgncctccgcnntcccttctnctccaacactctnaaagtttttcttgantttcntnacnccccacctcccctttcttttattcatgtatacctatagcagtgttgtgtggttttaaattttttgtacgaaggaaagggaagganaatgtttcttaatccattatgcctttttatttcaccagttngcatatctgaacattttccatttctttccctcgtgtaaagtttgttgtacacttatgtangcaatntcacatattgtcctgtntgtttggagaatancttcttgatttattatccgtatagctttattcttaatttggagatatngaccatggaagatgttgttctagacctcatgtgtgaagaacattattgccgcgaagaaagatcatatatgttctccctatgcagatgcgaagctcatgggcanangnntgagagctaccaaacaatgtaactgacatgttgtgttctacatag

SEQ ID NO: 30296 - DNA, 435 bp, Glycine max
  unsure (1)..(435): unsure at all n locations
tcttgaaatgtatgctttcatgtgtcagtgaatatgtttacatctgcatacagtagtggttgagtgtcaggtgttaattataaattggagtctggtcactctactaattctccttgtttatatctatttattatacactagtaatctctgctctaatttgtgttttagatggtaagaaaggtggacatacagcaactcctcaccctgcgaagaaaggtggaaagactcccagcagtgaagccaaagccaagactcccaacaatgaagccaagactcccatgtctggtggactctcttgcataagctgcagcangtatgattntatcaaaaccctaagctctgttntgttaaattggatcgtgactgatattcttntataaaaaaatggttttaaccaggtctttcaactctgaaagtggtctgcaacaacataac

SEQ ID NO: 30297 - DNA, 410 bp, Glycine max
  unsure (1)..(410): unsure at all n locations
tgcagcttttctttagaatactgcttaaataccataatttgcaaccataatactgcaatgcacatagccgaagacataatgctaaaccatgccactcttccatttgttatttcactcacagtcctcattccagcttccctgaataaataacccaagaaacataaattaagcatatgagaagttgtaaaantatatttgcaatanacaatntacaggggaagatgttgatgtgaatggaattaccttcccttaaanatttattgngcaaaatgaatagaataaatagaattattaacggcaaaatgagaanncaaaactgaacataaatagagctcaactggacattctgcaatggggacaagaaaaacatatccannattaccttgggtaatgaacacaaaaacagaaat

SEQ ID NO: 30298 - DNA, 342 bp, Glycine max
  unsure (1)..(342): unsure at all n locations
cctgctgatcgttttctganagccatggttgacattccatttgcatttaagcgaatggaagttctccttttcatgggctcacttatagaggatcttgcaactactatggaatcttttgccattntagaggtatgcatcatacatgcagttgcagtgcttatgctnttctatcaaatgatgatcgtgatgttaaatntttntagttcaacttaatgccaactgagattgacaatgaccttattgtgactatatcatcttaatatagctactgccaatagcaaactgtcaagtttgacagagtatgtcttgcattagtaatgccaaattgatgctgtaattaat

SEQ ID NO: 30299 - DNA, 397 bp, Glycine max
  unsure (1)..(397): unsure at all n locations
ctcacagtcacctgcggcatgcaagcttctgctctangatatacttcaagctactatggtctatcttgataacaaaacgattaggcaataaataatgtctcacattcaaatcaaatacatttaaataataagaaataagacatcataattaattaaaagttcttaatatacatttaaataaaatcctttcaaaagggtaaaaggcttacattcacttcattattaccaaataaactcgttagaaacattgtattttttgctcaaaacatcatgtaaataagcaaaactcatgccccaatgtcacatcctatcagagcattgcgccccgacgttcttcagcacaagattccttaaagcaattcacctagttatctgctcccacgaacacaaagttcga

SEQ ID NO: 30300 - DNA, 325 bp, Glycine max
gttcaatactatctcttccaagaaaagttcattgttcaaaaacttgtgctattcttcttcttcattcacttctccctttgccaaaagaatagaaaaactaaccgcctgaattcttttgtgtctcccttctctctttccaagagaattcataggattaacggcctgagaattctattgattcttcccttccccttaaacaaaagatttcaaaggactaaccgcctaagatatcttttgttttcccttacaaagattcaaaggactaaccgcctgagaatactttgttctaacacattgtagggtacatcctttgtggtacaagtag

SEQ ID NO: 30301 - DNA, 462 bp, Glycine max
  unsure (1)..(462): unsure at all n locations
tcctctcagtcacctgcggcatgcaagcnttcaagtgcgggtttaagaatcgaaggccaagtcaccgcgatatacgaggatgactccncaaggagatcnggattggtacagctatgtcctcccgatttccgactaggaaattggcgagtggaggaactcccggacgtttacgcgacaagcataatgtantcctttgtaatattaaaactctacggatgggcctaggctttagagtttccttntgttaagcattatgtcttttgtttntgaagttataatataaagatctttcttcatctgttcctgcgcctctacccattctcattcatttgcatgtttatttctttacgcttaaaaatgctagatccgatgacgagtccctcgaaggactaatacccgggacccagccgtcaatttcgagcaagaagcgggtcggatggagagtgaagaggacgaggatgt

SEQ ID NO: 30302 - DNA, 502 bp, Glycine max
  unsure (1)..(502): unsure at all n locations
gcttgatgggtcgaaagaatacattttgtcatatcaanagggggagaatgtgaatgtatgtatacatgattntgatgatgtcataagaagaatcaaataaagttgcttcataggataaacatggcttcaagattaatacaagattgcttcaacaaacaaagccttgtgtcataccctaatttcgtccggggacctttgcttgatgacatgcaacttttgtttggtccttgtgaggtgcttggcacccgtcattaggcaatttgtgaaattccgggacatgccgganaacaaaagaaaatattgatgcacaatccgtaaggttccgtgacacaccatatatcaaatggaagcatcgttgcacaattagtgaggttccgtaacattccgtaagtcaaaaaggggatgaatatgtaatccgcaaggttccgtaacattatggaaagataacaagtatcgttacgaaattcataagtttccgtaactttacgaaaaaagaatcaca

SEQ ID NO: 30303 - DNA, 428 bp, Glycine max
  unsure (1)..(428): unsure at all n locations
accgcgatctcaagtcaccgcggctgcagctgaggcaactgatgcatnggtaactgggtaacccagctggccttgaaccagaaatctgtacctgtcgcaagggtctggtggttgtgctcctctgctgaccaccatacaaacctttgcccttccatgcagcaacctggagcaattgagcagcccgaagcttatgctgcanatatttacaatagacctcctcaacctcagcagcaaaatcaaccacagcagaacaattatgacctctccagcaacagatacaaccctggatggaggaatcaccctaatctcaaatggtctagccctcagcaacaacaacaacagcctgctccttccttccaaaatgctgctagcccaagaagaccatacanttctncaccaatccaacaacagcaacaaccccagaaaca

SEQ ID NO: 30304 - DNA, 306 bp, Glycine max
  unsure (1)..(306): unsure at all n locations
tctacatgagtacaggttcgtaatgacagtgctgaacgtgttgaagaataaatgtgctcatttttntcttttttccttaattactgtgttaagaaatttatcttctgccatttttgctacaagagtgttgttgatttccttttgtttctgttctattntttttcgtttattatttaaaaaatgatgttctgccatctttgctacaagagttgttgctgatgttttgcaacaatatgattcacagagcagtgttaaagaataaatgttccatttttatctatttttcccctttttttctaatttttt

SEQ ID NO: 30305 - DNA, 321 bp, Glycine max
ttatgagagatgagagcttaatactgagaaatgtgagagaaagagagggtgcatatctgtcatctgagaagataacttcatgaaataaactacttggacttaattgattatagctatagtcttcagcaagttctacaatgccatccgtgcttttcaaaaacaataattaactagctttttattcattttttgacaagaactaattatataactagctagtaactaccctttaatatcatacttagcatgttaaaaactacaagtagtaattttgcgtgtatttcggctgggaaatcgatcaatagctatcatacactaata

SEQ ID NO: 30306 - DNA, 337 bp, Glycine max
ctgcagcttgatgcacatttgagaggtaatgtacaacgatatgatgcgctccatgagaggttggatcaaatggagaatagagatcatcatgaagaagaaaggacgagaagagggaatgatggtgttcctagacataaccgaattgatggtattaaactcaacattcctccatgtaaaggaaagaatgatccggaggcctacttggagtgggagatgaatatagagcatgttttctcatgcaacaactatgaggatgaccataaggtgaagctggctgccacggagttttccgactatgctctagtgtggtggaacaagctactaaaggagagagcaa

SEQ ID NO: 30307 - DNA, 576 bp, Glycine max
  unsure (1)..(576): unsure at all n locations
atctaggactactgtatacatgataatttttaaataattgntaacaantatcttaacatntatccacgattatagatgtattgaatcattgatcgccgttgttacngtcacttagacactcaagcttgtcgatatgtcatgcgtctgaatcggacgtgcgagttattatatactcgattacaatgtcccgagagctagcgctgttcaattactagcatctcgagacgctatgtgcctgaatggacgagctactgataagttatgacgctttgaatatgtcgagagcttacgtgcgtaatattggcgtcgagatcgtatgcgcataattgacatcaatgaaaggttgacattgagttctcgagagctccttaggcaatggaagcgtctcatctgtatgtgcctaaggggatgccgtaaagtgatgacaatgtatgctcggacatagtgacattatgaggtgaagctagctctaaagacggcaggaaatctactcttattctgaaggtcgtgtaacacagatccgttcgagccaatcgatgaagggaacctgacataatttagggatcggagtgttcc

SEQ ID NO: 30308 - DNA, 450 bp, Glycine max
  unsure (1)..(450): unsure at all n locations
ccgcgatccttgagtcacctgcggcatgcaagctngacagtattacanatctcaattgtataagcaaagacttggactttgatgttntgatgatgccatatgatcatgcacnttctcaagtttaattcaagaaanaaatccaagaaattcaagatacatcatcaagaagatctctagtgatttaggaagggaattccaagttgaaaaagcaagaggtttggccaatggaattaagcaaaaatggttttacaagagatntactctctggtaatcgattaccagtggccaaaacactttctanaatgttnttaaaataattttgaatatttttgaaggcatgcaatcgattacatgaggattgtaatcgattaccagcagctgataatgttacaacagtcattagaaatttgaattcataatgtataatgtgtaatccattacacatggatg

SEQ ID NO: 30309 - DNA, 324 bp, Glycine max
  unsure (1)..(324): unsure at all n locations
aacagaaaacgcaatngaagctaaagacagtaatgtaaatgaaacaggagaaaataatggcacatcagtacctgatggatttgctttgggatactacttgtatgtgtggatgcaaaatctaccggcaagtgcatcatgttgtcaagtaaatatttaatacggtgtgaatcgagtatcgaactcatggaacttgttcatatggtaaaggtatgttcaataagcaggcatttgcaaacagacatcatgattgtgaatgatagtaaaagtatgttctatcctaattacaaagcaataaacgtggtgaagtaagtgtgaacataaata

SEQ ID NO: 30310 - DNA, 450 bp, Glycine max
  unsure (1)..(450): unsure at all n locations
agcttatctcagatcagtttatgaacanaataaacctccttataaatacatgtttcactccaaccaaatgcatagatngcacattgttcagtccctcaagctcatgcaaagatgggaaattacaaatatttacattctttcaatttgcattcaaacaaacacaaacacacatatatattaggtggaacaatgtaatattaatttgaatattgattacatatatactattttccatgatgatataataacttgccttgtgacaatatataccaacaacccagttgtttaaatatttcatcanaaatgcttgcatggttccattcttttctctcttcacatactccaaataattcgtatgaattatccctataactagcctgaatntagtcttccatcttttcccatggtgataccatgtcaagtgctcgggctcctctagaacagcaatat

SEQ ID NO: 30311 - DNA, 385 bp, Glycine max
  unsure (1)..(385): unsure at all n locations
agagagaaatgtggatgtaataataaggccatattagtaatagtggtgttgtttatttactaaaccttcgcatccaaatatcaagtatatgctcaattaacatttcaccggtcataccaacatttaactgagatattccaattcagcaaaagacagaaaacaaacatcctatactaaaggcatgtgagatatgctgtgtaaatatgtacacagtcatgtcaatgattattcagtaaaatcatcaatagtgtatgttgaacaatataaataacatggaaattaatattntcatcaaatagactgtaattntatattattgaatgaattgtnccaatcaagcagatntatgggtcacataaaagttggagaaagctaatgtgtggag

SEQ ID NO: 30312 - DNA, 412 bp, Glycine max
  unsure (1)..(412): unsure at all n locations
agctngtaaagaactagaaanaatcaagaacaagcttgttcgcacatcgttcgcgtgtatgatatccactccacaaggtntgaagttgaggagaccttcaatcctattacgcaacgtggcggacaaaagtgggctgttaacttgaatggtcattattgtcaatgcggaagggattctgcgcttcactatccatgttcacacattattgcagctcgtggttacgtgagcatgaactactaccaatatatagatgttgtatacactcgggaataagttgttgcatcccaaattgtcgcaacactctatcggggtggtgccactcaacaacatggaaacagaataagtggtaccacccgngcaccacgctacgctaccaaccanacatatcgatggcacgacgacataatgcttg

SEQ ID NO: 30313 - DNA, 306 bp, Glycine max
cgcattttacacggactatatatattggctcgtacctgtcccgcggacccgcggttcaaacggaccggtccgcgggcctagttataaagaaatatcaatatcaataaaaatgtaacacaatctgattataattaatacaaatgtaaagtaaatctcaacaatcaatcaataacatcatataaaatatacaatgtcttaacacaaaaaaataccaccaacaaactttaattattgagacttagacatctgcaacaccaaatgatctcatatttgaagtagtttgagtcttctccatctacacatctt

SEQ ID NO: 30314 - DNA, 314 bp, Glycine max
  unsure (1)..(314): unsure at all n locations
ttagagtcacctgccgcatgcaagcttctaaggaagttntctcanagaagcttctcaaggaagttntctcaagaaagcttctcaaggaaactacctagtctataaatagaagcatgtgtaacacttgttgtaactttgatgaatgaaagtcttatgagacacacttcanagttccacttctcttcctcttttattccttcaatttccatcntcccccttctctctttcttttcctccattgaagcatcctctccaagcttcttatccaaagctcatcttggtggtgnactccttctccatggcttattcttaat

SEQ ID NO: 30315 - DNA, 369 bp, Glycine max
  unsure (1)..(369): unsure at all n locations
tctcggctcatgctgtgaacgcctctagctcaacacccgtgcagcctattgcacccacccagagggaagctccccaagttccaactccaaacgcgactcgaccggccggtaattccaacacgacaaggaacttccctccgagacgcgtgccgaaattcaccccgctcccaatgacgtacgaagatcttctaccatccctcatcgccaatcatttggccgtggtaactcccggaagggtcttcgaaccccctttcccgaagtggtatgaccctaatgcaacttgcaagtaccatggnggtgccccggngcattccatcgaanaatgcatggcccttatatacaaggtccaacatctaatggatgccggat

SEQ ID NO: 30316 - DNA, 471 bp, Glycine max
  unsure (1)..(471): unsure at all n locations
agcttctagccaaatggacttaccctgacttaattcctttgatagcccttttgagcctttgttccctttcctttgtttgaagctcactacaagccttaagtgataaaccatgatatcaccatatccttaaggaattntggagctttggaatagttttgggaataagtgtgggggggttttgttcattggataacatgttttgttggccatgcttcatgatatattttgagccatacttgatgtacattgcatattggttaaatgttggacatgctgaatgagatgctgnttctcanaggctacagagtaaaaataaaatcatataagaaaaagaaaacagtanagtgagtgaatagatcttaatgacnaagatgatagactctggtctctcttatgttaaatttatcttactcttttatttctaattttctaaatcactattctcatgtacttatctttggatcagcacta

SEQ ID NO: 30317 - DNA, 396 bp, Glycine max
  unsure (1)..(396): unsure at all n locations
atatgaacactntggtcaatntcaattatgatattaattntttttaaattatatataannaacctaaaagcanganaaagagaaaatacaaaatcaatatctctctctaaatttctccttattttatttcatcaattcatattaattagaaaaatactcgatttatagggttcacgctcaacacaataacatatcaatttcacaataattggtctgtcaaacatatataattcactgtaataattataaggataaaatgaanattgcaaaaacaccccanaactcattccaatggatatctctaaggatccctacacgtgttctcactaattcccaattgtgaataactcatcccttacctctgggctcacatgtcttcagccagcgatagtagca

SEQ ID NO: 30318 - DNA, 274 bp, Glycine max
  unsure (1)..(274): unsure at all n locations
accggtgagagtgtngaactaaactgtgagtgaatgactnagcttgagtnataatctttgcatgaatctctgaattttagaatgaaatgtataaatgagaacatgatgaaggccatgattgtacatacacaggacttttgaccaanaaactttccttgaatgttaattatatcctttgcaccctttttgagctgaatgatatttgtcaaaaatttgaaccctgaacttaaataagtatctnctgataccttgcttagattctaggagagcatat

SEQ ID NO: 30319 - DNA, 207 bp, Glycine max
gcttcccctgtgtgcatttgtgtaatacattatcctgtgtatgatgatcacgggtccaaggcagccagggaatgatattgatgtgtatcttacaccattaatcgaagacttgaaaaaattgtgggaagaaggagtagatgtgtgggatgcaaatgtgcagcatacattcacattacacgcaatggtgttttgtactattaatgattt

SEQ ID NO: 30320 - DNA, 430 bp, Glycine max
  unsure (1)..(430): unsure at all n locations
tgaagcttccatatgttgagtggtgcaaccctctttagaatatcactcatgcacccaacatcttcatgatttgtgtacatagggactcattaagtaggtttgttcttaatttttgtttcaatacaaacttaagtgctcatatgggacaccttangtttgtcataatattttgtaggaataatcaacatgaaaataaagaanaaggtatgttntattcaattactttccttaactnttaaaataatgatcaagggcttcccatggaccctgagagaataatggtcattcctgagtggcctactccaccatgtataagggacatttgnngcttcaatgacttaacanacttttacaataggtttgtctcatatttttctatacttgtagcaccactcattgagtnggtaaagaactatgttctctcatggga

SEQ ID NO: 30321 - DNA, 386 bp, Glycine max
  unsure (1)..(386): unsure at all n locations
gaaagaggaagtgtagaagggtgaaacttcttgttattattcgttgaccacagagtggtacctggagatatgtcgcggnggtcaggagaccttgnggatgtcaggtggtgtgctattacccaaaaccaagcttgaccaatcccgacccaacccgggcatagtcagtcagtgagaacctgcgatgtacctaagcaggcgagctcctggcagtcaacagataaaaagaactaagaccacaaagcanggaggcttgtgtggtggctggccagctgtgaatcttgtgtgatatatgggttatggcctctggtaatcgattaccaagggtgggtaatcgattacaaggcttaaaaatgaagacaggaggctaagatggtctttggtaatcg

SEQ ID NO: 30322 - DNA, 453 bp, Glycine max
  unsure (1)..(453): unsure at all n locations
gatcctctcagtcacctgcggcatgcaagcttctcccncaattntctataaataggaggagaagtgatgtagaatatgtgttcagccccttaggcacttctctctctctctctcgagatagatgaggaaaattagttccgtgaagaatattcaagccgaggcgcttccgtaacatttccgtaacgtttccgtgagtaattactcgaagatcctcgaccgttcttcaagattcatcgtttgttcttcgttntcttcagtcttcaacgggtaagtacctcataccaagcttctcatttcattctatgtacccgtggtggtccacattnntgttcatgtatatttattctcagtntcatttactttttatacccncttttgacgtgcttaagccatttatttaagtcatttctcacttattctaaaaataanataaatttccaccgatcgtttgaa

SEQ ID NO: 30323 - DNA, 365 bp, Glycine max
cttcctgctattattgttgaccacagagtggtacctggagatatgtcgcgggggtcaggagaccttcgggacgtcaggtggggtgctattgcccaaaaccaagcttgaccaatcccgacccaacccgggcatagtcggtcagtgagaacctgtgatgtacctaagcaggcgagctccttgcagtcaaccgattaaaggaaaacaaagaccacaaagcaaggaggcttgtggtggctgaccagctgtgaatatgtgtgatatgtggagtatagtctctggtaatcgattaccaagggtgggtaatagattacaaggcttaaaaatgaagacaggaggctaagatggtctctggtaatcgattacca

SEQ ID NO: 30324 - DNA, 248 bp, Glycine max
  unsure (1)..(248): unsure at all n locations
cacacatatgtcctattcggngacataactcatctagacgctcgaaattgaacaacgcaagctctcgagacattcgaatgtgcataacatttcgcacaaatgtccaattctgggacataatatatcaagacgctctaaattgcatagcggaagcactcaggaaattcatatggtcataattattcacatggatgtccgactcgggaaaataatatatcgtgatgctctaaattgaacaacgagagcta

SEQ ID NO: 30325 - DNA, 408 bp, Glycine max
  unsure (1)..(408): unsure at all n locations
aatgacccactaacttagaattaanataacttaatgccattaatctagggaattaaaagaacttaatggctgagtgtaactgaaattgtggcaaccaaaagtcacccgcaacagccaacaagtcagccaccatttggtctcccataaggctgatgcctaggttgccaattgggcccttattacaacttgaactaaacctactaaagcccttntagttgattaacccaaaacatatttttggtcagccaactttacaaggattgggccattatttatacaaactaaacactctaaaattgagacaaagtggtgccatttagtcctcatccatttgggccatgatacaactcacaaccttggactgttctccttgaaacttgngcttgtattcaaatagtatggacagca

SEQ ID NO: 30326 - DNA, 284 bp, Glycine max
agcttctcggctcctgctgagaacgcctctatctcaacactcgtgcagcctaaagcacccacccagagagaagctgctcaagttccaactccgaacgcgactcgaccgggcggtaattccaacacgacaaggaacttgcctcatagaccgttgcctgaattcacccccgctccaatgacgtacgaagatcttctaccatccttcatcgccaatcatatagccgcggtaactcccggaatggtcttcgaaccctctttcccgaagtgggatgaccctaatgcaac

SEQ ID NO: 30327 - DNA, 188 bp, Glycine max
  unsure (1)..(188): unsure at all n locations
gtatgttgctggattaatatctcgatgcacgatatgtggttcacactccttgtgcaaataagctaatccatgagctgcaccctgngcaatcttgagtcttacatcccattttagagctgaagttccatcctcactctcatgcagccaatagtcaaggctttcattctccaagtaggagtaaataaaca

SEQ ID NO: 30328 - DNA, 157 bp, Glycine max
  unsure (1)..(157): unsure at all n locations
aaattacgccccgcctgccatcattcaggactgttgtatgattancattctgcgacatgtagccatactacagatgatgaactgaatcccgcggttctgcagcttgcccttgcgataataatggccatggtgaaagcgaggcgatgatgtttcttcg

SEQ ID NO: 30329 - DNA, 368 bp, Glycine max
  unsure (1)..(368): unsure at all n locations
agcttctctggattccatgtgaagcatatgtttatattaatggaaaacaaaagcagtggtcatgacccattntatgttnttagctntcccttgatgctgctatatgctaaatcatagcaatgatttggtaattacagcagagctaatcaagctattgacttgaacaggcgttccggctaatacggtttctgctatgacatgaaagcagataaagaatatacaaacagccaaataagccttcatggatgaggccaatggcatatggttatcaagtggtggagcataacatggccagagatggttctgatgattcagttgtggcacagagagagganatggatcaaacagaattatgcgtatttggaatc

SEQ ID NO: 30330 - DNA, 318 bp, Glycine max
  unsure (1)..(318): unsure at all n locations
atatgcttaattaactatcacatcattattagttgcaggctntgatatgcttaattaagagatatttattagttttagggacaaataacatttcatttagatcaagtaatctttgatgggtactaagcgttatggagctagtggcaaggatctctcaagtttatcaccatgacctcctgctagagtacgtactcttaccatcatgatctaaaatttcttgaaacggattggagtcgggaatcacctaattgcttgcaccactatcaaaatacccataaccatttagaaatgaattttgtgagtcaatgagagcattat

SEQ ID NO: 30331 - DNA, 366 bp, Glycine max
  unsure (1)..(366): unsure at all n locations
agcttcaacctagaggagacggaccattccaagtgttgtataagatcaacgacaatgcctacaagaatgacttgcctagtgagtataatgtaagtgccactctcaatgtgtctgatctatctctntntgatgcagatggaggagccttggatatgaggacaaatccttttcaagaacgatggagtgatgaggacataaccaaggaccatgaagcacttgaaggtcccatgaccagaggcagacttanacaagcccaacacgtcatagagacaaagctggtcatttgtatagctgccattgatgatgattgaaggcccaagtgcagaaagatgaaagcccanaggcagaggcactaccaagactact

SEQ ID NO: 30332 - DNA, 347 bp, Glycine max
tatgcgcacacttctgtacgaacgttcacttgcacatgacattattatatctaatatatatgcacccatatacaatcattgcaccttcgttacctataatattcacatgtacttccatggtgtatttgttatctacatcacacacatttcctttgctaaattcacatacatgcatactctaagcactgtggctatcaaaaattgcatacgtgcacatcttggtatttctcatacctatacatacacaaactatatgatgaatcttgactatctacacaataaggcgctacatttcatgctattctcaagtgtttgtactacctaaagccgcatgcaaattgaagtat

SEQ ID NO: 30333 - DNA, 329 bp, Glycine max
  unsure (1)..(329): unsure at all n locations
agcttagcccaagaggagatggaccttctcatgtcttgtagacgatcaataataatgcctataggttagacctcccaagagagtatggagtcagcaccacttttaatatttctgaatttaattcctttgcangtggagctgatatagaggaggaggaaccaacagatttgaggtcaaatcctcatcaagggggagggggtgatgcaatcctccctatgaaaggaccagttaccagagccatgagcaagaggctccaagaggattgggctagagttgataaagaaggccttanggttctcatgaaccttanggtagaattttgagcccat

SEQ ID NO: 30334 - DNA, 357 bp, Glycine max
  unsure (1)..(357): unsure at all n locations
gctcgcccaggcangcaaggagggcccatgttggcctgattgctatntgcacccacacttttactaaatacacccatgcctttcttttggtgattatttttcgtaaagttacggaaacttacaaatttcgtaacgatacttgttttctttccgtaatgttatggaaccttgcggattacataatcatcccttttntgacttacggaatgttacagaacctcactaatcgtgcaacgatgcttgcttttgatttccggtgtgtcatggaaccttacggattgtgcaccaatattatcttttgatttccggcacgtcacggaaattcacanaatgcctaatgatgggtgccaagcacct

SEQ ID NO: 30335 - DNA, 203 bp, Glycine max
atcacactataagacctaggcgacacatgttcgatgatgagcatgaccaacatatatactactgagaaggtacataacctaaatcttatatgtgtacacacattaatttattaaatgcatactatatactatttatacaagtcttattcacaaattaaatctgaccatatataatgtgcaaagagtgtgtggctagagttatc

SEQ ID NO: 30336 - DNA, 343 bp, Glycine max
ctaaccaaggtaagccattattcacacttatccatttcttataaaatggcactatcttcgcaagattaatttgagtctcctcagatggtcaaagaagtgaccatgttaaggaatgtacttgggtatgtaattgcgataataactcacaaagtgaaatcacctcgagtaaagtgtcaacatggcttatcatgatacttatatatcgtcactcacatttatgcctacagaataatgcgctactcgatgagttcgtgtatgtacattgatattgaaagtgtgacatttatctatatacacatcattacatatatatatatatctcttctgaatgaactcacgcatt

SEQ ID NO: 30337 - DNA, 350 bp, Glycine max
  unsure (1)..(350): unsure at all n locations
agctagcctcanagaggtccaggaaggacaaggcagccgaatgagctagttccgctctggagtatgacagtcaccgctttaggagcgctgtacaccagcagcgcttcgaggccatcaagggatggtcgtttctccgggagtggcgcgtccagctcanggacgacgagtatactgatttctangaggaaatatggcgccggcggtgggcatcactggttactcccatggccaagtttgatccagaaatagtccttgagttttatgccaatgcttggccaacagaggagggcgtgcgtgacatgagatcctgngtaaggggtcagtggatcccgtttgatgccgacgctatc

SEQ ID NO: 30338 - DNA, 223 bp, Glycine max
  unsure (1)..(223): unsure at all n locations
acccgtcacatgtggtactaggtggcgatcggtcgatggtgcanaacaactctncacatncacaaatcacgcataaacccaccattcncagttgcccaccttcaactgagctcacgtactcccacgtagcccttatcctcattcctctcaacacacggtcgccatcaatctctccaagcttncacaacacccaagcaatacataatccaaacatcatgaacta

SEQ ID NO: 30339 - DNA, 321 bp, Glycine max
  unsure (1)..(321): unsure at all n locations
agctagagtgctcttgatgttnntagtgtttgacccatgattntgatataattagtgtaaaatattgaggagttntatttcctcatgtgtgataatttgaaactgtgattaaaggtgaatgtgtattaagatgtgagctatggactgtgcaatcacacaaattgatagaccatttaataggcgacgagtatttttgatgggatccactgtgggaacccgacagntaaaatgatattgaaaacaattgagtagttgtgtgtattgcatggggtataggtaaagagtatgtgattcatgaagagtgttagcacttgatatgac

SEQ ID NO: 30340 - DNA, 342 bp, Glycine max
  unsure (1)..(342): unsure at all n locations
acacatgttttntttcagctntaaagttatgcagtagtcccacagatatgaagcatttatagtagcatgtactatgtcggatctaccttcctttgggatgacgagaataattttcccgaaatcacctccaaacacaacaacttttccaccaaatgaaccactgtcagaattagacatgcacatgatgtcattcaatgttntatctaatgcttcataacaaacttatgagccataggagcctcatcctatantaatcaattgattgcctttaacaattcaacttgttctgtaccttggtggatattacatgtggagttgtccaatataggcaccatgaatagc

SEQ ID NO: 30341 - DNA, 450 bp, Glycine max
  unsure (1)..(450): unsure at all n locations
tcacttctacatctcatctctagcatgcattttctttctntacccactcctcacgtnntggtttttagggaaaacaccataactaaacgcgccgcaagggatccctatcgcaccagatccaaatctagaacgatgggtgatcaagaggagacacaggaacagatgaaagccgacatgtcggctctgaaagaacaaatggcctccatgatggaggccatgttaggtatgaagcagctcatggagaagaacgcggccactgccgccgctgtcagttcggctgccgaagcagacccgactctcttggcaactacgcaccatcctccctcanacatagtaggacggngaagggacgcactgnggcacgatggcagccctcacctgggatacaaccgagcggcttacccttatggatnggccgccaactattcaccacccatcttgcaagaagat

SEQ ID NO: 30342 - DNA, 419 bp, Glycine max
  unsure (1)..(419): unsure at all n locations
tgttggatgagttaaacatacccattctgttntatgtgtttgtgatgatgtttgtgatgttgtatgctgaanaactgctcatggaaaactgttagagatgaaatgtagagttaacctanggttggaaagtgagaatgtgatgttatgagtggaaaaagagtgaggctttgagagttggaaggttaagtctgaattctgtggtaaatggaggttaaagtgagttaatactagcttgaaatgtcattntggacttatgagaaagcttggactgtgctagggagaaaaacaaatgaccaaagtgaaccaagagccatttctatggcaaaattgtgtgttgaagagtcaaattttgattcggtggagatttaggtgtaaatccagtttgagcacgtntagatggatgttatggactggtgtga

SEQ ID NO: 30343 - DNA, 360 bp, Glycine max
  unsure (1)..(360): unsure at all n locations
ttctgggggtgaagctccttcttccttggcttattccctagtggatggtgcctcccctatcctcttctcctttgccttccgctgcatctccatgantgaaaatcaccattgaaggacctcattgaagatcaaagatccagcctccatagaagctccacaagcaagcttccatcaagttatgaccatttgaatctctcgagatcttccgtgggtcaatntcgggcgtctccatatgtcatgtgcctgaatcggacctnncgtagaaaaattatgaccatntgaacttctctagagcttcgcggtgttaatttcgagcttctcgatatctgatgtgcctgaatcggacatncgagtgaaaag

SEQ ID NO: 30344 - DNA, 440 bp, Glycine max
  unsure (1)..(440): unsure at all n locations
ccgatgatgccgatcgaacatttcctaatcgacatcatgcaattgttattcanggattgaatagaataaccaatggccggtgtctgtcgttatatgaccccgactgatatctttcagccgacattgcgcaatttcttttacaaacgctggccgataatgtttttttatttacggtagaggaagtattttgttttggtgttgcctaaaaaatntacaacgtatgacggctaggtttttcggtgcgagctcaaccgagggttcgttccgaccgacactggcatgttgttcttctcatttaggaggataagaaaacgttcgcccaccccggcaaaaacaaataanataaaacattattcacgcatattgataaaataaatgattgctgacgtctgcatggagagatgaccgatcgaggtctaaataagaaacatcaccggatg

SEQ ID NO: 30345 - DNA, 372 bp, Glycine max
  unsure (1)..(372): unsure at all n locations
agctntacagcagaatttagtaatgacccactaacctatatataannataactaatgccattaacctanggaattaaaaaaacttaatggctagtgtaactgaaattgggcaaccaaaagtcacccccaacagccaacaagtcagccaccatttggtctcccaaaaggctgatgcctangttgccaattgggcccttattacaacttgaactanacctaactaaagcccttttagttgattaacccanaacatattnttggtcagccaactntacaaggattgngccattatntagacaaactaaacactctannaatgaaacanagtggtgtcatttagtcctcctccattngngccatgatacaactcac

SEQ ID NO: 30346 - DNA, 304 bp, Glycine max
  unsure (1)..(304): unsure at all n locations
cttcactcgcatgtgcgattcatgcgcgtagcgtattgttattctctatatctaacanaggaagctctcgagaagatctaatggacatcaactttcactcgcatgatccatgcaggcgcataacatattgagacgcttgaaaatgaacaactgagtttctcgagaaattcatatggtgataactcttaactcgcatgtccgattcatgcgcataacatattgagacgctcgaaattgaacaacggatgttctcgagaaatttagatggtcataacctttcactcttatgtgcgatacacgcgca

SEQ ID NO: 30347 - DNA, 348 bp, Glycine max
  unsure (1)..(348): unsure at all n locations
agctagacgatgcacgagattcttcgctgctgggcggtgggtgatcaagtntgatggcgtggagaaatgtcgtggctgtcccattttatcgctctcaagacactgaagttttgttgacgcttctgatgcattttctctctatctgaatgacaggttccgctggtcgggatattgaccggccgaatgatgttatgctcacacaaaattagtgtcttatctttacttcgctcttatctccaataaaagattagtaaagaggggcaactgtcataccctacattcgtctggagaccattgtttggtggcatgcaaccttcgctggaccacctcgaggtacttaacacccat

SEQ ID NO: 30348 - DNA, 369 bp, Glycine max
  unsure (1)..(369): unsure at all n locations
ctcgccaggcgagcagggtgcttcctccagaagcataagccttctggaggaatcttctggagggcccaagtgggcctggttgctatttgcacccctatctttactaaatacaccccctttctatatttttggtgattctttttccgtaatgttacgaaacttttacgaatttcgtaacgatacttatttttcttccgcaaggttacaaatccttacagattatgtatttactctnttttagctntcgaagaagttacggaaacttacggattgcgcataaacacctcttttcgacttctgccacttacgaaatttcacggatcgcgcatgcctgcttnctttagatttctgagacgtctcgggacttca

SEQ ID NO: 30349 - DNA, 365 bp, Glycine max
  unsure (1)..(365): unsure at all n locations
agctntagcattataattaccatttaattatattctattgacaagagatttctgaggaggagtttcttgctttttggataacacataaagtgtgtntagtaactattataaatcaattcttactagtgttgatggtaccatcttcattggtgacatctatgcgagggcagtctcatatttcattggcttgtggagtggcgtcgccacatttatcatttgggactgacgagagtaacatttccatccatatgtttagctaaatttgtacttaaattgaaagggagttcatgaatacatctattctactggttctttatgtcccactgcgattatcatattacttatagtcattattaggttactca

SEQ ID NO: 30350 - DNA, 375 bp, Glycine max
  unsure (1)..(375): unsure at all n locations
gcttctattttaagataaataacacaaagggaaatattttttagagaatataatatttatggttatactccaaattattgtatccaactcttaatntaaagaatgtgtatagtaaaaaaataataaataataaacaacttctacttattttntattntaacttaagtaactcttaagaaagagaaaaataataaagctgggccaaacggtatcttagtattaaatatggaatgagctataaatgcatgttggtatttaacaaggatgggccaaattccatanagataagaaccgggtgaaaacaactataaaatatgttntgtctaaggaagagaatgacattctctntgtctgaaagggagaatngatgcaatc

SEQ ID NO: 30351 - DNA, 373 bp, Glycine max
  unsure (1)..(373): unsure at all n locations
agctngtgcctcttcatgtctggaatatgaatgtagcatatagatccaaagacacttagatgctttgctgatggcttcttcccgttccaagcttcaattggagtcttgtctcttacagacttagttggacatatgttgagtatgtaaacagcagtgtagactgcttcagtccagaatgtgttaggtagtcccttctccttgagcatcgatctagctatttccataactgtgcgattctttctctcggacactccattctgttgaggagaatatgcgactataagttgtcgctctatgccttcatcctcacaaaatatttaaactcgcgagaggtgtactctttgccgcgagcacttcttaagtactttatcta

SEQ ID NO: 30352 - DNA, 392 bp, Glycine max
  unsure (1)..(392): unsure at all n locations
ctgcactgctaaacatcttgagaataggtgttgaaaatgaagagtntgcttcctgtttactctatactcactataacaaaacctttaaaattatttgaaaggagttcttgcagtataaaaattgaatatagaaaaggaatagactggttgatagcgatacaagagatgatcgagaatgtaatgaattaagcaaattaagaaacactactaactgtaacatgtccttaatctctgtaacactgtaaagtctcaatcttcgaactatataatgggaaaaataaactatgaaggaatggcacgctacatgcatgatcacaaaactgaatgcgattatgcttcagaaatgcaatcaagagctcatgcttattacaaatcagaatgaatcataaatg

SEQ ID NO: 30353 - DNA, 590 bp, Glycine max
  unsure (1)..(590): unsure at all n locations
agtgtgatcccttagaccctcgacncgcgatccctgagtcatctgaggctgcagctgaagacacaagtcgggacttgttgtactcttgataanatcgacatatgagacgatagtacgctatctaacagatgcaagcaatctaagacttgtgaacgaagatagatcacttattntataattgcataggcacgagaaaagggatgagacgacacatcataaccggtcacagaacacgagaagaccacgagaagataataatatgttgtggccatatagagagctaaatgattaaagaaatatctcattgctcaattatatgaaatactgatggagttgggacacaatacgatatgtcataacagtaatcatacttggatatgggtagatcatgtacatatgagcagtgaacaacataccaaggtattaatacttcatattcatagatatactccatgcttacaagcttgagacataagcagtaccttgtaaagggggagacatgattgtggaaaaatagatatgccatttatctgtcatattgatataaaattgttgatgagttgacatcaattgcatgtgtccaatgattn

SEQ ID NO: 30354 - DNA, 237 bp, Glycine max
  unsure (1)..(237): unsure at all n locations
agctntgagccanaatcctaacacaccatataccttgacccgggatgagaatttccatcctcgcccttggaagaaaacanaaaaagaanaagaaagttcctgatcaaagatcggaagaaaacanaaaagaaaaaagttcccgatcaaagatcggaagaatacaaaagaagaaaaagttcccggtcaaagttcagaagaaaacaaagtgaaaaagattatccctgatcaaagatcgga

SEQ ID NO: 30355 - DNA, 403 bp, Glycine max
  unsure (1)..(403): unsure at all n locations
tcttagtttcagatgatgcagatgggtntgtagctacctcatgcactcctctaatgactatggcatcattattggcgctaaactgctgngagttggaggccatcttctcaattaaatttctggcttcagcaggagtcatgtctccaagggctccaccactggcagcatctatcatacttctctccatattactgagtccttcataaaaatattggagaagaagctgttctgaaatctgatggtgagggcaactggcacatagtttcttaaatcgctcccagtactcatacaggctctctccactgagctgtctaatacctgagatatctntcctgatggctgtggtcctggaagcanggaaaaaatttctaaaatactctcttaagtcatcccagctcgtgat

SEQ ID NO: 30356 - DNA, 136 bp, Glycine max
  unsure (1)..(136): unsure at all n locations
tagtctataaatagaagcatgtgtaacacttgttggaactttgatgaatganagtcttatgagatacacttcanagttccacttcttttcttcttttattcctttcaattcgtgctcccgccttctctctttcttt

SEQ ID NO: 30357 - DNA, 232 bp, Glycine max
  unsure (1)..(232): unsure at all n locations
tcggacctcagtgtanaaagttatgaccatatgaatntctcgggagcttccgttgttcaatatcgagcgtctgtatatgtgatacgcctgaatcgaacatccgtgtgaaaagttatgaccatttgaatttctcgagagcttccttggttcaattccgagcatctcgacatattgtgtgcccgaatctgaccttcgtgtgaaaagttatgaccattagaatttctcgagagct

SEQ ID NO: 30358 - DNA, 448 bp, Glycine max
  unsure (1)..(448): unsure at all n locations
atcctctcagtcacctgcggcatgcagctangatgagtgatagtntctntaatattagagcttatattattaattcctagactctcactntcttttccttgtgtgntggtggcagagatatgattcatnatttaccanaatcagttcccaagattcaaanatggtcagaggtgactttggctccttgcgtgattatgatttctgggataagaaatcccgtcaggatataaatcanaggagaaatttttagagttntaccaatcctttgcatcacaagaactcttccctgnatgtgctaacagatataaataccaaatcccaatttctttctctccatgctcacaccttcatttcaagcatccatctaagattacccgataagaagtaactctcaattccctggacatattggccatctatcttcttaataatatagtttcacttatct

SEQ ID NO: 30359 - DNA, 446 bp, Glycine max
  unsure (1)..(446): unsure at all n locations
gaaaaaatcttcataaattagtcacttgaagaattgtgacttttggaaatatatntttcgaaattagtcactggtaatcgattaccattaaggtgtaatcgattacacatcaacagatgcaactcttcactttgaattttgaatattaaaatgtttagaagctctggtaatcgattacaagtatattgtaatcgattacacaagtttaaaatactntaaaactgtttaaacataagttataactcttgaaatttgaaatattaccgttttaagacactggtaatcgattactgccttctggtaatcgagtaccagagagtataactctntggtaatgattttgtgaaaactcttatgctactcacatatttgaacaactttnttagtactaacttcgatgatcttctcttgatcttgatcatgacttgatattcttgaacttgatc

SEQ ID NO: 30360 - DNA, 362 bp, Glycine max
  unsure (1)..(362): unsure at all n locations
atgagttaaacatacccattctgtnttaaggtttntgtgatgatgtttatgatgtttatatgctganattgctgatggaaaactgntacagatgaatggtagaattaacctaaggttagatagtgagaatgtggtgtatgagctggaaaagagtgacgctctgatcctagcttaacatgggttataatgagagttggaaggctaaatctggattccgcggtaaatgaacgttaaaatggggtaatcctagcttgaaatgtcatttangacatgtgagacaagttatgctgatctagagatgaaaacaaatgaccaaagtgaaccatgatccatttctagggcataattgggtgttgaggagt

SEQ ID NO: 30361 - DNA, 430 bp, Glycine max
  unsure (1)..(430): unsure at all n locations
ctcgcccaggcgagcaaggttgttgcttctggaggaatcttctggagggcccaagtgggcctggttgctatttgcacccgcctttatactaaatgcaccccccttctatttttttgtaattatttttccgtaacgttacgaaactntgtgaatttcgtaacgatacttattttccttccgcaaggttacgaatccttacggattatgtatttactcttttttagctttcgaagaagttacggaaactcacggattgcgcaaaaacacctctnttcgacttccgccacattacggaatttcacggatcgtgcaagcctgcttccttttgatttctgagacgtctcangacttcatttattgtgcaacataggacaccaagtatctcatagcggctaaccaaaggttgcatgtcatcaagtaataatccccg

SEQ ID NO: 30362 - DNA, 465 bp, Glycine max
  unsure (1)..(465): unsure at all n locations
gctagcatgatnacattctccnnctttctcaagcanattcttaattcttcttgacatcatcaaaatcttcatgatttacanttctccccttttgatgatgacaaccacctgtaggttaggagcaacaacaaagaanaaatatctatntgcatatagtttactcccccttggtgttgcaatgattgcttatatgagacagttgaagatttcatatttntcatatgtaaacaaattgtctcataaacaatagataatttttcttactatgttatcttttatctttctctcccgctttgtcaacatcaaaaacaaatcatgaatagagaggagaaagatgttaccacatgttgcaatgtatgataatcaagtgataccaataggcattataacaatcattcaatattaatcaagcaaatacaagtacaatgacacatcaatcaaatacaatcanatacaatcaatcat

SEQ ID NO: 30363 - DNA, 407 bp, Glycine max
  unsure (1)..(407): unsure at all n locations
ttggcatgctactnntgttttagcagtacgttntcctcatctttctttcatatatcttgttctagcatcatcatnaattaagttagttttggtttctagccaaaagctagagtcttgtgaaagtatcaatacaagaatgtatcatatgtgggacaaaaatcacctgtcccaattatatgtttcaattcgttaccatccaattcattttaaaagtacatgtaagttttccatccaatttaacatatagttatctacgtggacgaaaatcacctgtcgcaattatatgtcttaattctgcaccatttaaatatatgttgccatctcatcatttanaaagtacatgtggcatttcccatccaatttaacatggttatctatgtaacattcttttactctcttaacacaag

SEQ ID NO: 30364 - DNA, 402 bp, Glycine max
  unsure (1)..(402): unsure at all n locations
agcgttatagagtgagtcttgtatcggtttaatcgattacaactatctcataatcgattacattgntgtntgagagaatgactgatttattcangagtcttggctttaattgattaccaagatcgattacttaaggcatctaatcgattgcattgttcttgagttatttccagatgttgggatgaactctttaatcgattacttagataatctaatcgattagttcattgaattaatcgactatgctatagatttaatcgattacaagcagntataattgttttctctataaataaccagcttgagttcacattctaaaatcaagagatcaatagaggatcctcaatacatctcanaaataacatcttaaccttagaatgagcaagaattcgtgctatcatt

SEQ ID NO: 30365 - DNA, 467 bp, Glycine max
  unsure (1)..(467): unsure at all n locations
atgataacaatgattccctgacctctaactatggtatcaaaaacggtaaattataataaactaccctcacctattgtgagctctccttcaattcctctttgcgtcactcggaggtttctctcgttcatgcttgtcagtccaaacacaattctctatatgccaaactgaaggaaatttaatatagatttcagaaacaaagtaatgacaaacattcagagtcaaatacccctatcaaaacataaagagatgaggggtgtgtcggattctacataaaggacacatcattttgaaattctgatcacgccaatgtgaccgaggttcagtgaaagttacaaaaataacatcaatgttgtagaaagataactctntacaatgtctcattctctagggtgtttccaaaggaagtggataataccctattatagtatccaacacacaagagacaataagaggaactcaaactaact

SEQ ID NO: 30366 - DNA, 407 bp, Glycine max
  unsure (1)..(407): unsure at all n locations
ggatganagtgcacaactcctacttgttgttatgatgatggagaagcagtacttcttggacctgaaatgctacaacagattaacgaacaagtgaagttgattcgagagaagataaaggcatctcangataggcagaagagctattatgatagaaggaggaagccactatatnttcatgaaggagaaccatgtgttttgaaggtttctcccttaaccggagtcggaagggctcttatagctaggaagttgacacccaagtatctaggtccatatcanaatttgaagaagatagngcctgtagcttatcatatcgccttacctccgagtttatcgaatntgcattctgtgttccatgtctctcaactgagacggtacaacccagatccatcacatatacttgcagtgga

SEQ ID NO: 30367 - DNA, 385 bp, Glycine max
  unsure (1)..(385): unsure at all n locations
ttgactcaccatataccttgacccacggtgagaatgtcaatccttaccctcagaagcaaaataagaagagaaggagaatttccaatcaaaggataaaggagaaggaaaatntccaatcaaagaggaagcataataaggaaagaaggataatttccaatcaaaggaaaaagagaggaaaggaaattcccaatcaaagagtgggagatagcaaaaagaaaagaaagaaaattcccaatcaaagaatgggagaaagaataaaagagaaggagaagaaggaaagaaagctcatgatcaaggatcgaaagaaaacaaaagaaatgtgcagagaggtctttggaccatacaatatctgaacaatacggaattgtcaccatatgaacaaaag

SEQ ID NO: 30368 - DNA, 371 bp, Glycine max
  unsure (1)..(371): unsure at all n locations
agcacctgcgctgcagcttatagatttattatttgatgtgnattctttgttataaccggttacatatattacagtatgagttacagggttttttcaagttgtattaatattagtctaattaaaattagntttctaaattaagagaacctatttcacaatgagaaatttgtattcanagatattcacagagatagttaatntactttctttttagctagcattatattacatataaagtttccttatatgtaagtcaatatattaaatgactataagaaatctggacttataaatggagtaatggatatatgatatagttgtgcattattatgataagttggaacattaataattgacacaagtgataatga

SEQ ID NO: 30369 - DNA, 433 bp, Glycine max
  unsure (1)..(433): unsure at all n locations
gtagcgatacagaatagactctgtctgatccatggattaatctttgtcaaggactatgagcacacacgatatatatttccctcttaataagaattattttatatccaaagaccaattataatgtgaattcgatcatttgatcaaagaacacaaatcgttattatttgtaccaatgttgatgatagcttatagtgtaatataacttattatttntttcctttcattcttttgatatagactacagtattcttcactgaagacaatcatanttaagatgaataataccattttgtgcaacagaactctccctcatagtattatgacaattgtatatccaaaacttgaactcagatatcttatntaacataaaaattaaatttacattaattgattcacgcgttacgttattatgtatcttattgntatctttact

SEQ ID NO: 30370 - DNA, 366 bp, Glycine max
cacctgacgctgcagcttgagcacacgctacgatatttcttaaagatccctacggttaaatcatgttaaagtgtctttagaagttgcaaaccaaatgtcgagaagatcaaacagttaacgaatgctgggcagcgtttctaccgaggcaacttcacgtagttttctctataagcttcattaagaggcttccttcagaagcttcattatgaggcttctagcacactccacacattttctcagatatcccaacggtcagatcatggaaacgtgttttgtgaattcgcggatcatatttctagaagatccaactgtctatgaatgccgtgcagcgttattaccgagacagctccatgtagctctctctat

SEQ ID NO: 30371 - DNA, 351 bp, Glycine max
  unsure (1)..(351): unsure at all n locations
attgttgaccacagagtggtacctggagatatgtcgacggggtcaggagacctatgggacgtcangtggggtgctattgcccaaaaccaagcttgaccaatcccgacccaacccgggcatagtcggtcagtgagaacctgtgatgtacctaagcaggcgagctcctggcagtcaacagataaaaggaaaacaagaccacatagcaaggaggcttgtggtggctggccagctgtgaattatgtgtaatatgtggattgtggcctctggtaatcgattaccaagggtgggtaatcgattacaaggcttaaaattgatgacaggaggctaagatggtctctggtaatcgattac

SEQ ID NO: 30372 - DNA, 275 bp, Glycine max
  unsure (1)..(275): unsure at all n locations
ctgatgcttcacgctatttcgctgagtcttgtnatcaaaaccggtgagctgatgctataacataattgccagaaatgactcaccttacaagtaagctctccttggaagccaccagagcacaactattatctattaccatcaagcgcttgtttctntacaaaatacataactaaactagctcctctgtatattcattagtattttcaaatgtcatgctttcatnctatgactcttaatgcttctttttcctgcttttacattgcttgtacatgttt

SEQ ID NO: 30373 - DNA, 400 bp, Glycine max
  unsure (1)..(400): unsure at all n locations
agctngatgataccaattgttatagcanaactaggaaatcaaataaaagaaattgaaattcttgaacaaacaagggaactcaattaaatgaatgaattccgatgagcatggtggtcgtgcttttcattattagagaaataaattacaacaaggaagatgattacaaatcctgtcttgagaatgcttcctaacttccagctgctaattatagcttctaaccactaactgcctaacaattgttcaaatagggaaaactaacataatcaaatctaactaactctggacacgtcagccagctcctaactaccttcctaagctagctcacgtgtgtttcggcagtgatagcaacatctctaatgatttcctgacatacctcaagctattcctctagttacttcga

SEQ ID NO: 30374 - DNA, 495 bp, Glycine max
  unsure (1)..(495): unsure at all n locations
atacaagaatgaagctctgataccacttgttagacaagtggcctcagatatcttaagaagggggggttgaattaagatattccaaactgcttccccaattaaaaatctatttcactttntattcaagttatgaattcccttaatgacaatcttcgtaaatattaattcaaataaaacaatttgaatatgaatataaatcaataataaataaaggagattaagggaagagagaatgcaaactcagttttatactggttcggccacacccttgtgcctacgtccagtccccaagcaacccgcttgagagttccactatcttgtaaattccttttacaagttctaaacacacaaggacaatccttcctttgtgtttagaaatcctntacaacaagagactcacagtctcttaatcccttagagaatgagaagaagaagaagagatctctcttanaagagatgggatttacagaatgagcactcaaataattccttatg

SEQ ID NO: 30375 - DNA, 134 bp, Glycine max
aactagttccgctcctgagtatgacagtcaccactttatgagcgctgtacaccaggagcgcttcgaggccatcaagggatggtcgtttctccgggagcgacgcgtccagctcagggacgacgagtatactgatt

SEQ ID NO: 30376 - DNA, 304 bp, Glycine max
  unsure (1)..(304): unsure at all n locations
gagatgaggaagtgttgaagggtgaaacttcctgctnttattgttgaccacagagtggtacctggagatatgtcgtgngggtcaggagaccttgtggacgtcatgtggggtgctattgcccataaccaagcttgaccaatcccgacccaacccgggcatagtcggtcagtgagaacctgtgatgtacctaaacaggcgagctcctggcagtcaacagataaaaggaacaaagaccacatagcaaggaggcttgtggtggctggccagctgtgaatattgtgtaatatgtggattatggcctctg

SEQ ID NO: 30377 - DNA, 398 bp, Glycine max
  unsure (1)..(398): unsure at all n locations
agctnntatgcaagtcaatttcaagaggcatctcggagatgatcntttacgagcatatttgcgcaaaatctcttgaactaagaagatgtcgtccatcatctttctgttcttaatgaatagcagttgagtttccccaattatatgtctaagcacttaggctattgcggtggccagaattttagacacaatcttgtataacanattacagcaagatatgggtctaaaatggttacctgngaggcctggtcatgcttatgaataacgcaatatagcatggttagctgcttagaattgttcaggtgaaagaatcattaccgcacaaagaatcataccaatgtatttaagcctctgaagataaacatgaagcctctgccaggagcttatgtatcatcacaaat

SEQ ID NO: 30378 - DNA, 341 bp, Glycine max
  unsure (1)..(341): unsure at all n locations
tctaaggtgccatatagtntgagagctagtactangtgctgttttggcatcagacatagcatgaganactggatgtacaatggaatcagaaatttgtgcattagaactactataaacaggattaacaacagaatcaacactggaatatgaaagtaagcaggttgcctgaagtagaatctgagtacaagatgtggaaacacatatagaccatcaggatccagtgaaccttgaagtatgacatatattggtccctgtgattcacagcacaatggttaggataacactcagagaaaacattgttatccttagtaaaattgctgacactaatcaagttttagtga

SEQ ID NO: 30379 - DNA, 420 bp, Glycine max
  unsure (1)..(420): unsure at all n locations
ctgcggctgcagctagttgtgtttatttcttttgatttctaaacaataaaaagaaaatgaagttaccanatccattaatgagntaattaagtctctttatggccaaattgccaaaacacacactaccatgtacattctattttatttttnttcattttcccatttggagaaagtttggtgttntgtccatatgaaagaacaaaattatttcttatttgccagatatgattnngtgattntntttttatcttatctaatatctatctttcatgtgcaaanatgcagtttggtatgtcatctgcattggttacactatgtggccaagcttatggagcanggcanattcaatcaacatgtatttatgttcanagatcatggattatacttactgccacttgtataatcctcttacctatttat

SEQ ID NO: 30380 - DNA, 161 bp, Glycine max
gagaccgacgatgctgattgctaacctctcaaactccgtgaggtactcattgacagaacctcgttgaaccatcttgaataatgtgccgcgtggatcatcataaaatgatggagcacaacgagtctctatagctcgaaggagagctgaccacgatgtgatga

SEQ ID NO: 30381 - DNA, 554 bp, Glycine max
  unsure (1)..(554): unsure at all n locations
nttgtncccttgtaccgcgatcctcagagtcacctgcggcatgcaagctntgtccgcnaannatcactaaaactggtttaaagtccaacgcctttaatggtcctctttgcttttatcggntaacatggaccgttcanaagccataaatcaacatgtaactttaccacttttgccagaactacgtaagtctgatttcctcatcgcaattgaagatacgtaagagcaaaagccccgcttttgtcgaccacccctagagatcagtaatggtccagtgccttaacagttctcttcttttcacaaccaagagatcgttaatgggtctaacgccttaacgttctcttctttcanaaaccaaaagatcgttaattggtccaaagcctaacgnttctctccttccaaaataaagatcgttaatggtcaacgcttaaacaacttagtcggcaaatatatctacaaaaaagataaatactaaccacgttagtctaaagactcgaagctgattctctcgattgagaacgagacgagaacccctgtgaccaaagataaatcataat

SEQ ID NO: 30382 - DNA, 472 bp, Glycine max
  unsure (1)..(472): unsure at all n locations
ccggtgagagtgtaaccttaaactgtgagtgaacgactatctgtgagtgataatctctgcatgaatctctaaatcttagaatgaaatgtataaatgaggacatgatgaaggccatgattgtacatacacaagctcttttgaccaaacaacttaccttatatgataattgcatactttgctccctttttgagctgaatgatattgtcaaaaatttgaaccctaaacttaaataaatatctcctgataccttgcttagattctacgagagcatatggttcaagacaatttactctaaatttgngggagggaagtcaattcgaatgataataaaaaggttaagcatcagcacacacaacacataagttgtatgttaaagaataaagaagaaaggaaagaataaattgtgttgttacaataatgtcgatagaaactcgaaaggaaaagatagtgagaaagctactggtataataca

SEQ ID NO: 30383 - DNA, 381 bp, Glycine max
  unsure (1)..(381): unsure at all n locations
agctagtacanatctttacacttggagtgataacatgcagtcctcttgaacccttaccgcccactctgtcgtcatggtgagactcaggaagcccaacaggtttagccttttgaatgtagtctgaacaaaattcaatggcttattctgcaatgtacctttcaacaatagatgcttccggacgatgtagattctttgtataccctnttaagatcttcatgtatcgctcaaccgggtacatccaccacaaataaacaggaccacaacatttgatttctctgaccagatgaacaattaagtgaatcatgatgtcaaagaaagcatgaggaaaatacatctccaaatggcatagtataattgcggcctcattttccaggtcatcaa

SEQ ID NO: 30384 - DNA, 394 bp, Glycine max
  unsure (1)..(394): unsure at all n locations
gctcncagagcctggaacaagagaatagatacttntctcttgcaagttggattcatgaaatgcactactgaatatggtgtgtatgttaaaggagaaagtctttcagacatcctcatagcgtggttatatgtggatgacttgttgatagcaagaaaagatttcaatgctatctcgacattcaagcaagagatgaaatctgaatttgaaatgtcagatcttggagaattatcatattttctgggcatagagttcaagaggacaaaggctaggtattttattcaccanagcaaatacacaactgatgttctaaagaggtttcagaatgttgactgcaactcagtttcaactcctgttgaaactagtgctatgctggatcaatcanggctgaaacaat

SEQ ID NO: 30385 - DNA, 295 bp, Glycine max
  unsure (1)..(295): unsure at all n locations
agctngtcatcgtgagacatcagagggctagtatttaataaatgtgggtaggaaanattcaccaaattgatagagaaaaatctaaaatcatacatcttatgcaaataaggcatgctagcccccaacattattgcattntgattccatctttggacattgtgattntgaaaattagaaaacccaaagtttattatggcatttcatcaaacatacaactcccaactgatctggcaaaagaaatagtgagtagaaaatggaacttgcagacaaaaaacaaataaaagaaagatgattt

SEQ ID NO: 30386 - DNA, 489 bp, Glycine max
  unsure (1)..(489): unsure at all n locations
gcttctgaggacacaatgcaaggaagctattctcgaactaaatgcttcatatgaaaggtacanttttgtaatttctcaattcagttntcaattctggacgatttcctgttaatttatcctttcacttttggttatagatgacttgctccacggttgaactcactgttcaatangtggagaagttgagggaaatgagtccactttatgaaattgtcaaggaaggtatcaacatcaaggacattcaatgggcacagcactgattattatcaagctctcagaatgcaatgcaagtgatgggaagcaattgtgattgaactccagacgtagctgccactcttgcaattgcagattcttcgaacttgctgattatntagtaatttgtatcttgaggttacattacaattaanaatttaccctgtcagagctatttattangtatacaccatctgtttcaatgattggtagttttgcttgtcagcgatgtttatg

SEQ ID NO: 30387 - DNA, 362 bp, Glycine max
  unsure (1)..(362): unsure at all n locations
acctgtttatgttgttagacgctcttgtgtataatcatccatttgaacttgtgatccaacttgctttgtgaanacctccatcatatgagaaaagtttaagttctatctaacatactgttcaactccctttatagtgtttattntaagtaaggggacaaagaatgtgataggatggtggtagaaatgccaaaacaaaggccttttgggcttgagcttcactacattttcatttatttatcttgattgngtttaaagaatattcaatacatntttgagatgttaaaaaggttgtgagtagtaaagtcataaacgtatgcgctagttgatgaaaagatacaagccatnagtttatctttatttat

SEQ ID NO: 30388 - DNA, 370 bp, Glycine max
gatcatacatcatgacttccatccgggattcaagatatgagatctagaggcatcaagtcatgacttcatataggataagtattaaaagattatttcagaatccaaatagcacagttgtgttttactaaagaattttctcacattgtctaagtcaccaaagtgattactctctggtaatcgactaccagctattagtaatcaatgaccaatgaccagtttggttttcagaatgttatcaagtggtttataacgttccataatgagactgatatagtgtaatcgattacactatattagtaatcgattacaagtgaatctgaacgttggaatgcagatccaattgtgaagagtcacaactatgcataaaatg

SEQ ID NO: 30389 - DNA, 298 bp, Glycine max
ccttcttgtctcaaccgtgagctgtgactaccattcttcctgtccgcaatgcttctctatatatatgcctgagtgggcttatagcctaacccatacttcccacgatttcctttggcatttatcaggctagttatgctgccgttgtctttgcctaaacctattccgggttcgtaaccgttccccaacataactcgggccatcattactgctgtatcggacaggcaagcttgcccagagaaggagtccacggaggaaatgcttaccacctcaaaagactagatatgcggttctaatgacg

SEQ ID NO: 30390 - DNA, 170 bp, Glycine max
  unsure (1)..(170): unsure at all n locations
ttaataatattacccctcgccttgcgctcatcngagacatgaagtaatcattatgcatatatgcgacttagacgccatgacaacatgatgtatgaactgattcgcagcggatcgaactcattgtcgcatgtgataactataactcatgtgtaaacggagccattaactcg

SEQ ID NO: 30391 - DNA, 417 bp, Glycine max
  unsure (1)..(417): unsure at all n locations
agcttacncctatggctagcctccagacttcactcnccgtgccgctccgaaagatgtgagccaagcccctaccttcgaggggcaacttcctccttatgccgattatcccgtgcaagacgatgaggaaggagatacctatctcggccccctgctccacctcanagatccatccccncatgaactaccccaaccaaacatagttcgccatgtcccatcttcacccgcacccataatcgaatctgttcccttcgcagaggataaaggaaagattgatgcacttgaggagaggctgagagcggtagagggcctcgacaattacccattctcggatctagcggacctatgtctcgtgcncaacattgtcatccctcccaagttcaaagtaccggactttgattagtacatagggacgacatg

SEQ ID NO: 30392 - DNA, 300 bp, Glycine max
tgcggagatgatggtacagcgggtgaaccacaagcggaagtttcttttggtgaggtagccatggaaaagcagagcgtctggaatgatttcgtaaatctcagaaggctattgggaaatgctggtataaacacgaatgccaagcagatataatattgaatgaggaatgtagagggtcgtgtgaagcaacggtcgaattttccttggttcagtagtgaacgtgctattaatgttaagtgattcgtttgggcacgttcagattgctgtagttgctataattcctctagcacacaaatgcccagc

SEQ ID NO: 30393 - DNA, 490 bp, Glycine max
ctgatggtcataactctacactcggacgtccgattcacgcgcatcatatatctagacgctctatagtgaacaatgcaagctcttgatcagttcaaatggtcataatctttacatggatgtccgatactggcacataatatatcgagacgctcgtaattgaacaatgtaagctctcgagcgattcacatggtcataacttatcgctctgaagcgcgattcaggctctaatatattatgacacccatatattaatattggaagttcttgaacagatcatatggtattacctctcactcgagtgctgattcagcgcaatatatatctgatgctcgaatagaccatgcgactctagagaatacaagagccatattatatctctgatagtaatcttgcgcttaatagttcagacgtctaacaatatcattgaagtcatataccatcatattgccatattctctctgcgtgtcataacatgctaataatataaacg

SEQ ID NO: 30394 - DNA, 369 bp, Glycine max
caacatcatatagccaaagaactcggatatcaacacagttataacaatggagtagcaagatataagtatcagagtattaaatccaataagccaaactcataatcaaggaaataatcaaaccagaattcacataacataaaatgtcaacaaccacaaaatatccaagactgaaacacaagagaaataagcaaagtacttagcataataatgtaaattctaagagactaatagccaaaatacacggcttataaaagataaataatcagaacctataatctaataagacggaggaggtggtggaagatcgaaactctgacgaatgtatccgacatcctcttcaagctgtgtaagacgaatgtccataccggc

SEQ ID NO: 30395 - DNA, 400 bp, Glycine max
  unsure (1)..(400): unsure at all n locations
tgcagctagagacactctacacgagccaacctcactcattctaacctatatcaaattcacaattctggttatggtagtcattggtttttctattcccaccacacacacacttaacactcttagttcacacaccacaccatggttaactaacaatatattatgcattgctagtatgttatacctttattgtaanattgaacttcactagtttattaagagaatcattaataataaaataatactccgtatctagatctctagttggtatatagttgtgcattagaatataggttatatgactatatatttaacaataattagttatgatgaatttcattatataacataaacgacatcgtgtctaaggaaaggaaagataatttattatatatattataaa

SEQ ID NO: 30396 - DNA, 441 bp, Glycine max
  unsure (1)..(441): unsure at all n locations
gcttgatagcgtctagaaaaaacaagatagcaaatgttgaattgaatgagtggatgtctatgtaagataactggtaatagctaccaaagattctgactgttacataagaacatccttctactgacataaattagcattactagaatgcacttgatgcaagcaagacaacatagtcaaattcacagtggaaatcaaaaacagacctcacctaatttaaatatccgagttttcacattgtgacagaagtagtgcactactaaagtttaacagaaacattcatcagccaccatctccggtgtatgattatttccaacttgtaaaggaaggttagctaaacagaatgtaatttgcatcatacatgttctttctacccttgtattttgatagctgttaactaagttcatagacatactatgnacaggagtgacataatcatatcta

SEQ ID NO: 30397 - DNA, 479 bp, Glycine max
  unsure (1)..(479): unsure at all n locations
atcctctgagtcacctgccgcatgcaagcttagctntaatccaatagtccgtggactcaattttataatatgaacaactcattntgcttgtngtagttattatatgtaggctggcctccagacacgcttaaattgcgttcanatccttgacttcacctttttcctttgccctcgaatcaaacgataaaacccttttcattctcacattggctttgatttcttccaatgtcccattgtcataagcaaaaaagatatgtgaacacccacaattcaaccctaaagagaaagaaaacaaagaaacaaaaatatgtatgatatataatatgatgtgacactaagtgagagataataataaagaaatattaatgaaatggttacattacaaagtgttcagatattatcactcaaatatccctttgatattcaaacattcttttaagggatagtattagaaattacttaaatatacttatataaaa

SEQ ID NO: 30398 - DNA, 457 bp, Glycine max
  unsure (1)..(457): unsure at all n locations
gctaactcgatanatacagctntatcaccgtctacacgcaatgctactgcttgacgtttatctgcatctntatctaccagattcntgaaaacaaatatagacatgcatgtttctttntgtattacttaagcttcagtcagcacatatntatttttctgaaagcaataatgcatcaaagctatcatagggtctgtttggctatatttttttataaaanaattaaaagaataaaataacattaacttctctaataaattaagaataatttatacataagttaaagttaactctntacagaaattaaatgattctatcttatctaanaatgctgngtttgagttttaatttattntatggatgaagtgatttaacttatttatgtggtagaaaatatttcttactatagtgtatgatagtctcttatagatatcgactactcacactaaaaaactattaa

SEQ ID NO: 30399 - DNA, 403 bp, Glycine max
  unsure (1)..(403): unsure at all n locations
agctntgcatgtctagtgattctagagagagacaggtccatgttccagagagttttgagagaatttgttgtgtgaagatctgcagagaccagagcttgaagcgaatgccgttatgagagtttgagatgtagttatgagtggttgtgagatcctagatgtgaatgagacattctcaccacttgtatatttgcaatctttcatcttgttcttctctttgctgcaaaggaagcttcctggttatggaaagctaanatcctttgttgcatcttccctgtaggtacttgatgcanatatctgttgatctatctaatgatagtttgagtgttctctgcgctatcaactgttcattctagtatgcctttaccatgatcacgatgatgcatgctctgttatggtcattcac

SEQ ID NO: 30400 - DNA, 429 bp, Glycine max
  unsure (1)..(429): unsure at all n locations
tctatatgctgctgaataattctgtacatgtaccagatgagcttctngaattagcaaacgcagcggccaaagcatctcttgaagaagtggatgcagattaatggactataaatgatgatttcagagatgtatatcatgacattgtgaatgagcattagaaacatctatacgaaacacaaggcttctatagtaggatattgtattcttcttgatgatataatgcccttattgatttgctgattcttggacaatcgtattgaagttctatagaagctgacctctattgatatgtgttgaattctctgtcaaatccttgcgcttatgtgcacagcattgaatttactttattaacacgtcatttgcaagcgaattgttaaacaatgtcggaacactctcacattatacatanattatatgggtctcataata

SEQ ID NO: 30401 - DNA, 414 bp, Glycine max
  unsure (1)..(414): unsure at all n locations
anntatactgtactcaatcagacatccgagtanaaattatttgtcgttggattggctcaaagattcaacattcaattcgagcggctccatatatnacnggactcantcagacatccgagtaaaaagtattgtcgtttgattagcttagagctcaacaatcatttcgagtgctcgtatatccgagactcaatagacatcgagtaaaaagtatggtgtngaattgctcaagcttcacttcatttgagcgctcattattacgcctaataacatcgagtaaagtattgcgttgaatgctanagctcacatcaatttcacgtctgtattacagactatcaactcgataaagtatgcgtgattgtcaactccataattcacgccgttatcagaccacactcagtaaattgcgtgatgtag

SEQ ID NO: 30402 - DNA, 416 bp, Glycine max
  unsure (1)..(416): unsure at all n locations
catggatgtctgattgagtcctgtcatatatcgagacgctcgaaattgaatgttgaatctctgagccaatccaaacgacaataactttntactcggatgtctgattgtgtcccgtaatataacgagactctcaaaatagaatgttgaagctctgagctaattcaaacgacaataacttttaactcggatgtctgattgagtcctgtcatacatcgagacgctcgannatgaatgttgaagctctgagccaattcaaacgacaataactntatactcggatgtctggatgactctcgtcacatatcgagacgctcgaaattgaatgttgaagctctgagccaattcaaacgacaatnaacttttactcggatgtttgattgagtccagcatatatcatacgctcgaaaatgatgttg

SEQ ID NO: 30403 - DNA, 479 bp, Glycine max
agcttggcaataagcgatattttgcatacagtatttgccattgcggtgtgactttttgaatttatagcaaacgttttatcactatcaggtagcataaagattcatgcaaaacaagtagaaatctactctcaattcatggtgcattacatctacaatgttctaaaagaaacctttcatgttgaggctgcaactaagaacaaattaaagacatggacatcatgaaatttacatgagtgaacagacgattgcaatcgcatagcatacagtcattgcaccacattaatgaacttcaatcccttttatatattcttttttgcccaagctaccttgtattgttgcattctgaatcttgattataggacaagtagttaacgggttaatttgataaaataaaaaataaaaaatacgtggacaaaacataattggtcattccaaaatatcctttcatgcttctaacatattttccgcattatgcaaat

SEQ ID NO: 30404 - DNA, 501 bp, Glycine max
agcttgcttctacagatgatgacaaaaagcccaagagaatgatttcaagattgagtcaacaagattcaagaatcaagagaagtttgatttcaagattgaagagaagatgaattcaagattcaagagaagaaatcaagaagacttcacaagggaagtattgaaaagatttttcaaaaaaaacaaacatagcacaattttgtttttcaatagagtttttctcaaaattttctaagttaccagagtttttactctctggtaatcgattaccagtggcaaagcttgatttcaaaagcttttaactgaatctgcaacgttccaattgatttttaaatggtgtaatcgattaccagtgtaacttaacgttgaaattcaaattcaattatgaagagtcacatcttttcataaaatgctttgtgttatcgattacatggttttggtaattgattaccagtgacaagttttgaataaaaagtccagagatgtaactcttctaatggtttt

SEQ ID NO: 30405 - DNA, 442 bp, Glycine max
tcaccacatttaagggttgggtggattcttatttttccctcaagtttgctaaccacctactctctatttgcttgtttgttgttcacttctctgtagcaattatggttatgcttaaatgactttatctgaaaagtgtttctaacttcattctttgcatagtagatctcccaatcacaagatgccttcttgcattttgctctagccctctatttatcattcttcttccacttgaactccctgcccatgaatatgctatctccctcgaggcagatttaaattcatccaaagtaccaaactctatccctaattccatcttctattgaccaaatccactactttgactatattgaggataaacttcaacatcctcatcttcatcatcactactaatggggattttcagctcctctgaatgataaccatctcttttaactttaacttc

SEQ ID NO: 30406 - DNA, 513 bp, Glycine max
agcttgtctaagtccatactatgatttgttcaatttgcataccaaggaagttgggaagttccatataaacttcttcaaacaaatctccattcaaaaaagcattattaacatctaataggagaaggcaccagtttctagcagtagcaacacagagcaaaactctcacagtggtaagcttgacaactagagaaaaagtataagagaaatcgattccagcttgttgagtataccctttggcaaccaatcgagctttgtatctatccacagagccatccattttatatttaactttatacacccatctacaacctatacaatgcttatcaagtggtaagggaacaagtcttcaggtggaatttgttggacaagtggcctcaatatcttaaggggaggggggatgaattaagtcttacaaaattgcacttagaaccttattaaatctcaagtgcccaggttgattgcattcatagcattttgggggctaagaggaattttctccttccttctttggat

SEQ ID NO: 30407 - DNA, 449 bp, Glycine max
ttttatatcgttgttccttgtcttactttgttggtttgcgaggatacaacttctcacatgtaattgcttgtttagcttctcgtgttagttgactatttgtcttaattggcgctcgtgctatttcttcaactatcatgtcctccttctatatgtcttcctttacttcgtcgtctacccttcatgtcctttcttactggctctttaattgctaacttgcttctttttgttacggcatttcaatcaaccttgttggaaatttcttttatttgcattgcttactcctttacttgatctttcaacaaatttaattcctccatggtgtctccagtttggagttggacctggtgctaaggttgattatggcttccttttaattttgtagtgcatttttctcatgaaattggttaccaccacactctttacattaaaaacttggttattattggcag

SEQ ID NO: 30408 - DNA, 505 bp, Glycine max
agcttcccaaacacaacactgcactcgccctccaactccccctcttcctcaccttccgcagccaacacctgggcttctccatcttcctcatctaggaccatcagccttagttggcgatcaagacactaatgttgggggtgaaaagcccctccacatttgtagcataaaccattctgttgtctctccaaaaactcttggtaaggcaagtgttgaactactctgtctctgttctgatttcgaaattgctcatgaggctgccctttgggaggcccagacccattaacatctcctgattgcacctccctattgctacatacagacccccaatctgacccatcgtgtgattgggttggggcacgaaacccgacctgtacccattgcgaaaacttgcatttctttgcatcgatgaaacatccttttccgacaactcatgctctactgcccttgtaaaattcagctatgtgaacgcgatagagtccccaacatccgcatactccgaactagt

SEQ ID NO: 30409 - DNA, 482 bp, Glycine max
tccacttgtatattgcaactgatgcaatcctacctttcatgggtattggatagaagactccaaaaggcttgggctagagctactaaagaaggccctaaggttctcatgaaccttaaggtagatttttgagcccatgggtcaaggttggatccactcttctttgtaaatattaaaataggtttttccttcgtttgggtcttgtattttggccattctagtagtatagggttttagccttgtatttcgaggcattttcagtagtctttgtagtagggattttttttggttttttcatgtattttgtcatgggggtgagcttagctattatagggggtgtgtagctaagctctagcttttcatctcaaggaggtgagcctagctattagaaacgtgtgtgtagcttaactcttactttttttaggaatcttctcaaagaagcttcttaaggaggtgagcttaattattaaaagggtgtgtgtaac

SEQ ID NO: 30410 - DNA, 510 bp, Glycine max
agctttattcaagacaaagaaattatagatattcaagatggatgatcaagacagtctctatagtcttagaaagggtatattaaataggaagggaattccaattgaagtagcaaaaggtttggccaagaattttaaattaaaaagtctttttcaacaaatttactctctggtaatcgattaccaaaggatgtaatcgattaccagtggccaaaactgatttacaacagctattaaaatttgaattcaaagtttgcactatgtaatcgattacacatatatagtaatcgattaccagcagtttctgaacgttttaattcaaattttaaagcttgtaatcgattacacatatactgtaatcgattaccagaagagagtttcagaaaacattctcaacagtcacatctttttgtgtgattcttgaatggctatcataggcctatatatatgtgacttgagacacgaatttgataagagtttttcaaaacaaaaaggtcttatcctcttataaag

SEQ ID NO: 30411 - DNA, 521 bp, Glycine max
tgcaatattgaaacacatctatacacgatctgaaacttctaaaaagatgatggaacatcatgaaaccctttactttttgacctcattatgctgtcattggcagtgtttccttctccacaaccataccaggaagaagttgttgcatagcttgcaacaatctcagtaaatcgtggtatgatctttcctagttggcgtagatgttttcagtggccttttgctttgccaaccatggtttacggtacatggtggtgtatccttcagtgcttttgatgtgtgctatcaatgctgacactaaagttgatggatcattttcaatcaagttgtggatgcttttactgacgagcaaatacgacaactttgcatgatcttgtgagattgatggatttgaacatgtatggggttcacacagctttcttatttcccgttgcttacttgcaaagatgtatgacgccttgcaccctccagcccacctattatcatcacaaatgaaaattagctttgttgggtttgatagttatgtc

SEQ ID NO: 30412 - DNA, 500 bp, Glycine max
agctttgatgatattttctttaccgacgaaaggatcaatgtgggtctaaaaaaaggcaaatttagtcatcctacttagacgaatgagaaaactggggcaaaagaagagggtgaggatgaaggagaagcccgtgctgtgactgccattccaatacagccaagtttcccaccaacccaacaatgtcattactcagccaataacaaaccttctccttacccaccgcccagttatccacgaaggccatccctaaaatcaaccacaaagcctacctaccgcacttccaatgacaaacaccacctttagtgtaaaccaaaacaccaaccaagaaatgaattttgcagcgagaaagccttataatttcaccccaattccagtgtcctatgctaacttgctcccatatctacttgataattcaatggtagccataaccccagccaaggttcatcaacctccatttcttcgaaaatacaactcgaacacaacgggtgcttgtcatggaa

SEQ ID NO: 30413 - DNA, 397 bp, Glycine max
tgtaatcgattacagagatacagttttctattaccagagcacattttcaaaaaatattctcaacagtcacatctttttatgtggttcttgaatggctatcaaaggcctatatatatatgtgacttgagacacgaatttaagaagagtttttggagaacaaaaaggtcttatcctattaaaaagcaaatcgtgttatcctcttacaaattccttggccaaattacttgtgattcaataaggaattatttgagtgctcaaattgttcagtctatctctttcaagagagatttcttcttttcttcttcttcattctgaaaagggattaagagaccgagggtctcctgttgtgaaagaattctaaacacaaaggaagggttgtcccttgtgtgttaaaact

SEQ ID NO: 30414 - DNA, 500 bp, Glycine max
agcttgtcggcaaaaactttgatgacgaaggacaagaaattgtaaccaacacgctcgaagaagtaccacaatgcggtggcataaacgagcaccgcaaccgctccacgccaattcatccacaacaccacatcaacaactaagcctttgccgagaacacgatgaaaggatgagaaactaaggcaatgccaagattgtcagaagaatgaagaatgaaggggttagaatcatcaatgacagccatggccatgagagaaaaaaaaaaagagccaaccagacatccgaaaagtccccataaaaaatgattcataaggggatgacttatccagttatataagaacttaatcatcaatgatatccatggccatgagagaaaaaaaagaatcaaccaggcatccgaaaggtcccctttaaaaaaaaaaatgattcgtaagggggtggcttacccagttttttaaaaaattaatcatcaatgacatccatggccatgagagagaaaaaaa

SEQ ID NO: 30415 - DNA, 427 bp, Glycine max
tcgacaaaacaatagggactctgacttacattatctacatttactccctagattcaagagaataactagaggtatatatagcccaaggtagaggtgcaagtagcactagttctaacatctgatcctctatggaagagactttatatagcaaaaatataaactaagcaaattaataagaaacaccaccttcacattttgtgaaccatctgcagccacccctttgagaattctcacaagtattgttcatgtattctggcacggttcttttcccaccacagtctagcatgcatctcaccaaacttttctcgactgcataaaatatgaagaaacaccaaaagaaataaatttcatacaggtctacatgagaattataaacatgctaatgaaattgagagcagaatggcttacaacagacaaattacaatac

SEQ ID NO: 30416 - DNA, 505 bp, Glycine max
agcttttgtcactctacctttatctggctttgatattaaccagacttaaaactgtcgacaacagcgtcaacaaattcttgcaccctggatacaaaggtttctttgaatcagtttgcaatgtatcatacacaggggcatgagcttgctgaaaagactcttgtccaaggtcacaaatcatatcctcaaagcgatctcccatttctacatcaaacggttcggattgctgcccactctgcatgtctatcatttcaccatgccatatccacgtcgtataattcctctaattctatcacacaacagatgctctcgtatgtcatccattatttgtcgtcttccgttcaaacaattgatgcaaggacaataatattttccatcttcatccggttgacctctttctgaaagaaattgtaagaattgctcgaagccttcctcatattctgggctgatgcgactttcattcatccaacttcgatccatctaaataataactcgggcatactctcaa

SEQ ID NO: 30417 - DNA, 478 bp, Glycine max
ttagaggatgtgacatgggagcataatgatgtcttgtgttgccagtttccagaattttgccttgaggacaaggcattgtctaaggaggtgggagttgatagaaatgtgattagtgaagtggggcctatgccaagggtgtggagagtttatactaggaaaaagacaaaaggaatgaaagataatgacgtggctgtgaacgcatgagagtggctacagatagctattgctggaagggaataattaggaaggaattccgttaggatttgggggggttgcctctgggtgatttgagagcactgcgcgcttgggaattggttgctattaccagtttgttatttttctttttttctgctcttttcttcctgtaattgtggatcttacaattactcacattacactgttatacccattttatcactatttttgtgcattaagacccatcattttcactccaaaataaatcttggggtcaaaatct

SEQ ID NO: 30418 - DNA, 486 bp, Glycine max
agcttgttcttgatttttttttatttctttaacaagctttgaacaatatacttggtcttcatttaactgtctttgggcttggcggccacgctcaacaaagtactttcgacacctactgtacgttgatttcaccaatgttgttatgggaatgttgcgacaatcctttaaaaccttattgatacattctgagaggttcgttgtcatgtggccatatcgacgtccttctctatcgtaagccatcgtccatttttcctttgagatgcgatcaatccatgttgctatggctggactcagttcacgaaaatttttctaaattttgatcaaaaatgtgcttgcatggagtgtatgctgcataaaattagttatgaataaaaattttaagttataatgaaagtaaaataaacgtgaccctcaaataatgaaaattttacccattttcttcaacatttcttttttgtgggcattattgaatttttcgattgaagt

SEQ ID NO: 30419 - DNA, 487 bp, Glycine max
tattgaaactattgataagcctcccatggttttctcctgatctaagtgatgctgaagcaaccaaggtttttcaaaaatacctagatgagtgtcttactactaagtgcattatcttggaatcaatgagttcagaactccagaggcaacatcaagacatggacccatatgagatcgtcgaatatcttaagaagatgtacggtggtcaaagcgggaaggctatatttcaattatctaaggccctgtttagatcctcacttgttgcaaatgaaaaggttggaccccatgttcttaagatgattgatctcatagaacaacttgagaagttggggtggactcttgggaaagagctttctcaagatttgattctacaatcactttccgatttattttcacaatttattgtgaattttaacatgaataagatgaattgtgacttgcatgaaatgcttaatctgctaatttgattatgagaattaaattgcttttg

SEQ ID NO: 30420 - DNA, 505 bp, Glycine max
agcttgcttgtggttcttctatggaggctggatctttgagcttcaatgaggtccttcaatggtgatttttcaccatggagatgcagcggaagacaaaggagaagaggtgagaggaggcgccatccattaaggaataagccatggaaaaaagagcttcaccaccaagatgagccttggataagaagcttggaaggatgcttcaatggaggaaaagaaagagggagagaaagagagaggggggagcacgaaattgaaggaagaaaaagggagagaagttgaactttgagttgtgtctcacaagactctcattcatcaaagttacaacaagtgttacacatgcttctatttatagactaggtagcttccttgagaagctttcttgagaaaacttccttgagaagcttctttgagaaaacttccttgagaagctagaacttatctacacacacccctctcataactaagctcacctccttgagaagctttctttagaagattcctaaat

SEQ ID NO: 30421 - DNA, 497 bp, Glycine max
tgcaatcatttggtataaaattcacttagtcttgtggctctacacaagggtgtctgcaaccttctaaaatagtatctccttcatcctattaaaatcaaaatgacaatgttaaatgctattcctaaaaagatccctccaaccaaaacaggggataaacagagaaggaaggtaaatgcgagaagaaaagaatgtagtaattgtgaaaacagcaaattaagtaccaatgaagtgatgtcaggccttgtgtagggagtaggacaactagaagccaaatcagcaaatctcaactatagattcctatccatgtaccttagtaacttttttaatttatagattctttaaaaaaaattcatggttagtggggttctactaaatgttgtcatgacaagagtatattcattagacatcaaaatggaagttatagtgccctttaactaacaaaattatttttccctgatatttctctttgatctttctaaattgtcaaatctaaatgt

SEQ ID NO: 30422 - DNA, 490 bp, Glycine max
agcttttaaactaggtttttttgtaattcatggggatttttaaccagctggactgaaataatatatttttttttgttgtgcaaatagttgataattgctaaatatgagttattgtgatgataaaaatatattaaaaatatctttaaaaatatttatttagcagatatttaaaatatcaggaagtctcatgaagatatgattaaaagcaaaacaaatccgaaaatatcaaaaatatcaaaaaggaagatttctagcatcaagcccaagtccactacaacaaatataaaaagggagtcaagccgaacggaaaagaacacaccacacaaccccctctcataggagtttcatttactccctttttttctttcgttcacccgtattatgccatcagttcttataccccatccattgaaaagcccttaatggctatgaatagctaaacccctattttagggctgacagggctaaaagccaaacgatgtatgatgta

SEQ ID NO: 30423 - DNA, 435 bp, Glycine max
ttctaaagttttctggttttccttaccttgtaaacttgtgctattcatcttttcattctcttctccctttgccaaaaagaattcgccaaggactaattgcctgaattctttttgtgtctctcttctcccttttccaaaagaacaaaggactaaccgcctgaattcttttgtgtctcccttctcccttgtcaaagaattcaaaatgacacagtctgagaattcttttgattcttccctttccctaatagaaaagtgttcaaaggactaaccgcctgagaattcttttgtatccccattcacaaagtatcaaaggtttaatagcctgagatctttgtcttaacacattggagggtacatcctttgtggtacaagtagagggtacatctacttgggtttgactgagaacaagaagagggaacatctcttggggatcag

SEQ ID NO: 30424 - DNA, 126 bp, Glycine max
gggaaaataggaaagaagagggaagggagggagagaaagtgaggggtaggaaggaggtaaatataaaagagagaagggggaggaaaaagagaggggaataggaaagaaaagagggaagggaagaaa

SEQ ID NO: 30425 - DNA, 506 bp, Glycine max
agcttcacaaccttagtagcaattgctacaagactcacataacacctgctatgttcactttgaacttcagaagcaataatcctttaattattcttctaagttcttccctctaatctaaagggatggacactacaccttttgagatgctttctattgagacttctggcacgaacatgtttatagacactcttacatatttaattttactttgactccatctagagtgttttggctaaggaagtttcttgttgttggagttagccctagtgaccaatccatttcagactatatttgttatcgtgatattgttttatatattttatatacatgagacatgtcaactattatgttattagttttatagcataataatgtcctaatgataggtgattcgttcaatggtaaatcaagtgagacttgattgtgagatttattgaacaatgaaacattgttccaaaagtatctatagtcatgtactattgttgactaaagtaacaataatgcat

SEQ ID NO: 30426 - DNA, 456 bp, Glycine max
tgtagcaaataagaagtatattgaaattaatcaggttatgatgttataataattttataggtttgatgcagtttcaaaaatttatgttcctatgttttcagatatgtttttccctctcattttttgaatatcaaaatttgatttcgatcttgtttaaatagtagtgttttgcaaaaagtctacaagaaagttttcaaagttcatacacatacacatactaatcaatcccctttttagtatgtttcttttatttcaaaagtatttccaataaattaaacaacattgtatttcaaaagttttaaagtataggatttgaaattcaaacatatgtgtgttggtgtggcaagttccttattatggaatatgacaattgaggaaagccttattttaaacttgggcccttgcaaaaacccctaggtactattagggattttctcattattttttaaatgaaaa

SEQ ID NO: 30427 - DNA, 497 bp, Glycine max
agcttgtttctaaacactcacttatttccaacagctgatttgcctttggggagttccaaaagcttctagacattgttcttcggaaactggtccagctctacttgcattgctttgacccaatgttcatcaaacatagcatcatctatgtgttttggctcaatctttgatagtagcactgtatgcttgagagagttccttgttttcactttgtccttaggatcaccaatgatttgaggctttggatgatgttttgttagcaagggtcctattggttctctgacttttttaggttgatcatccactggtctgttggacgcaagctcatcttggctagacgcagaagaacacttgacgatattttctattttcatctctggaaaagaattatccagctctaacattgtagtgtcaaacttgttgtcattaaatcttacatgaatagcctcttctacaataaaggttctagagttgtacactctatatgccttggacgattt

SEQ ID NO: 30428 - DNA, 469 bp, Glycine max
tatgctgcaaacatctacaacagacctccttaaccttagcagtaaaatcagccacaacagaacaactatgacctctcaagcaacaggtgcaatcccagatagaggaatcatcccaaccttagatggtcgaatccttcacaacagcagcaacaacaacagccttattttcaaaatgttgttggcccaagcagaccatgcgttcctccaccaatctagcaacaacaacaacaacaacaacaacaacaataacaacagccccagaaacagcaaacagttgaggcccctccgcaaccttcccttgaagaacttgtgaggcaaatgactatgcaaaacatgcagtttcaacaagagaccagagcctccattcagagcttaactaatcagatgggacagtgggctacacaattaaatcaacaacagtcccaaaattctgatagattaccttctcaatctgtccaaaatcccaaaa

SEQ ID NO: 30429 - DNA, 508 bp, Glycine max
agcttttctttctcaatcattctgcctattgactaataattctaattgcaagttcacattcttgttctttctttgactaacatacgtacttgctcaaacttatgaaaagaaacacaaactccatcacaatcatgcattcaatccaaaatcaattcataacaccaattttcacaaaaagataaaaatgtttcactacataaccatccaagtcaagttaaactgttccatatgcttcaaaacatgcatactagttatccacaaacaaaaatagaagtgtatataaacattaaccaaaataactaagacactgaactgaaatataataattatataaaaaaatatccaaaaagcaaaatccttaggaatttaaaatctctgagacaggtcctgtgtgtcctgtgtctgagcatcctcctcatttgtctagtgaagtactggagtagctggaggagaggtgttcagtgtccagactggtgtggtctgatcctctggtatatcaagtacagga

SEQ ID NO: 30430 - DNA, 516 bp, Glycine max
ttatgtttgagtgtccacatggatgtgtgccatgatcagttttgcatgaatttctaatcatcattatcatatgcgtgtcattgaaatgattttgggcattcccttattcctgaaccacttgctaaacaaatatcccgacatacatcatgtgttgtcattcgtaggccttttgagccaaacctcaacattttagccataaccttgacctaggatggaaatttccaaccttacccttggaagaaagaacaaaaagatcttcccaaaagaagcttcttttacccttgggttataaatgtgcttcaaaagaaaagaaaagaaaaaggaaaggaagaaattcaaacaatcaaagattggagaaaagcaaaaagaaaaaaaatagaaaagatagaaagaaaaaatacaaaaaggttctttggaccagacaatgtctgaacaatgtgcaaaattgtcaaaatcaaaaaaggaaatagtaatagtagcttggttaaaacctgagggatgcatgaagcaatcacc

SEQ ID NO: 30431 - DNA, 511 bp, Glycine max
agctttccacattgaattcattacctaatgtcatattagatgggaattgggtatcttaacataagaaatttcagatggactttaatcctaatcccacagccgaccttttcacgagatctctacttaaccctttggttaaatgatccaaattatgctgagttctcacaaactccactgatatcacaccatgcatgattaactcccgaaccatgttgtgtctaacacccaagtgtctagacttcccattatacacttgactatatgccttagccaaagtagtctgactatcgcacctgatagacatgggaggtataggtttgggccacaatggaatctcatagatcagatttcttagccactcagcttctttaccagctgctgctaaagctacaaattcagattccattgttgaatttgtaatgcaggtctgtttcttggatgcccaagagatagcacctcctccaaggaggaatacccaaccacttgtggatgaataatcttccatattggt

SEQ ID NO: 30432 - DNA, 509 bp, Glycine max
tagatataagtcttaattaaacaaacttggcattgttttagtagaaccttatttgactcaggtgggtaggtccaataaccttttcatttgtgcctttcagtttctggcttctttctaattaccatttcttgcacttttgtaattttaacaagtaaccttcttctccttctattttttgggaggaagttaattttcattttgtctagtatttgtttctttcttcatcatttcagtacgttggttttcatcattttaaaaacgataaaacatggccttagggaaatctccttctgttgctttaggagtttatatgtttatgtttgctagagagggctatttatatttggttgcataaggtaattttagagcaaactttgaacaatactttaactgttcttgaattaggaaatatatttacaattttacatgtatggtataagtgtaaatattttgggggtgcttaacaagcgttaatagtctgaaaaaagtgtgttactattgtgattctc

SEQ ID NO: 30433 - DNA, 505 bp, Glycine max
agcttcacaagcaagcttccatcattaccaaacttttgtacgcacttctactggggcaaccccattctctttggtatatgggatggaagctatgctccattttgaggtggagattcattctttgagaattctagcagagtcaggattggaagaagtagaatgggcccaggcacgttttgactagttaaatgttattgagggaaattggctgccataagtcatgggcgactatatcagagtagaatgaaaagtgcattcgaaaaaaacgtgcgcttgtgtgagttcaccgagggggatcttattttgaagaaaatatcgcatgttcagaaagatcattgagggaaatgggccctgaactatgaaggaccttttatggtaaagaaggctttctcgggtggagcattgttacttatgaatatggatgatgaagagctgcctttgcctgtgaattctgatgttgttaagtgatactatgcatgatattggggacagtttgaaagttcac

SEQ ID NO: 30434 - DNA, 523 bp, Glycine max
ttactatgcagagaatatccaaagaaaatatcttcatctgacttagcatcaaattttcctaagttatcttttccattattcaatacaaaacatttacaaccaaagatatgaagatgtgagatgtttggttttctgccattgaacaattcatatggagttttctttaaaatgggtcttattaaagccctatttaaaatgtagcatgcagtgttaatggcttcagcccaaaagtattttggaagaggagtatcatttaataaagttctagcaatctcttccaaagatctatttttcctttcaacaacaccattttgttgaggggttcttggtgcagaaaagttatgctcaatcccatgcttatcacaaaataattcaaattctttattttcaaactcacccctatgatcactcctaatagatataatcttgagatttttcttattttggatgatttttgcaagttttctaaatgcttgaaatgcatcattcttatgagtgataaaaagagtccatgtgtatctag

SEQ ID NO: 30435 - DNA, 492 bp, Glycine max
agcttgactcatatttctttttcagatgttgcatcccccaatatgtatgactggagatggagaaggatgcattgcatccagctgttgagggagcttacttagagtttctatgaaggtctctaattgcttggccaggagcttgttttgagctaacatagcatcttgagaagtgagctcaagaagactcttctttatgggtgcataggcttgatcacagaggatggcgtgatcactggctgtcatattctctatcagctccatggcttcttctagagtcttcaatttaatcttcccaccagcgaaggcattgaggagctgcttgggatggggtcgcaagccgtcaatgaatatgttgaattggactggctcaatgaacccatgtgtaggagtcttccagagcaactcataaaaatgatctattgcttttattcaacgggttctcatggaattgggggaaagatgagaatttccaccttttccttttccggtctt

SEQ ID NO: 30436 - DNA, 355 bp, Glycine max
gctcaagcttttttacaaccctattacattaaatagaccaggcttaggcttattaaaaagccttatatgcctgataggtccgcctatattattttttgagtaccaatatataatattattttttggatacaattaatttttttttggaaactatcagactttgattacacattactgctccataacttctattcctataatcaaggactttaattataatttaagtgtgagtaatgtgcccttttatattcctcattattttgattgacttttctttttctttaactttcttattacggtcctactctataaaatattaaatatttattgtgaaaaagacttttaaaaaggttat

SEQ ID NO: 30437 - DNA, 506 bp, Glycine max
agctttgaaaatggttcttatgccagatcatcttaaattgttgcaggtactcttccttcttcctagtagctagtgccttaatcatcttcttgttagctccagacattgaccttgctgtccatactgcttttgcaattaggttactcaacacaaatcttattcacatactgttctttgattttccatagattaaatgtgtaaacatagattaaattcttatccaaactttggttttaagtttttggtaggagcaagctaattgagttgctcacctttttagttaggtagttgcaattctatattagtcaccatattttttgttactaggtatgaattaccaatttttggtctctataaataacatgtttgacaaaactatgattgagtcatgttcgaacattatttaacaactagaggactaattttacaaaaaaattagaataattttaagcaattggagttttaaagggaccgagtcacacaatctagcttttaagtttgaaaga

SEQ ID NO: 30438 - DNA, 517 bp, Glycine max
tggaacgagaagaagccatcagcattatctttaagggctaccgtgtctacaactaagtctagaagaacctagaactatcatgatactaatctatcatgaaaactctagaaaaacctaaagtaatgtagaaacattcaccatcattgagaggttggtgacttgaacctataaataggcaattagtatgttgtaattgataatccaaaaaatcaatgacatagccttctttctaaaacaattctctaaaactatcaactatcaattatcaactatcaactatcatctgaccaactaccaacgtgcgcggaatatggagattttcaatgataagaaatgacaaccttggttacttaattataaatcaagcaaaaataacatatgatattgctttctctccttcccccaattcaatggctcagaagcaaccgcttacagtatcttggtccctaccactttaccagcaaagaactcaatcaagttgaatgtggatggtacactactaaaaatgctattattt

SEQ ID NO: 30439 - DNA, 509 bp, Glycine max
agcttgcaagtgtattcaatttacttgacttaagcacacgacacaaagaataggttgcattagaaccataaggtacggtcaaaacaatattccttatgaaatatatcttgatgcaggtcatcaaactataaggcattaacatcgctacgaacaaggaattgcaaacatccatacaacaaacatacataaacttataggttcctaccacaagcatatatcgtgcatacaagaaataagaatcaagctaccattaatggtgtattactgaatcgcaagcttcaacaaccacattcatgactacacacaaaagaagagagttaagtagccgtgtgtttacacatcaagaaaaagacactcatccaaggcatatataaggttcaaaaggttttcacaacactaatccacacatcaagagagaaataagcttattaaccacatacccgccggaagataagggctcattaaggcgttatcaatcaatatcaagactacctgcattacctaatggg

SEQ ID NO: 30440 - DNA, 516 bp, Glycine max
tttaaaaaacggatcgatgttgcgagtgcttttataacatttaaacaaacagatgctaagatttttacaaaatacccttgcaagctcacttctcgataccctctctttttcgaaaccctaagccttccatttctctcttaccttcccagcgtcttgctagtgcctgtgcagctagttcatggagaatcgctccttcgaccacgtcctcagctggctcaaatcctctcggctcgacatcgtcgacctcactgacattgacgtcgaccctggttactccttccaggccatccacgagcaaatgcagccttgtctaccatcaatgctatgtccacagagagaggcgagagccactaaaacaaaacaatgatcaaatcaagtttacatttcagttcagttatgcttctaacggtaatgacgagttttagaaacactgtcgaactcttcagtcacaccttcacttcttcttcattcactttttttccctttaaaaaatattttcttttttccaggaccctt

SEQ ID NO: 30441 - DNA, 500 bp, Glycine max
agcttgcttgtggggcttttatggaggttggatctttgagcttcaatgaagtcctttaatggtgattttccaccatggaaatgcagcggaagacaaaggagaagaggtgagaggaggcgccatccactagggaataagccatggaagaaggagcttcaccaccaagatgagccttggataagaagcttggaaggatgcttcaatggaggaaaagaaagagggagagaaagagagaggggggagcacgaaattgaaggaataaaagagggagagaagtggaactttgaagtatgtctcacaagactctcattcatcaaagttacaacaagtgttacacatgcttctatttatagactaggtagcttctgagaagctttcttgagaaaacttccttgagaagcttctttgagaaaactttcttgagaagctagagcttagctacacacacccctcttataactaagctcaccttcttgagaaacttccttaaaaagattctt

SEQ ID NO: 30442 - DNA, 512 bp, Glycine max
  unsure (1)..(512): unsure at all n locations
ttatataaacttctgagcttcgacctgttgagagatacaagttagtcgttgcctaatagcttgggcgctttacactatgcacattattatgcagagagagtgaggggaccccaaacatcttctacaacatatctccagagaagtacaattttccaacgtcgtcttgtgctcaaagctgactttcaacattcaattcaaatacaatattaacaacataagtcaaaaggaattaagaatgttaagacaatttaaaacttccctttcgtgtgctattgtacatattgcttattgaaccatggacattactttttgatgattactttcagtacttgaggattgagttactgttccattgcctttggactatgttagactattgacaagcgtatgaatgttgtcgcagtttacaaaatttataaatgagactgtctccatanggacttgagttatttagtttcttcagataaagttaaacaggttaatagatatatacaaaggatttgatcaaattt

SEQ ID NO: 30443 - DNA, 487 bp, Glycine max
agctttgatgatgtctatattgagtcacatgtttgtcatcatcaaaaagggggagattgtgaatgtatgtatacatgattttgatgatgtcaaaagaagaatcaaacaaggctcatttgcttcaagattaatacaagattgttttaacaaacaaagccttgattcaagctttcttcaagatcaagccttgcctcacaaggaaaggtttcaagtcatccaagggacatgtaatcgattaccaatggttcgaaagtgtgtaatcgattacacatcatatgtaattgattaccagagactctgaacgttgggaattcaaattttaaatgaagagttacaattgttcaagaaaaacaactgtgtaatcgattacaccaattctgtaatcgattaccagagaggattttcaaggaatatcgccaacagtcacatcttattatttggattttgaatggccatcaaaagcctatatatatgtgtgacttgggac

SEQ ID NO: 30444 - DNA, 452 bp, Glycine max
tttagaggtttaagttataatttttattttcaaatcatcaatagttatatcaaatttgtcctaatactggacacgtgtcaaactaacattcaatgttgagtctcttttctttttccttcattctccctctctgttgctaagtgttgttctccgtgagtgaatgaatgtgtaatactaaataacttttagacattttgatggaaggattttcaattttaatcacaaaccccaccaaataaaataaaaagtctaaaatccacattactacttttaggtgttgccatagcttgcactcaaaaaaccatacaacatcaacaaaaagtcattttttagagccaaacccctcatactatgttaaaactccaaagagaaacacaataacctcaacatccttcatttcaagaaaggagcaatgaaaaatgtaagagcacctcaacattgtcaaaaaattg

SEQ ID NO: 30445 - DNA, 473 bp, Glycine max
agctttgagttttatattttatttgggggaagattatcattttctcacttacttttatttgtaatctttgcttcaattttcaggccttcaacagatgaacgaactgcaatatagaattcttatcagaagaggtacaaatagagctaatacaatggtaagacatcaatcagataagttactccaccacacacactaacatatttgtgaggagaaaaaaaaatgttcccttacctgaaatggcaggcatgagtgcaccaacacaaattatcatgcaagcacccagtaaaacaaaaataagcaaaaccgtttttgtacctcttgtgtttctcaatgaatctttttaaaggcgagggtggtatgcttctatttgaggaaccaggttttgtgatatgtagaaagcttcctcatcacaaacttgatgattaagaagcaaacaaaattttgcatttctgcaaaggtgtgaatacaaaaca

SEQ ID NO: 30446 - DNA, 513 bp, Glycine max
tgtatatttgggataaaattgcttctattttgagtttgttacaccttcaaaaatgggagcaaaacattgtggatgaaatttatgtaaaaaattgtactgaaaattcatcatttaatttttcattcccattttcaagaataagagaaactaaccctaaagggacaaatggagaactgtactttaattttgtccagattggcatccgagttttaatgagctgatagtaaattgttggtttcttttcttggcttttctaattggtttccatgattctctatggtgcttgtatgattattttttgacctgaagtgtttaaggatgaccacgtccaattgctggctttattttagttcaaagatggattgcttttttaacttctttaatgtagtactctaggaagcagagaaagtagtaatgagcatgagtatgttatgatacactgggtcccatcatgtagagtttgtctgataaattagaatgacattggtatccaccagaaagccaaaaaaaaaa

SEQ ID NO: 30447 - DNA, 509 bp, Glycine max
agcttgtcagctatgtggagcccatccaatggtcttcttgaaggattcatgaagcaatttcgatggctataaagaacaagttgaatcattccaattctccaacacattgtgctagatttcttattgagaaatttgtgttttagcttcaaccctctctatgagagtgagccatttttgtattatgctttaaaagcttgtaataatcatatatagaattgtgagatttagttcctaagtggaatcctgttgtgaagagaaaatctgtaatctgtgcggttggatcacagacccattttctgtaaagtccaacaatggctagaagaagagaaatccagtagtatagctggtctagcaaaggctaggtttgaagtctagtggagaattaataggttgtagaaattcgctagtttgttggtccagttgtgaattggttgtgttagtgaaatcttatttttaatagtgaggactggacatagccaaaggttaggtgatctaatataacaacctct

SEQ ID NO: 30448 - DNA, 425 bp, Glycine max
tactgggtatgcaacttgttaattatatcaaccctgttaaatgtcaataaaaacaaataaaatgctgaaagaacatagacaattagctcttatcctaaataataaaacagttaatgacctgtcattttatcaactaaagaacatagacaatttttcaactgcatattgttgaagttggatttaacgtttatttgagtttcaagaaaaagctacctgtcattttatctcatgacttagctcctctgaagtgtgttgagggtactgagatagtaaattttgcttggatagttgtcagtaagaaataataacgaactgtagtttttcataaacttatgtattattgtccgatgagttttgctttccaaaaataaaatttcccttttttaaactaatattgatgcacaatgctcatttaagcacatttt

SEQ ID NO: 30449 - DNA, 508 bp, Glycine max
  unsure (1)..(508): unsure at all n locations
agctttagaagttgtaggtatgtgacagtcctgtcgagagtcctttggcttcggttagtaccagaacggtaattttttttcgatgagtcaattgcagagctttttccttgtgaaatattgcaggtagctcatagctgacttccgtttgactgagatgtggttgggactaccttattttgaaatactttacacatgtttgggatgaattttttacgggaaaacaattttttttttatcaaaagctcccgcagaaagttaataaaaataaattatttaaatcatttgtctgtgtgtgtgtgagagagagagagagattaactaggctatatttgttgctgaaagaagcagaagcatgcaaatttgacttgggaaaagaaatcaaatagtctaaagctaagtaccggctaccatgacctaggacggaacanaagttccacatacctgaccaagcattaagtgttatataggacatatgtaatgcccttaattcaattttaaattccaagaa

SEQ ID NO: 30450 - DNA, 491 bp, Glycine max
tcagaggttgcttgatgagcttaacgacaatactgtcattgtgtttgttaacaccaagaggaatgcggatcatgttgccaagagtttggataaggaagggtatcgcgtgactactttgcatggagggaagtcgcaggagcagagggagattagtcttgaagggtttaggaccaagagatataatgttcttgttgctactgatgttgctggacgtgggattgacatacctgatgtggctcatgtcatcaactatgatatgcctgggaatattgaaatggacacgcaccggattgggcgtactggtcctgcaagaaagacgggtgtggctaccacgttcttgactcttcaggactctgatgtcttctatgacctcaagcagatgcttattcaaagtaacagtcctgttccacctgaactggcaaggcatgaagcttcaaaattcaaaccaggaactatttcagacagaccacctaaccaaatgacactgtttt

SEQ ID NO: 30451 - DNA, 475 bp, Glycine max
agcttgtctttggtttagatatgatttatacatgatttaggacttgtaggatccaatttgggcaaaattggatgagggcaagagtgatttcgaaaatctgcactttatgcagaattttactgttgaaatgtgcagcagaattttgtgcttgtgcagaaaatgcttatgtatggctggttgtggaaagggttgtacatattgggttatggacgttttctagtagatcccaacgatcaaaatgtatacttatgtactagggacctccagtaaaattttcgagtcgatccaacggtgaacgaattggaacgaagagaatgttactggggtatttgagtaaggaaaactgtggtattggtttgtgttttaggcagagttttctgcctctgccctgttttcttggtttttgatagttcatgatgtttggatgttgaatttcttggatgttgtggaagcttggagggattgatggggaccc

SEQ ID NO: 30452 - DNA, 492 bp, Glycine max
ttgcgagattcctcacggaaaacgttacggtaaacgtttttgaagcgcctcggcttagattttcttcacttaaacaatttttccaagcaaattcgaaagagagagaagtgcctaaggggctgaacccttttcttattcacttcctcccctatttatagcaaaataggggaggtggttgccgcccagctcgcccaggcgagctcagctcgcccaggcgagccaggttgcttcctccagaagcaaccgccttctggaggaatattctggagggcccaagtgggcctgggtgctatttgcacccccatttttactaaatacacccccctctgctgttttttggtgattcttttttcgtaaagttacggaaacttacaaatttcgtaacgatacttgttttctttccgtaatgttacggaaccttgcggattacataatcatcccctttttaacttacggaatgttacggaaccttacttaattatgcaacgatgc

SEQ ID NO: 30453 - DNA, 511 bp, Glycine max
agcttatcatgcactacttgaagcttcgaactaaaacttttgtcactccactcatatctggccttcacattaaccagacttaacaccgccgacaacaacgtcaaggaaatcttgcaccccagatacaaaggtttctttgaattagtttgcaatgtatcatacataggggcatgtgcttgctgaaaagactcttgtccaaggtcacgaatcatatcctccaagagatctcccatttctacattaaacggttcagattgggacccactctgcatgtctgtcaattcactatgtcatatccacgtcgtataattcttcttaatttcatcacacaacatagctctatcaaaatgctcattctcaactagagcaagtgtttttgtttattttctccatagttcattcaaggattgcacatccaactaaacagcacagtccttgattttctcacaggggaaaaaagattgagaagaaacaaaaaaattgacgacaaatcggaaaaaaaaactgtcac

SEQ ID NO: 30454 - DNA, 517 bp, Glycine max
tccataggtggatctagagtcctaaggatttgttggtctccaaattgcctttatctttagactaagatccaacctatgaattagccacaagtagggaaatgccctctcaacataactaacccatagtacaagtaacaatctgaacggtaactcaacaacagtcaagtgagcatggagcccctcaataatagtcatcaagatgccttttagccctaggcttgcataggctcgggtatagagcccaaaagtgtgcgaggtaaaagtgacaatggagtgtgtgtggggaacatacaaacctcataatcctaaaactacccgaatttgtaaaaggaaaaaacaaaacaaaatatacaaaatgccttttatcctagagtgacatataatgtttataaaataaaaatataaccaagatatataaataaaagaactcatacaaccaagacacaaaacatacaagaaaaaaagtaaaaaaaagggggtggcataaatatttataaaattatacttttgcgcaatt

SEQ ID NO: 30455 - DNA, 498 bp, Glycine max
agcttcggagactttttgattgtcatgtcttcatttttgttttttgcctgctaatcataaatacatcagtccaacagaacgcccacttcaaaaatgaaagatatttctcttcgataaaagattaaattttaaaacaaaacaatatattaaaagcatttgaacctttttccatgtatctgaaacaaatatggaaacatcatatgtagtttttggcccaggatttttaataatctcatcaatattctgtgaacaaaaaaatgcattgtgtcacatatctatccagaaagatattaacttaagaaaaaagttcaaaagttaagaattttcatcaccttaaaaactgattcccggtgagtatcagtgtcatcttgaattacaaccaaatccttgtttacatccgtatgcaaaagggcgcttccctcattctttatattgccacttttgctgatccccaagtcattctcactatcactgccatcatagcatttatctggattt

SEQ ID NO: 30456 - DNA, 424 bp, Glycine max
tctacttctacttaaaaaaaatttatatttttactatcaaataatttgtgttttatttttcttataactctaaatttgagctttaaattcaaagcatctttcgagttagagttttttctacgtctttaacttttagattcatgaagcatctcttgaaagaataaagtacaaaaatgggggtccaaaactactagttacagattatataaaatattaaatttattaagtaatagggacaaaaacataaattctattcattaaacgacaataatatggaggaaaataatgaatgatcgccacgcataccgtcttccctgtttttctctgtactatataaactcagctcttatgatcgacacaacacgtcacaaactctcatgcttttttccacttgcaaactccaaattcactctgacagtttttg

SEQ ID NO: 30457 - DNA, 471 bp, Glycine max
agcttccatcatcttccaagggaggaaggcgcgcagagtcgccaccaacgtttattcgaggaaaacgtcggaaaaatcggaaaggtgtggtctacgaaccttaagtgtgaaaggttcgggagttgtttttacacacggggaaggtattagcaccccatgcgtccatcacaaaggacggcaaccttcaatcaagtgtgcaaatatgacttcaaaattatgtattttcccttttatatgtttttatgtcttttatacctttttgtattttttatctttttgtggtcgacaagagtgtttccctcgctcctacgtatcctcaattgtgatgaggaaatcagacttatgtagttcttttagaactaaacattggttaagttgttttgatctttttccgcaagatcgattttagccacacaaaagtttgttaaggagttgggccattaaacgatcttttgattcttttgaaaggag

SEQ ID NO: 30458 - DNA, 472 bp, Glycine max
ttaagcccaacatataatcgattaaaatgatgcagtaatcaattaaaacaacaaatcttgaaccataacaccacaaacacataaattgtaatcgattaaaccatgaggtaatcgactaaaatggaatatttcaaaaattgataaatgtcataccctaatttcatccggggaccattgtttggtggcatgaaaccttcgcttgaccacctcgaggtacttaacacccatcgttaggcaatccgtgaagttccacaaacatgctggaagtcgaaaggaagtattgttgcacaatccgtgaagttccgcaacattccagaagtcaaaaagggcattgtggtgtgatccgtaaagtttcgcgacattccggaaagaaaataggtgtcgttacgtaatccgtaaagttccgtaatgtttcggaaaaaggaatcaccagaaaaagcaaaaagaggtgtatttagtaaaaaaggtgtgc

SEQ ID NO: 30459 - DNA, 501 bp, Glycine max
agcttgaaagaagaatatttttaattaatgtaaataaattaaaaattaagtggcgataatgaaggttgattaatggttatctagatttcataaagttagaaaagggttaattaaattataagagtttaaagtggagaacatttttgtaaataactatacaactagtttaaaaatagaattttagtttaattagttggtgactaattaaagtgtttggttatatgatgtagaataattaaaataagttagagttgtaacacagtgaaaaattacaactcagactgacagagaaattgtgttgtgtcatttgtgtatgtatgaatttaatttcaatacttgtatgtttttaattatagaatttgcgtgctatatatgtctatacttagtgtaaataatttgtttagtctaccttgacaaggatatggaaactacttaacaaaaatttcatctgtaacaaaaatacgttgtacactgagtgacagtgtaatttaactctgtgtg

SEQ ID NO: 30460 - DNA, 515 bp, Glycine max
ttgattttcaaatttgggactatattaagggagagatcagttggaagactttgttctctggacaagtcttagagattcaagcctataataaaatctatctgttgaattttcatgaactttgtcttaatttactttagacacaatttgaagcaacattcatgttgaagaccttgagagataaggtcagtttaaggcttatctatgacaaacaaggtgtctgtcttgttttgcgagctgtgtctggtagtgcatgtttttatttaattttttgcttctgtggttttcaaattcaaaatacggttacattttattaaactagagagatttttttttcaaccatgtatattataaaaatctatcttcattttctaaaggcctaagcaaaatagagtggttgcagtaaagacatttgtgaagtatgggaaaagtgttgtaaagaaaattttatttggaatgacatagaatgaattttggtgcaatatttaccttaatgaaaataaggttatgttagattt

SEQ ID NO: 30461 - DNA, 457 bp, Glycine max
agcttatcgttacactcctttagcacattgtcataggaacgagtgggcgaaggtggaagcggagggccattcaacagcgtaaacatttcccttccaatgtcaaacgaaaccacaatttcagagtcagtgtcagagtcagaagtcatggttgcaagccaaaatatggtttcagtggtagcgacggaactagagacgagacacaaaggtcgcaacttggtggcatcaatttgcctccaagacccggtggtcaacgaatacacttccgctcgatcaaccctaacgttgtcgagaaccacgacctgatgctcctcgtcgaacacgcccatggagattctaacgatcttgtaatcattagcgacggggctgaaacccaatccaacgtagtattaaccgaatagggttgtgccgggcacctgtttgatctgtctggaagcggggttgaagaaggaaagcgcgg

SEQ ID NO: 30462 - DNA, 511 bp, Glycine max
  unsure (1)..(511): unsure at all n locations
tgtttcatcgtttacatttaaattccttttttatcagntagttctacttctgcaacttgtctttttagttatagcatccccatctttcttaaaaggatttccattctagaattttaacttctgcactgtagaggatataggcgtggtttgcttctggttacctccttcactcttatcactgcacggtttgcaacgtactgggtttttgttttttatcatcacataaattgaagagtttagcacagcttcaactagaaagactaaaggaactcatttttgtttcaacttgtgtatatccaacgcctgtgttaggcctgttcaagaagtggatcacttaacctgagcttacaaatgaatgttgctatatttgacgctgggtaacatcttgaaataattttgtaaggttaactaaaagcaatgttacaaaaagtcgatgattaaacttcttaatattttataaataaaaccataatatttggcttattggaaatttctggttgcttggattttg

SEQ ID NO: 30463 - DNA, 503 bp, Glycine max
agcttgcaaaccattccattctccacacatattactagctccatcatatccttgacctcatatattttgaatgttgagattatgatgagacaatattgaacatatcccatgcttaagaatggatgatgtagtatcttgcatatgtatcatatccaaaaaatgctccttaacatatccattcttatcaacaaatctaagaactagagttgtttgttctcttttagattcatcatgggcttcatcaacaatgaaacaaaattttgcattaccaatctcttcttgaatttcatcttgcacctttctagcaaagacatatagaatatctttttggatagtgagtgaaatgtatcttacattttgagggacgttttccgagataatttcatctatttccttattataagaagctaagagctttatcatttcaagaaagttaccacggtttccagatcccacactttcatcatgtcccctaaaaatgcaagcttgaaatgtcaaccatt

SEQ ID NO: 30464 - DNA, 434 bp, Glycine max
  unsure (1)..(434): unsure at all n locations
tgaagcccttaaaattgagagaaatgtagctttttgctgtaaactgtcacatgagatttgaacatctactggatgagagtactattgaagtgaacagtcccagaaatgctttcctgcatctgatcaggaagataaatccggatatttttactcagatcattattaatggatcatatgatgcccctttctttgccacacggtttagggaggcactcttccattattctgctatttatgacatgtttgacactgtcataactagtgaaaatgaatggaggatgacgattgagagtgagcttttgggccgggaggttatgaatgttatagcatgtgaaggntctganagggntcaaaaacctgagacatacaaacaatggcaggtttggaataccaaggctggttttaagcaggtccctctgaatgaagaattaatg

SEQ ID NO: 30465 - DNA, 441 bp, Glycine max
agcttctagcttattcaatttttatggaaaaaaaggtcaatggaaggatcaaataattaggcaaaagccatctatatttccctgaagatggaaagctttgcatggctaaaaggtgcaatattgttcgctacaaatgcatgcatgatgggttctactatatatgtaagccaaggtccaacagccacatctgttgttttcaatggattatgatcgagtggtcgatatacatatatctatgtatgtatgttacaattaaatgaaatagtaggtatagaataaattgctcttttctcctttttaattggtttgtgaaatttgagcatctatttaacaagttggtgttttcttaagagaaactgtatttatacatcaaaactatacaacttttttttaacaaatgagagacataagtttatatattgagagagagaaaaaaaagac

SEQ ID NO: 30466 - DNA, 737 bp, Glycine max
  unsure (1)..(737): unsure at all n locations
tggtcgttccnnccagcncatgagatcgttgaacatactttaagncnacactagttgacacctctcacaacttcctcacccctaaattgactattgaatccggggcgatttttttttatttgccaaaaggctcagcccctgatgcacttttctctcttacgaatttgcttggcaaaattgattccgtgcaaaatatcttatcctaaggcgctaaccaagcatctccgagtcgaaacttcctaaaggatatcgaccgaatcttaagacctttccttcaattcaaattcttccacactgttcttgtctgatccctagaagcaagtgtatagttacacatttataccaaagcctttttacgagtggatctcctacttatcagataaggctatttacacagcttgagccccattttcagatcttcctaaacatcgagtcaaaatgagtgtccgtttatttaacagtgtgcgcaaaacgccgatttattacaatgatgccacgcttatttcaagttaacaaataagaaattcggctttggtctgaaaatacacaacctaactttagggacctgtatgtaattttcaaaatcccaattgggtgaaatatttctcagaactttaatgtgtaaaaccaccactttgtgggtacccccctttaacacacatattgtaggttaaatcgggggacccaataggaccagctttctcaataaaaaagggttaccaagtctgtaatcttcg

SEQ ID NO: 30467 - DNA, 442 bp, Glycine max
agcttgagtttttccttctttggggtccttctatttgtctgaaagctaacttttttctactccccaaatatacagttttcgcacatgtcaatttcaactgattgaagtcttggtaatttcccttttgagtgcataatcttcatcccttggacaggtttgaaggggactcttctctccttaagagaattttggacaagtttaatggacttcaaacctatgttggtgagaggtttgactccttggaacttcaagtggacacacgattcgaggagatgaactcaaggattgcaaaggttgaagaagatgtcaccatcattcacgactgccttgatttacctccaccaccaccatcagtttagacattactattattaataggatttttgatttcttaccatgtatttggctttattaatatgacaattgaacacttatttctttt

SEQ ID NO: 30468 - DNA, 511 bp, Glycine max
ttcctatcttaaagatttgtttggtaaatttaacaaaggaaaaagtgatcttaatcacatgcttaatgtgcaaaagcatactacaaataagaccgacttatggtataacaagcaaaccaccttttcaaagaaaacaaagtttgtatcctcaaaagaggtgaacccaaacaaggtctacaagtgaggaacacagtgaattctaggagaaatgcaaagacatgtcattattgcatgaaaagacttctttcaaagcaaaaaacattttttctacttcaaaaccctttaaactacttcacattgatttatttggtccttctagaactatgagtttagatgaaaattactatggcttagtaataatggatgattactcaaggttcacatgactttgtttttgaaaaccaaaaatgaagcttttaatgcttttcgcaaacttgccaaggtgattcaaaatgaaaaagtctgaacattttttcacttagaagtgatcatggaagtgaatttcaaaatg

SEQ ID NO: 30469 - DNA, 499 bp, Glycine max
agcttgcctcaaagagatccaggaaggataaagcggctgaaggaaccagttccgctcccgaatatgacagccaccgttttaggagcgctgagcaccagcagcgcttcgaggccatcaagggatggtcatttctccgggagcgacgcgtccagctcagggacgacgagtataccgacttccaggaggagatagttcaccggcggtgggcatcactggttacccccatggccaagttcgacccagacatagtcctcgaattttatgccaatgcttggcctacagaggagggcgtgcgagatatgcgatcctgggtgaggggtcagtggatcccgttcgatgcggatgctctcagcaagttcctgggataccctttagtgctggaggagggccaggaatgcgagtatggccagaggaggaaccggtccgacgggtttgatgaggaggccatcgcccagttgctatgtattccggggcaggattttgcccggactgctactgg

SEQ ID NO: 30470 - DNA, 392 bp, Glycine max
tctcccccaattttctataaatagggggagatttgtttgttaaaaagggttcagccccttaggcacttctctctctttcgaatttgcttggaaaaattgtttccgtgaagaaaatctaagccgaggcgcttccgaaacgtttccgtaaggaatttcgcgaaggttttcgaccgttctttgacgttcttcattctttcttcatcgttcttcgatcttgaacgggtaagtacctcaaaccaagcttttcgattcattctataaaaataggtttttgaagtttgtcatttcaatttcttactaagtaaatggatcgttttcaaggtccaacgccttaaaatgatcaccttttaagtaaaaaagaatcgcttgataaaaaagaactacgtaggtct

SEQ ID NO: 30471 - DNA, 383 bp, Glycine max
agcttcatgtggatcgacattcattatcaacgaaaacgaaaggaatggacaaatgtggtagagaaaatgtgttacagttagagagatggcaatgtcaggagctgcgagtatgaccctatactcaatgggaaaacatcctttaatgtatattcaaatgtatcaacacaatcgtcgttcagggatcaatacttctcatcatgaagaaagactaaggaatctttagaagagagatgaatgacatataatagttacactagggaatggttcaaaggaacctgggggaatgttgagttgggttaaccccactaagggcattcttggttagttcagaggactcacgggcttcacttggaattcctaactagaacagaattgtatccagg

SEQ ID NO: 30472 - DNA, 318 bp, Glycine max
tttcgcaaagatttcggtaaaatctgtgtctaatccatgggagaaggctctacatattgcctcccttggccagtgttatgatcaaccggatgaggggcttcacctttgggaacttccagctatcacccatgggaggaaaaatttggaaagatcttaagggggccctttgggggggaggaaaccgtacctcttaccaaggttcaatccctcataaccaaaaattccgagaatagcccaaatttggggccaggatttggcccccgggagccaggccaaaaatgggggggcgggaatcccgcaaaatattggggaggcaaa

SEQ ID NO: 30473 - DNA, 511 bp, Glycine max
agcttagtatacaattgtatcaaaattttgttttacacatataaacagagtaatagagatgcatgaagtatactattcttgtgacacgaggaaacccatttcattcttagtctacacataaccatgtccatgacagacctattttcaatctttaatcagcatgactttaggcatattatcatttggaacataacaaccaaacatttgttctctaaaaaacatgcgtgattttaaaataattatccaatgaaaaggtgttttttgaaaaaccaatcagtgttcaagactaaaactttacaccatatgttaaaatctaataaaaccacaaattattttttgaaaacccaccttcgaagggtagtagaacaaatatgaaatttgaatgggaaaaattggattcataatattgtacatggtacataaatcaaaaacaaatgaatacataaacaaaggaatttgatatcagtaatgatatttttgttgttcagttgggtgttgacaacagccacaa

SEQ ID NO: 30474 - DNA, 518 bp, Glycine max
tcttaggtgacccatagtgaacaaattttattaaccgttggattcatctgacttttatggttgcactctacactctccgcactggatctttcttcccgtccctttctctctcaatcctccaccgtcactgtttactctctccttctcccacttcgctattctcatcagcatcgtcgtcaacggccttgtttccgcgaccaccattgtcctcacctatgtcatcctttacggcaagggtgtctcacttcctcggtgagatcgaaaccctctccagcggctattggatctcgtcagtgttgcatgtttacacggtaacggcattgtcgctctaccaatgatacggaggaggacctcctcggtggcttctaacggcacgaatgagaactgatgacggcaacagtggtattgtccgtgaagaggttttcaactgctttattgccactgtaaaatttggttaagtttattcccttatggagatttgtttctgggtttgggttttatgccctggtttttggctg

SEQ ID NO: 30475 - DNA, 508 bp, Glycine max
agcttggtgctctttgcattcagtgtttacaggataaggtttgtgctctacacttccttgctagtgtgggtgcattttgggaactgcatattgcacatgacggtttttgttaaccaccttagttattgtaggttcattcaattcgtgaagcagctgctaacaacttgaaacgccttgctgaagaatttggtcctgagtgggctatgcagcacataattcctcaggttcatctatttacttaatttattattaacgaaatgatacaccaacatatgtcaacattaattcgtctgtgtgggtttttgtgcatgtcttgaaatatatgtttgctatatgctattaccttttctattctcccaagtgtaacttcagaagtatctatatggaatgtgtggaacaggttttggagatgaacaacaacccacactatttgtatcggatgactattcttcgggctatctctttgcttgctcctgggatgggccctgaaatcacttgttcaaacttg

SEQ ID NO: 30476 - DNA, 516 bp, Glycine max
tctactcacaggcccttggtcaatagaatctcatggcttttccaagaggtttgaagaggcggatcgaaatctctctgtttcaatgtcaatcttccttcttttatgctgaggacaagaatgttccacatcataagtgaaacttttgggggaaattctgaaaatctggaaatcagttgaaaagctggtaatttttccatcactgtgcaatgtcttatgcaacacctcaccatctttacacaaggtaatgctattggggggctgttgtgccaaaccaacattaacatcatccataggagcagaaaatgggaacccaatagtgaaatttgtaacactttcatctgtggatttatgcagatcatttcccataactgcttcaaaagaaaaatttgcccacttagtactacattcaacattttctagtttactgtttactgaaacaaattttgatggcataacttcttttgacaaacttcttgatgaattttcaccagcaacttgtgaaagacttgaatgata

SEQ ID NO: 30477 - DNA, 502 bp, Glycine max
  unsure (1)..(502): unsure at all n locations
agctttgagggtgcgtagcccaccatcttttcatagtagagtatcgataatgtgtctaccatcacgattatcgtctccctttccatcattgggggtaccacttgggccgccagatccctccaccttttgggcgtgttctttgaaagatccgtccccctttttgcaaatgttctgtagttgcatcctatccagaaccatatcaaaattgtactaatactgcctaacaaaggcaaccattaggtccttccaagaatggactcgggaaggttccaagttagtgtaccaggtaacagctaccccagtaagactttcatggaaggaatgtatcaacaattcctcatcttttgcgtattcccccatcttctgacaatacatctttagatggttcttgggacaagtagtccccttgtacttgtcaaagtccagcaccttgaacttgggaggggtgatgatattgggtactaagaacaactcttttangttagcaaaagcttaatcttca

SEQ ID NO: 30478 - DNA, 520 bp, Glycine max
tgccacccagctcgcccaagcgagcaaagttgctttctccagaagcaacagccttttggaggaatcttctggagggcccaagtgggcctaattgctatttgcactcccctttttactaaatgcacccccttctattttgttggtaattctttttccgtaatgttacgaaactttacgaatttcgtaacgatacttatttttcttccgcaaggttacgaatccttacggattatgtatttactcttttttagctttcgaagaagttacggaaacttacggattgcgcaaaacacctcttttcgatttccgtcacattatggaatttcacggattgcgcaagcctgcttccttttgatttccgacacgtctcgggacttcattcattgtgcaaccaaagacgccaagtgtcccgaaacgaccaatcaaaggttgtatatcatcaaatactaatccccggacgaaattagggtatgacacaagatcaattccaagattctccactaagtgtgcttaagtgtca

SEQ ID NO: 30479 - DNA, 502 bp, Glycine max
agcttcaaaactcttttactcagaatctaggtgtccaacacccctccattcaatgggttttctaggtttgagaagtgaaatttagaatgaggtaaatttgaagcaaactctcacctcacacaagtccataatatcaatctaaacttgctcaaactgaatttacacctaaaattccaccgaatcaaaatttgactcctcaacacccaattttgccctacaaatggctcttggttcactttggtcatttgtttttctccctagcacagtccaagctttctcataagtcctaaaagacatttcaagctaggattaactcactttaacctccatttaccacagaattcagacttaaccttccaactctcaaagcctcactctttttccactcataacatcacattctcactttctaaccctaaggtaactctacccttcacctctatcagttttccataagtaatttcagcatattaaaacatcacaaacatcttaccaaaaaccc

SEQ ID NO: 30480 - DNA, 492 bp, Glycine max
tgttcaagccataaatcgacctctttatttttataccaagtccttattaccacgaatacaaaaacctttaggttgttgcatgtatattgtctcactcaaatcaccattcagaaaagttatctttacatccatttagtgcaactccaaatcgaaatgagctatgagggtcataatgattctaaaggaatcctttgtcgatataggggaaaaagtctctttaaagtcaacaacctcattttgcataaaatcttttgtcactagtctaaccttaaatctttcaatgttaccatttgagtctttctttgtcttaaagacccatttacaaccgattgccttataattctcaggcaacttaactagctcccatacaccattaactgacatagattgcatctctttattcattgcatgccttcacattttttttactaaaggtaagaaacaacttcatgataattcttttggatcaataatgtctccaatgtcgtatgc

SEQ ID NO: 30481 - DNA, 494 bp, Glycine max
agcttcatgatgatgaatcttgttgattcaagtagttttgatgatgacaaaaagcccaaagaatgatttcaagattgagtcaacaagttcaagatcaagattaatttcaagtttcatgagaagaaatcaagaagattcaagaatcaagagaagtttgatttcaagattcaagagaagaaatcaagaagacttcacaagggaagtattgaaaagatttttcaaaaaacaaacatagcacagttttgttttcaaaataatttttctcaaaattttccaagttaccagagtttttactctctagtaatcgattaccaatggcaaagtttgatttcaaaagcttttaactaaatttgcaacgttccaattgttttttaaatggtgtaatcgattacaatatattggtaatcgattaccagtgtatctgaacgttgaaattcaaattcaattgtgaagagtcacattttttcataaaatgctttgtgtaatcgattaca

SEQ ID NO: 30482 - DNA, 408 bp, Glycine max
  unsure (1)..(408): unsure at all n locations
tttcgcaaagattacggggaaaactgggacttatccatggnagaaatctctacatattgcctcccttgcccaatattatgatcaaccgatgaggtgcttcacctttgggaacttccagctatcacccatggtagaagaatttgaagagatcttaaggtgtcctctaggggggaggaaaccatacctcttcacaaggttctatccctcattagctagaatttccaagatagtccaaatctcggcgcacgaattagaccacaggaagcaagtcaaaaatggggtggttggaataccgagaaaatatttggaggcaaaagcaagaatcttggcatgtaaaggcgagtgggccccgatcatagatattctcgcattgttgattttcggaagagtcctctttcccaatgtgga

SEQ ID NO: 30483 - DNA, 449 bp, Glycine max
agctttaataatattgatttatcgaccgttccatcgaaattatcgtaaaaaatgtgacgatatttttataaataataatgacgaaggtttttacaaaactgtggatgaaaccgaaaattgacatgttttttacgggaaccgacattgaaatcaataattcaacgacaattttgaaaattcctctttgaaagggatgagttttgggttttgatttttgcaccctctttctcagtctcactcgatccctctctttgcggcctctctcactctgtctctcttgactcttacaccctaaaacgcggtggtgtcgccgtcgaagctgtctccagtgccactgtcgaagtttgccactctctacgtttctctctttctgtttcgctcaaccccgaaccttctttcactctatgcaaattttttggtttctgtgaatgtttcattttctaaaaccc

SEQ ID NO: 30484 - DNA, 486 bp, Glycine max
  unsure (1)..(486): unsure at all n locations
tcatgatgatgaatnnngttgatttttgtttttttnntgatgacaaagatgatgacaaaaagcccaaagaatgatttcaagattgagtcaacaagttcaagatcaagattaatttcaagtttcatgagaagaaatcaagaagattcaagattcaagagaagtttgatttcaggattcaagagaagatggattcaagaagacttcacaagggaagtattgtncngatttttcaaaaaaacaaacatagcacatttttgtttttcaaaagagttttctcaaaattttctaagttaccagaggttttactctctggtaatcgattaccagtttcctgtaatcgattaccagtttcctgtaatcgattaccagtggcaaagtttgatttcaaaagcttttaactgaatttgcaacgttccaattgttttttaaatggggtaatcgattacaatatattgggaattgattaccaatgtatctgaacattga

SEQ ID NO: 30485 - DNA, 500 bp, Glycine max
agcttaggatctactcagttaaaaaatttaaagtgtgcatcaactagccaaaaccattaaaggaattcatagaagacatcacataagccatatgaatatgaccacatccacaaagaaattgagctagttataattacaaagtatgaaatgagacaaggcaataatcatgtgattgattataaggcctaagatgtcagtccgaactatacacaacttcctgctctcactacagagcatagggaccaaaacaagacaaactaatggagaggcaacattaaaggttggccagatagttaatacctcttattaatctctggttcttaaatcataatgttgattgagccttctgattcttaatcataatattgagcaagccttttgtgcctttctcttcttttttctttagctttgggggttgaagaaccactttgatagtgggcgcaaagacaactttcacattctgttattaactggggcacatgaaaacttgtgatataaac

SEQ ID NO: 30486 - DNA, 495 bp, Glycine max
tagaagggccgagagcggcgaatcattgattttaagcatggtgttagaaggtaagttaaaggcttgtcagaggtcgaagagaagtttgacagaacagttgagcaaaatagaagacaatatgttgataatcatcaaccaatataaggagaaggtgaacttggttgctagtcatgggcagatgttggaagatgaacatgcaaaggtatcgactttgcagattgaaagggaagcgagagagagggtgatagagttgttgcacggggaagctatgaaatagatgaatagattcattctcactctgaatgagagtcaagagcttccaaggttgttagccaaagccaaggcagtggttgacatgtactcggctttcgatgaagttcacagtcttttcaattactaccaacacatggtcgaactaatgacccatataattaggaagtcgttaagcatttgggttgtatttatgctttgacttttgaaagatctgatgaacca

SEQ ID NO: 30487 - DNA, 490 bp, Glycine max
agcttgcatttggaattgctaaagccccactccatcattaggattagtacctgacatctcaaacaaacaaatcaaacgtaacaagacaattatagttgctgtttgaatacctcacccactcaagtgtatcacacaattatggcttttctctaatgaaacactcttgccttttaccactctaattccccttgagttcttaggcaattcaagagattatggccacaacaaagaacaattcaccaatatgtgtaaggtaaggctagacaaggaaaaggttaaccaagaaaaaggctaacaatgtttttaggcacaaatgaaggaaataaaattcagaatttaggaattcaagtaacaatccttcatgcaaccaatatattaccttaaagagtttttttttttaagttcttcaagcatgaaccattcagcccaatttttttttttttttaattttgcttatacgaaattctgcttcttttttttttttttttta

SEQ ID NO: 30488 - DNA, 489 bp, Glycine max
ttgcggatttggtcttcgccagtgtaaggatttaagtggatctgaaaagaggcaaatttaatcatcctgcttagacgaatgagaaaactggggcaaataaagagggtgaggatgagggagaaacccatgatgtgactgccattcctatacggccaagtttcccaccaaacccaacaatgtcattactcagtcaataacaaaccacctccttacccaccacccagttatccacaaaggccatccctaaatcaaccacaaagcctgtctaccgcacttccaatgacgaagaccacctttagcacaaaccaaaaaaaacaccaaccaagaaatgaattttgcagcgaaaagcctgtaggattcaccccaaattccggtgtcatatgctaacttgctcccatatctacttgataacgcaatggtagccataacccctgctaggttccctcaaacccccatttttttgaggatatgactcgaacgcaacatgtg

SEQ ID NO: 30489 - DNA, 483 bp, Glycine max
agcttaggaaagtccttcttattctgttatacattttttactttatggcatgagatgaagtgcaaagattggacctcttgctagttgttattaatgaatacttaaacacttatgcgtgagggaaacaatggccatgagactgtggtttaagcttctttccttgatatctatcttatgcctaacttcatctaattgttcaggttacattttattcttttctttggataactacatgccttgtaaaagagaagtgatgagggcattaacttcattctcttatcatgcaatcagtaacttttgttgcatacacctttgtacatagtcactgcatgttattgtcacttggggaccaatgaactgttctttatttgcttgaggacaagcaaatctataaatttgggggagttgttagtcggtgaaaaccactaactttggtgtattaaaactgagtaaaactgtttcaaaactctttcaatttatggt

SEQ ID NO: 30490 - DNA, 226 bp, Glycine max
aacttggacctttctctctctagaaaacccaagacatgcagaagcttcaagaaaatgccaaactctactccaaaatctgatttgaagcttaaataggtggctttgctcatgattgcgcgcttagcacaattctaaaccgcttagtgcttattaatggatttcggcttagcgcgtgcctttttcgctcatcggatggactgaaacagcgcactttgctggatgaccc

SEQ ID NO: 30491 - DNA, 502 bp, Glycine max
agcttgtacctgtaaataatgattgtagataatggtattgtaataatgttatccaaaattaacttttattctggagaaacaaaaaattcttaaagcacaaacactacaacttcaataccatccccatcacctattcattatttaatttccatgctcttttttcccattgcaggtgacactatcattgtgaagtgaaggaaagacaaaagtagatcatggaaaaggtattaagacggggaatttgtactcttgaatttcctcagttgttgttgttgttgcaacagcagcagcactgatgtgtttgctaaatttcacatgctttttcttcacaaggtaacttcttggtgacgaaacattgagaaaaggacttactgcatgagaaattataagtggttacatttgaaaaaagcatatactaatctaacttttttgatattgcaagatagttcagactcattttctctgatcaataattggccctttgtagttacttataaaattc

SEQ ID NO: 30492 - DNA, 511 bp, Glycine max
attatcatcaaataaaatagtaagtttaattatctgaattgtcataatttttttatatttctcctagtcatatacatcatgtcaatttcctaagcagtcaaactccaatgacactaattcaatgagaattatatgcgcaagtaaataagaaaatcaccaaagtttcaacatgagaaggtgtttgcttctagtatttatatacacataaagggtgaaaaagtttggtgacagggtgttcttttaccatagaaagaatgcccatgccatggcccgctccaagaagaggaggtgtgtgtatatatatcatgcaagtaagactatttccaattgtatctgcttcatgagttactcattattggtgcagatgatttgatactgtgttcctgattcaagcttatcaattaaatcattattttttaattatcaaaattaatgttagtgaaattaaacacttattctaagtaactttaacattagaggaaatttttggataaatttttttaaaaattat

SEQ ID NO: 30493 - DNA, 510 bp, Glycine max
  unsure (1)..(510): unsure at all n locations
agcttggactggttctgatataaaatcagctaaactgccagaattataagatctcaaggatgaaaatttgttgtctgttgattgagctgacgcagttctctgggggatgtgtgcaaattaatgtcatgcagagagaaacacaagatcagcttgatacaaaaataaggccacaagcacttggaaaatgtaataaacagaatcattcaaagagaatgcttattcaccaagtttgaacaataacactcaaactaaaccaatccttggttattttggaaaggaaacatttgaatgtttggacttcacagaagtgatagttatgaagaccacatctcaactttttaatagatcttctcanaaggacgcgtattaccaggcagtgagatatagtaaaaaacgatcaagaaatccattattaacaagaaactcaaagactcaattctctctgtactagatttgatatattgatgccctgaaaaattgatctgactatctttagaaaatgccatgctc

SEQ ID NO: 30494 - DNA, 429 bp, Glycine max
tgtaggattatggggtacccatcacatgtggtacttggtggcggtcgggcgatggtgcacaacaagttttccacatccacaatgcgcgcataaacccaccatcccctgttgcccacctccaactgagctcacgtactcccacgtagcccatatcctcgtttctctcaacaccgggtccccatcaatcctcccaagcttccacaacatccaagaaaaacaacattcaaacagcacaagctatcacagccaagcaaaacagagcaaaggcagaaaactatgctcaacacatcaaccaaaatcacagcttttctcacttaaagaccacagtaacaattccttcgatccaattcggtaaccggtggatcgactccaaaattgtactggaagtctatagtgcttaaaccttcattgggacccttgggatctact

SEQ ID NO: 30495 - DNA, 511 bp, Glycine max
agcttgacactctcagctgctcttttccagaaaaataagaaataatatcagaaccaagatattcctgcattatgaatagcaaaactttggcatcaaagtaaatttttctagcaagaaaaatatgtttgcccagaaaaatgacaattgtcgtaccttttcagaaacaaagtaatttaccattggaactacttcaccatagagataaactatgcagcagtaatcattacagcatctctatttgttaacatcttagtcctctgcctcatctgaaaatggataggcaagtaagacatctagtattataacaaagatgattacacagaagatgcttccctttccagaacgcatcggatatgtgcactacttgtaattctcattttgacgttgaccttcatccaagcgttaaacattataacaaaataggccactaattaaaaaaaatcattaactaaaaaggcctcctgcctaatctaactttccatataaggtatattaagacccgagcaaatta

SEQ ID NO: 30496 - DNA, 424 bp, Glycine max
aaatcctcaagcttgtcgtgacgcatatgaacaaaacacaaattttctttgtctggatttcaagtcaaccggacaccttaggttttatctaatgtcagcagtgtgctagggttttgaaatgacagcaacatatacatttcataccaatttccttcttgtgttaacaaaggaacacaggatatatcaaaatctaggattaagattctctccaatcaacattctttccaccttcctccagcctctgtctctctctctctatatatatttcttgttatttttccatcattttcttttttctttccattattttttagcttctgatcttaattttgtactagagaggcaagagatgatccgatttccaacatattatctttcaataaagcaccagcctaaatgtattttattatggccaaaaactttt

SEQ ID NO: 30497 - DNA, 476 bp, Glycine max
agcttgtctcagtgtttatgcgagacgttgaccaacatgttagctatcattgccaagtaccaagaagagttaggtctagccacggcccacgagcataggatcgcggacgagtatgctcaagtatacgcggaaaaagaggctagaggaagggtgatcggctctttacaccaagaggcaaccatgtggatggatcggtttgctcttaccttgaacgggagtcaagaacttccccgcttgttagccaaggccaaggcgatggcagacacctactccgcccccgaagagattcatgggcttctcggctattgtcagcatatgatagacttaatggcccacataattagaaattgctaggaaacttgtatggtctcttagaccttgactagatacgactttctttttgaaataaaatgagttgggcccatgtttctactccaaaaatcagtgcgaatcaagtaactcccgcattttatctc

SEQ ID NO: 30498 - DNA, 414 bp, Glycine max
tcccagagtcaagattcaagggacaagctttttatttttaagagcacgattcaagattcaagaatcaagagaagacttaatcaagataagtatgaaaaagtttttgaaaactgagtagcacatggatttttctcaaaatctatttaccaaagattttgtactctctagggatgaattaccagattattgtaatcgattgccagtataaaaaatggttttcaaaaagctttcgactgaatttacaacgctgcaattgatttcaaaatgttgtgatcgattacaatgtttcggtaatcgattacctgtgtgctagaacgtcgaaagtcaaattctaatgtgaagaggtacattctttcacaaaaaagctttgagtaattgatttacgctattttggttatcggattactaatgaaa

SEQ ID NO: 30499 - DNA, 446 bp, Glycine max
agctttatctgcgcaaaattcccttttttgagaactttattcaaaatcttatttcctgctgtcattcagttgaggatttaagaatcataaagtgctcaggtttgaagcatttgcatgtttcaaatctcattcgactcaaaagggctgagatccaccactgcattcaactgaagaaggttgagatcagtgctcctaatcttgacacattttggtattgtggcaagaaaacaagtccctgtaaagttagtttggaggggtgcacatctctgaaaaggttgacattggagcatcccccagtgactcgtgatttttgtgaaaatcagttctccaattttttccttacttgaaaaattggatttaagtatgttcaataataagagtagattccttattatttcaaatcctcatcttgagaaattctcttttaaaggatgccagaaactggg

SEQ ID NO: 30500 - DNA, 502 bp, Glycine max
ttgaatatattgaagtatcttaatacatcttatgtttttcagtttcgcatgaactagtcacgtgatttagtaatatgagatcaatttacaaattaaggtgacactcttagctgttcataccgcctacattttctttttctctaatcactgatcaccaaatagccagtgcaatacttctacattggttcatattatgatgaaaacgaaccaagatattctcccgatatttctatagtatacagcagagttcatatgtaattatttgttgcttctattcaatgcttaaagcaaaaaagcgttgcggacttatcagcaaattctagcatagtaatcattgcttagtatttaaatttgaatgaataataaggcaacacagcggaactgtgttttcagatttactgataaagtgctgtggcagtttatattgatttgactagtacaacaaccgggagttaaatcaacacgtagatgatggtttgcattattttcaacaaattaaaat

SEQ ID NO: 30501 - DNA, 411 bp, Glycine max
agcttgctctaactatactttgatttttgtatccatgggaggaggttgtatgtcatttgtgtttcaagaatactatcccactggaaaaactaactttacaaatgttcgccttggcatgaaatgtcccccaaaaaccttgcctctaagaggtccataaaggacaacgcttgcgaatgacctatttccgctgcggaggatgatattcaccggtttacgagcgcggtacaccaacaaagcttgcaacccatcgaggggtggtcgactttacgggagcgacgcgtacaactcaaggacgacaaggattctgatttccaggacgaaattaggcgccggcggagggcaccaatgcttactcccattgccaagattgatacaaaaatagaccttgaggattatgcctttgcttggccc

SEQ ID NO: 30502 - DNA, 372 bp, Glycine max
tgtcccatgcttcttgggccgtaggcgcttttgatattttgtcaactgtagcttcatccaccgattgctatatgagaaacagagccttctcgtctctctttcttgactccttccacctttcctttacaccttggctgaactaggcttcatcttgcttcacaaacccattctctacgatatcccacacatctagagctcctagtagcgccttcatgttgatactccaattatcatagatgatctttgtgatcatctgcattcggaaaggaaaacctccattcgccatctttcgaggatcttgaacctttgataccactttgttggaaataaggctctttgtgttttcgaaaagggtttatgaatattggagac

SEQ ID NO: 30503 - DNA, 302 bp, Glycine max
catgcaagctgccctccctcataaattatgaaaaccacaagctgtcctcactcaccaaaagacaaaaagcaatctcaagccgacctacaagacggcaaagaaacaatgaagcagaagaatcaaaggacagggcagacggagcctagggggagaacccacacagaaaggcgcacacgcacaaaaaagaggaactatacaaggcgtcaaaaggcacaaaccagtaagcgagaaaagcccacaagaaaccaggaaaaccgggaaaagaggaaagcggaagagcaaacccttacgggaaggaggga

SEQ ID NO: 30504 - DNA, 523 bp, Glycine max
tgggaactacctaatactcagctttggaaaatgatttctatacaaattttatttttataaagcgactaacaaatatggaactgaatctcattttgacattttaactcttccctaaattccaatatagatttgtgatttatccaaaactatttgtgtaaacatatatattatacttagaattatatttttaatagttctgtacacttattagtttttatgcatataataaatatttttgtagaaagtgtctaggtctattttgaatttgtaggttgagttctttgtgaaataaaataaatattaaaagaatgcacttaatgtttggatctattttactcaaaatccatgttgtaaagacactttcttcatcaactgtaagtctaagtaaaaaggtgttatcaatcaatggttttgaactgtcattgaaaagttgtccactttctacgacggtcaattcaatattccatgctaaccttgatgttaaaagtccttccaaacccatggttgaaatcctttttttttc

SEQ ID NO: 30505 - DNA, 784 bp, Glycine max
  unsure (1)..(784): unsure at all n locations
cgcagccccccggccgtgaaagtggacatcgctcaacnnttnggaagaaccttaanaatactcagcctgcttgcctggaggtcgaactctttaggtactttttgggaacccgagcctcgaaattcgcccttatagtggaggcgtattacaaattcacatggcccgtcggttttacaaacggtcgtgacttggggaataacaccttggcgttacccccaactttaattcgcccttggaaacactattcccccctttttgccaagcttggccgtaataatccgaaagaaggccccgcacccgaatcgcctctttccccaacaagtttgctgcaaacccttgaattggcgaaaatggccgccctgaatgccgggattttttcttccttaacccattcttggtggcggtatatttcatcaacccgcattattggggcaacttcttccattacaaaatcttgggtcttgaatggcccggcattagtttaaaacccagagccccccgaatacccccgggcaaaacaaacccgggttgtaacccccgaaaacctcccttttgtctggggctggatattcgaaattattaacaacctcccctaatcacgcggcgcatcgctattctcccaaaatgtataatttttctccaaatcgcaacgcactcggactcctagccattcttgtttcaaattgtccaccgggggctcctaccacccactaatgattatggggagaactcatcatcctatatgtgtcctatactgactcgttctcctctctttcctgatacc

SEQ ID NO: 30506 - DNA, 472 bp, Glycine max
agcttgccaccctgctctttttttgagctaggcagcttcctctagaaggcaccgccttctggtggaactttctggaaggcctaagtgggtctggttgctatttgcacccccctgtttactaaatacaccccctacccttttttgcttattcttttgccgcaacattacggaactttacgaattacgtaacgatacatgtttcctttccgtaatgtcatgaaaccttacggattacgtaatcatcccttttttggcttctggaatgttacggaacttcacggattgcgcaacaatactttcttttgacttccggcatgtcacggaacttcacggattgtgcaacattgctttcttttgactttcgacatgtgatggaacttttaaaggaagccattaattgactttggtatgacaccattagccaacattccttttaaactgatttacataatctgtattcgattaccttgaa

SEQ ID NO: 30507 - DNA, 413 bp, Glycine max
tctccatcagatcaatgttttgtgttgcttttgtgaaaggtgaactttgaactattgagacttgcttcttcatgatatctttagtcagatattttttttttaaattagaactatacactgagaagttaattacactaaatttaaccaaataaaaactcactttgtacagcaatatatagcatattgagaatgtcttttttatgtaacgaaagaaaaaaaaaattgcctaatactactacctctataaataccagtaacataagcctaaaagctactacaaaatttggttggtttttcatatgtaaagaacggtcatgattttttaagagaacctttcctgttgaaaggacgaaaagagaggatccaaatccatacataattttgatagttgatttatcattgtgactgaattg

SEQ ID NO: 30508 - DNA, 457 bp, Glycine max
agctttgaaatttttatttttggacaaataaaaataataaagttcttgttaccactgtaaagctaacacggtgagcaagcataatgccgacaccatgcaatgctacacattgttttacactggaccaagggtaaggcaccctaacttggttcctcttttggggttctacactgggccaaggggtgagaagcttcttcttcatcccttctataggcatgggagtctcactcaatttataagaggtaaataaaatgtttttataaaggaaattttgtgtcttgttttctttgaggatgttctttttcgtgttgtgtgtcttgattttagcaatataataatgggtttgatctccaatttttctgtttggcttgtggcaaatcattcactgctgaaactgggtttgttgttaggtttttcttaaaggatggagaatgttgaatttggggatatgggaatt

SEQ ID NO: 30509 - DNA, 511 bp, Glycine max
tccttgaaaagattcctaaaaaagctagagcttagttacacacacctatctaatagctaagctcacctccttgagatgagaagctagaacttagctacacaccccctataatagctaagctcacccccatgaaaaaatacatgaaaatacaaaaaaaaatccctactacaaagactactcaaaatgcctcgaaatacaagactaaaaccctatactactagaatgaccaaaatacaaggcccaaacgaaggaaaaacctattctaatatttacaaagataagcgggctcatacttagcccatgggctcgaaatctaccctaaggctcatgagaaccctagggccttcccttggatctttggcacaatctacctggagtcttctatccaatgcccttgcggggtaggattgcatcacagctgtggtctttgccttaaagatttggaggcactatttatatggtactcggtttgaagttttcagcgatcacaagagcctcaaatacttgttcg

SEQ ID NO: 30510 - DNA, 471 bp, Glycine max
agcttccatcaggagagatttagaggagcacgaaattttgtgctctaaaagagctttgaaatctgaagtttaatattcaaatgatcaaagttgaaaaaatgcacacacattacctctatttatagcctaagtgtcacacaaaattggagggaaatttgaatttcaattcaaatttcacttgaatttgaaattgaatttgtggagccaaactttggagccaaaatttcactaattatgattagtgaattttagttatggttcagcctactaatccaagatcaattccaagattctccactaagtgtgcttaggtgtcatgaggcatgaaaagcatgaaggacatgcccaaagtgtgactatatgatgtgacaatggggtgtagtaagcaaatgctcacctccccctttaaaatttaattggattgggcttctaccaattcaattaaattttatttcccaacacacacatcaa

SEQ ID NO: 30511 - DNA, 506 bp, Glycine max
tgtgcatccaataccctgatgaggatgtcccgtatgttcttaaaactggactgattcatttgcttccaaagtttcatggccttgcaggtgaagacccgcacaaacatttgaaggaatttcatattgtctgctccaccatgaaacccccagatttccaagaggatcatatatttctgaaggcttttcctcattctttagagggagtggcaaaggactggctgtattaccttgctccaaggtccatcacgagctgggatgacttgaagagagtattcttagaaaaaattttccctgcttccaggaccacaaccatcaggaaggatatctcaggtattagacaactcagtggagagagcctgtatgaatactgggagagatttaaaaaactatgtgccttggtaacccaactggccttgaaccagaaatatgtacttgttgcaagggtcaatggtttgtgcttctctactgaccaccatacagacctttgcccttccatgcagcaacct

SEQ ID NO: 30512 - DNA, 512 bp, Glycine max
agctttactacatcatttttctcataaccgacttagatttaacgatgttgaatcacccttttgtagtagtgttggcaaggagtcatgaagaatgagccaatagaagattcagattttctttggaatcgcaagcttccagagccatttgaaattggcagagtcactatcattgttgttgtaaagacccgctcgaactatacgcccaaatccaacgatcttggaagccatgggccaagatgcactccatggagtctagtctagaaggaaaattcataggaagtagtatgtacaaatggttaacacaccagcatccctcaacaataatatctcggaggtagatgttagcatcatggatcgctacaaagggaacttcgtaatagaaggggccaaagctcgaccattcatcatactagagtgaggtattacctgcacctaaacaaaacttaaatccagcaagaaacttgtctttggcctttaagataccacactacatgtgggagacaccttggccg

SEQ ID NO: 30513 - DNA, 496 bp, Glycine max
ttcatatttaattcctgcataactgccacatagaaattactgttagttatagaatactgtaatgacagatgatgattatttgccatataattaggatctgttgtttagacttgattttagtttacaactttgttttcagtgtaattttctttgtaaagcgaggatgaaattatttttttttggatttttgttattataacttatctgtctgctaattacaggtttaaatttttgagctgcggaaagaagtgactgatttgcaaaatttggtaaaagactatcaaatgccttaatcttttgggtgtgttgcttcttcttttgctgctacatctagtccagtctttagtactcaagaagcatttcattttattttgcgaagaataaacacaagcaatgagttaggttgtacatatcttgcatttcctacatgaatcctgcttcaatctgataaaagaaacttggtaaaacctcaacacaaaagttaacttttgtagtt

SEQ ID NO: 30514 - DNA, 498 bp, Glycine max
agctttgaaaagtgttgtttttcactttctcgctaagccaatttgctggcttagggagcatccgctaagcgcacaactcatgggctaagcatgaggaaggctctggaagaagatgagttgtacaggttcactaagcgcaccgcttcatctcactaagcgcaccacttcagttcatccgctaagcgagaaaggcacgcgctaagccaaaattcactaatgtgcgctatgccgtccataattgcgctaagcgcacgagcacgaacaaggccacctatttaagcctgaaattagattttagagggggagtttagactgggattcagagctttgcatgtctagagtttctagagagagaaaggtccaagttatagagagttttgagagattttgctgtgtgaagatctgcagagaccaaagcttgaagcgggagccaatttgagagcttgagatgagtttgtgagtgattgtgagatcctagaagtgaaagagacatcctca

SEQ ID NO: 30515 - DNA, 515 bp, Glycine max
tttcaattcattctatgtacccgtggtggtccacattttgtttcatgtatttttattctcgtttttatttgctttttatacctccttttgacgtgcttaagccatttatttaagtcatttctcgcttaatctaaaaataaaataaatttccaccgatcgtttgaattgtatcatccgttaatttcggttaaaatgaattccgaccgttcggtcgtgccgtaaccacgttggaaatcaaaaaagaggtaaaataataatataataataaaaaaaataccttttagtaaagtaaagcgaaaaatcaatcggacgttttctcttttggatttctcattcttaattgaattgactaataactaaagtgaaactaaggctaaaatcgaactcgcctagtcaagctcgtccacaaaaataggtttttgaaagtttatcatttcagtttcttattaagttaaaaagatcattttttaggtccaacgccttaaaataatcaccccttcaaagtaaaaatcaat

SEQ ID NO: 30516 - DNA, 291 bp, Glycine max
  unsure (1)..(291): unsure at all n locations
agcgcgctcatcatccattttttattatatacagcaccngggggatagaaccccaagagaacgtctcaaaaatactcgaaaattaggctgaaattagaatacacgaactgcaccactccccataaatattatcacgtttccctccccccaatcggaaaccctatccatccagactgtctctcaacaaaggattacaatttgaattccccaactctattccccaacctgcttttttgtcaatactgactaagaaataatacttactgtttcatcctattattacgaatcact

SEQ ID NO: 30517 - DNA, 503 bp, Glycine max
tggattggctcgactcattttcacctctattgatttttggcacttacgattaggccatccatctaataaagttcttgatcaagtatgtaccaactttacttatgtcaaaataaataaaagtagtgtttgtgatacatgccatttagcaaaacaaagcaagcttactttttcttctagtgttactggtacacgcaagccttttgaattagttcacatggatatttggggaacccttgctaccccctctttgcatggacataaatattttcttactgtggtagatgattttacaaggcacacttggttggtcctcatgaaattaaaatctgaaactagaaacctcattgaaaactttattcattttggttggaatcaatttaatgctatttgttaagactattatttcaaaacatggggcctaattttggctattcccgaactctattaaaaaaatatgggatttttacataataatttaatgtgtttcacaaccacaaacaaaa

SEQ ID NO: 30518 - DNA, 509 bp, Glycine max
agcttctatataagctgaatcattttatcaataaagacaagttgagttttattcagaaaattagagtttatctcttttatcttagtgagagtgattctcctaaattcttgagtgattcaagaacaccctggctgtatcaaaggactttcacaacctttgtgtgttgccctcgctggaaagagtgattcttcccttcctttcatcttcacccttgttctttcaaccacaattccagaaaatctacctctgcccagaattatctcgtggccataactcccattttacgcactcaaattaagtgattcttgagcctaaattgaatttcaaaacgagacctttcacctcgttttggaatcatctcaattggagccatgtagcttcagttattgccatttcaatttttctgtccagccaccacttaacctacattttaccatcccattcatccattttatgccaagaaccaccttattaaggcccacgaaattaaccacctttttttccatcct

SEQ ID NO: 30519 - DNA, 488 bp, Glycine max
ttaacctcatcgtccctcacagtctttagatttgggtagtcaatccaatccttgtgttcggactctcagccacttatgatagccgccgatgatcccattactgcttcccctaagctctctgtcctttcttcacgccgcatcccatgccttgcgaactccttggagtaccctcgcgttgtggtcactaaaaccccgtgcgatgaaaggcgtgatgctttcgtctaatggcactcctctcatggggtagccaagctgtcttatggtgagaacgggattataattaatacaaccccttgttcccatcaagggaacatttggacatccttcgcatgaagatagaatcttgattcttccttccttctagcgagggaaccaattaacagacgcccccccatgctagccaagagttggtcccaattcgcctttcctttttcgacgcacgagcggtaaccttgtatcggatagacgagcctacctttttggagaaa

SEQ ID NO: 30520 - DNA, 455 bp, Glycine max
agcttattgaaactagaggtatcatttgttgatgtagctcaaatgaaaaaagcaagtgaggatgataacccggtggctaatcactcagttcaaatggaagagcacaatgcatttgaagcccaatttatcccttttgagcaggaacatttggaagaggatattgaagcatctaactctggggaaagttcagacaagaacaatgacaagtccatttcaatggttggacatccatccttctgcctcaatttactgaatttattaatatggggaacaatgaggttaattatgttggacaaagatcatggattgataaggttgaaggatactaagtgaagaagccagaattcatccccatattaagaaacattcttaataagcatggagaagtttttaagaattctatggtatcaacaacgacactccggtcaattttcttgggggtgatatgtggcatc

SEQ ID NO: 30521 - DNA, 511 bp, Glycine max
tgtgagaggattcttattagagatattggttgatatgcaaatgaaattactcatttctgtgctgctctttattctttaatttagagcacaactcgttcaaatctttaatgctttattactgcagtatattttatatcttaacattatgaaatgctttgataaaatgttagcaactgttaagtgaaaatgttcctctttttgtaatacagaattcatggcctcaaatctggaaagatgttgaaagagttccgtggccatacatcttatgtgaatgatgcaatttttacaaatgatgggagtcgtgttattactgcctcaagtgactgtacaatcaaggtctgttacttggcattgtacttgaagttccttgttcatttggtgttcatatgagatgtctttttcctccgtattgtaagtctgggatgtaaagactacagactgcataccaacttttaagccccctcctcctttaaaggtgtgtcttccaaaaatttactattatggggttttg

SEQ ID NO: 30522 - DNA, 506 bp, Glycine max
agcttgttgacacgtggagatttaggttatcttccacgctcacaagatctgtcatactgacttttgcttcacgctgacggccggaaatacccgagtggttatccgtataaactttttgcattctgtaagacgaaaagcctgataacacgcagagactaacatcgtcttctgcgaccttcgtcaatcgcggccgacaagcccgttgacacgtggagatttacgtcatcttccgcgctcacaagatctgtcatactgacttttgagtcacgctgacggccggaaatacccgagtggttatccgtataaactttttgttgtctgtaagacgaaaagcctgatagcacgcagagactaacgtcgtcttctgcgcccttcgtcaatcgcggccgacaagcccgttgacacgtggagatttacgttatcttccgcgctcacaagatctgtcatactgacttttgagtcacgctgacgggcggaaatacccgaatggttatcccgataaactt

SEQ ID NO: 30523 - DNA, 416 bp, Glycine max
tttcgtcttacagaatgcaaaatgtttatactgataaccactcgggtatttccgcccgtcagcgtgactcaaaagtcagtatgacagatcttttgagcacggtagatgacgtaaatcaccgcgtgtaaacgggcttgttggccgcgattgacgaatggcgcagaagacgacgttagtctctacgtgctatcaggcttttcgtcttacagacaggaaaaagtttatacggataaccactcgggtattttcgcccgtcagcgtgactcaaaagtcagtatgacagatcttgtgagcgcggaagataacgtaaatctccacgtgtcaacgggcttgtcggccgcgattggcgaatggcgcaaaaaacgacgttagtctttgcgtgctatcaggcttttcgtcttacataccacaaaaag

SEQ ID NO: 30524 - DNA, 507 bp, Glycine max
agctttggctgattcaaaatggtttaatgcaatgcaacaagaatatgaggcactgatgaataacaagacctgggatttggtttctcttccacccaatagaaaagcagtgggtttcaaatgggtgttcagagtcaaagaaagtgcagatgggactgtcaataaatacaaagctagactagtagcaaaaggatttcatcaagtggctggttctaatttcaatgaaactttttcccctgttatcatacctgttacggtaaggttgattctcaccttggctctaaccaataagtgggaactctttcaacttgatgttaacaatgccttcttaaatggttttctagaggaaaccatctatatgcagcaaccccctggatttgaaaaccccaatacttctcttgtttgtaaattgaataaggctctatatgggcttaagcaagcaccaagacagtggtttgatagactaaaatctacactcttgcatcttgttttttttgcaagcaagtgatc

SEQ ID NO: 30525 - DNA, 503 bp, Glycine max
tgtaccttaactagttacaaggattccttctcaaatccccttattcagctaaatatgtaccttcaaaacttgaactttcaacccgagtgcacatacttgatctaaaagatactgtcataccctaatttcgtccggggattattatttgatgatatacaacctttgattggccgcttcaagatactaggcacccttttttgcacaatatgtgaagtcccgagacgtgccgaaaatcaaaaggaagcaggcttacgcgatctgtgaaaattccataatgtgacggaaatcgaaagcaggtgtttttcgcaatccgtgagttttcataacttcttcgaaagctaaaaaagagtaaatacataatccgtaaggattcgtaaccttgcggaaggaaaataagtatcgttacgaaattcgtaaagtttcgtaacgttacggaaaaagaattaccaaaaaaaggtaaaggggtgtatttagtaaaatgggggtacaaatagtaatttttg

SEQ ID NO: 30526 - DNA, 395 bp, Glycine max
agactgaataactatttaattggtcttgacaaccggagtgagaattggtttaaaaattttaaaaatatatatttattataaaaatcacatgagaatgtaaaataaattacgaataatataattttatgtattctaaaaaaaaatatgcttcttttaattctttaactaatatcttaacaacattagttaccatttattcaagaaaaaaactctaacaaagttatccataaacaaattgtgagattagattttgaaagaaaagccttttaacattttttagatgtagctaattttgaatgatgttaaagataaatatatttatgctttttttactatgctactagtgtgagtttactaatttaaaaaaaactctccatgactactttttgtcaaaa

SEQ ID NO: 30527 - DNA, 382 bp, Glycine max
tggtaatagtgactagaaatcgctttttttatctaagggcggtggcgcacgatggaatatggtgacgacagtgaatggagaacttggtcggtgggttatgatgtggaaggcaagtagaatttttctgtcgattaactttctgattcagacaatggcagactaaaattggtttccggaacaaatgacggtgacacgtggtggctgaaatttgcctcatgacgacaaagactaaaatcaaaggggttttgttgcggacatgaagaggaggcgattgatggtggtggtttcttggttcacaatcggagttggtcgaaaaacggaacaagattgaacgaagagggaaaaagtaattgaatatgacgaaaaaaaaataattacatat

SEQ ID NO: 30528 - DNA, 489 bp, Glycine max
agctttattcaagacaaataaattaaagatattcaagatggatgatcaagacagtctctagagtcttaggaatggtatattaaataggaagggaattcctaattgaagtagcaaaaggtttggccaagaaatttaagttaaaaagtctttttcaagagatttactctctggtaatcgattaccagaggatgtaattgattaccagtggccaaaaatgatttacaacagctattaaaatttgaattcaaaatttgcactgtgtaatcgattacacatatatggtaatcgattaccagcagttattgaacgttttaattcaaattttaaagcttgtaatcgattacacacatactataatcgattaccagaggagattttcagaaaatattgtcaacagtcacatcttttcatttggttcttgaatggccatcaaaggcctatatatatgtgaattgagacacgaatttgctaagagttttataacaaaaa

SEQ ID NO: 30529 - DNA, 408 bp, Glycine max
tggagaggatgcttcaatggaggaaaagattgaggagagaaagagagaggggggagcacgaaattgaaggaagaaaaagggagagaagttgaactttgagttgtgtctcacaagactctcattcatcaaagttataacaagtgttacacatgcttctatttatagactaggttgcttccttgagaagcttctttgagaaaatttccttgagaagctagagcttagcgacacacacccatctaaaaactaagctcacctccttgacaaaattcatgaaaatacaaaaaaaaaatccctactacaaagactacccaaaatgccctcaaatacaaggctaaaaccctatactacaagaatggccaaaatacaaggcccaaaagaaagaaaaacctattctaatatttacat

SEQ ID NO: 30530 - DNA, 1073 bp, Glycine max
  unsure (1)..(1073): unsure at all n locations
ccccacccgcccaacaccgacacaaatagcaagtgtatgaggccctncctctacacacctcgatccatntaccgncaagacgtcanntataaccaccgcggataccaacacctttacncnacccccagatncaacaggacgccannanntttggaaaatagtatggcanatncgnaaccgaccgggcacnccgtcgaaaaaagancnaacacnagcgaggccgacgacagcagcgcgaatgacaggacagagcaccgcttagtggtttctttgtacacgacgcgcagaaacaaacacagaccagaagactagaatgacaccagctcaggacaagaggacgcatctatcacacaatgcacaaaaccgccgtgtaggcaatcgagaggaaacaaagagaccactctccactgacgaaaccacacgcgaaaaaccagcggcggcaaaacaagccacgagtcgaatcgtcgcccacgcaacctacacgaggagaagagacgccaacacccggggtgaaatagacgcccacgccctccaatgtgagccagaaccaagagaatcgcgcaacacggaccaagaaggcgacaacgcacaaagatggcaagacgatcaacgcaaaaatggaatcgaggcaagaacacacgagcaacaggaaggggaagaccggaaaacgcaacgccggacaacggtatacacaaaacccaagacaaaaggtggcaagacgggcacagggcacggagaggatcatcaacacagcaaaaagaggggaagaagaggcgcaccccccacaatacgttgggaagacgagaactgggaccacaaacagaacacccccgccccgagtgtcggaaaacaaccaatgagaaacagaggcgagaacgaaaaagggggacggaaaaaatcacggacggggccaccaaggggggccaaagaagaaaacgacgtggggcggcgggaaaaagacagccccgcgacaagacaccttaaaaaaaaagaaaaggagacgccgaggaagaaacagggaaaagcattaaccggggcacagagacaaaaaaaacgaaagcgccccgggcccg

SEQ ID NO: 30531 - DNA, 364 bp, Glycine max
gaatatgggctctgtgaagttaaaatcaacgctcatatctcccgcctcttcctcaattcgcaatatctcttctgatgcaagtgtgtgatgaggcaactctgtctttgtgcccccatcattactgtcactacttttacaagggtgatcatgaacatcatcgatctcgtccttattttcatttctacacaataccccatattcttccgcctctttttgtacagtaataactcgatcgtaccatctggaattgtcctcacctgcatatttcccctcggtcacttcataactatattcaatactgcaccgaaaacaacttttcgccctgtttctactactttttttaacttccactgcttcctctcaa

SEQ ID NO: 30532 - DNA, 500 bp, Glycine max
agcttgcataacataagcttagatagaaatattgaacgcataaaaacaacatcaaatagatagtaataatatttgcatcaagtatcagtagaatttcccaataaaagattctagccctccattacaagggagtacctttcacaaattggagaagggttttagagaaaataccagattacaaagcagtggggatgtctcctccacctctaagaacctaggaatcactcctatacctaaaatctacctaaaagttagggcctttttcttccttgctcagcttttcctctgttctttgttcagcactaggctcacgtagtctattcaaacctcctctcttcattctctgcaattcaggcttaaaaagggctttttgtccgcgaaggcgtgattagcgcgagtaagtgaaatttggcttagtgccattctcacgcttagcacagaagagagaatcttctcgctgaatgagctgatgatgcgctgagcacgtgatgacatggtag

SEQ ID NO: 30533 - DNA, 513 bp, Glycine max
tgtaggattatggggtacccatcacatgtggtactaggtggcggtcgggcgatggtgcacaacaagttttccacatccacaaagcgcgcataaacccaccatccactgttgcccacctccaactgagctcacgtactcccgcgtagcccatatcctcgtttctctcaacaccgggtccccatcaatcctcccaagcttccccaacattcaagtaattcgacaatcaaacaacacaaactatcacagccaagaaaacagggcaaatgcagaaaactctgcccaaaacaccaaccagaatcacagcttttctcacttaaagaccccagtaacaattccttcgttccaattcgttaaccgttggatcgactccaaaattttaatggaagtctatagcacataaacctacattttgaccgttgggatctactagcaaacatccagaactcattctgcactactctttccacaaccagcaaaacataagcattttctgcacttatgcaaaattctgct

SEQ ID NO: 30534 - DNA, 466 bp, Glycine max
agctttatacctaccatgtttgtaattgcttgcttctcagttagatctggaaattcatagcaagaggcaatcccagagtatttaaataacctacatttattacggtgtcaataataatatattaattagcccgtgaaattctaactcatctcttgtaatccctgcttaattgtttttcttaaatttttgtattaagttcctcagctttgactttatctgatatgacgaatttgagtttctcacatatggcattctttttcaaaagaattgtgaaaacagtaaaaaaaaaaactcataatagatgttgcttttgtatatgagcagtagacttttagaaggaaagtaaggtattgtgtgatttactcattttaaatccctattaatttcttgttcattgattatttatttcttcttttctctgattttggctgcagatttgcagggcccctgcttatatacataactg

SEQ ID NO: 30535 - DNA, 500 bp, Glycine max
taacaaatacccaatcaccttctcagaatctaacatcatgtctattgttattaggaaaatgtttcatagtatgatgagctttgataagtttcttcctaaaatcagcgaatacagcttcgcggtcagcaagaaagtcatcctcggcatcaaggttggatgttcccgtcacataatgcggaatattgggaggtttcttcccaaaggtgatcttgtaaggtgacagccccatgcctgaatgaatggatgtattatacgaccattctgcccatagtaagaattttccccaggttgaaggtcgaggatgaacaaaagctcccaaatactgttctattatgcgatttaacacctcagtctatccatggatcttgccaacaatgtgcatgaagagctgcgccaccattgaagctatgtaatgggtttggagggtaccaaagtgaattccctttgaaaaaccgtctatgacgaccaagatcacagtgtgtcccccgaaaactggcaat

SEQ ID NO: 30536 - DNA, 503 bp, Glycine max
agctttggagtttccaagtgccaattcgtcttcttctttagtccagtcttcttctggcttcaattcttcagtgggctttccttctgtgtccagcatcttgggatgttcccagcctttgatgacagctttccaggttctgctatccagtgatttgaggaaggccaccattcttgctttccaatattcatagttgcttccatcaagaattggtggtctgttcactggtccgccttctttctccatgttcatcagaatttatcaccctagatctcactctgtgatttcgagtgttggctctgataccaaatgaaattctgataccaggggacagatgtcgtaccggatgtcacgacatcacgcttcagaacatgcagattatatgtgtccgtatgaacagattaaacaagtaaataacataagagaattgtttacccagttcggtgcaacctcacctacatctgggggctaccaagccagggaggaaatccactctcaatagtgtt

SEQ ID NO: 30537 - DNA, 468 bp, Glycine max
tgtaggattatggggtacccatcacatgtggtactaggtggcggtcgggcgatggtgcacaacaagttttccacatccacaaagcacacataaacccaccatcccctgttgcccacctccaactgaggtcacgtactcccacgtagcccatatcctcttttctctcaacaccgggtccccatcaatcctcccaagcttccccaacatcaaagtaatacaacattcgcacagcacaagctatcacagccaagcaaaacagggcaaaggcagaaaactctgctcaaaacaccaaccaaaatcacagcttttcttacttaaagactccagtaacaattccttcgttccaattcgttaaccgttggatcgactcgaaaattttactggaagtctctagtacttaagcctacattgtgaccgttgggatctactaacaaacatccagaacacattctgtactactcttttcac

SEQ ID NO: 30538 - DNA, 507 bp, Glycine max
agcttcttaaggaagctacatgaatctgcctcggtaaaaacgcttcacagcctttgttaaccgttggatcttctcgaaatttggtttgcagctttacaagatacatgtccacaatctgaccgttgggatctcagagaagatgtctggagtatgctcgaagcttccattcccgagagcatttcttattcaagcatttcagcctttgctttcgtgtagcttagaaaaaacgcaatttcttctcctttctttcttccaaagccatttctaatgtcccaatcactttctccatcacccataaccaccattagccaccacaaaccatcgttgttctccattgaaaccccacactgagaggaacccttcaaccgaagcggaatcatccaacttggcttgcaatttcggtagagaatgaaaccctaatttgacctttcgttttcttacgaggtaaccatggttctacgcttttttttgttagtttcatcttgtctttgcatcttttctgacttt

SEQ ID NO: 30539 - DNA, 369 bp, Glycine max
tgtacgcacatcgttcgcgtgtatgaaattcacttttcaaggttggaagtagaggagagcctccaaccctttaacgccacgtggcagacaaaaagtgggcagttaacttgaatggtcattattgtcaatgccggaagtattcagcgcttcactatccatgttcacacattattgcagcttgtggttacctgagcatgaactactaccaatatatagatgttgtttatacaaacgagcacatcttaaaagcttactcccgacaatggtggcctcttgggaatgaagccgctattcctccttctgatgacacatggacacttattttcttaccaactacaatttcgttcgaaagggccgaccaaaatcaac

SEQ ID NO: 30540 - DNA, 497 bp, Glycine max
agcttaacaaaaggcatgctaagtgggtggaattcctagagcaattcccttatgttatcaaacataaaaagggaaaaggtaatattgtagccgatgctctttctcggcgtcatgcattactttctatgcttgaaacaaaattgattggtcttgaatgtttgaaaagcatgtatgaaaatgatgaaacttttggagaaatttttaaaaattgtgaaaaattttcagaaaatggtttctttagacatgaaggctttcttttcaaagaaaacaaattgtgtgtgcctaaatgttctactagaaatttgcttgtttgtgaagcacatgaaggaggtttaatggggcattttggggtccaaaagactctagaaacattacaagaacatttttattggcctcatatgaaaaaggatgtgcagaaattttgtgaacattgcattgtatgtaaaaaggcaaagtctaaggtaaaacctcatggattgtatactccattgccaatt

SEQ ID NO: 30541 - DNA, 499 bp, Glycine max
tctagaaggagatcaacttgatgttctatgcttcttgaaggtggcagtccatgaggaatctccttggaaaagacatctttaaattcctgcaataagggttgaacactaggagaaacataaatagttaactgattagaattatcactctctctcttttgtgtatcactcttttcctcgggtgtatcactcttctttttcatattcctttgtggagcctcactattttctttctcttgttctctcttttctctcattctgatttggtcatcacatgcttctctaggggatagaggtttaagagtaaacgaggaagatttgactattcgtctgtagggctcttctttgttacggttcaacaaacgttgcatttgtatagtccacgcgtccagaaataagcgctgagattcgtccagttgatgatatacaccaccattgtcaccagttcttgccatgattaaggaacaaagaatttttcagtaaattaaaaaaaataaaaatt

SEQ ID NO: 30542 - DNA, 263 bp, Glycine max
aggtcctccggaccaagaaccaattctgatgtttgattgcttatcacgagggaaccgtcaaacatacgctcattattgcttatccaggacttggtgcacaagcgacaaatggtgccccgaactgtctacataaaagtacgaaccggtctgacatggataaaaaggctgacgaaaggctttaatctgcctgacgaaatggaaagcatgcctacggccctgttaagcccgactagccttcgttattaggaaataggacccttgcc

SEQ ID NO: 30543 - DNA, 502 bp, Glycine max
agcttatccttattgttgtttgtgttgttcatgtctgtgtaaatagacaaataattcatttctagaatagttcatttttctttaaaacgtggtttataaagatcaaaacattttcaaatcttggttttggttcaaaacagatttttttttccctttcatttgttcaccaaaaaatgcacacgtttttaacttcatttaattattattgattaaaacattttcatgttttgatttgattcaacacacgtttgattttatttcttctttcatttactcaccaaaatttggaacatatataatcgtattatataagaagggaaacacatttaaatttttgcattaatttttataaaatattttttattagaaatcaaataaaagtataaattaatatgaaatattgtacatttatttaagaaattttgggtttttaatttccatcaagatttctaaaattatgcttttattataccagaatttcaggattaattaaacttactcg

SEQ ID NO: 30544 - DNA, 525 bp, Glycine max
tataagaacaaaattgccttaatcatttccaaatatgcatgtgaattaggacgcatcaacaagaatcaagccaaggctattgtgcaagcaatcaatggggcaaaacacaccaaatgattataatgatggatggctcaaattctcacaaaggtaaaatcatcactttcaaaactatcatgacatgtagagaagaatcaaggatttcaagtcacaaaatgtcaagaacttttattttcaaaacaattacccatttatttcttgaacatatcctataattcaaagaaaaacatgcaaagtcgtgcgtgcacacgaaattgacccaaaatattaaacttaaaatccgacgaaactaacaacattaacaaattaacacaactaacaaattaacaaaaccaacaaaactagaaaaaccaaagaacactccccccccccccccatacttaaacaacacattgtcctcaatgtagcacaattaaaagattaaaaacaattaaatcatcaaagagaatcggacaagtgtaataa

SEQ ID NO: 30545 - DNA, 494 bp, Glycine max
agctttgagacgcatgtgatcttttggcatcatcaaaacatcggcttgatcctttgtctacaatctccccctttttgatgatgacaatccctgaaatcaagacaaactatatacaagatgatagtacgttcacacaacccttactccccaatcttttggcatgaatgcctaactttacttaatgataaatttctaattgatttctaacccaagctcttcaagttctgtccccctttggcaacatcaaaaagaactaagcaacataaacaaaatccaaacaaagccaaacattaaaccaaaataaatccatacattgtcataaccaaccaaagcaaagtccagaaatataataatagtgcaagaatacgataactagtgcaacaaaaaagccaaatacacggcgataaaacaaagtactaataatacttaattacttagtcctaataataataaccattaatctaagaggatgatggaagccgtggtggtggatc

SEQ ID NO: 30546 - DNA, 458 bp, Glycine max
tataatatatcgatacgctagaaattaaatgtcggaaactctcgggaaattcaaatggtcataacgtttcacacggatgtccgattcgggcacataatatgtcgagaggctcgaaattgaacaacggaagctcttgagaaatttaaatggtcataacttataactcggatgtctaattcaggcgcatcacatatagaggcactcaaaattgaacaacggaagctctcgagaaattcaaatggttataactattcacactgaggttcgattcatgattataatatatcaagacactcgaaactaaacatcggaagctctcgataaattcaattggtcataacttttcacacgaatgtccgattcgggcgcataatatgtccacacgctcggattttgaacaacggaaagcttcgggaaatttaaatggtcataccttttcacacctgaagtccgattca

SEQ ID NO: 30547 - DNA, 507 bp, Glycine max
agcttgctaatgcaaaagcttattatttatgtgttttacgacaaaaggaaaaaaaaaatgattgatttgtctttttctgaaactttacggctcggtaattgagatccaggtgagtgagactcaagcgaattttctgagaatgaattcagatgaatttgtaaaaatattaaaatattcagtcagcagaaggaaaaaaaaaggtgaattctccctccttttctttctctgagttttcttttttttctttttctttatttttaaactaaattacttgacattttggagaaaaaaattataatatcatttttagtttaatgtcagtgtataattgtatcatttaattatacattatcatttaaaattatttaagattatgaatttaaattttcaatatgaaagaagaagcataacttttaaaacatataatttcttatgtacaaacaaaatttgtctttattcatgtcacatatctacgtgacaatttgaaaaaaaatatttactatcatc

SEQ ID NO: 30548 - DNA, 516 bp, Glycine max
tttaaatgcataaggtaatttctctaaaaaatggttactaccaaataagattttagtagcaaaaactgaatccacatccactggaaaaataagagttaatttcatatctcaactattcagatcaacctgtgttgattatttgtttgttacttctttctttcttccttcccctccgtactggataaaagaattataatattacaacattttttcctacttgaaaatcaaataagatggataaaaattgagtgtgtaagttaactataaaaaaagtattttaacaattcgtagttttgaaatcaaatcttataagaatgcaattcgtagtttgtggttaaaatttcataggaaaaaaatgttaacctttgtaatcttgttgggtaagaatccaaataaagtgatcgagttaaatctgaaaaaaaagatgcaccgaaaatcaagaaaccagttcaggtatacgtcataaaaagcaagaagtcaaacacgctcatccacacatataatacatagcaatat

SEQ ID NO: 30549 - DNA, 507 bp, Glycine max
agcttgtaggattatggggtacccatcacatgtggtactaggtggcggttgggcgatggtgcacaacaagttttccacatccacaatgcgcgcataaacccaccatcccctgtagcccacctccaactgagctcacgtactcccacgtagcccatatcctcgtttctctgaacaccgggtccccatcaatcctcccaagcttccccaacatcaaagtaatacaacattcaaacagcacaaactatcacagccaagaaaacagagcaaaggcagaaaactctgccaaaacaccaaccaaaatcacagcttttctcacttaaagaccccagtaacaattccttcgttccaattcgttaaccgttggatcgactccaaatttttactggaagtctctagtacataagcctacattttgaccgttgggatctactagcaaacatccagaactcatttctgcactgctctttccacaaccagcaaatgccttatatttttctgcacttgtgc

SEQ ID NO: 30550 - DNA, 430 bp, Glycine max
tgccacccagctcgcccaagcgagccaggttgcttcctccagaagcaaccgccttctggaggaagaatctggaaggcccaagtgggcctggttgctatttgcacccatttttttttactaaatacaccccttttttacttttttggtgattctttttctgtaacgttacgaaactttacgaatttcgtaacgatacttattttctttccgtaaggttatggaaccttacggatcatgtaattactcttttttagcttttgaaaaagttacggaaactcacggattgcgtaacaatacttccttttgatttccgtcacgttacggaatttcacggattgcgtaacaacgcttccttttgatttccggcacgtctcgggacttcacatattgtgcaacaaaaggtgcccagtactttgaagcagtcaattta

SEQ ID NO: 30551 - DNA, 507 bp, Glycine max
agcttgtaggattatggggtacctatcacatgtggtactaggtggcggtcgggcgatggtgcacaacaagttttccacatcctctttgcgcgcataaacccaccatcccctattgcccacctccatctgagctcacgtactcccacgtagcccatatcctcgtttctctcaacaccgggtccccatcaatcctcccaagcttccacaacatccaagcaaaacaaaattcaaacagcacaagctatcacagccaagcaaaacaggaaaaggcagaaaactctgctcaacacaccaaccagaatcacagcttttcccacttaaagaccccagtaacaattccttcgatccaattctttaaccgctggatcgactccaaaattttactggaagtctatagtacataagcctacattgtgaccgttgggatctactagcaaacgtccagaactcattctgtactactctttccacagcctaccacacacaagcatttttctgcacaaagcc

SEQ ID NO: 30552 - DNA, 464 bp, Glycine max
tttcgattcattctatgtacccgtagtggttcacattgtgtttcgtgcattttgattctcgttttgtttactttttataccccctgttgacgtgcttaagccattttacttaagtcatttctcgcttaacttaaaaataaaataaatttccaccgaacatttgaattgcattatccgttaacttcggttaaaatcaattccgactgttcggtcgtgccgtaaccacgttggaaatcaaaaagaggtaaaaaaataatataataatcaaaaagacatcttttagtaaaataaagcggaacatcaatcggacgttttctctttgggatttctcattcttaatcgaattgattaaataactaaagtgaaattaaggctaaaatcaactcgcctaatcaagctcgttcacaaaaataggcttttgaagttcgtcattttatttctcactaagtaaaatggatcatttt

SEQ ID NO: 30553 - DNA, 502 bp, Glycine max
agctttactatgcagagaatatccaaggaaaataccttcatctgacttagcatcaaattttcctaagttatcttttccattattcaatacaaaacatttacaaccaaagatatgaagatgtgagatgtttggttttctgccattgaacaattcatatggagttttctttaaaatgggtcttattaaagccctatttaaaatgtagcacgcagtgttaacggcttcagcccaaaagtattttggaagaggagtatcatttaataaagttctagcaatctcttccaaagatctatttttcctttccacaacaccattttgttgaggggttcttggtgcagaaaagttatgctcaatcccatgcttatcacaaaataattcaaattctttattttcaaactcacccccatgatcactcctaatagatataatctttagatttttcttattttgaatgatttttgcaagttttctaaatgcttgaaatgcatcattcttatgagtg

SEQ ID NO: 30554 - DNA, 424 bp, Glycine max
tataatatatcgatacgctcgaaattaatttttggaaactctcaagaaattcaaatggtcataacttttctcacggatgtccgattcgggcgcataagatgtcgagaggctcgaatttgaacaacggaagctcttgagaaattcaaatggtcataacatttcacacggatgtccgattcaagcttataatatatcgatacgctcgaaattaaacgtcggaaactctcgggaaattcaaatggtcataacgtttcacacggatgtccgattcgggcacataatatgtcgagaggctcgaaattgaacaacggaagctcttgagaaatttaaatggtcataacttatcactcggatgtctaattcaggcgcatcacatatagaggcgctcgaaaatgaacaacggaagctctcgagaaattcaaat

SEQ ID NO: 30555 - DNA, 504 bp, Glycine max
agctttaacttgtattttttcaagtcttttttcatgcacattatcacacaagtgtttttctaaaaagcttttaagaaaactctattttatcactcactagacaacaatccagtattttaacaaaaactattttttgaatcagtgaacaacacagttcatatctattataccacttattatcctatgaaaaacttctatttgtgaaaaaatttatatctttggttaacatactattcatccccccccccccctttctagtgtgatctttgatatttcagttagcatcagagctcaacctcttgagttgagtaattaaaaatattgaggaaaagatctaacaaccaaagaaagaagaaggatactctacccacaaggcacctatgttagaggagtaaagtatgattactggaaagagcaaatgattgctcacttcgagcccatacacatcgacttataggacatcatagaaaatggtaaccccattccataaaatgttgagatgaa

SEQ ID NO: 30556 - DNA, 346 bp, Glycine max
tcatcctcggatccctcttattggactttgcccaatcgagacaaccctcttaggtttagactaacttaaactgagtttcgtccacagatccctcttgttagactagactcagctcaagaagcttatgaaagtttagcctaatttagcctaaacatcgtctgtagatccctcttgtaagactaggcctagactaaatagcattattgttacatcatatttaaaaccaaaacttaatccgcatatccctcttgtaagactaagttttgattatgcttcaatcaagctctaaggtaatagtacattttccaatgcttaaggcagctaactatgcacacaaatggatgat

SEQ ID NO: 30557 - DNA, 404 bp, Glycine max
agcttgaatcggacatccgtgtgaaaagttacgagattttgaatttctcaagagcttccattgttcaatttcgagcattcttcccttttataagcctgaatcggacattcgtgtgaaaagttatgaccatttgaatttctcaagagcttccgttgttcaatttcgagcctctcgacatcttatacgcccgaatcgaacatccgtgtgaaaagttatgaccatttgaatttctcgagagcttccgatgtttaatttcgagcgtatcgatatattataagcttgaatcggacatccgtgtgaaaagttacgagattttgaatttctcaagagcttccattgttcaatttcgagcctctcgacatcttatacgcccgaatcgaacatcccggtgaaaagttatgacc

SEQ ID NO: 30558 - DNA, 489 bp, Glycine max
tggaggggttgatggggacccggtgctgataggaacgaggataacggctacgtgggggtacatgagctcagttgaaggtgggcaactggggatggtgggttcatgtttgatttgtggatgtgggagagttgatttgcaccatcgcctgatcgccacctagtaccacatatgacgggtaccccataatcctacaagcttgaagtgagaaagtgtggaaaagtcagtcttcctacttttatttgttgaccatagagtggtacctggagatatgtcgcgggagtcaagagaccttggggacgtcaggtggggtgctattgcccaaaaccaagcttgatcaatcctgacccaacccgggcatagtcagtcagtgagaacctgtgacgtacctaaacaggcgagctcctggtagtcaacccataaaagaacaaagaccacacagcaaggaggcttgtgtggtggctggccagctatggatcttgagtgatatct

SEQ ID NO: 30559 - DNA, 518 bp, Glycine max
atgcaagctttgagccaaaatcctgactcatcttaaaccttgacccagggtgagaatgtcaatccttaccctcggaagcaaaaaagaatagaagggaaatttccaatcaaagaaaaagagaaggaaaatttccaatgaaagcaaaaaaaagaaaagaaggaaaattccccaatcaaagagtgggagaaagcaaaaagaaaagaaaggaaattcccaatcaaagaatgggagaaagtaaaaaaggaagaagaagaaggaaagaaagctcctgatcagggatcgaaggaaaaacagaagaaatgtgcagaaaggtctttggaccggacaatatctgaacaatacagaattgtcaccaaatgaacaaaaaagaaggaaaggaaaccacgacctaaaatggtcttctccctttgattaccaaccaaaaatcccgtgcgctagcgactttttcgccccgcactagacaaaaaaacagaaaaagaaaaagccaacaaaaaaaacaaaagcccaaaacccacaaa

SEQ ID NO: 30560 - DNA, 248 bp, Glycine max
ttgaaccttattcctgggctccattttactgttcttttgccaggcggacacccttaataaggttctactaactcctactgtgcgtcgatctcacaaatgttttgttggaaatgattcaactcacaagctaatccaaattgatccattctgagacgaaacatggcctgtagatatatcttggtacattaggactatactaaatagccctattgttccttcatatgcaaaaccaccacttaatcctggta

SEQ ID NO: 30561 - DNA, 499 bp, Glycine max
agcttcgggaacaggagcttctagttccccactgggaaacccatcaaagagatttctttctttctgcgtcaagagaaaattggggaaagtgaacaagaacaagctgcgttatatagatacatggacctgtacactaccctttttttcaccttggcctcaccctcttcccatccgtaatcaatttttttttttttggaaaatgtcattcttatttttaagattataaatgaatcaactatgcatctttttttaatttatggttttttttttattgatatatgcatatttcacttaaatgtaaaatactagtacgatagttgtgatttaaaggtcattgaggatgtgaagttggtaattgctaatctcaaatttgagtcttgagtataaatatgtattaaaacaaatgtgatttgaagaattttttttggatttattgaattttgttttcttttttaagtgtaatttgcttatcgtcaaatttttggtttttgttcgaaaa

SEQ ID NO: 30562 - DNA, 300 bp, Glycine max
tattgggatacaattgattttaacctgcattgccttttgacaccctcagaagagcacggtattacaataaagggttgttgcttttttgcactttcactattgctatttgcttatcccattgcattatggaaagccttgttatgcaaatttgaagggcattaagcaattgtaggagttgcagataattttaccccgatagaaacccttttttctactcaaattttctatccatccaatatcaccctaaaacaatggccttattgttcactttcagcaccttttatgtgagaaattctttgc

SEQ ID NO: 30563 - DNA, 502 bp, Glycine max
  unsure (1)..(502): unsure at all n locations
atgcaaggaatatccaaggaaaattccttcatctgacttaacatcaaattttcctatgttttctttaccatggggtatcataattcattngcaaccaaaaacatgaagatgcgaaatgttggattttctaccattaaacagttcatatggagttttctttaaaatgggtcttattaaatccctattcatgatataacatgcagtattaacagcttcagcccaaaaatattttggaagaggagtatcattcaataaggttctagcaatctcttccaaagacctatttttcctttcaacaactccattttgttgaggggttctaggtgcagaaaaattatgttcaatgccatgcttttcacaaaataaatcaaattctttattttcaaactcacccccatgatcactcctcatagatataattttgagatttttcttattttgaataacttttgcaattttcctaaatgcttgaaaagcatcattcttatgagtgataaataan

SEQ ID NO: 30564 - DNA, 511 bp, Glycine max
tatccttatgtcctgcctctggacttcaccccccgtgccaccccggaagatttaagccaagcccctacttttgaggggcaactcccaccttatgaagactatcccgggcaagacgatggggaaggagataccaattttggccccctgctccacctcaaagagccatccccgcatgaactaccccagccgaacatagtccgccatatctcggcctcacccacacccgtaaaagaatctgttcccttcgcggaagataagggaaagattgaggcgcttgaagagaggttaagagcagtcgagggccttggcaattacccattctcggatttagcggatttatgtctcgtgcccaacatcgtcatccctcccaagttcaaagtaccggactttgattagtacaaaggaacgacatgtccgaaggggcatcttcagatgtattgccgaaagaagggggcgtattctgcggacgagaaaatgttggtccatttttttcaagacagcttggccgggg

SEQ ID NO: 30565 - DNA, 492 bp, Glycine max
agcttttaatacacttctttcaagatagcttggccggagccgcggtagtttggtacactaatttggaagcttcccgtatccgtacttgttaggatctgattactgccttcctaaggcaatatcagtataactccgatatggctcccgatcgcactcagctgcagaatatgttcaagaaagagggcgaaacctttaaagaatacgcacaacggtggagagacctggcggcacaagtggctcctcccatggttgagagagagatgatcaccatgatggtagacactttgccagtgttctactatgagaagctagtaggttacatgccgtccagcttcgcggacctagtgttcgccgcggaaagaatcgaggtaggattgaaaagaggaaagtttgattacgtttcctccacgagtgcgaatgccaaaagaatcggggcaacaggggcaaaaaggaaggaaagagatgcccatgccgtctcttcaacgcccgcgt

SEQ ID NO: 30566 - DNA, 493 bp, Glycine max
agcttcatgcttaagtatgtatggcaaaacttcattattattgttcaagacatacaagtgagcttgtaacaaatcttttagacttggagtgatcacatgcagtcctcttgaacccttaccacccactctgtcatcatgccgagactcaggaaggccaataggtttagccttctcaatgtattctgaacaaaattcaatgacttcttttgcaatgtacctctcaacaatagatgcttctagatgataaggattctttgtatacccttttaagatcttcatgtattgctcaaccgggtacatccaccacaaataaacaggaccacaacatttgatttctctgaccagatccataatcaagtgaatcatgatgtcaaagaaagcaggggaaaaatacatctccaactggcatagtataatttcggcctcattttccagctcatcatacttgacaggatcaacgactttgctatatatggcatggaaaaaaaagcac

SEQ ID NO: 30567 - DNA, 359 bp, Glycine max
tcttgatgaggaagccatcttgcggttctttgtgttgagatattaagggattgtgaggctactagaagtgggaggaacacacccccactacatgaacttcttcagtatttcattttctctgggcattgttgtaaaataatcttccctgctatggagagctaaatcctcaattggttcttgctatggggtacttgatgtaaatacttgcatatatatctaatgatgcgttatgtgtgcactgtggtatcaatacataagtctagtttgcctttgccttgagcacacaactgcatgcttatttagggtcactcaacattgggaaatggcttgatcgttaaaacctgattggatgtggctag

SEQ ID NO: 30568 - DNA, 476 bp, Glycine max
agcttgtagcaaattcaaactggaataactttttacttggatgtccgattgtgtctcgtagtatatagagacgctcgttattgaaaacagaagctcgaagtaaattcaaacgacaataactatttactcggatgttcgattgtgtcccgtaatatatctagacgcttgtaattgaaaatggaagcttgtagcaaattcaaacaggaataactttttactcggatgtccgattgtgtctcgtagtatatcgagcgctcgttattgaaaacagatgctcatagaaaattcaaacaacaataaatttttattcaaatgttcgattgtgtcccgtaatatatcgagatgctcaaaattgaaaacgaaagctcgttgcaaatgcaaaccagaataacttttaactcggatttccgaataagtcccgtaatatatcgggacgctcgaaattgaaaacataagcttttttagaaaattttaat

SEQ ID NO: 30569 - DNA, 427 bp, Glycine max
tcacgatatactacgggacacaatcggacattcgagtaaaaagttattgtcattttaattttcttagagcttccgttttaattacgagcggctcgatatattacgggactgaatcagacatccgaggaaaacgtttttgtcattagaatttgctcagagcttttgttttcaatatcaagcgtctcgttatattacgggacttaattgtacatctgagttaaaatttaatggggtttgaatttgctacgaccttctctttccaattacgagcgcctcgatatactacgggacacaatcggacatccgagatataagttatttttttttgcatttgctcagagcttatgttttcaatttcgagcatctcgatatattacgggacttatatagacatcccagaaataaattattgtcctttggaatttgc

SEQ ID NO: 30570 - DNA, 488 bp, Glycine max
agcttttgtccaaaattaattatatatatgatgggaactaagatccaagctagtttcatgtgtagaaataatatattagaaactgacgatgacagtcctgtactagaaattgtaggataacctttttttttttttaaataactgctaacagttgtgtaattaagcaatgtgaagttatttactgtttgtttgtaaacagaaaatgctctctgtttgtctatgagacagcaagcgtatgtgttgtgtatattttagtgttcattatcatattttattattattttatcagtatatctaaaaaaaacgtgtattgattagttttcttactcttgtctcacgaacaaagccagcaggctaccaacaatgaagagcaccaccagagatgcttagaaggtagccctgttccaaagtctcgaaatagtaagcttcgttgggtattataaacgtgggttttaacttactttattattatcgcctttttttaatga

SEQ ID NO: 30571 - DNA, 245 bp, Glycine max
taaaacattctcctgtctttgtgtctcccttttgggactctctattagtttttgttttttctagtttatgtatatttacttcttttcttttttcataactcgatatatatatatatatatatatatatatatatatatatatatatatatctcttagttaagaaaaaatactctttttttgagatatattctaattgatttttcttcagggatatatgtaatttatattttctacctgtttatca

SEQ ID NO: 30572 - DNA, 501 bp, Glycine max
  unsure (1)..(501): unsure at all n locations
agcttctctttgttcaaaaagagaaaggatataaacaactcatgctttccataaatataaatcttataatttcaacatatttacctccctcaaaactnatccttagacttaatttctaaccaatatctaacgaagtttgcattactacttaatttgcacctatatggctatgctttagatacctataaggttgtcaccaaataaggaccacaatcatttcttctttggtagagggaataaacccatcgaaagtaaggccctataggtacctacattatcaaagactactccacgcctgcaaggctatgtttgagaaacctctaggatttttcaccacacagggaaacaaaggtttttctactcctaggatggatatccaaagactaatatttatatgcatttggggtaaatgaaaaagtaatttcctatatatggtaaatcgacaagcaatatcggtataccttaaaaaacaacatttgcatggancaattattataaatt

SEQ ID NO: 30573 - DNA, 332 bp, Glycine max
tattaaataattacttgttaaaattttctttttagactagtgctactaccagaatgcatcactccacagccctgtaaaataattaatgtgttgaaatcttcagacctctccatatgaaatatatctatttttttcttatggtgttgatgactttgttgacatatgaaataattcgcagatgattgtaaatgttacggatgattcacagaagtgaaagcattgtcatggtaaataaataaggctaaaatatgccctttttttttcactctgcctgggttcctaagatggaatgcctgaagattaaacaccatgtaaaattccctccctaacat

SEQ ID NO: 30574 - DNA, 484 bp, Glycine max
agctttggagcatatggtgactattctgagggcagctcaaatgcaaggagaggcccaacacttggaggcccacaaggaagagttgctagtcctatgtgtggattgcttggaatgaaggtccaactatagactttgggattttacatttctcttattttgttgagaactaatttgtataaatttaggggaactgaatgaaaagggggacagttgtggtttttgtcaaaagtgtgagaattgtctttgctagggttcttccttgaaccaactaatcttattaggaattcacccaattcttatggcgatcctctaggtttatcaaacctcgttgtttgtggcgcctattcgattttctatcttctacgtttatttgttcgtttctgcatttcagcgttcttcaatttgtgcctccaacccgattttcttaggttcattctgcacattttacgagtctagtttttagtgtttcttgaccctaaattgc

SEQ ID NO: 30575 - DNA, 483 bp, Glycine max
ttagagaagctcttcttttattctcttctcattttagtttatctagacattagggcagtggaatctctttggcagatgatatttgttatgaagatgaacttcatgaacttggaggatgccaactaatttatcccatgcaagagtctcaaggtttctagcttcgttaatgatcgctatttttggttcctacaccttgggaaagctatcaagtaccttcaagtttatatgagctttggtgaaggtatgtcccaaattttctagcctgttcaaaagcacttgtagtcttccaaacatgtcatccacagattctcctttcatggagaaagtcttatagtgtctcaattagagtgacaatctttctcaattgtacatcttttgtatcttcataatagatgctcaatgaatcctagatctctatctattttaagtctgtagactttgttatactcatttttgggataaagcacatgttaaagtataatg

SEQ ID NO: 30576 - DNA, 863 bp, Glycine max
  unsure (1)..(863): unsure at all n locations
atgaccctattgaatccatggaacncccacccgaggatcctctagatctcgaccctgcagggcagtgcaatgctttgagctattctacttttattttcttgactacgaactcacatatcatcgagtagttgtaatatataccatgatgtggccacatacaaagatcctatactactataataatatatcacttacctttccaaattaataggtgacctataatgatccatactaaatatactaagcaacanaatcagttattttacatgtgagtactatcatgtctatttacactatagcccatatatacgaatcatcagtcaataaccatatagaattattcctcgcagctaacatgaactcatttttatagaacaatcttaggatacaagctataggtaactacaaaattatgagcaaaataacctgtgcacactctcccgacaaaaataatcatttggcccttaaccggaattttgaatccactggcgattactccacttttaaaaacattcttaattgaatactccacacgttttagttctcatttctggaagaagtatttttgataagccaaagatagcgcgccccaaaaagtatggtggcgtttaatctaagttaaccacttctaatccttgaattattggtgattggacaataaataataacccgttagttatttagccccttgtgtctaattggtaacttccccagatctcttagatccaacaaatcttcacgggaagtgtgttggtagaggttacttccacatatgtaaaacatgtgagcatatctttgtaataagttctctcctgaaccaacacataatgtgtggcaagtttacgattttcacaatcatttcg

SEQ ID NO: 30577 - DNA, 424 bp, Glycine max
tataattcataatcattcaaattttttttttaaagaggcagaaccaatttatttatagtcttaactctaattaaaggtcctaaatatgtttttgagtgcttgagtctctctaaaatacaaaatatgccctttattggctttattaaattcaaaatatgaaaattcgactcaaaatgtgtaaattcaactttggtgttaaggacactagagttaagcacatgttaagtcaaaagacatttgtaccttaagatgaattaaaatccttaattatttttattagaagtaaacaaatacaaaggttaaaagttgagttttgtgcactatcaaaacatgccttgcaaaatttaaatttgatgtttcaaacgatatccaaattaaaagcatgatcagatacaacattaaaagtgaaaagttaaacttcatt

SEQ ID NO: 30578 - DNA, 499 bp, Glycine max
agcttgcatgcatttgcattctgttatcttgtgaatcaaaggataaaggaagattcattttgagtagtgatcaatatcacaccgaaatcaggacaaaggtaagcgaaaggtgataccggtatttcatggtgttttacatcttactgcgtgatgccattttcctttattcaaaagcttaggggcaggaacgagcaggtgctaggcccatgatcaatcaaccatcatctcacgtccgactcaagatgtgttaaagaagcgttactaggaggcaacctagtacctttaaaattcccatttttacttatttgtctattatatttgaatacgcctatttttatttgcgaccttacgagtttaatatataaatgaaaaaaaagggaggataattaactttttgcaaagaaattttgaaaaaaaaattaggttagctcgcctgggcgagcatgtctgcatgagaaaacataaaaaggggggaggggtaaaacttcattcaccccca

SEQ ID NO: 30579 - DNA, 508 bp, Glycine max
tagcacgtagtcacataaccgagtgtttcttttgcatgcgtgcttagcatgtaagctaggctcatcatgcaagtcattttgcaaaaatgacagtacaacctttatggacctatttaaaccttgttttcatttggatgttgggggagcatggaccaaggattgtgtgtggcagttgaggagcttcaatcttccattttcctgtatttcccttcatttttcccttccattttataattttgaggtttctcatgacaatgagaggctagttcatccgttgttgggggattggtgtgccaagttactctaatataattaatctttatatttattcaatgttatttcctatgttattgcttctttccattttgattgcttgttttatggtttgattaccttagctttaattctttgtttatattgctaatggaaaatgcttgaaaaccgagttttgaatagagcatctaatgaatgtctcatcaaagggatgtttgttagtatcattagtgat

SEQ ID NO: 30580 - DNA, 485 bp, Glycine max
agcttgacactctcagctgcacttcaccagaaaaataagaaataatatcagaaccaagatattcctgcattatgaatagcaaaactttggcatcaaagtaaatttttctagcaagaaaaatatgtttgccaagaaaaatgacaattgtcgtaccttttcagaaacaaagtaatttaccattggaactacttcaccatagagataagctatgcagcagtaatcattacagcatctctatttgttaacatcttagtcctctgcctcatctgaaaatggataggcaagtaagacatctagtattataacaaagatgattacacagaagatgcttccctttccagaacgaatcggatatgtgcactacttgtaattctcattttgacgttgaccttcatcaaagcgtttaacattagaaaaaaaataggccactagttaaaataaatcattagctaaaaaggcctcgtgcctaatcttttttttatcgg

SEQ ID NO: 30581 - DNA, 481 bp, Glycine max
tgtcgtgacgcatatgaacaaaacacaaatttacactgactggatttcaagtcaaccggacaccttaggttttatctaatgtcagcagtgtgctagggttttgaaatgacagcaacatatacatttcataccaatttccttcttgtgttaacaaaggaacacaggatatatcaaaatctaggattaagattctctccaatcaacattctctccaccttcctccagcctctgtctctctctctctatatatatttcttgttatttttccatcattttcttttttctttccattattttttagcttctgatcttaattttgtactagagaggcaagagaggatccgatttccaacatatcatctttcaataaagcacgagcataaatgtattttattatggccaaaaactttttaccactcaccataattcgccaagtagcagcaaaaagaccataaaaggcaactctcaagttagttccata

SEQ ID NO: 30582 - DNA, 395 bp, Glycine max
  unsure (1)..(395): unsure at all n locations
agcttgtgcctcttcacgtctggaatatgaatatcatatagatccaaagacccttaggtgctttgctgatggcttcttcccgttccaagcttcaattggagtcttgtcttttacagacttagttggacatctgttgagtatgtaaacagcaatgtagactacttcagcccaaaatgtgttaggtagtcccttctccttgagcatcgatctagccatttccataactgtgcgattttttctctcagacactccattttgttgaggagaatatgcgactgtaagttttcgctcaatgccttcatcctcacaaaatctttcaaacttgcgagaggtgtactcttttccgtgatcacttcttagtacttttatccattttccactntgatttttcagca

SEQ ID NO: 30583 - DNA, 330 bp, Glycine max
atttaatttttactttaattgattctagcggattttaacctttaaaaaatgtaattttaattttgaattgaatattggcaatttctaaacaaatatcattatcaaatacttaatagacacatcatcacttaaagtaaaattttcaaatatcagggagcaaatgcgaaggaaaaacttattggtgatcaaactcaaaatttggatatatattaaggatcaaaaacatatttaagccttaaaattaaaatataatatttttatgtttcggcccaaatttgttgtcatgatccaataataatttttgtgtggatattaatacgatgtgtatgt

SEQ ID NO: 30584 - DNA, 343 bp, Glycine max
tcatgaacttggcattactgctcttcatatcaagctccgcgccacgggtgggaaccagaaaaaactccgggtcctggtgctcaaacagctcttcgtgcccttgctcgttcaagaatgaaaattggtcgtataggtatttgccttcactttatttgcccattgtcatgtttttatgtgttggctgcatattttccagggtgtaacatattgtgttgaagcatttattttcttggttaatctgaagagtcagtgtttatctctccctttcgattgcagctttgttttcttattgatttcatttgaatggcatgtactgtgaagtacttattaatggttcttgatt

SEQ ID NO: 30585 - DNA, 212 bp, Glycine max
catgctactatcacacatccagtcattagtttctctatcaacaaagtttgtcaatttatatgtcagaacaacattgggttgctggcaaaagaatcctcaggcatctaaatggcacacttcattttgggcttgaactggaacccattttttctacaaagcactactctgttcatgccttttgtgatgctgactgggcttcaaatcctgatgat

SEQ ID NO: 30586 - DNA, 449 bp, Glycine max
  unsure (1)..(449): unsure at all n locations
tgcatttggaattgcgaaagccccactccatcattaggattattacctgacatctcaaacaaacaaatcaaacgtaacaagacaattatagttgttgtttgaatacctcacccactcaagtgtatcacacaattatggcttttctctaatgaaacactcttgccttttaccactctaattccccttgagttcttatgcaattcaagagattatggccacaacaaagaacaattcaccaatatgtgtaaggtaaggctagagagacaaggaaaaggttaaccaagaaaaaggctaacaatgtttttaggcacaaatgaaggaaataaaattcataatttaggaattcangtaacaatccttcatgcaaccaatatattaccttanagagaattttttttttaaagttcttcagcatgaaccattcagcccanntttttttttgttttaat

SEQ ID NO: 30587 - DNA, 312 bp, Glycine max
tactcggatgtctgaatgagtcccttcatatatcgagacgctcgaaattgaatgttgaagctctgagccaaatcaagccgacaatatctttttactccgatgtctgattgaggcccgtcatatatcgagacgctcgaaattgaatgttgaacctctgagccaattccaacgacaataacttttttctcggatgtctgaatgagtcccgtcatatctcgagacgctcgaaattgaatgttgaagctctgagccaattcaaacgacaataactctttactcggatgtctgattgagtcctgtcatatatcgaga

SEQ ID NO: 30588 - DNA, 395 bp, Glycine max
agcttgatcaaaacaattatctaatcattccaatccattcaaatcatacaattactcattcaaatcattctcaaacactcatctcatgcaaaataatccactgcatatcattttcaatcaattcactattcaaacaagctttttggtacaagcaaacaactcaaagtgctgaaatttaaataactgaaatttaaataactgaaatttaaagaactgaaatataaaaactaaaattaaaatgactgaacaaaaatcataaaataactgaaaataaactaaaatgttcaagatgcacaaatttaaatgtcctgctcctggggttgctcttgtgcatgctcattaacgtccaacacctgagtagctggtgaatcctaagaaataggctactctaactc

SEQ ID NO: 30589 - DNA, 332 bp, Glycine max
tctcagcttatactcttccatggttttcttgaccagacatgaagagtctatatagctagaccttgacttgcattcaaagaacttcttgaacaactcttaagaaaccttgaaacctttacaacctttacaattctttaagaattcattcccaatcatctttcttcttcttcctttgccaaaaagctttctaagttttttggtttccaaaccttattcttctgcaagtgaaaattctgcagaaaacaaaagtgtgctatatcttttcattctcttcttcctttgcaaaaagaattcaacaaggactaatcgcctggaattcttttgtgtctctc

SEQ ID NO: 30590 - DNA, 358 bp, Glycine max
agcttatctccagcatagtcaacatcacagtagcttgtgagtccaaaatctttccttcttttaaagcatagaccaaggttataagttccaataagatatctaaaaatgcatttaataacagataaaaggactttccttggttctttttgaaaccttgcacataagtaaacactaaacattatatcaggcctatacgctataaggtataacaatgatccaatcattgctatttattgggttttgtccaacttttttagattcttcgtccaaccctaagtatctagttggatgtataggtgtctccatttcttttgcattgtccacgttgaacatatttagtaagtctttcatatacttg

SEQ ID NO: 30591 - DNA, 436 bp, Glycine max
aagaaagagggagagaaagagagagggggatcatgtaaatgaaggaataaaagacggagagaagtggaactttgaagtatgtctcacaagactcttattcatcaaagttacaacaagtgttacacatgcttctatttatagactaagtagcttccttgagaagctttcttgagaagctttcttgagaaaacttgcttgagaagcttctttgagaaaacttccttgagaagctagagcttagctacacacatccctctcataactaagctcacctccttgagaagcttccttaagaagattcctaaagaagcttgagcttagctacacatacctctctaatagctaagctcacctccttgagatgagaagctagagcgtagctacacaccccctataatagctgagctcaccccatgacgagaaatatgataataca

SEQ ID NO: 30592 - DNA, 451 bp, Glycine max
  unsure (1)..(451): unsure at all n locations
ccccacccaccatcccttcttacttcctaatgaccatatcctcctaccacccananaggaattaatctgcgctcggaccgaaccaaggagcggcggagcagccttgcagggaggggatatgagtcagcacgacccctatgagcgaccctccagctgaacgataaagaccgggagggagacaaacccaagagaaatggcccaaaaaaaaaaaaagacccgaatccgggattaacaacggccagggtctgacaaccagcaacagaatcgagagcggcaaacaaattgaaagacgggttttaggagatacagaacggctcaaagagtcaccgtatataaaaaagcttgcacccggagggagacgaactggtaacaaacttatgtagaacgaaacgagaagataaacccaaacttggattgaaaattaaaaaaggagggtccgtacacaagagag

SEQ ID NO: 30593 - DNA, 412 bp, Glycine max
acgtggcatttcttttgtaggcacacctctcaaccaataacagagtaaccgacaattttgaaagcatgcaccctttaaatatcttcactctaaaatctcccatctttggtaaacttctttttcaaccttagcttaattattttgatacaaatattataagcaggcaaaaattaataatgttaaattccaatgtatctcattgacgagtaattgaaaagtaaaagaaaaacgtctcttgggcacatcgaaacaaataaaacatgaacaagacattcaattgtcaagtgtaataacattcaaaagaaacgagaaaggtcaaaattaattcacataatattctatatttgcgcgcaataattgtttgatatgactggacctaattacacagccaacaatctcgaaaataaataca

SEQ ID NO: 30594 - DNA, 385 bp, Glycine max
  unsure (1)..(385): unsure at all n locations
actgagctttacttgacatgactaactttcttaaaatgttgataatacatttaataaaaaatccaatgcaatgaccatggtaatcaaaatagaaagtttacttcttaggtaagaagtgcagagattcctttctcacttctcacttattacagctagaacctatgtctagctggtggctctatcggctntgatgtaaaaattcactaacaccctgtatctaatataaaagttgacaaattcagaatttttattttaaaccacgtaaagaataatatgcatatttgacaataaagaccaagagaaacttatatagcacaatccagtggtagagaagcaacactaattatagtgttcaaagttcgtaattagacatgagaatagatac

SEQ ID NO: 30595 - DNA, 331 bp, Glycine max
cagctctgatttcgcgagtatttatagaagatgacgcattggaatcgaataccagtattggtaatcgattacaggcccaataagccttctggtaattgattacaagctggctggtcatgtgttatcgaatacaccggatggtgatcgattaccaaagcctatcctaagctagtttctaagagaatatctatatttatgctcaaatacatcctatatgactaattttcactactaatacactaaattcaatcattcaattactatatacacaagaaatcataaattctatcattaaaaccagaattcaaaccagatccaacaaaataatcta

SEQ ID NO: 30596 - DNA, 425 bp, Glycine max
  unsure (1)..(425): unsure at all n locations
gactttgaccttcttatctaaaaaagttntttaaaaaacttgagtttgacctttataataaacaagccaagccgaaccaagccttaaatagcccgagtcaaaagcccttgacaagcaactcgctcatttccatccctacccacgaataataacgaccagggtattcctttcttctgaacaagaggggtgttgctagatgcatccaacaacattgctgatgtacccaacatttttttaatacccaaaatgtccctagtttattgttctttttaatttctggctgagtggtgattcgtaagtggatttttcacatactgatncaattcgatcgtatgaattatacgaatgaagttgatcataagtatgaagttcacctatataaagtatacggatgaagttcatccgtataaatcatacgaatgaac

SEQ ID NO: 30597 - DNA, 208 bp, Glycine max
ctagattatttacacgtacttgccaggtgtatttgttaattacatcacacacatgtggttggctgaatatacatacatgcatactcaaaacattgtggggtaccagaaaatgcacatgtgcacatcgcggtgtttctaatacctatatatacacaaacttcatgatgaatcttgactatcttcacacataggcgctacacttcatccc

SEQ ID NO: 30598 - DNA, 362 bp, Glycine max
caaactattacgtaactcttggagacgttcacaatgatctaatttcaatatctgtaaattccacaatttacatagagattctggaagagttttgaagtcacctccagaaagattcaagtactttagatgttttaaatgaccaattgaagatgacaatctttctctatttacagtcaatcacccgtaaagaataacatttcaacatatgaggagaaagttggtcaccatagcaatctggcaagatataggttcttaaagatttgacttgatacaacttaattgaattggcttttgtattccatgtgaacctacgatctgaaaggtggtggattctttcacaagaagtagttacgtaatcatca

SEQ ID NO: 30599 - DNA, 345 bp, Glycine max
  unsure (1)..(345): unsure at all n locations
agcttatccgacatcccatcagcagggatttcatagagaaatattgcatgcctaggaaggtgtaggggtaagcactgcagcaactaaaggaggaccaacaatagccaaccgcagcagcaccgcccccctctacaggaaacactatccctggggtccatcttcactcacctatggaggttagagctctagatgcacaggtacatgcaacatgtgactagccagtangcaactaatcataggggtcaggtgcagctaaatgagaccttctatcggtacactacgcaccaacacagtcaggacaccagtcctttccgtggcctacccncaagtagttcggggccacag

SEQ ID NO: 30600 - DNA, 476 bp, Glycine max
  unsure (1)..(476): unsure at all n locations
tactcagctataaaacctacaagaganttaaaaatccatcattagatcattgaaaacttgagaaaatccttcaggatcaagtagatgtttcactggatgagtccactcagacatacgaagcttgcataactcttaaagaaaaagagtccaagctatgtcttgagattaagacaagtgccggagaaaaagctacccttcttaagaacttttaggagtgggaaaacaaactgaaagaccttcaaaaggagcttaatgaagttcataatcatcaaaaagaagaaagatatgatctttggagagtgtgcacaagcacacatagattatgaagacctcaaaatgacttaacataatctttgggtggaatgtgaagatcacaaganatctatgagtttcttgaaaatgagcttatgaagactaggaatntantggcaacctcaaatgtatcaaactcatgaggaataagaactaagatacat

SEQ ID NO: 30601 - DNA, 126 bp, Glycine max
tatacccattctggcttacagatcataatgatgctttgtgatgcttgtgtgccgaaatcattggtataaaactgatatatatgaacgcgagagttaacactatggttgaaaagtgagaatgtagtg

SEQ ID NO: 30602 - DNA, 308 bp, Glycine max
agcataaaccatatagtctagcgacacgtgcagatttttgattcatggccagttatgttaccaagttaactaacgcatctagtttaccttcaagcttcttaatctcagctgatgaagatgaatatgtgactacttcatgcacttcattaatgacaatagcatcatttctggcactaaattgctgggagtttgaagccatcttctcaattaaatttatggcttcagcaagggtcatgtctccaagggctccaccactggtagcatctatcatacttcgctccatgttactgagtccttcataaaaatat

SEQ ID NO: 30603 - DNA, 400 bp, Glycine max
  unsure (1)..(400): unsure at all n locations
atattgctaccgacggcaaagcagaatttagcgcgacaacaaatagactagataagcgaacctttttgaaaaggattatatcttcatccccataaactatagtctcactggagatgatgtaattcacacgctgcagaagacatgacatgctacacagatgaagaaactaagggatctcccaagaagcttgactctcgcacatggaatcccgacaaggaatatatcaagatctccacaatcgtttccaaagttatctaagcgaagaatggaaagagacgcacaacaatgcgagggatgatgaagtctctctataatatacaacttcatacgtgccactgagctgctcaccacaaagagatacgntggggatcattagctcactaggtgaacgttactgaac

SEQ ID NO: 30604 - DNA, 455 bp, Glycine max
  unsure (1)..(455): unsure at all n locations
agtcttgatctagtagaagacatgtatcaagaatgggttatttcaaaccttgttacccgataccattggggttgcttatataaccttcttctaggntaatggacttagtttcctattttaagccccacaatggtgataatcttgggtaatagatatgatgttgatatatattttcttatatgatcctttaggcggtgaggataaactttcccactttcataatttacaatgactaaatgcgctgatgatttttgcaatagatctactcaatcagacacccttctaggtagtgtgttaagtatgagttagcacatatgccccaagcatcatagtgttctgtatcggcttaagtgtttgctttctagatagatagatatcaattaataaggattnttctagtctaggcaattgtatgctcctggacttctcttttaaagctatntatttcccttatc

SEQ ID NO: 30605 - DNA, 326 bp, Glycine max
  unsure (1)..(326): unsure at all n locations
aactcacccctcacaattcttgtaccgtgtggctggtacctgtgatgatcacaaacctttgttcgtgggagcagaatgacagcagtagaggatgagaagcgagattcttttgtggagctaccgagctgacgtgatgacgttgggattattttgggagagaggtgcgttttgttaatcaactcctccatagcttgttccataactctttttgttggtttgaagatgtaaatcacaaatttaattatatgtatgatgtgtactgagntaccattcatatatatatatatatatgtatatatatctatatatatatatatatacatatt

SEQ ID NO: 30606 - DNA, 151 bp, Glycine max
atttcatgcactctgccaatgcagtatgcccattcaaaatctcttataacacacataaggacaagtggtcaattaatgagctattggctatgtgtgttcaagaaaaagaaaagttgataatggaagaaggtgaaaagcttatattaactgc

SEQ ID NO: 30607 - DNA, 424 bp, Glycine max
  unsure (1)..(424): unsure at all n locations
ctatgaaactgacggtgttcatgactaactctttttttctttataaaatcgncatgtagtatttgaaaatatgatccaggagaatgattttgcctgtgtgttaaccacgacgacagtttcgcatatgactctttccaatcgccatattctattgcaatggctttttgtttccccaaccaagcttttttgtacgacactttgtacgcaaattcactgttgatcctctcttgaatcaaagaaacttttattgatggatcttctctgatcatgtctgtcgagggagggacaaaatttaaatgacaattaacgctaaagaatagcataatatgaacataaaatacgtacctactacacaagtgacaattaaatatgaatcaagcttctcgtcatgtgtgtggtccaccccattgtgtgactttctatg

SEQ ID NO: 30608 - DNA, 304 bp, Glycine max
  unsure (1)..(304): unsure at all n locations
agcttcanggttatggaactactaattggttgttatctgtggcttgtcacagaactcatgagtgttagtagtcatttacgactaacttttgtattgaataattacatgaaattagtcttttccccccaatttatggttctttttgtaagaattggacatattttcatgtttagtttgaatttatacagtagatactcccattttgtgaattaatgttgaaaccacttcaatttccagccaaaagaagagaaggtctagcagctagtgtctcgctaagcgagccttatgtgcttagtgagtgaca

SEQ ID NO: 30609 - DNA, 287 bp, Glycine max
caacaagttattcacatcctcaaatcgcgcataaacccaccataccctgttgcccacctccaattgagctcacgtactcccacgtatcccatattctcgattctctcaacaccgggtccccatcaatcctcacaagctttccctacatcccagtaaatccaccttcaaacagcacaaactgtctcaggctagaaaaatagggcaaaggcagaaaactcttgccaaaacaccaaccaatatcacaattattctcacttacagaccccaatacataagcctacattttg

SEQ ID NO: 30610 - DNA, 450 bp, Glycine max
  unsure (1)..(450): unsure at all n locations
agcttctcccncaattttctataaatagggggtttatgtgttttataaaagggttcagcccctttggcacttctctctctttcgaatntgcttaggaaaattgtttccgtgaagaagatccaagccgagacgcttccgtaacgttttcgtgagtgatttcgcgaaggttttcgaccgttcttcagtgatcttcattcggtcttaagtcttcaacgggtaagtacctcataccaagcttttcaattcattctatgtacccgtggtggtccacatttggtttcatgtatttttattctcggttcattcactgtttatacccccttttgacgtgcttaagccattttatttaagtcatttctcgcttaacctaagaataaaatatatttccaccgatcgtttgaattgtattatccgttaactttggttgaaataaatttcgactgatcggtc

SEQ ID NO: 30611 - DNA, 390 bp, Glycine max
  unsure (1)..(390): unsure at all n locations
tgttgagtctgaacattgatggttgatttaaatgtgattttttgttttggagattacgttatttatttgggtgccaaggggaggcttattacgcttgaatgggcaattcaagaactgatgccttggccattcaggaaccttggattggaaactaatctacggtctatgttcgccatccctggactgatgaatgggccattcacgaacgtcaatcagaaagttttaacggtcaagtattgtttcctgagccagttacggatttggactttgtttgctttttctcggctttccagttgtagacttgtagtgcctgtcactttctagcatttattcttatagactggttatttcttttggagnttatggttttgggttattaagaatttattt

SEQ ID NO: 30612 - DNA, 449 bp, Glycine max
  unsure (1)..(449): unsure at all n locations
catgcagctntcgcttaacggcaataattcccaaaagaaaatgttttgccctattctggggcctcaaaataaatcacgtacatgtaaatgtgagcgagagaaattgtgtaccatcccataaattggccatatgcatttgatcaacacgagcgtactttttcactttctctattaaacacatttaaaataatatacattcacgtagtagaacatcattcatacatgtgatttgaaaatcaatttaatttgatatacttttaatataaaagttcatacttgctgcataanaaataaaataattcctaaattttataattaaagtgtatacataattaggaaaaaataaattattcttagagaatcatataatccataacacatgttttaatatcgcatgtaacaaatttaataatctcttcatataacacatataagagaccaacaagatc

SEQ ID NO: 30613 - DNA, 437 bp, Glycine max
  unsure (1)..(437): unsure at all n locations
tatctgagggcaaaatgaagctctnttacttaagctntntagtgatctactcatattctccaannnagaantatatagtgtcttatgggccttgcaataagtagatatgttaagtaactacaaaatctgaaaataaataataattattaattaagctcaattaattgcctaaaataaaaactaaactaaggtgaaaaaataagaataaaagaaaggtaaaaaagttaagaaaaatacaaaaatactaaactattcaatcaggggaataacaaattcataatacaagtacttgaaaccatgcgaagcaccttcaaattgagttgaattagttntgtaaaatatgtattataagtttcatcggtggaaatcaaattttgagacctgatgattatatagcattaaccattgtattggnntaaagtatattatcactgata

SEQ ID NO: 30614 - DNA, 369 bp, Glycine max
  unsure (1)..(369): unsure at all n locations
agtcgtatttaccttttaacaactcccccaaatttacagttttgcttgtcctcaagcaaaaagagaacagctcacttgtccttaagtgacaataacatgcagtgactatgtacaatggtgtatgaaacaaatgttactgattgcatgataatagaatgaagcattctgtactcatcacttgtctttcacaaaatatgcaactattcaaagaaaaaaataaaatgtatgttgtactattagatgaagttaatcataacatagatgttaaggaangtagcttaaaccacagtttcacgactactggttcactcaagcacaagtgtttaagctattcttaataacaactaacaagagatccaatcttgcact

SEQ ID NO: 30615 - DNA, 390 bp, Glycine max
ggatcttcttcatcaacggagtcctttgcttcttgaagttcaatggaagcggaatggagaaggaagaaagatgattggagatgccacttcaaggagaagatgagtcaagaacaagctcaccaccataagaagccatggataaaaacttgaaggtaggagaagatgagtggagggagaaggagagaaggagcacgaaatttagttcctcaaatgaggtatgaactttgaagtgtaattctcaaatgatcaaagttcaaaaaatacacacatatggcctttatttatagcctaagtgtcacacaaaattgtagggaaatttgaatttctattcaaatttcacttgaatttgaaattgaatttgtggagccaaaatttcactaattatgatta

SEQ ID NO: 30616 - DNA, 449 bp, Glycine max
  unsure (1)..(449): unsure at all n locations
agctntctattctaatatagaaatccatgaatgtaccttaatgtctgaagtttatgggattaagatggtcattgaccaatccctattttatgatttaacaaaattgcctagtgaaggtgtaccttttgagggtgcattgattgatgaatggaaattctatttctctgtgcatgatgcctgccggttggtttgcaccaatcaagcggatatgaccggaagacttcttgtcagttcattggcttttgagagccgcatcctccattaccttattgttcgcatcttactccctagatcttcaaaccttgctcaggtttctgaagaagatctcattgtcatgtgggcctttcataaaggtttacaaattgattgggcacaccttgntagatatcgcatgcataaggcatngcgaatgaatgccccnttgccttatcctcatcttattactcttt

SEQ ID NO: 30617 - DNA, 521 bp, Glycine max
  unsure (1)..(521): unsure at all n locations
nttggaatgatnctcattgcantancngacaccatagaanactcaagctctgatcaatcatgaggaacactttctggggttaggaagcttttcttgtcatgaatgctcacaagaagctgaagacagccatgaggaccctgtagagaaggaattccaagattttctttattccagtggggtgaatcctaatgtgtatgtcctttcatctggaagatgggatgtaaatcaaagtattctgcatgttctaaaccggtaatatgcctgaagattggatcatgctagcacttgtgaaattagtttctaagttaagtgccttttataaagaaagtttgtttagtaattactaacatataataatgttntcaatgcagaagctcaatcaagctcaagaccaccaaccattgatccagagttngaagagtacttttctatgcttatgctctangacaggttacccgataaggaacatgcataagtgtatatataatgctgtaaaccgctcgtgtatgtattgacgagan

SEQ ID NO: 30618 - DNA, 440 bp, Glycine max
  unsure (1)..(440): unsure at all n locations
agcttcattgtgagatatgtgggtattttaaataagataccttttttgagcaggatgagtttcttcaaaaattagttcaaaatgctagtatggcagtatctagtaaaagtttgaatccatgcacttagtcttgaagatttaaatctatgaactaacaggattntccatgaaaaagaggctatactgatgttgttgaaacaacaaaaaatgcatatttggactaacattaccgtagaatgctcttcaagaaaatatcatgaataaaatattgaatggagttatacctagcttggattgaaaatgaacaaacgaagagtaaaaacaaaataggactatagaacatagacacagaatgaggtccacaaggccaaacattcatatgaaaaagactaatacattcaagctagaacagttaagagctacagaaacttaccttgatc

SEQ ID NO: 30619 - DNA, 415 bp, Glycine max
  unsure (1)..(415): unsure at all n locations
ctcagctaatttagaagcttctcctagatcaacctttttttttntattcccaaccctattacttgccccctttttacactcagctttctttttaatcaatagcagcacacacacactttttattttatacttatagngttttttttaatacatttgactgtgtgtgttgctctgctcttaccattccattcctttttacccagtagctcccccaaatttgggacaaacttgctttgagatgtgactcccgcaaattcggggcgaattttgccttgaaccaagtcattctatgaatgatgctatcctacaacctaagacaaggtagtaggagataaactgtgcaggctcaaggttcaatcaatcaaacattcattcagctcanactgggtgcaagggataaatcattcatgcacat

SEQ ID NO: 30620 - DNA, 427 bp, Glycine max
  unsure (1)..(427): unsure at all n locations
gcttgattacgaaattgtatagatacgttctttctcaataaaaatcactaaatagcaaaataaaactcataattgtgacttttgtttctcgatcggttcaaaggtgtcaacttggaagcaatggacacatagttggtttctcagaagaaggttttgtttgaattcccactatgtcttagggtcgttgcaattgatcatgaccccactattcttgataacattcttaatatgtgttctcgatgccactatcgcggtgattcaattaattgttactatttcttgtacaaagatttgattcttttttattgatgattgtctttatgttgcagctgtggcatactctgatgcctcacttgctatntcgcgaggaaactctggagtcaaatcaccaccaataaaacaagattctgaatttgttcttatgttc

SEQ ID NO: 30621 - DNA, 393 bp, Glycine max
  unsure (1)..(393): unsure at all n locations
tgaggatagagacttcccaagctatntatcttctctctcatattgctctttctcactctaagaagtggattcactcttttgtcttggatgataggaatgaaggctcctacccttatttatactactccacctctacaatgaatggtggagattacttgtatcttatggtggagattaattctctagaatgcttcacacattctatgagtctctacactctgctactcccttccatactctntcataaggttctagaaggttccacacatctccagaatattccagaggtttctacattcttccacaagcttctagagagttctacactactctagagttctctaggacgttctagaaaattctacacttttctagaaagctctagaattttct

SEQ ID NO: 30622 - DNA, 170 bp, Glycine max
gatagactacacactactggtccataaattatatttcattaatcaacgacattaattgtctaatatgtgagagtcatgtgcgcgtatatattccacattattatgagtgataatgttttgacttatctcatatgtccctgcaccctaaaatgggaaatacttattgagaa

SEQ ID NO: 30623 - DNA, 406 bp, Glycine max
  unsure (1)..(406): unsure at all n locations
actacgctcactgttaaaaactaatgacatgctaacaaagaactatgtatagctagttcagagacggtgaagaactaaacaagttttgataaacaatggctgtttttgtttctatagtgattgaaacacatgcctattgccaacagctagtgtattgtactctaaagttttgcgtcttcttctttggattcgtaactcatccgaaagccacaagaacgaactacgcaattatggtccttgaaaatagtttgatcttatataattatgaccatntacattgaacactgggagacagaagcgagacagcatgttaataaaagattttaaattcacgggctggagtgtattgtgggaagtgtattcatttttttcacattccaaacacatatatggtgtggttacatgg

SEQ ID NO: 30624 - DNA, 359 bp, Glycine max
tccattatcaataatctatccttcaatcttctttcaacattcttcaatcaatcttttcaactctttctacaaaattttctgatttatttctcttcatctttctaaaagatattgttcaatactttctcttccaagaaaagttctttgttcaaaaacttgtgctattcatctttttcattctcttctccctttgccaaaagaacataaggactaaccgcctgaattcttttgtgtctctcttctcccttacaaaagattcaaaggactaaccgcctgagaattcttttgattcttcccttccccttaagcaaaagaattcacaggactaaccgcctgagatatcttttgtttccccttac

SEQ ID NO: 30625 - DNA, 447 bp, Glycine max
  unsure (1)..(447): unsure at all n locations
agcttgtgcgaatcaaatcactcctgcattttatctctagcatgcatttttcctttctttacccactcctcacgtttggtttttttagggaaaaacaccataactaaacgtgccacaaggcattcctatcgcaccagatccaaatctataacgatgggtgatcaagaggagacacaggaacagatgaaagctgacatgtctgctctgaaagaacagatggcttccatgatggaggccatgttaggaatgaggcagctcatggagaaaaacgtggccaccgctgccactgtcagttcggcagccaaagcagacccaactctcttggctaccgcacgccatcctccctcaaacatagtanggcggngaaggaacacgctggggcatgacggcaacccttatctgggatacaactgagtggcttacccttatggattgtcgccaactact

SEQ ID NO: 30626 - DNA, 255 bp, Glycine max
caacgaccgcgtaactagcctgataaatgccaaaagaaatcgtgggaagtatggtttaagctataaacccactcacgccgatataaagagaagcatcactggaaggaagagcggtggtcaaagctcgcggttgagacaagaaagtgaatggagcccgccctgtcacataagtagaagctttataaacgcacgtctgggagacgaaggtcaagtggtcgcgatatacgaagatgatgttccgagtacattggattt

SEQ ID NO: 30627 - DNA, 387 bp, Glycine max
agcttgtatagttccctaatggtatggttatttgaagtaaattttgtaaataaatcttgttttatggttaaagttgtctctagaacatttccattggatttaaagatgaaatctatgcattttcagctgaaaaagaggctaagttttgaattgtaaaaagtagcaattgggctaagcgcatatccaccgctaagcgcagcttcagcgtgcttagcgcaaaggagaatttggcagagcatcagcatcaaagccacgtgattgaggtcgtacccgaatcaaataaacattaaaaatgaagtatctaagaagtgatcctaggtcgtctcccaacgagcaatggtcaacaaacgttcataatagatagtgataaaatagtaacgaatttga

SEQ ID NO: 30628 - DNA, 473 bp, Glycine max
  unsure (1)..(473): unsure at all n locations
nttgattcatatcgatgcgatgcananacancncaagcttataagcgcgggtctgggagaccaaagtcnagtggtcgcgatttacttatattatgtttccagttcactggatttggtacgaccatgctcttctgaattccagcagggaaattggcgagtggatgtacgccccggcctttacgcaacgagcataatgtaaaccattacgtggttaaaagctctatttntgggactaggcttttgagtcaaacctattgctaaggctttgtgtcatttgcttctgactttatcatacgaggatcttgactcatcggctgtacttttttgagcattctattcctttcatggaacttatgtcttccgcggagattcatgcgagtcccctacgttctaaccaggaccaggattactgcggcaaaatttttacttaataatgaaagagtgcggcttaccttgtccacaatgtaggtgtg

SEQ ID NO: 30629 - DNA, 254 bp, Glycine max
  unsure (1)..(254): unsure at all n locations
tctgtatggtggtcagcagaggagcacaaaccacaaacccttgcgacaggtacagatttctgattcaaggccatctgggttaccaagttgaccaacgcattcagtgtgcgttcaagcttcttagtttcagatgatgcaaatgggttngtagctacctgtcataccctaatttcgtccggggacctttgcttgatgacatgtgaccattctttggtccttgtgaggtgcttggcacacatcattatgcaatttat

SEQ ID NO: 30630 - DNA, 210 bp, Glycine max
acgccttaaaatgatcaccttttaaaataaaaaagaatcacttgataagaaagaactacctagggctgatttcctcatcacaaattgaggaataccttagagccaaaggaaacacccttggtcgccaccaaaaaggaaaaattttaaaagggtgttaaggatattaggacataaaatggaacataaaaaccaaagtcacgtttgcacatt

SEQ ID NO: 30631 - DNA, 389 bp, Glycine max
tctggctactgtcttacaattctaaatgcaaggtcacattctgttggatcaagtggcctcggaataattaagaagggggttgaattaattattagtgaacctttactaaataaaaatctattcttcttaatggtacttgattcaattatgcttttactataatgttaagaagataaagaacataaattgatacttaaccaaaagttaaagcgatagttaaagtgcccagcggaaattaaagagcgtatggaagaaaaagacaaacacaagagttttattctggtttggcacaaccaatgcctacatccagtctcctacgacatgccgtcttgagaattttttcaccttgtaaatccatacaagcaagaccacagggatgttcctccttg

SEQ ID NO: 30632 - DNA, 451 bp, Glycine max
  unsure (1)..(451): unsure at all n locations
gaaagattcaagaaattgtgtgcaagctttcctcaccaccatatttctgagcaacttcttcttcaatatttctatgagggacttaacaacatggagaggagtatgattaatgctgccagtggtggagcccttggtgatatgacccctgctgaagctaggaatttgattgagaagatggattccaactcccaacaatttaatgcaagaaatgttgttattgttcttagaggagtccatgaggtggccacggattcatcttcatctactgaaaataaaaagcttgaaggaaaacttgatgccttggtcaacctagtaactcagcttgccatgaattagaaatctacaccttgttcaagactttgtggtctatgttcttctgcagatctttgtcctactttccagccatctggagtcaatgagcaaccttgagcttatgctgcanacatttata

SEQ ID NO: 30633 - DNA, 425 bp, Glycine max
agcttctctgctggcacaacagccattacagtctttatcttgtaactacagtttctgtccacaacagaatgaacatgaaaacaatatgagtacaaagatcatatttgagttaccaatagaaagttttataaagaatattcatattctggattaatagacaaagaaaaatgctggaatctatcccgcaaatctgccaagatctgacattatttactttgctttagagcataacagacataggcaaacagttacataaaaaaattaataatataagaaagaaaattgataagcattcaggactcaaggtttgagattcaataataatcataatagacaacaggttgcatatagttataaggaaataggacgaccatatgatattccttcatcacgtgtagactggtgagcttaatactcataacagg

SEQ ID NO: 30634 - DNA, 403 bp, Glycine max
  unsure (1)..(403): unsure at all n locations
gaagctcttanacctctctttacttcttgcttcttcatcattttgtgcaaaactcttatattttattccaaaattctntttcattgttagaagattgaaacatcaaagacctgagctctttattcatctaagtcatttcgggtaacttcattcaagataaagggggtatttccactttttgaaccctaacctttgtgtctttggaagctaaacttcattgaatgttgctttgatgttcaaatattcctagctattgtcttgatggaactggatgatatgttgtgtctcttgaaattctaggtgaaaaatgatttcttgcctgtaaaaccttgggtagccttcattcaactaaatcaaagtttctacaagtatgaataaacaagttaagacattcataaataaa

SEQ ID NO: 30635 - DNA, 417 bp, Glycine max
ttaaaccataagaatatcctcttagccagcaaattacatgctcagccccatgacccttaattctgactgcaatgaatagcgcttggcgacatatggtctcacttagccaagttgaagccatcgctcagtgatcaatctattgcttagtggaattcaactcgaattgatttttggcttaactaaaccttggctggcttagcgaaaataatcaacctcacgtgccagggtggtgcgctaagcgcttgaacttgtggcttagcgcatgagtgattatgcgcttagcgagaagcatgtgcttagcgaaaggactaattttcaaaaagattttctaagttataacttagtcctttcccaagaaattagaacccttaatttcacatacaaagatagggttatatgctccatgtaaagaatatt

SEQ ID NO: 30636 - DNA, 391 bp, Glycine max
tgagatgaggaagtgttgaaaggtgaaacttcctactcttattgttgaccacttagtggtacctggagatatgtcgcggtggtcaggagaccttggggacgtcaggtggggtgctattgcctaaaaccaagcttgaccaatcccgacccaacccgagcatagttggtcagtgagaacctgtgatgtacctaagcaggcgagctcctggaagtcaacagataaaaggaacaaagaccacaaagcaagggggcttgtggtggctggccagctgtgaattttgtgtgatatatgattatggcctctggtaatcgattaccaagggtgggtaatcgattacaaggcttaaaattgaagacaggaggctaagatggtctctggtaatcgattacca

SEQ ID NO: 30637 - DNA, 343 bp, Glycine max
tgggcaaatccgaggactggtgtacggaggcagcatcttctctcaattgtagtcaaatggatattccattgtcttaccttggaattcctgtaggggtcaactctaaaaataggtctgtgtggcaccccattattaccaaatgcgaggctcaacttacgaaatggaagcaaagaaatctatcaatggggggtagaataaccctcattaattcagtcttaacagccttacccatatatttgctatccttcttcaagagtcctaagctagcggtgcagaagattacatctatacaaaggatattttgatggggcaacctccaagactccattaagaatccttgggt

SEQ ID NO: 30638 - DNA, 446 bp, Glycine max
  unsure (1)..(446): unsure at all n locations
tgctcaccactatcagaggagaaacctttttgttgtttcatataaacctcctcctctaaatcaccattaagaaaagttgttttaacatcaatttgttgcaactcaaggtcaaaatgagcaactaatgccaagattatacgaagagaatctttcttagatactggagaaaaagtctctttgtaatctattccttccttttgagtaaatcctttagcaacaagtcttgccttgtatctctcgatgttgcctaatgaatcccttttggtcttaaaggcccatttatatccaatgacctttgccccattatgcaactctacaaggttccaaactttgttactctgcatagaattcatctcatccttcatggcagtcataccataaattgactctttacaactcatggctttgatcaaaagttcaggatcattntcagctncaatattata

SEQ ID NO: 30639 - DNA, 438 bp, Glycine max
  unsure (1)..(438): unsure at all n locations
agcttatcagaaagctctgaaagaagctatatatcttatcttaaaattacacgagtgaattcacaaactaatgcaaatgaaacactaagtatttatcttcaaatataacatgccacccatcatattgacgcaatcgtaacagtaaatggtctaagatgttcatgtgacattggacatagccactacataacaccgtaaactcttgagagaagattaattaaagaaataaaagatatcaacgacagattaaaaaaggggtttcatttgaaaatatatacaagttattttgcacctatagattctgctctgtntacagagagaatgaactttgccttccttagcttttcttcagcatcatattaccagcctattcatatgaacaagaatccattttaaccttatagaccgctctgcgaactttgacaatcaacttagcat

SEQ ID NO: 30640 - DNA, 270 bp, Glycine max
cgacccaacccgagcatagtcagtcagtgagtatctgttatgtacctaagcaggcgagctcctgacagtcaacagagtaaaggaataaagaccacaaagtcaggaggcttgtgttgtggctggccaaatgtgaactttgattgatatatgggatatggcctcttgtaatcaattaccaagggtgggtaatcgattacaatgcttaaaaatgaagacgggagactaggatggtctctggtaatcgactaccacggcgtgtaatcgattacc

SEQ ID NO: 30641 - DNA, 514 bp, Glycine max
  unsure (1)..(514): unsure at all n locations
acgccannttganttgaattgcattcgcgaancngacacnananaatactcgagcttgttgagtggatgatattggaacccaagggacacttttttttttgtgctaaaatcagacgaagtcgctacgggtttcattctctttattgacaatcaccttgttatgattatatgattctctaacacaagcgagaacctgttggaagaaagcccatagctaatctcccaacagaaaggctttatgtatatccactctccacagctgaatgcggataatagtctagattgaactagcggtgttctaatatagctccacacgttgagttgagaacgtgacagtcggcatcaatgaatcttgtgccgtggggagaaagactaagagaaagagacgaaaagtacgtggatgactagncgcgctgtgctaagtgtagctcttgtgatacccacgtaactgccggacggtagcttacgtgatacccaaactgagatactctcggtcatacacgcgggctctccg

SEQ ID NO: 30642 - DNA, 358 bp, Glycine max
agcttcttatacaaggcacatcatggtggtgaatcttcttcttccatggcttattccttaatggatggcgcctcctctcacctccttttctttgtcttccgctgcatcttcatggtggaaaaacaccattaaaggaccccattgtaacttaaagatccaccctccatataatccccaccagcaatcttccatcaagtgtgaatcacagcacaacagcttcaagtaggtgctccttcaaccttcattaatttctattctttaccttctcttccatttttgttcttcattcttctccatggatctcctcacatgtcctgatctaaaggtggttaacatgattctttacagtttccactga

SEQ ID NO: 30643 - DNA, 294 bp, Glycine max
aggatggcgcctcctctcacctcttcttctttgtctttcgctgcatcttcatgatggaaaatcaccattaaaggacctcattgaagctcaaggatccagcctccatataagccccacaagctagcttgcatcaagaaaggtgctctacatgttggtgaaaaaggacatgatgaagaagattcatctcttctttcaaagaatttggataggtttgatggccttcaaacctttgctggtgaaaggcttgacaatttggaattacaagtcgatatgcacctcaatgagatggagtca

SEQ ID NO: 30644 - DNA, 436 bp, Glycine max
agcttatcttgattgaatgtagcattttacttgtctatatttctaaattatcatttctgcaaacgactcattcagctctgacattatagtgtttgtcttattgccattaaatcttacaggaatgtccttttccataatcaaggttttagagttatacactctatatgccttggataattgagagtattcaagtaagaatccataatcacatttggagtcaaactctttaaagttatccttggtgttcaaaatgaaacgttgacatccaaatgggtggaaataaaaaatattacgcttaccttcctttcacaattaatagggagtcttctgtaagattgacctaatatagactcttgtatgtaaaaaacaaacagtgtgatcgacgccgtactcgaatcaaataaacatgataatgcagtaactatgaagtgatcct

SEQ ID NO: 30645 - DNA, 244 bp, Glycine max
gcgtattcttttgaaagattcgtgcccccttttagcacatgttttgtagctgcatactatccgaagacattatactgacgctgcctaacgaaggcaatcactaggtccttccaagaatggactccggaaggttccaagctagtgtaccatgtaacaactaccccagtaagactttcttggaaagaatgtatcaagcagtcctcatcctttgcgtatgcctccatcttccgatagtacatattta

SEQ ID NO: 30646 - DNA, 279 bp, Glycine max
gtcattctcaaaccctaagagtaggtctcataaaccttctcttgtattagcctatatatgaatgcactctttatgtccatttgatatagccgtcatttaggatgagcgaaaaaatcataataaaatgcgtattgcctgtagcaagcaacatgagcataagtttcactatagatgatgccttacaactgtgagtaaccttttgcaactaaccttgccttgcttcgtacaaccttacatgcctcggtcaacttgtttcgaatacccatgtagaacctccta

SEQ ID NO: 30647 - DNA, 300 bp, Glycine max
agagaaggtgaactttgagttgtgtctcacaagactctcattcatcaaaggtaccacaagtgttacacatacttctatttatagactaggtagcttccttgagaagctttcttgagaaaaattccttgagaagcttctttgagaaaactttcttgagaagctagagcttaactacacacacccctctcataactaagcttaccttcttgagaaacttcttgagaagattctaaataagctgagcttagctacacatcctctctaatagctaagttcacctcctgagatgagaagctagag

SEQ ID NO: 30648 - DNA, 362 bp, Glycine max
tatagatataaaattgtttatatatatcgacaaaatatatagccgagaagataattaagtagttatcatgggtcacaagccacatggcaggcctagaatgaatctataacaatagtcaataccctaatgaagaaattttcttttcatcaatgttacaaataacaactaagtataaactctcaaaaacgatcttaaagtggttgtaattcttcatcaccagtatagaccaccattgttttgtctatgttttttatatttatcctcatcttttctaatttcatcctcatctcttgatgtttgatcctttatacataatcattgacattaaatggtgacattcagaagcaatatatcagatgtag

SEQ ID NO: 30649 - DNA, 461 bp, Glycine max
tcatgcgtttggagctgaattcccggaatatgcgcccttctgtttctaatgcgaccctggagacagcgtctgagcggtcgagcatgttggagccgacgccggcccaccacgcaaagacgccgtcgaggaggttgacgttgttttctcagagggtaacgagatcgtcgcgggcgaggacgcagcctatggtttctgtggccgagaagcggatggagtcgctgggggagtctaagcagtccgagatttccttgttgcagtcggagatgaacctggagaggcggtatgaggggattgcggccatgatggagaccgcggcggcagcgacttctgtgtcggggaagtggaggtccgtgcggatgccgccgcagacggtgtcccatatatctggaatgatgcgggtggagcggatgatgtctaatgcgagcttcttgctacggcggaggctggagcggcactatctt

SEQ ID NO: 30650 - DNA, 449 bp, Glycine max
  unsure (1)..(449): unsure at all n locations
acctcagagtcacctgcggcatgcaagcnttcacttcagaaagatgctttagatgatgtctacattcangtatctagtctgtctgggattataacatggcccttgctgttttatatgaatagaatcacatgtctgtactgtttattatattatgcagcaaaaagtagttgatgatgttggtcagcttctaaacccaaaccatgccttattgttgaaagcagcagtaacaactggtgaacaggctagagggtgcgtgccaattgttttctttgatgagaacacttattattcatgtcgtcttattcttgattgcttgtctcagtctgggctgaatttgctagttgtcaaanttctgtttgcagacagatattgctcagtgcacctagctatttacagggggatattcaaaatgttcaaaatctgaaccagaaactttcagggtctacaca

SEQ ID NO: 30651 - DNA, 539 bp, Glycine max
  unsure (1)..(539): unsure at all n locations
ccccacccttcctccacatatctacagaccctacttcatctacctcccccccgcacccgggcnnatggtcgttcatcgcacccaacccnaacctagccgccaacacgcctaagaagaagccaaacattgttctttgtgatgcaaaagggaagatacagttgtatataccaccccaatcatcaaggttcgacaggggtgcattgaaggaacagacatccaaagcccagtgaccacatctacggaatgaataggccatgaccaggaaaccatggaaagggatacattctaatagagatgcgatgcattcctatacctacggttcaaagcaaaaaaaggccactacgattcaaagctgccgttagaacactctttggaaatatacacgatgaacaacaaactttcgatcaagcagtgacggaatactctaccaacccgactctacaaagtactacttggacgcggaccagcgcaaaagcaacaacaacctgaaatttctggcccgccaaaatcaagcaacaacctattaagacgctgagacn

SEQ ID NO: 30652 - DNA, 430 bp, Glycine max
  unsure (1)..(430): unsure at all n locations
gctttacagcagattntagtaatgacccacttacctataattaaaataacttaatgccattaacctagggaattaaaaaaacttaatggctgagtataactgaaattgtggcaaccaaaagtcacccccaacagccaacaagtcagccaccatttggtctcccaaaaggctgatgcctangttgccaattgggcccttattacaacttgaactaaacctaactaaagccctcttagttaattaacccaaaacatatttttggtcagccaactttacaaggattgggccattatttagacaaactaaacactctaaaattgagacaaagtggtgtcatttagtccttctctcattgggccatgatacaactcacaaccttggactnttctccttgaaacatgggcttgtattcaaatagtatggacaacac

SEQ ID NO: 30653 - DNA, 511 bp, Glycine max
  unsure (1)..(511): unsure at all n locations
ntgactctccntagcgccctaaatctcagcttgatgcacatatggagaggtttatgaaacaaccagatgattctcttcattagagggtggatccaatggagaattgagatcattatgaagaagaaaggatgagaagagggaatgattgtgttccttgacaaaacccaattgatgggtttaaactccacattccttcatttaaaagaaagaatgatccggaggcctacttggagtgggagatgaaaatagagcatgttttctcattccacaactattaagaggacccgaatgtgaagcttggcgccacggaagtttccgactatgctcttgtgtggtggaacaagctacacaaaggagagagcaagaaattgaagagcccattggttgatacatggaccgagatgaaatagatcatgatgaagcggtatgtgccggctagttactcaanggactttgannattcagcttcaaaaactaacccaatgcaacaatggggttgaagagtatttat

SEQ ID NO: 30654 - DNA, 370 bp, Glycine max
gcttgatgtcattcaaaacacactatgttgacctaaatgaagactaaacattcattgtttatttatttggattcattatgcgaaataattcgttgtaacccgtcactaaccaattaatattatcaactactcgtttggttaagcaaggaaattgttggtccaacaaaaatcatttacgcgtacagcatacatcattggcataattgacaacacataatgacatgcatgcgtgttacagtttgagcgtgacaacacattggttgacttcagtacacattttgaaactagcagtcgctcaacaacacattggttgacttgactacacattagcgacaacacattggctgacttgactacacatttacgcgtg

SEQ ID NO: 30655 - DNA, 471 bp, Glycine max
  unsure (1)..(471): unsure at all n locations
tctaaactttgtacaagaatgaagctctgataccacttgttatacaagtggcctcagatatcttaagaaggggggggttgaattaagatattcgaaacttttctcctaattaaaaatctatcttactttttacttaaggtatgaattcccttaatgacaatcttcttaaatattaattcaaatgaagcaacttgaattatgaatataaagcaataataaataaaggagattaagggaagagaaaatgcaaactcagttttatactggttcggccacacccttgtgcctacgtccagtccccaagcaacccgcttgagagttccactaacttggtaattccttttacaagttctaaacacacaaggacaacccttcctttgtgttagagattcttacaacaagagactcacagtctcttaatcccttagagaatgagaagaagaagaggaacanatctctctagaaagagat

SEQ ID NO: 30656 - DNA, 438 bp, Glycine max
  unsure (1)..(438): unsure at all n locations
gctgtagaatggctagacatgatacatgtcatggcttgttttggttcaaggataaaaggggtgccccacattatttccatgacacaaatgcaaaaaatgatgatttggaaactttatgcaaaactgatcatgcatgcgcctatgcggacgctcaagtgtcaaatttttatggtcatgtgatgctagggctcaagattcatttcctctattttaaatcaacccaatgtttccaaaatatgttcttctatcaatttgtgcattcctccaagtccacttcgggcgtccggtgaaattttcacagcattcacccttcaggtgtagacacgttttttttcttcaaaaatcggttatgatcaatgaantttcttcaaagaaaagttggaaatcatctcttttcanaagcatgtcgtttattagctagacaacttaatttctctt

SEQ ID NO: 30657 - DNA, 343 bp, Glycine max
aagcttctttaagaggcttctagcacagtccatacatcttctccaagatcccaacggtcagatcagggaaaattgttttgtgaagttgcagaccaaatttcgtgaagatccaacggttaatgaaggctgggcagcgtttttgccgaggcagcttcatgtagctttctctagaagcttcattaagaggcttcctctagaagcttcattaagaggcttcctctagaagcttcctcgtggcttctttgagaatctttctcaagaggcttctttgagaagctttctcaagagtcttctttgagaagctagatccttatctatccacccctctattaactaaattaac

SEQ ID NO: 30658 - DNA, 284 bp, Glycine max
  unsure (1)..(284): unsure at all n locations
tgaggaagtgttgaagggtgaaactttctgcttttattgntgaccacagagtggtacctggagatatgtcgcgggggtcaagagaccttggggacgtcaggtggggtgctattgcccaaaaccaagcttgaccaatcccgacccaacccgggcatagtcggtcagtgagaacatgtgacgtacctaagcaggcgagcttctggcagtcaacagataaaaggaaaacaagaccacagagcaaggaggcttgtggtggctggccagctgtgaattttgtgtaatat

SEQ ID NO: 30659 - DNA, 479 bp, Glycine max
  unsure (1)..(479): unsure at all n locations
nggaagaaccctatgagtatggctagaaactctttttttctattcatcttgcttttgcatagttgcataagcatcatgctggaatgagaatgagtatggatgggcctataaaatttccacatgcaatgttaatttctttttaaaattgagtgaagtaaaacttatgagaaaggaatataacgcataaaaaaatgagaaaggaatataatattatgaatgtgctactaacgcctatgataaaggctctactttcttgagtagcaatataatatatatatatatatatatatatatatatatatatatatatatatatatatatatatgtgcactctaccataaagaagactaacaaatctgatcctcaaatgttatcttttaagatacagagtatacaccaacgataccatttctaatgacgattatgtctagatgtatcaataacggagtatactacacactatggacactgtgatccg

SEQ ID NO: 30660 - DNA, 400 bp, Glycine max
  unsure (1)..(400): unsure at all n locations
gcttgagccaaaatcatgactcattatatattcttgacccagggtgagaatgccaatccttaccctcggaagcaaaaaaaagaagagaaggaaaatttccaatcaaaggaaaaaggagaaggaaaatttccaatcaaagaggaagcaaaaaaggagagaaggaaaatttccaatcaaaggacaaagagaggaaaggaaattctcaatcaaagagtgggagaaagcaaaaagaaaagaaagaaaattcccaatcaaagaatgggagaaagaaaaaaagagagaagttataaagaagacagctcctggtcaaagaaaacagaagaaatgtgccgagaggtccttggaccacactatatctgaacaatacagaatngtcaccaaatgaacaaaagaaagaaaa

SEQ ID NO: 30661 - DNA, 421 bp, Glycine max
gcttctacaataccagtaactatggctaacagtaactatttacttttaaacaaaacaagccatataacccggtcaagaaaacatatgctaggagtaattttctttacaaatgattatgaaaaaagaattatccaaatctccaggtttccctcctgtccatcaaaaggaataagacaaggaattttattggtaaaacaaatatcaaaataacaatgtcaaaacaacaattatgtacagtgatttataatccaatccccacaccatccatagaaaaaattaaacacctttgacctagtaaccgtgattaaaagcaaaactaacaaaaaatattctgatcatcgccacttgttcttgggccagtaagattttttcatcatggcccatcatcaagaatgcagaggaaaaaaaaaagcaattaata

SEQ ID NO: 30662 - DNA, 420 bp, Glycine max
cacgcttatatctatgctaaaaccctcaatatttctgtcataaccgcatgggtgcgcgacatatacgagactacactctctaatctcccttactatgctgaccatggagtagcggatgactttcttcagatcgcctatgttagtggatagatattgactcacaagaaattacataatctttcttagatgtaacgcaaatacacctggaccgctttcttccttttccgacacacctacacacttttctaaattatgaaaacatacacaaactttcttagatatgatgcagctatgtgagagaagtcatacgcaacaactattgagtatttttcatcaaaaacaacgcggttttgctcctttgactataaaacatgtttattaaaaaaatatttctgcacaaaatgcaaacaagttctcaca

SEQ ID NO: 30663 - DNA, 409 bp, Glycine max
  unsure (1)..(409): unsure at all n locations
caccccactgcatttcctttactatatttatattacccacacccctcccgtcccccccanttgatgttctgccagcgaacaaaactactgcaaaatggacttcagcatctaggcttattatggagaaagcagagagtttgactgaaccttagtgaagactggttaatatcctaaataacattccactttacttggatgggtaaagaggagatctgaacctaagaatggctggaaaacatcagcttgtgaacgaggaaagcaatcgggctgggactagtgcaggatttataactgtcagaaaaattacgagtatatgatgacaaaagagcctcttcactttacaggagggaacctacgaaactctatatacctgggggtcgctcgtgaagattagcacatgcgacaacct

SEQ ID NO: 30664 - DNA, 447 bp, Glycine max
atgaagttttctggttttccaaacctttaaaacttgtgctattcatcttttcattctcttctccctttgccaaaatgaattcgccaaggactaaccacctgaattctttttgtgtctctcttcccccttttccaaaagaacaaaggactaaccgcctgaattcttttatgtctctcttctctcttgtcaaagaattcaaaacaacacagtctaagaattcttttgattcttcccatccctaatacaaaagtgtttaaaggactaacggcctgagaattcttttgtatcccattcacaaagtatcaaaggtttaacagcctgagatctttgtcttaacaaattggagggtacatcctttctggtacaagtagagggtacatctacttgggtttgactgagaacaagagagggtacatctcttgtggatcagttctagtggagggtaca

SEQ ID NO: 30665 - DNA, 431 bp, Glycine max
  unsure (1)..(431): unsure at all n locations
tgagcttctcaaagaagcttctcaaggaggtgagcttattttttagatgggtgtgtctagctaagctctagcttttcaaggaagttttcgcaaagaagcttctcaaggatgttttctcatgaaagcttctcaaggaaactatctagtctataaatagaagcatgtgtaacacatgttgtaactttcttgaatgaaagtcttatgagatacaattcaaagttccacttctctccctcttttattccttcaatttcgtgctcccgccttctctctttcttttcctccattaaagtatcctcttcaagcttcttatccaaggcaattgttggtggtgaagctccttcttccttggctgattccctagtggatggtgccacccctctactcttctcctttttcttacgctgcatcttcatggngtaaaatcacca

SEQ ID NO: 30666 - DNA, 187 bp, Glycine max
ggggcagaacagggccccgggggcaagccaaaccactgaccaccacccaccggaagtagcggaaaccggacactacagcgcctggagtacaaaagagacaaacacaacggagctggggggcggccaggaactgggaaatgaagggccggaacaaacaaggggaccaccaaccaaagacccggaaaag

SEQ ID NO: 30667 - DNA, 435 bp, Glycine max
agcttcgtcatcatcatcaatttcatacacttcagtattattattgtcaccatcaccatagacggagctacaaaaattgtgactactgtccatctctaacattatatcgtccaacttctacacaccaacacattagaaaataaataaaaaatacataacctaattgttgcctttgaaacaccgtaatttctctatcattaagtgcctgcaatggtacacaacaatgacactagtatcttccattaacagaagaagaatggcagaattaaaataagttattattataaatagctttttttgttaaaaatataatttttaaaatactctatattgttcattataaattaaaatttattacaaaatatataatcttatagattcaacattttatgcatacattacataatttgttaataacactttattatcaataaa

SEQ ID NO: 30668 - DNA, 309 bp, Glycine max
  unsure (1)..(309): unsure at all n locations
gctcagacaatcattaggaggaggagaattttttttacttttcttataagctgatggagtgcggtgttntgatgaggatttgttgtacagagaagcttagaattttcttatgagtctttgttaaactaatgccacttgtaatcctacctgccttgtattcttgataatattcctttaattgaacaacctctctttaagtctctcttgaagcctttgtcttttaatgatgttaaaacttctatctttgctatgagtcctttcaagtctccatgaatagatggattccaacttttttgtctatcatactta

SEQ ID NO: 30669 - DNA, 420 bp, Glycine max
  unsure (1)..(420): unsure at all n locations
agcttattatccaaggctcatcttgatggtgaagctccttcttccatggcttattccctagtggatggtgcctcctctcacctcttctcctttgtcttctgctgcatctccatggtggaaaatcaccattaaaggaactcattgaagctcaaagatcaagcctccattgaagccccacaagcaagcttccatcaagtggtaatcagagcataaaagcttcaagtaggtgctccttaaacctccattgatttttagttttaccttctccttcattgttgtttcttcatttttctccatgtatctcctcacatgtcttgtgataaatgttgttaacatgattttttgaatttccaccgattgatcttgctatagaaactagaattcagtttctatggctcanatttcctgttcatgttcttg

SEQ ID NO: 30670 - DNA, 412 bp, Glycine max
  unsure (1)..(412): unsure at all n locations
gcttctcattcatgggtccaaaaatttatttttattcttataangttgagacatcaaggacctgagctctttgttcatctgagtcattntgtgtaacttcattcaaggtaagggggatctttccacttcttgaaccctaaccttgttgcctttggaagctaagctttattgcatgtngttttgatgtctaaatattcgtagctactgtcttggctggaactagagtatatgttgtttttctggaaattctaaggttaaaaattagttctttaggtgttaaaacttaaggttagccttaaatttcatttaaatcggagttttctagcaaaagctatgaataaaacaagttctaagacatcttattggataaaatatgtcatgaaantatacacgcagtgagagttgtatggac

SEQ ID NO: 30671 - DNA, 449 bp, Glycine max
  unsure (1)..(449): unsure at all n locations
agcttgtcccactaagcgcgtgaatttaaaatctgaaaattcaaacatcactgagtgctcgcttagcgagtcacccacgctaagcgaggcagtcaaaactgccaaaaataagacataattgccttaggtagttacctttgtgcacattatagcatttcttctgcatcattgacattcactgtgcacttgcactattctcaccttgcactctctgcttctttttctctcatttgtactcaccatcctctgcaatccaagtaagtacttctgattttaccttttaatttctatttttgaaccctangatagaagccatgttgtgtttgctttgaaaaatggtgattntgtgttgtgttgatgttcattggttagttgtttaatcataggttgttagggatntaatttcacgtataatgtaggttcatttcatgtgttntgactatagtaat

SEQ ID NO: 30672 - DNA, 381 bp, Glycine max
  unsure (1)..(381): unsure at all n locations
agagcatactgcatttgacaacgaacaaacccattgtcttggaagtacttgtcaatgcgagtattccatgccctcggtgcttgctttagaccatacaacgccttgttcaatttcaagacttttccttcttgaccttcgatgacaaaacccattggttgttcaacatagacatcttctttaagatagccatttagaaatgccgattntacatcaagctgaaaaattctccacttcatttgagctgccaaggaaataagaagacgaatggtctccatgcgggcaaccggtgcaaacacttcatcataatcaactccatanttgtgcttgtagcccttagctacaagtcttgctgtgtgtctctcaacctctcattttgcattc

SEQ ID NO: 30673 - DNA, 444 bp, Glycine max
  unsure (1)..(444): unsure at all n locations
acctattggcttgcttcgtaggactcaacatcctttcttttatctttcatagaactcaaagtcctcttttttatctttcacaggactcaaagtcctcgcctttatctttcatagaactcaaagtccttgcttttatctttcataggactcaaagtcctctcttttatctttcataagactcatagtcctcacttttatctttcacaggactcaaagtcctcgcttttatctttcacaggactcaaagtcctcgcctttatctttcataggactcaaagtcctcacctttatctttcacaggacctaatgtcctctcctatatcttttataggactcaaagtcctcttataggactcaaagtcctcactnttatctttcataggactcanagtcctcccctttatctttcataggactcanattcctctatctntatgctttcag

SEQ ID NO: 30674 - DNA, 231 bp, Glycine max
tgtagctacctcatgcactcctctaatgactatggcatcatttctggcgctaaactgctgcgaattggaagccatcttctcaattaaattcctggcttcagtaagagtcatgttttcaagggcttcaccactggcagcatctatcatacttctcttcatattactgagtccttcataaaaatattggagaagaagcttgtctgaaatcttgatggtggggcactggcacat

SEQ ID NO: 30675 - DNA, 315 bp, Glycine max
cgtgatgggggaggggtttaaggggttccaaggttcaagagttgatataagaaagaaggaagaataaaccaagatgaggcgcttccgaatcgtgactgtgatcattccctacatcggtttcttggtatgtggtcctcgtgcaacaatcggttagttttgtttttaaggattgagtatgatctatgtacccttagggggcccctctgttattatgtgcatattcatcttctccatctatcattggtaatctcattttttatttgtgaaggttaatcttaactgatcactagtttcgtagaggtgtctttaaagaga

SEQ ID NO: 30676 - DNA, 433 bp, Glycine max
  unsure (1)..(433): unsure at all n locations
tcttcgactgaacagagaagatactcatgttggacacatgggaccccccttttgggtacgtatcccatgtcatgacagttggatagctaattttcttgccataaaaatggtataaaaccactaaacgtttgtattgtaaataactttactcaattaactccactttgagctcttactaacttcaatgttgaagtctatgcagacaccccaatgccaccgtgcaatcccctcgctgtcgtcatgttctaccactagaatcaccatcgcagaccaattctagctcaagatctttcactaaactgaatctcctttagatgaatcgaataaatgccaattttcttgtgtaaaataataataataattctgaatttcaatgagatcaaataacccttattttctctctctaacttatctatacaattanaaagaagaa

SEQ ID NO: 30677 - DNA, 351 bp, Glycine max
agcttctatataagctgaaccatattatcaataaacacatgttgagttttattcagaaaattagagtttatctcttttatcttagtgagagtgattctcctaaattcttgagtgattcaagaacaccctggctgtatcaaaggactttcacaacctttgtgtgttgccctcgctggaaagagtgattcttttcttccaatcatctccacccttgttctttcaaaccacaattccagaaaatccacctctgcccaaaattatctcgtgaaaggtctcgctttgaaattcaatttatgctcaagaatcacttaacttgagtgtgtaaaatgggaattatggtcacgagataat

SEQ ID NO: 30678 - DNA, 317 bp, Glycine max
  unsure (1)..(317): unsure at all n locations
gctctcgagaanatcgagtggtcataaattttcacacagatgtccgattcggggaaataatatatcgagacgcacgaaattgaacaacggaagctctccagaaatttgaatggtcataacatttcactcggatgttcgatccggggacataatttatcgagacgctcgaaattgaacaaccgaagctctcgacaaattagaatggtcgtaacttttcacgcgaatgttcgattcggggacataactcatctagacgctcgaatatgaacaacgcgagctctcgagagatatgaatggtcataaagtttcacacggat

SEQ ID NO: 30679 - DNA, 261 bp, Glycine max
acatgtatagagaatacctgtagaagccctcgcaaagaaaatagagcaggtgaagtgttttttttttggaaagcaaacatacatatatatattattaataatatcccatccctaccaaaaggactgatgaattacacataaatacaagacactaatagtgtcgccttccaaccaaaacaaaccctccaaaaatccactactaaggataaaatatccaacccaaacagatatacaataaacccagcccatattaactaaaat

SEQ ID NO: 30680 - DNA, 468 bp, Glycine max
  unsure (1)..(468): unsure at all n locations
ctcagcttaacatcagaccacttccagagtgctggaactacttcacatttacttgatggggcctatgcaagttgaaagccttggaggaaagaggtatgcctatgttgttgtggatgatttctccagatttacctgggtcaactttatcagagaaaaatcagacacctttgaagtattcaaggagttgagtctaagacttcaaagagaaaaagactgtgtcatcaagagaatcaggagtgaccatggcagagagtttgaaaacagcaggtttactgaattctgcacatctgaaggcatcactcatgagttctctgcagccattacaccacaacagaatggcatagttgagaggaaaaacaggactttgcaagaggatgctanggtcatgcttcatgccaaagaacttccctataatctctgtgctgaagccatgaacacagcatgctacattcacaacagagtcacact

SEQ ID NO: 30681 - DNA, 370 bp, Glycine max
gatgatgtcgaaaagaaattactatgttgtcatcatcaaaaagagggagaatgtgaatgtatgtatacatgattttgatgatgccaaagaagaatcaaacaatgctgcttcaaatgataagcatttgcttcaagaataattcaagagtgcttcaacaaacaaagccttgtttcaagattcactaaagacccagtcttgccttaaaacaaagtgctttcaagacatgcaacgctctggtaatcgattaccagaagacatggttgagaaatagctgttgaaaaaggttgtgaatatgaatattcaacatgtaatcgactaccatatgtctgtaatcgattaccagccacggaactgttggaattcaaattca

SEQ ID NO: 30682 - DNA, 376 bp, Glycine max
  unsure (1)..(376): unsure at all n locations
tagccctagatgggatggaccttttcaggtctcagataggatcaatagcaatgcctatatgttagacctcccagaagagtatggagtcaacaccacttttaacatttctgatttaattccttttgcaggtggagccaatattgaggaggaggaaccaacaaatttgacaaatcctctttaagggggaggggatgatgcaaccctcccaaggaagggactaatcacttgagccatgagcaagaggctcctagaggattgggctagggctgctgaagaaagccataaggttctcatgaacctcatggtagatttttgagcccatgggccaaggttaggtccacttatctntgtacatatttttcatactctaatttca

SEQ ID NO: 30683 - DNA, 449 bp, Glycine max
gatccttaagtcaccgcggctgcagctttgattaaaatttaaaggactctcctaactttaacgtcgattttttaaataattatttgttaaacaagtaactaaatccaatgaaaaaacaagcaactaaaattgcttctttttttttttctctcttaatattctgatattattatatgcggatatttcaaagatctcatccaacttttgttaaggaatactaataaatacttaatttaattcttttaattttataaatttatgattatgacccgtatagattattaattaatagttgtgattattagagatattaaatcaattataaattaaataaaaattattaatcattaaatttttgtaataaaatactattaattcttaagattgtgattaatttacaattaacttacataattaattagttataattatctattaataacttatca

SEQ ID NO: 30684 - DNA, 383 bp, Glycine max
ggagaatattgataattaagtgagtgatccactacgaaaaagaatgtgtatgtgtttcttgatttcacggttgtcatcatcaaaaagggggagattgtggaagtaatgcctttcaaggttattttgatgatgccaaagaatcaagagttaagccaagttttcagcaaagaattcagaatcaagttttaagtttcaagattcaagaatcaagtttcaagaatcaagaattaagatcaagattcaagactcaagattcaagaatcagtagaagacttaatcaagacaaatattaaaaagttttttcaaaactgagtagcacatgaatttttctcacaaccttttaccaaagacgttttactctctggtaatcgattactagaata

SEQ ID NO: 30685 - DNA, 435 bp, Glycine max
atttccagtttcctgaatatgtctacgaatcttgccagatggcggtgcttatctttcttggatggtaccatgggatatggcacttccatacccttatctgaagctttttctttcctcttttctctatctttttcattcctactcttttcttcatctttattttttttaactttttctttttcttccttttcttcttctttgtctacctctatttcattttcttggacttttatttttctttcttcgaccattatttgtatttcccccctctgactcattgcattcagtacctcattcttcttgttaatagtagtgtcctttaaaggagcatgctccttcacagcaacaacatactcatcctcagccccataagccttctgctacttgtacacaacttacactcttcttgggattttctaatatttgcccaaagtg

SEQ ID NO: 30686 - DNA, 587 bp, Glycine max
  unsure (1)..(587): unsure at all n locations
cgtctccgcgctctcgactctcanctttacttgnctntcatttatctaccttctntcttatcttaacttgtcacatctacaacncccccacacccatttgaaattgtgtcgatctcgcatccncgatactctatagacgagctgcaggcatgctatcttggnacacctaaaagtagaatgtattacatattattgctcacccatatgcgagctgaaaataaaagatcctagccagacctatatgctctcccattacatcaaccaactggtggggcaggactacattaaatatttcatattcttgggaaaaaagaaactgtgcatcacctcaccctttttaacaattaaagctacctggcctactatcctatccaattctcgtatacaaagattgatcaagcttatatttgctggatggtattatttcatntcaaagcccaaacagtgtgacaaaccttaccaccacattctatgtgtccatatttgtaaaaanaaaaaaaaaaaaaaaattcctacccattgccataggttttcttattcaagttgtggggggtgttgaacagcctaccttgattgaaagaggtgtt

SEQ ID NO: 30687 - DNA, 423 bp, Glycine max
  unsure (1)..(423): unsure at all n locations
agttactagtgcatgttcgcgtttgatttcattttaaccacttacttttctttttttgagataccactctcacttgattatgtaaaagagtcaagctcaatttttttaattncatatattacatgttaagctcaattttttaattatcttgtataaaaataattattaaatattatattgataaagttataaaaaatttaaggaaaattaataaatataattgagttataattaagttaggaaaatttaataataataattaaattataattttacgttaggagattgaaatagcctaagggtttgttgacccaactctgttttgggcttaaagctacttataagttaatataagnaaaatagaacctaaaaataagtagaagtcgttatgagttttattttatttttaaaactctttaaata

SEQ ID NO: 30688 - DNA, 394 bp, Glycine max
  unsure (1)..(394): unsure at all n locations
agctatgccaatatgtctgcaacttgattggcttctctcaaaatatatatgggttcgtataatgtggccctcgttagcatggactggatcgatagcctaaacaatattaaagcacaagcaccgattgcaacatccttgagctaataattacacaagtttagagtcagaataaactctaattctcttgtgcatgtcctcgtgacaaagccatttcaagaccaatcataatagttttcagttntgcaatcaacactgtacaaccttctagaattgacacgaagtcgcagatgaaagcacaatgaagaatngtcactctaatttggaatcagcacaatccctgangaggtggaatagtgattcctcattctcatcatagtgagtacacatatttgat

SEQ ID NO: 30689 - DNA, 355 bp, Glycine max
  unsure (1)..(355): unsure at all n locations
cttgaaactcagctttgctgcnacatttatatagaccctctcagtggccaaaccaacttcaatataataattatgagctttcaagccacagatataatccaggttggaagaatcatccaaatctgagatgggcaagtcttccacaacaacaacagcctgtccctcctttccagaatgctgctgggtcaagcaggccatatgttcctcctccaatgcagcagcaacaacaacaacaaagacaacaagcagctgaggccccttctcaaccttccttataggagttagtgaggcaaatgatcatccagaatatgcaattttagtaagagacaagagcctccattcagactctgacaaa

SEQ ID NO: 30690 - DNA, 322 bp, Glycine max
gtcattagagacatctaacaatgactttcaaatatgccccatgtgtggtgtcgcttgtcaacgtcgggacttatacgcgattctcctcaaatttcagccaggccgcatcaattagactttgcaccttacgcttcagggccatatcagaattgtacttgtcgcaacctacccttttgcgggcgagtgaggcgaggctcacgggtgcgtcttccaaaggaggaaaatgcgcggagtacccaccaatgtttatttgtggaaaacgtctaataaaccgaaggaaaccggtcatgaagaatattccagatttgggagttgtatttac

SEQ ID NO: 30691 - DNA, 459 bp, Glycine max
  unsure (1)..(459): unsure at all n locations
ttgttccttttatatacaagagaagatctttaactcatcacgttgtctaaaaaagccttgaggtggatccaagtgctctgatcattcattagcatattcatgttttggtggcctactcaccactgtttgtttctttatggaactcaccataactaaaaaaaagcgccaaggcacccctataacactcgattcagaagtaagatggataaccaagaggtagtgcatgatcagatgaaagccgacctatctgccttaaatgatcaaatggcttctatcacagaggccatgcttaagattcaaaanactatataagacaatgctacggcggccgctttccatacaactatggaagcggaatctgtgctacagcccgcaataaactttggccgagacagaaacacaacgtgtntcaattgaggtatagtctcaagcctaccctatggcttgccttcgacttat

SEQ ID NO: 30692 - DNA, 396 bp, Glycine max
tgcttttattgatgaccacaaagaggtacctgtagatatgtcgcgggggtcacgagaccttggggacgttaggtggggtgctattgcccaaaaccaagcttgaccaatcccgacccaacccgggcatagtcggtcagtgagaacctgtgatgtacctaagcaggcgagctcctgtctttcaacagattataggaacaaagaccacaaagcaaggaggcttgtggtggctggccagctgtgaactttgattgatatgtgggttatggcctctggtaatcgaataccaagggtgggtaattgattacaacgcttaaaaatgaagacagggggctaagatggtctctggtaatcgattaccaagggatgtaatctagtaccactcttgaaaacggagtc

SEQ ID NO: 30693 - DNA, 263 bp, Glycine max
tgggatcttggaaaagttctcttctttcttttgtgcgtcatgttcaagtagtcaattctattgtgtaaagaatgctattatatagctttcatatttatgcccggcctatatatactttgaatatgatataatagtggatttgcattttatttggacaagttatgtggaaaatagaaaattggtaccgtctatttgaaaaaatgtttctcttgctggatgggaggattatattataccttcagcctattataatgggctattta

SEQ ID NO: 30694 - DNA, 448 bp, Glycine max
  unsure (1)..(448): unsure at all n locations
gcttgttgtcgtgtgctgagtgtgtgagcatgtcgtgtataaggattcaacaaaacctgtacttatattaattgagccgaggtccaagtcctttgttgtaaaggctattgtagccttgtaaataattctcggcttgtagataatagtcgggagcttataaataatgctagagataagcatttgcttatagataaaaagtagaagataatcgtaccttgtagataatgtgtgatgttatagataattaattacctaccaatggatattatattcaaatacatttgaatataagtaggttagagataacttgtttgtcggggagcccaactgctaagggcttggtgtccgcgctcttgtagcaggactaacatnagacagtgtttctgagtgccaagtangatgtcacgtataatttgtgggtcctggacagtacaattcataatttcta

SEQ ID NO: 30695 - DNA, 388 bp, Glycine max
  unsure (1)..(388): unsure at all n locations
ctttcagaatatattttctgcnttgattcttgagctatgcattttaagctaaaatattacttggagttggttagacccaataactgccagaagtacagtagttacagacttacagtcatagaaaaatatatgaatttgtagcatattaagggtctccagccccttcaacttggtcagcgcagaaaaatatggcattggctataggttcctcagtacctgtgacaaatcaggaaaactttaagtaaataatgttaagtcagcagaagggcagcagtggtgtacatgtttgaaaacatccttatccatcaaaatgttctatttacattttccatatagtgtaaacctttatacataaatctcagttcacaaaatttcactatagctcggg

SEQ ID NO: 30696 - DNA, 389 bp, Glycine max
agcttaacaaagttttgtcttatgcaccttaaattaattaatttcattgtccttataaatgtaatttttagttgttgatagtgaagtgtcatcaattttcatcattgggcagtcatgactggacatgaattattaattctattagcaattagcagcgccaatattgtattgctatatacttgctctttctttatctaagtcttttaccatatatatatatatatatatatatatatatatatatatatatatatgaaaagcaagagaagtcttcactatatatcacgcactcaaactgaaggacttgtgattctcaatgcagctccaagaatttgatgcggtaaaactaacacaagcagagctggctataacaataatattgatactaa

SEQ ID NO: 30697 - DNA, 262 bp, Glycine max
attgatgaattggagacactacctctgtagagctagatttgagggttttagtgatcataaaagtttgaaatacctatttgaccacaaagaactgaacatgaggcagaaaaggtggatggagttcttgaaggattatgacttagaagtggtatatcaccttagcaaagccaatgtagtggcagatgctttaagctgaaagtcattactcacatctgctatgatgattcaagaatgaaagttgactaaagagttcagagatctg

SEQ ID NO: 30698 - DNA, 489 bp, Glycine max
  unsure (1)..(489): unsure at all n locations
ntgaactttgcctcggacccagagcaccgcagctgcagctgtgtactgtacataccctgcggagattgtttatttgaataacggatgaagaacgttccaaaacgggggaacccttggcgaaatacttcacggaaaaactctctgagacggtgccaccgctcacccgcttatatgttattaatggtaacgactttgcgccctagctaaagatagagaagggtcaaatgggctgcacccactacttatagcctgtcacccacatggttggctgaaacagcggggggggtgtcgtccaactacgttcggccagcctggtggtgttacattcaaatcactggcttctggaggaagcttcaaagggctcatcccggactgcgtgctattcgcaccgtcgttctcactaagttcacacgcattaggtgctgataggcgtgtccttaatactggagttctcgaacctacgagacatgtcacgagcgttgcatttcg

SEQ ID NO: 30699 - DNA, 111 bp, Glycine max
ctttctgcccctttctgtaaggatctatgcctgcccttcgaaattatgcctgaatctgaagctgcgtacaaataacatcatgacttcttaaattccccttttctatccccc

SEQ ID NO: 30700 - DNA, 390 bp, Glycine max
tatctcacaatcgatcaagttgttattatgagacaatgactgattatttcaagagtctttggtttaatcgggtaccagctggattaattgattacttctctctcggttgagtgttcagaggagaacacgaacactttaatcgattacttacgtcatctaatcaattacattgttcttgaggagttttccaaatgttggatgaacactttaatctattacttagataatttaatccattacttagataatttaatcgattactttgctaaaataattgattaacttatagtattaatcaattacaactaagtataattgtctgctctataaataaatagcttgtgttcacatctacacatcatgagatcattagagaatactccctacatc

SEQ ID NO: 30701 - DNA, 332 bp, Glycine max
  unsure (1)..(332): unsure at all n locations
aaagattttggctggttatgccataaacacattcctgatcagaaaagaaagaagctggatgataagagtgagtcaatggttttcataagatatagctctagtggtgcatacaagctgtataatcctaccaccaagaaagtagaattcagcagagatgtattgtttgaagaatataatgcttggaaatccgataattgttgttcacgttaagatcaaacagtggctgagatagatttagatctagatcagactgcacctgatntagataatggagaagaacttggagaggaactcaatttaccacttgcaccacctgtggaatctaatgcacc

SEQ ID NO: 30702 - DNA, 174 bp, Glycine max
agcttgtgcgaatcaaatcacttctgcattttatctctagcatgcattctttctttctttacccactcctcacgtttggttttttagggaaaaacaccataactaaacgcgccacaaggcatccctatcgcaccagaatcaaatctagaacgatgggtgatcaagaagagacac

SEQ ID NO: 30703 - DNA, 410 bp, Glycine max
  unsure (1)..(410): unsure at all n locations
gcgtgggtctgggagacaaaggtcaagtggtcgcgatatgcttatattatgttccgagtacattggatttggtacgaccatgcccttctgatttccaactgggaaaatggcgagtggaggaacgctccggcatttacgcaacgagcataatggaaacctttatggttttaaaagctctatagctgggcctaggctttagagttttttcctttttgtgaggctctgtgtcttttgttcttgaatttataatacaaggatctttcttcatctgttcctacgtctctacccattctcattcatttgcatgtttacttctttttccaaacggcagatccgatgacgagtcccccgaaggactaatacctgggacccgcttatcgactntgagcaagaaatgaatcaaacggaag

SEQ ID NO: 30704 - DNA, 572 bp, Glycine max
  unsure (1)..(572): unsure at all n locations
accgccacagtcnncgttatcttcaactattcaatacacatcnaacttaaccttctactctcatataccacaaccccacacataggnattttgatttcctgacagtgcgagaccgcganannnanagcgagcgtgcgcacgaagcnnggggcaccgagcacacacagatattatgtttgatattcgaaccgaaccacgccatgcaacactatagccagagatcggacacaaacgctaaaagggacagagcagagaaaaaaccaaccatgagtgacgttggaatatcaacaggcgatgaccatgtaagcaagaaccgaaacaaagatcatgaaagagatagacaaccgaaccgtgagggaacaggctgctcccatacttaataccattgcgacaaagcctgaggattgggataactacgtacggggatcgccctgaacagataggtgggcccactgcattccaacaatgcaggccatgagcccaaccttggatcagcgatgagaaagaatggttcgaccgcaaacagtacaagtggcaatagtgggctgcctcaaaacacaaaacacatgacg

SEQ ID NO: 30705 - DNA, 301 bp, Glycine max
acctggataagtttaatatgaactgaattgatgacaacaaaacaaacaccaagtttgcctcaatacttaaacgcaatgtacattacgatgatttaacatatttcacgctggcattgaacattttgatgaaacgatggaaaacatggaccagcataatactaaaagaccggatgcattctaaaacacttactatacaatgttgaaggccatctgcaacttcttaaagcaagaccagactgagtcaaccaaagatggtatggacgatcgtaaaatgagtgcaactcataatacttctctgaat

SEQ ID NO: 30706 - DNA, 444 bp, Glycine max
  unsure (1)..(444): unsure at all n locations
agcttgtatttccaaacacttatgctatcctaaacgtgaccaatagtcacattaagtgaaaggctgtaaggctattgtcagtgttttcaaatatccacattgagcgcagttgagataaacaacaacttgataaataattaggtctgctccagtagttctcacatgccttttatgcctttagtccaattgaaccatactagtaattttttaggtatagaattttactctgctctgaaagcattattgttgcaaaggctcgataagtgttgggtcttacatatatccttgtctgctgtaagtcagttaaacatgattaatctttgttcttttttgaattngaaaaaccaacacaaatctgagccttcanaactcaagcaatctgaaatttctcccaaatntaattacttttattttattgtatcacattcagaaactttgaaatat

SEQ ID NO: 30707 - DNA, 245 bp, Glycine max
tactatttcttaatatagatgggctagtggatctaacaacgatcgacgcctttcttgcttatcaccacagcaaggaaagcctcatcatcgctattttggcggatgcatatgatacattcaacttgaggtgcaagaagaaaaatgagagaatcgtctattgtacgtttgttctttatatatgggaggtatcccacattttttatcatgaagttagatttgtttgccccctacaaagtcatcgcatg

SEQ ID NO: 30708 - DNA, 426 bp, Glycine max
  unsure (1)..(426): unsure at all n locations
ggatgttgaattctggntgttcctggtgcggagatgatggtacagcgggtgaaccaaaagcggaagtttcttttggtgaggtagccatggaaaagcagagcgtttggaatgatttcgtaaatctcagaaggctattgggaaatgctggtataaacacgaatgccaagcagatataaatttgaatgaggaatgtagagggtcgtgtgaagcaacggtcgaattttccttggttcagtagtgaacgtgctattaatgttaagtgattcgtttgggcacgttcagattgctgtagntgctataattcctctagcacacaaatgcccagcttgcccctcagttnttcaaactgatttgcatccaaagcctttgtgaaaatatctgctatttgttcctcagtgtcaacatgcttcagtgtgatcactttat

SEQ ID NO: 30709 - DNA, 393 bp, Glycine max
gatgatgtcccgagtacattggatttggtacgaccgtgccctcctgatttccagctgggaaattggcaagtggaggaacgccccgacatttacgcaacgagcataatgtaaacctttacggttttaaaagctctatagttgggcctaggctttagagattttccttttgctaaagctctgtgtcttttgtttctgaatttataatacaatgatctttcttcatctgttcctatgtctctacccattctcatccattagcatgtttacttctttatttctgaaatgacagatccgacgacgagtcccccgaaggtactaataccagggacctgtctatctacttcgagcacgacatgaatctaaccgaagatgaaggacacgatgatgtgggac

SEQ ID NO: 30710 - DNA, 604 bp, Glycine max
  unsure (1)..(604): unsure at all n locations
actacccacacacctctctctcccttgtcctntttaactctataccttttaatattcaatcgacatacacccacacaaccacaaaantttgaatcgtgacntgccgtancggcgaaccnanaacgacctgcaggatgccagctttaaagaacgcccactctgtattttgctattnatagagcacactacaaccttcttcgtgaccgctatatatttcactcattttaccaccaattaaaacaaatgagggccttcctctgaatacaatatctatgtgtaacctcattatcaccgccaaaaaaacaatatcatacgccataaatcaagccccatgtataacatcatcacgtgtagcaaacacctattaagggataatacatgtttagtcttcaacgcacattcatttatttactttaaccaaaaaaatcatattaatacctgagaaataatgaaagcataataacaatcaacatggtgatgcacatcaagtgtctctccattatcttcaatcacactaccggtcgtgttcattcgatatcaaacttgtttacacatgtagtggtgtcatacattcactaatcttccgccatcttaataaaacatg

SEQ ID NO: 30711 - DNA, 334 bp, Glycine max
  unsure (1)..(334): unsure at all n locations
gtgagcacttttataataagtaaagtatcgtctccacagggacttgttcaataattgggtaattaatagtaaaattataaggtacatgaattaagaaattaagtaaccaaaattaaaaacaattgcataaaattaaaagagaaaagtaagagaaaatttgttgaggaattctgtcaaacacttggtatatgcatganatttgagtaattntaatgagagaaatcatcggggtttaacttcattagtcttcctaacatgcaatcactctcaaaagtgtggaaccatagactaggatagaaaatccttatacataggtatgagataaatagagttc

SEQ ID NO: 30712 - DNA, 440 bp, Glycine max
acggacttaagcactgagctgcagcttgaaaatatacttggctttatttatctgttttgcgctaggcggccacgctcaacaaagtattttctacacctactgtacgtagatttgaccaatgctgttatgggaatggttctacaatccttcaaaaccttattgatacattctgaaaggttggttgtcatgtggccatatcgacgtacttctctatcataagccattcgccatttcttctttgaaattcgatcaacccatgtggctatggctggactcaattaacgaaagtgttgaaaattatgaaaaaaatgtgcttgcaggagagtcgctgcataaaatagttatgaatacaattttagttatatgaacttaaataacgtcaccatcaaaatgaatctacccaattttcacatttttttgcttgcattatgaattccatt

SEQ ID NO: 30713 - DNA, 370 bp, Glycine max
gcgagcaggggtgcttgctacaaaaataacaaccttctggagggcccaagtgggcgctggtgctatatgcaaccccaattttactaaatacacaccagtgcctatttatatgtgaatcgtctttccataaattactgaaacttaatgaatttcgtaactatctgggttctttactgtatggactgaacctagcggattacacaatcatccccattttgacttacgaatgaacggcacccactaatcatccctttagaataacgtgtgtctcggccttacgatgacatcatagtttgtcgtttacgcatgcccgaattcgctaaagctttgatggtgccgagcaccctcatgccaaacaaaatttgtgatg

SEQ ID NO: 30714 - DNA, 361 bp, Glycine max
  unsure (1)..(361): unsure at all n locations
cctgcggcatgcaagcgttgatctaccaccactcttcgnctccaattattcttaaaatgtctaatattttatcattattagtactttgatatccagcagcgtatttggctatattattatgatatttgaacaatttactatttctttattcgcatggtatgtttgaacaaatattaattatgctatctgacaaagtggtccttatatatttgatctaaatatggatcttgcaccatgatttggattatatattttcatgaatgttgtacggatgcttatttgtatttgtatgcttcaaactttgtaacgcattttggcattgtgtcgatgccaaacggggagagaaatagggattaaatca

SEQ ID NO: 30715 - DNA, 157 bp, Glycine max
actcgcctgtgctttttcttccatgctgtacgtggccaaatcattgatccaaccatgattgatgacgtgggaattgaagtcgcaaatataatgtgccaaatggagaaggatgattcccctcctttgcttgcatcatgatgcaattgattatgcatct

SEQ ID NO: 30716 - DNA, 423 bp, Glycine max
  unsure (1)..(423): unsure at all n locations
tagaagcttcaagaattatggcctcatcaaactacttgtttcccgagggaaattctataaatagacctcttatctttaatggagtgggttaccactactggaaaacctgcatgcaaatctttatagaggcaatagaattaaatatttgggaagccataaaacaaggaccttatgttccctctataatagccggaagtgcaacaatagaaaaacctatagcagactggactgaggaagaaagaagattagtacaatataatttaaaggccaaaaatattattacatctgcccttggaatagatgaatactntatggtttcaaattgtaaaagtgctaaggatatgtgggatacactacaagtaacacatgaaggcacaacagatgttaaaagatctangataaacactttaactcgtgaatatg

SEQ ID NO: 30717 - DNA, 382 bp, Glycine max
  unsure (1)..(382): unsure at all n locations
tgagaagtgaaattgagaatgaggtaaatttggagcaaactctcaccttacacaagtctattacatcaatttaaacttgctcaaactggatttacacctaaaattccaccgaatcaaaaattgactcctcaacacccaatttttaccctaaaaatgactctttgtccacttggtcatttgtttttctcacttgcacagcccaagctttctcataagtcctaaatgacatttcaaactatgattaactcactttaacctccanataccactaaatccagatttggccttccaactctcaaaaactcactctttttccactcataacaccatattctcaccttctaaccctaggttaactctacccttcatctctaacagtctt

SEQ ID NO: 30718 - DNA, 379 bp, Glycine max
  unsure (1)..(379): unsure at all n locations
tgtcttatgcaccttaaattagtttatttcattggccttataaatgtaaattttagttgttgatagtgaagtgtcattaattttcattattgggcagtcatgactggacatgaattattaattctattaacaattagcagtgccaatattgtattggtatatacttgctctttctttatctaagtcttntaccatatatatatatatatatatatatatatatatatatatatatatatgaaaagcaagagaagtcttctctatatatcacgcactcaaactgaaggacttgtgattctcaatgcagctccaagaatatgatgcggtaaaactaaaacaagcagagctggctataacaataatattgatactaatttat

SEQ ID NO: 30719 - DNA, 136 bp, Glycine max
  unsure (1)..(136): unsure at all n locations
ctaagcttgtgtgaattaccctaaccatgacttggagctaggtggtgtagtgtttgttttatgattnggagacactacctctgttgagctagatttgaggtgtttaatgatcataaaagtttgaagtacctatttg

SEQ ID NO: 30720 - DNA, 340 bp, Glycine max
attgaaccatatcctgctcagggagcaaaaattgcaatctttagtaacaacacttcataagtcttaaagccaattacaatcttatagtcaaatccttcttgaactagctatcacaacttttcgattatatcaagttgttaaggaacattgtacaacaaatactttgaataaaacagcacacccatgcaattaacacgggaagaacaatcaaagtcttatgatatgaagccaaaagcatcaatgtcccattcagacaatgcatttgatcgaacaagttggaggcatcatccaaggaatggaaatggacataaattggcaaagtgattctctttattgtcta

SEQ ID NO: 30721 - DNA, 448 bp, Glycine max
  unsure (1)..(448): unsure at all n locations
ggagtttccaagtgccaattcgtcttcttcttatgtccagtcttcttctgacttcaattcatcaaggggctttccttctgtgtccagcatcttgggatgttcccagcctttgatgacagcttttcaggttctgctatccagtgatttgaggaaggccaccatccttgctttccagtattcatagttggttccattcagaataggtggtctgttcactggtcctccttctttctccatgttcatcagaatttatctccctagatctcactcagtgatttcgagtgcctgctctgataccaattgaaattctgatactggggacagatgtcgtacaggatgtcacgacatcacgcttcagaacatgcagtatatatntgacagtgtgtacagtgtanacaagaagataacacaagagaattgtaacccagttcgtgcaacctacctacat

SEQ ID NO: 30722 - DNA, 389 bp, Glycine max
agctgtaattgtcattgggcacctattttgaatctcctatgttgtacctacatataagaaacagttccattctccccattttacaaaatcatattcatacatcattggggtatttcaccgagcacttggtgggcgcacgtttcaacataaattgcaagagaatggggacaatgtggcatgccccattgcttcagaatacagcataagcctaaggccttctcattcaaatcctcaactcaagagaacaagcataaaaacaaaccaaaaatgccccacaaatataagcacattctcacaattcggagcaccaaaagatgaagaaaatataccaatgggaagctaaaaacatcaaggatcgaatacttacttgttggagtgaattataacac

SEQ ID NO: 30723 - DNA, 436 bp, Glycine max
  unsure (1)..(436): unsure at all n locations
gatactcagctggatttcctcttagagggaatctatccttcctaagatggtttctatcccagtcccccctattaagaactagctcctttcttcctctattgcctttagttgcatacacctttgtttggttctttatttggttcccaaccctctcatgaaacttctttacaaactctgacctaaattctccttctttatgtataaaagaagtgtcaagtaggagggtaattaggtctaatggtgttagaggattgaacccataaacaacctcaaaaggggattgcttggtggttctatggacccccctattgtaggcaaattctacatgaggaagatactcattccatgacttatggttgcttttcagaagagcccttatnagggtgtatagagactattcactacctttatttgcccatcagtttgtggatggaaa

SEQ ID NO: 30724 - DNA, 195 bp, Glycine max
ttgagacatcaaggacctgagctcttagttcatctgagtcactatgtgtaacttcattcaatgtgaaggggatctttccacttcttgaaccctaaccttgttgccttaggaagctacgcattattgcgatgtggtttgatgtctaaatatacgtaactactggcttggctggactagagaatatgttgtttttct

SEQ ID NO: 30725 - DNA, 310 bp, Glycine max
accacagagggtacctggagatatgtcgcgggggtcaagagaccttggggacgtcaggtggggtgctattgcccaaaaccaagcttgaccaatcccgacccaacccgggcataatcagtcagtgagaacctgtgacgtacctaaacaggcgagctcttggcagtcaacaaataaaaggaacaaagaccacaaagcaaggaggcttgtgtggtggctggccagctgtgaatcttgtgtgatatatggatggtggcctctggtaatcgattaccaagggtgggtaatcgattacaaggcttaaaaatgaata

SEQ ID NO: 30726 - DNA, 408 bp, Glycine max
  unsure (1)..(408): unsure at all n locations
ctgcagcttggaaagatcatatcaatattttctttaaagcgactaaaaatcacaatgcaccctacgacctacatgctttttctttgaatgcttgtcttcatttgttgctttgctaattaattccgtaactcttcaactccagtggcatatccttaacaatgagcctcttcttttgcaaccatcttcttcaatttttatatctggtcatcatacacacgaattctatcctcatgagaggcaatnttctcttcagttgatataagcttctgtttcagctcctccactagtgatatacataacgattaacctcgaaagaacttgtattggtttaactgtatggcataattgtcatcctagatccaaaatttacacctactatctttctgaagattatacgacaaagacaaa

SEQ ID NO: 30727 - DNA, 319 bp, Glycine max
  unsure (1)..(319): unsure at all n locations
aaacctaatgtggagttcacaactgtctgactgcttgtctctcctaagaatgccataagtttttgtatgacttgggttgagattgaaacttgtgctttcttacagtgttaggttgtgtcatatatatagatgacttttaatatcagtgctgcattttttaaagattaaaaatacgcatgcacatgctntctgtatgtgttatcaactacaccaatgacgtgacatgctttagcttgcatcagacctgcatgtgtagtcatgttgtgcagggtcctttcacgcgctttatgttaatgcagacaacaattcatcatacatg

SEQ ID NO: 30728 - DNA, 444 bp, Glycine max
  unsure (1)..(444): unsure at all n locations
agcttgtaggattatggggtacccatcacatgtggtactatgtggcggtcgggcgatggtgcacaacaagttttccacatacacaatgcgcgcataaacccaccatcccctgttgcccacctncatctgagctcacgtactcccacgtagcccatatccttttttctctcaacaccgggttcccatcaatcctcccaagttttctccaacatcaaagttatacaacattcacacagcacaagctatcgcagccaagcaaaacagggcaaaggcagaaaactcttgccaataacaccaaccaaaatcacagcttttctcacttaaagaccccagtaacaatttcttcgatccaattctgtaaccggtggatcgacttcataaatttattggaagtctatagtgtatacgcctacattgtgaccgttgggatctactangaaacac

SEQ ID NO: 30729 - DNA, 516 bp, Glycine max
  unsure (1)..(516): unsure at all n locations
nttggatgaatgccatggaantanccgacaccanannaaacttcagctctaagaaaaagatggcctcaccaaacaacatatttccagaatgtgtttntatcaaagaccttccatccttaatggagagggttaccattactgtgaaacccgaatgcaaatttttattgaggcaattgatctaaatatttgggaagccatataaatagggccttatatacccaccacagtggaaagaaatttaatagatggtaattcatcaagcgaaagaattactattgaaaaacctacagatatatggtctgaagaggatagaaaacgagtaccatacagcttataagccaagaatataataacatctgccctgngaatggatgagtatttcaagggttcaaattgtaagagtgctaaggaaatgtggaacactctttcattaacacatgaatgaactactgatcgttaaagatctatgataaatgcactaactcatgagtatgaattatttagaatgattgcaag

SEQ ID NO: 30730 - DNA, 431 bp, Glycine max
  unsure (1)..(431): unsure at all n locations
gctttcttagccttcaagaagaccattacctcttcgctagcctaaacaaccccgttgaaatcgaggaattgtcgacaaggagactgctattttggcaaaaacaaaatgaagaanacatgagggttgaactcaagacaagaaacgaagtctaagaaatggttaggatcagagaataagcttgtcgcaacctgcccttccgcaagagggcgatgcgtgactcacgggtgcgtgttccaagaaaggaatacgcgcggagtcgccaccaacgtttatttgaggaatgtgtcggaaaaaccggaaaagacgtgatctacgaattctatgtgaaaggttcgagagttgtatttacgcacagggaaagtattagcaccccacgcgtccgtcacaaagagacaacctttaatcaatgtgcaatatgacatcaattatat

SEQ ID NO: 30731 - DNA, 393 bp, Glycine max
  unsure (1)..(393): unsure at all n locations
cactggtaattgattaccaaaacattgtaatcgattacaactttttgaaaataattggaatgttgtaaattcaatttgaaaactctttcaaatccattttgctactggtaatcgattacaacaatatggtaatcgattaccagagagtaaaaactctttggtaaacattntttgagaaaaaccatgttgtattcaatttttgagaaaaccttttcatacttatcttgattaagccttctcttgattcttgaatcttgagtcttgaatcttgatcttgattcttgagatcttgaatcttgaatcttaattcttgactttaaactctcttcttgagtcttgaatacttctcgattcttatcttgaactcttgaactgttcttgattcacttgagt

SEQ ID NO: 30732 - DNA, 380 bp, Glycine max
  unsure (1)..(380): unsure at all n locations
tggttttgggcaatagcaccccacctgacgtcgcttttgttcttctgttttccgcgacatatctncaggnaccactctgtggtcaacgaataaaagcaggaagtttcacccttcaacacttccttatttcaagcttgtaagattatggggtacccatcacatgtggtactaagtggcggtcgggcgatggtgcacaacaagttttccacatgcacaaagcgcgcataaacccaccatcccctgttgcccacctccaactgagctcacgtactcccacatagcccatatactcgtgtctctcaacaccaggtccccatcaatacatccaagcttgcccaacatcaaagtaatacaacattcaaacagcacaagctatcaca

SEQ ID NO: 30733 - DNA, 416 bp, Glycine max
  unsure (1)..(416): unsure at all n locations
agctngtcatatctctcttgatggnctctanatgnnatatcccctaccaagaacatattgcggaagtatggactactagcaacaatatgttatcaaagagaaaaactctagatgagggttcactgtaatcaagcatgtcagagacctatcataaccacatattcacctccactccttatgatcccatggacccgggtatagggcccctttacaactcaccgtgtgtgcaaatagtgttggtgtgtgtgtgcatcaaatgaataaatatatacctcatgcatacattttaaaacacactaaaagcatcaatagagtctatatatacaagaacataagaaataaaagacacagaaaagaacacagcggagtcatagaacgaaacacactgatgaatgcctaactttaacataattcct

SEQ ID NO: 30734 - DNA, 344 bp, Glycine max
  unsure (1)..(344): unsure at all n locations
tatagagttaagtctcatataggtntaatctattctattgtttcataatcgattacattgctgtttgagacaatgactaatttattcaaaagtctctgctttaattgattaccaagtggattaatcaattacttctctctcatttagttgttcaaaggagaacaagaatactttaatcgattagttaaagcatctaatcgattacattgttcttgagttctttccagatgttgggaagaacacttcaattgattacttaaataatcttatcaattactttgttgaattaatcaattactttgtagatttaatcaattactggcggttatatcagttttctctat

SEQ ID NO: 30735 - DNA, 255 bp, Glycine max
tcttcatatattgtgtttttgttgatacacaattttacttggtttcatatgtgctctataaattgagttttatttgtttgcataacttgtaggcaacaataacgcaaccagttgttaataacatgatgaatgtcttgtactttcagattaccgctggagcaataccattgtaccttgttgcctttacaggaaactgggcttatggatcttccacagaactgtatttgctgaatagagtgaatggtcctagttggg

SEQ ID NO: 30736 - DNA, 304 bp, Glycine max
ttcacaatgcagataggagaagagatagagcggtagaccgaggaagacagagacaccaacaaccacggtgtgaacgacaacctccacaagaacaggaatccgcctaacaaattaggggtgaatcaacaccattgcgggcggattttcctattgaggatagtccaactagtccctgttagtctgtgaaaacgactaacttttgtgtataaaacttgtgtatattgtatcaaacttctgcaatttatagttggtgtataatattataagtactttatgttaaatatagataatagataatttatac

SEQ ID NO: 30737 - DNA, 395 bp, Glycine max
agcttaaggcctatttccatgttcaaatcatattattgttctgaaagttgttctttatcaagtccatacaaaaacatttgaattcatttggttatttgggaaagccattcattgtttttcattctcaatgtttccaaaaatcactatgttgtgttctgatccaatcaaaagtaagtttcaaaaacaccggttgctgattcttttcaaagcatgttatgtctaagaaaaattttctatttaagtcccaaaacaagttatttataatctacgactacactaacctaacaaaatatatcaaagcagacgtaaattagtcaaaaacacatacttgcgtaagtttccaagcaaaaatccataacagtaaataacgtgataaagtactatagtttaataca

SEQ ID NO: 30738 - DNA, 302 bp, Glycine max
tttaaaaaaattgaaagtaatatatttacaattaaagaaaattactatttaactagataattcatagtaatttgttattataaaataaacaatagctatttacaaacaaaaaataaaatagtatgtttatgtttcataaaaaaaatatttaaaactaacaaaatgaatatatttagaattaaaagaaataactatttaaaaacataattgaagatagtttattttgtaatatataataactatttaaaaacaaatgagaaaataatatatttatatttcataaaagactatttaaaaacaaa

SEQ ID NO: 30739 - DNA, 469 bp, Glycine max
  unsure (1)..(469): unsure at all n locations
nttgattcatagcatcccggacccgcgaagtctacagcgagctgcaagcttataacgtttatgaattggcctacacctgctatatgttaataaagaggctaaaaagaaaaactgagcctatccttctaattaaataggccaattcctgccgcactttatgatagaccagatcaaaggacaaatgtatatcgggacggcctatcttctcccatcagcaataccaacacacaaacactgtaactcttatatctacaacaaatcatcttcttaccgcccacacatgtatcccgaatgtcgtatataaatccattcaaggctctacctacgcgcttctttgacgtccattcattcctgtgacctaacaccatcaacatttatgattattgagaagactaaattggttcaccaacgtctaagatctggattctttaaaaccattacggtccatttatagcatgtcacaacattg

SEQ ID NO: 30740 - DNA, 281 bp, Glycine max
tgattcagcgtatgaaaacctttatccttagtctatataacatgcgaaggacagacatctataatgtccacaatacattggaacatgggtcaaggaatcacattgacaattgtacttaataccttacttgaatcagaaaatgaaatggatgtcactcttgaggaaaaaacttcgtactataagaacctaattatagttaatggactacagggcacaatggccacttgttgttctgtgaacatggggcaatatagaaggggggatttgttcttttcatacga

SEQ ID NO: 30741 - DNA, 347 bp, Glycine max
  unsure (1)..(347): unsure at all n locations
ttctccttggcttgactctctttttataaaaggtggagaggacttgggcctgcgtacatctgcttattatgggagcctatatatgcgcttagcacgcctgttcctcgcttaacgccaatgcattgtttcgcgctaagcgcgtcttgggttaagcccttttcaattattttctagttttgcatttcttttgacttttaatccctcttttacgtatctgcaaaccaaggataggaaaatcttctaattcttaacaattaagcatgaataactgctaaataatcatttntaagaatactctaattatatntttagtataaaaatagctcatatntagtagttatcaacaa

SEQ ID NO: 30742 - DNA, 163 bp, Glycine max
gaccgagagacactatgtctgaacatctagattagacggtacaagcggatgactcactttgttgtcccatattactctcaaacagattcacttgctgcgaataatggggaatgactaacttgatagaatctgatatctacataatctacacctatatcatgcc

SEQ ID NO: 30743 - DNA, 310 bp, Glycine max
  unsure (1)..(310): unsure at all n locations
agcttaagagcatgcttagatggtatcgtgatatcaaaatacctagcaccacagatatgaagaccattgtttggcgacaaaaaagacaggatggaaggggattgcaatgctcatgctgagtttcaaaagttgcatcacagaattgatcagctggatagggagacaatcaatgcaaggaaagagattatgcatgaagtgaatgggaaagagcatttgaggttgttgaaggacatatgcagtcaactaaaattaattgagttagagatgagaagctggaaaacccacanagcaccacctaagagtaataaga

SEQ ID NO: 30744 - DNA, 516 bp, Glycine max
  unsure (1)..(516): unsure at all n locations
ntaaccagttatgcatgctttacggacctataaaactcaagctgaagaacccttgagatggctagaaacttttctttctattatcttgcttttgcatagttgcataagcatcatgctggaatgagaatgagtatggatgggcctataaaatttccacatgcaatgttaatttctttttaaaattgagtgaagtaaaacttatgagaaaggaatataacgcataaaaaaatgagaaaggaatataatattangaatgtgctactaaggcctatgataagggctctactttcttgagtagcaatataatatatatatatatatatatatatatatatatatatatatatatatatatatatatatgtgcactctagcagaaagaaaactaacaaatctgttcttcaaaagttatcttttgagagacagagtttactccacaactaccatctttcattatgattatcttcagatgtgtctataaaggatattactacacattattgaatctgtgatccg

SEQ ID NO: 30745 - DNA, 368 bp, Glycine max
agcttatagcgggatatacatgtctgtgccattactcttatgtgatctttctcgccattatctgacaaagagggtgcttctctgatctaatttgcgatggaccaccacagaacatattattgcctttctagtcaagccttgtcatcgtggctcatttgctggacccacacccgatatataaacagaggaattcatcccttatgccctggatacaacacttcaaggggctgcttggtagtgaatacgctgctacttaacccatgtgaaagtgccaccggtagggtatgttatcaccacattatgctgctgtacggcttggttttgcttagaaaactctaattctacacagggtgctgagttgtttggat

SEQ ID NO: 30746 - DNA, 394 bp, Glycine max
  unsure (1)..(394): unsure at all n locations
atatgtcttgttaatgttatcgaccataggccagtatctccattatatgtcatgggccccgtcccctgtagccaaataccccacaccatttaacctgatttttacaaaacagtttattttgggtatggtaaataaatgcagccaatcgntcttaaatatcttctccttttattttatttttcagacttttgcagttttttttatataaaataaggaaattctctgaagttgatacttgcatgtggataagaaaatgaaatatgttcaaatcaacagatgaatcattcgatttcaacccttttttttaactgtcaacatgttaaatatatattatnggatattaacttttcagttaatcagtgtngcaaattacacactctgaatttattatcat

SEQ ID NO: 30747 - DNA, 393 bp, Glycine max
tctgcgagcattgttctccagattccatattctcatgacctcattcttcagtcccagttgggcataaagagagatgatatgagtgtcaccctggccatctttgttgtccagcctttcctcagatttccttagggcacaaaccgcattccttgtaagtcctgcttatatgtaaaaaatggccgcaatagaataagtattccagtccatgacaatgtgtggctgagtctacatctctttcaatactttttccactccaccaaaatcagacctcacaccataagaatttatacagatcctgtagctgaagttgtctggcaagacttggttctgtttcatctcacgaaacacataccgaaccttctgatgctgtccaatatttgtatatagacacat

SEQ ID NO: 30748 - DNA, 337 bp, Glycine max
  unsure (1)..(337): unsure at all n locations
aaataaattctcgggttatattaaccaccaattaacccaaatctgaaagtgttaatgcacaatttccataaaagttaaagttcattttaacggagacttgcttttgtgtagataaggttgggggcttaaaggcattgcaatttgcaaggcatggtgtaactttttgaattntgatataagaattattcaaaatagtttctctcttactttttgggtggctttttctttcccatttcatgccagggggacgggaccactgtgtaacaaattaagttccaagcaacttgcatgcatggatactgtcaatgattttaacatgcaacacgcaacacgcaac

SEQ ID NO: 30749 - DNA, 431 bp, Glycine max
ccatttatttatgtgcaacgctcctgatacggtgcaacttatatttgttggtcaagcagcgacttttattatcctcacagcgccaccttgactgggcatctctttttcaatataccagcgatcattagtggccccatggcatagagatatactctcttttccaagaatcaaaagatctataatggtacaacgccatataatgacctttattgctcagtcaaatatctactgcgagagaggataacaacatcttatccactgtctaactctcagagaactgcgtatgaatgatttccttatcacaatggacgaatacctatgagcgagggacacactcttgtacacctactattgatataaaatatgtgcgcgtcacgctgcctagaatgtatagagatccaaagactcatgtttgacacatgagtaaggct

SEQ ID NO: 30750 - DNA, 363 bp, Glycine max
  unsure (1)..(363): unsure at all n locations
tattgtgaggaaatatggtagtgccatagacactattattaccatgaactgcatcaatcccatagatgagaggtattcccagtcgcgactgaagagctgatttttgaaagccatccaccatatcagcccaatcagacgacagtgcattttcaaatggtgcactgccaccagaactgagtatgctccctatagagtgcacaaataatcaaacgccacccttcaaattcatttcaaattccaacaggttcaaagcttgaacaaaatgtagacacaaatggaccatgtaatacatcgatacaaaaacatcaccaatgttcccattntcaagacacactctcaataggggtccctcaaattcatttc

SEQ ID NO: 30751 - DNA, 406 bp, Glycine max
  unsure (1)..(406): unsure at all n locations
ttacttcataaaatggattgatgcttttggtccctcctacccataaatacatttttaacttatagaagtgaaataagggtatttaaattccttattgataggggaaattcgttataccatttggaattattatatttctttcaagaaatagaattatactcatttgagttctcttaacttctttctacaataataggcctngacaatttccactaagcacctgaaatttgaattataagtcagaagccaggataagataaaagacactataattactattctaatacccttaacctctacattacaattgcattcaattntctaaagttcaatggatcttaatgtgtatatgtcatttaaattctctagatcttcacacaactatgggagaaaaccagaacatttt

SEQ ID NO: 30752 - DNA, 474 bp, Glycine max
  unsure (1)..(474): unsure at all n locations
tntgcgacanactatgtctgcaacattataactttattattttttgttttgatacctacttttcttttgcatcatcatcaaatttaatttgtacgtgttgatgattcacttttttttcttatattactttntacctcaggcacttgcttttaattttaaaagataacaaatattatataatattatatctacataatctacacctatattataattnttatttttcacctatattataattgttatttttcaacttatttgcgcgaatgcactcaacttaaactagttatacactaaaaaaaactaactaaaaatcattattattatanttttaaataatcttacacgatggtcgaaaatatcacttaggataaattggagtaactntatggatcccataattggtaaggtagtaacaataataatacaccagagcatgagaatgagaagacagtcacatctaaattaaccttc

SEQ ID NO: 30753 - DNA, 543 bp, Glycine max
  unsure (1)..(543): unsure at all n locations
cgcccgccaactgatctacctactgcccttactaacacaatttttaccccacccacacagggcgnnttgaacctgtggtcgccacgccgcgaccacaagcgacgcagcagcagctgcaacaaggcttttattctattgagaaaccatcaggtgggtatgagacctctcctaacatgaccagaacgaatgttttttcacatccatgtgatggcactcaagaccacaatgagccactaatgagataaccactccgaagaaatcttatacacatgcaggagaaaacatctctgcagaggcaataccttctcttagagtgaacccttgggcaacaagtctcgtcatatgtcgctcaacgtggcgcagtgagtcttcctcaaaacgcaacacatcgaagggctggtacaccaatatgcaacacaacgagatcccaaaagggagaagagggacaagaacacttcacatcatacagagcactgattacaagggggaatccctacaaccacggccggaaaaacaaacacatcaatgcggctccacgatgag

SEQ ID NO: 30754 - DNA, 339 bp, Glycine max
tactcctcatgcttctcaccatgtctaataaagttttatttcttcgctctaccacaccattctaatccggagaaccacgcatagtgtattgggcaacaatcccatgttcttgaagaaatttcgcaaatgaacctggtgcttgtccatcttctgtgtatctaccatagtactccccacctctatctgatctcgcgagcttaatttgttttccacattgtttctcaacttcagccttcaaaactgtaaaggcatctaaagcttcattcttagaatgaagatagtggagatacatatatcgtgaataatcatctataaaggttatgaagtatcttcaactat

SEQ ID NO: 30755 - DNA, 435 bp, Glycine max
  unsure (1)..(435): unsure at all n locations
gcttcacccaaacagttgggcaatggtgtgttttctttgaaattctgngtccctttttcaacatctatcctagtgtgtcggtcttcttatttttcttccaaatgaaattgtttggtaagattggatgggtctccttgaaaaacttgagtttgatttaaacatattttgtcgttttaagaccgctttttcaaggtcctagctactgatgttgtggctgatggaatgtcactgatgtttaataggcacggggagccctgcttcccattctactagcagtctgatcccaccatgtttgaagtcgtataatgaggatctgttgacccttgtggaaagggtccacaaagcgaatttcaagcagttgctggcctcgcttgaagcgtatgccatattatctcttcctttggcgagcgatcctctngctaccttggatggaag

SEQ ID NO: 30756 - DNA, 331 bp, Glycine max
tctcatagctgatttaaaacaccaaaacctgtgtgaatacctctagatcacacaacgaagccaaataccctaattatggataaattattaggtagtttgtgatttccatgtgtcctatgatcccaactaacacctacgtgatacattatcaagttttcaatttacaagaaagtattaataacattctaatacatgtcacgtggagattagtatgaatcataatggtcctagatcacataatcattctcctaactaccggagttataaacaatgaattaaccatcgctaactaagatctatcaaccaaagtggagttatatatatatatatt

SEQ ID NO: 30757 - DNA, 307 bp, Glycine max
  unsure (1)..(307): unsure at all n locations
agctntgtactgcatggttggtgttgacctttccataaaactctgccagtccatcatttcattcttcccttcaagaagatgaagaaaatgtttcaaatcggcctgtgtaacagtggtctgctccctctccttagccatatcaccggacctaatgcatgtgcaataacaaagttgccaaatgaataaaacaattagttcttcctctagcaatacagcacaaatgcacaatatatcatgaaatctgatagctagaactagaagtaagccattacaaagacaataattaaacaccaataatgcaacaaag

SEQ ID NO: 30758 - DNA, 383 bp, Glycine max
  unsure (1)..(383): unsure at all n locations
tgtgagagaaaaactattcggcatttacagaattgtttgagtatctcaagcctattccaactagtcccattctcccagacaacataacagacattgacatcaaaatctgattccgaaaatgctcaagcctattgtcttactacttccattgaaatgatatttatggactttgttagagtgaattattgtatgattgtattctgatgaattttggattaaaaataaataagttagcatgcgtattatagaaaatttatggacctctattatggtctcaaattgttcattcctgtgaaagctccatgaatgatattatccaggactntctatctgtagtctcttggtgcggattgcagaaagttattatcttggtagatcttaat

SEQ ID NO: 30759 - DNA, 432 bp, Glycine max
gtggtgaagctccttcatccatggcttattccctagtggatggcgcctcctctcacctcttctcctttgtcttccactgcatctccatggtggaaaatcaccattaaaggacctcattgaagctcaaagatccagcctccatagaagccccacaagcaagcttccatcatccctcttgattctgaaccctattgtccaatcaagagatccttcctataggcacttcagtcatagcatcctttggttatcaaaaggagcatgatggctcttgggtgaagaacggtgctcgacatgttggtgaagaacgacatgatggagaagattcatctcttctttcaaagactatggacagggttgatggccttcaaacctctgttgatgaaaggtttgacaccttggaatacaagtagatttcactcaatgaatggagtc

SEQ ID NO: 30760 - DNA, 598 bp, Glycine max
  unsure (1)..(598): unsure at all n locations
caatacgtacaaatccactacatagctacggcataattgtatatatactatnnnnnnnnnnnnannnaanttatggccatttgacacggtctcgcagcgcgacngcagcatgcatcttcttgcttgactatgcaagacatnatagacgatgtctaagactcctctcattatcacatccctaccaacataatagtcgatcacagaaccagtgaattttacttcgatccccacactataatatgctgcataataaaataacaacataaccaggaattcatgtcgaataagctactgagtaaggcatctatcctacatcgtcaaagaaaaaagacagcctacaaatgaaacatttcaaagacatggctnttaatgattatacatgaagtgcttccaaagatggtactgctaaataaaaaaatactatgcatcacgtgtgaaaacgaactgaagaatcaagttctgtaagaatgaaatgatatagttaacaatcaaatatggagttgatatattaaagaaatgcaagcctcgcagcttaccattgaaaatccatgagagagcactgcacttaagacatattgataaagtattcttacagaag

SEQ ID NO: 30761 - DNA, 489 bp, Glycine max
  unsure (1)..(489): unsure at all n locations
tcttcagtcacctgcggcatgcaagcttctgacaatggttatgtaaactctcaacaacattaattgctattggtttctctcaatcaaagaatgactattctctntntaccattgacaaaggtgcttccctggttgttctgttggtctatgtagatgacattttgcttgctggcccaagtgctacatgtgttcattctattcaggccaagcttcaagctttgttcatactaaagatccttggttccttacaatattttctgggcctagaagttgcanagtctagaaagggcgttgtcttgactcagtgaanatatgccctttctctgttagaggatactggttttctttgctgcaaaccatcctcccttccaatggatccaaatctatagctcaacatgcttagtggtgatttactgcccgatccctcaatgtacaagcatttacttggtcgcctcatgtacctaactatttcaaggccggatattacat

SEQ ID NO: 30762 - DNA, 468 bp, Glycine max
ggtgaatgaaatggctatgaagtggaacggaatagacactatacaaaggaaccactaaatccatcttttggatgcattatatagaaagccaaatggaatgaagtgttccctataacatttgtggaaagagttacataaaaatatatgaatttccaaatgacaaccaaccataatatagaaataaagttgtatactaataaccaattcatttagtttattgcctcatgcacacacaaacctgtctaaggtggtttgaagtaacaccttatagagacttcttggcaatgaatacaagaagatcagtgacacgttagctgtagaaccgaggacaaagaaggtattataaccaactgaattaataataataaagcatctaaaaatcgtgtgattagaattttggccaaattaacaacttattgacacactaacccactatcacatacaagaaaatgtaaaggtgcattacct

SEQ ID NO: 30763 - DNA, 214 bp, Glycine max
  unsure (1)..(214): unsure at all n locations
ctgcaagcttgggagaccttactacttgcagtggtatctttgggtggattttctgcgtatgcatggtaggtcngctctaactgcaatggtatatcgaaaggtgctaaggatatcaaacttggccatactaagtcacacgaacagggatgttagaaactacatggcacttgatcgtcttagggccagagactactatcggtatgttcatgacatg

SEQ ID NO: 30764 - DNA, 439 bp, Glycine max
  unsure (1)..(439): unsure at all n locations
tctggtgccaatctcactgngactctcacgacacttggatttgctttcctccctaacctcactctactcaacctcaatcacaacaattntgatgggtctataccatcagcaattgacaatgtgacaattttattttaaaaagactttttaataaaaaaaataatcaataaagttttagaaaatgataagattcttataattaaataaataaagaaaaatagctatattaaaataatgatcttgagaagaaaaaaaatatatgatttattctatgaaataaaatagagtctgtgtttatgaactaataaatataaataataggatatgagtattctaataggcgtagttatcacatgtctcctctttctctcaattgtgttttcctcttcccctgtcaaactctctcatttcctgctaccaccaacttgtttagaaaaca

SEQ ID NO: 30765 - DNA, 127 bp, Glycine max
  unsure (1)..(127): unsure at all n locations
acaacatcacagcatattgagtcttgttactggtgtgaggtagttccgcctagtagacaggaacaaacccactcctgcaaagaccagagacttatngctcatatgcgacagggaccgtaaaaacata

SEQ ID NO: 30766 - DNA, 168 bp, Glycine max
gaagtaactaattaacactaatatatagagtgactactcagaacgaagggataggccttgattaggcccatctaatctacctaattaaactaattacaccaaacaaagcctaaactcgcagtccaattattttagagcaaagactctgacttctaggctgaatatgac

SEQ ID NO: 30767 - DNA, 437 bp, Glycine max
  unsure (1)..(437): unsure at all n locations
agcttgcagaccanggatntatctgcaacttcaaaactatgaggctgagtcataaatacatatccctcaagcaacccattaagaaaagcattgttgacatcaaactgaaataactcccacccttgagaaagagcaagagtgagaataacacanattgtgacaggctcgaccacaggaaaaaatgtctcatgaaaatcaaatccatgaacctaatgaaacaaaccccttatcaaccagtgtggctttgaacttgttgatagaaccatcaacattttcttttactctgaaaagccatttgcacccaatagcttgcctattaggaggtaggggaaccaagtcccgagttctgttttacagtaaagcatcatactcctcttgcatagctgtagaccaatctgaattttccagggcctctttgacagtcttgggttcaaatg

SEQ ID NO: 30768 - DNA, 395 bp, Glycine max
  unsure (1)..(395): unsure at all n locations
agcttganataaggtatngaaataagaggtagcaacttttaatntcttnnttttttttattgaaatcaatatcatcatcatcatgttctaggcagtggatcatattggaggctttcctggaattagaagaggaatggaagaatttagagttaacgtcaccatctttcaaccagaaaatcttagccctttgtttctagtaatattcttcctaggcaatcaacatattgcggtttttgttcacttcaacatagttggaagagatgttcaaattgttagattgacgaatggatttaagttcttgtctgcagaaatggacttgatcactatacttccttcttagtctacgtccccatgtgttcatcactgcggaacatttattgattttttcaatgatg

SEQ ID NO: 30769 - DNA, 413 bp, Glycine max
  unsure (1)..(413): unsure at all n locations
tgtcaaagttagcatggatggagcaccttacctccgcanagttgtcttgaagatgtacaagagttaccctgagctctctgatgccttgngcaaaatgtttagctccttcaccattggtaactataattaatccataatttaccatacattaactnttttttatatagaatttaatgactgatcataacttttacgtatcagtatctagtttgttttctctttaatataactaccaaaagatatggatcttaaatntgattttgtagaaagttaactaatggtgtatgtgaatataaaattgaatcgtgcagctgattcgatggtattaattattggtgtgttcttgatatatttaaggaaattgtgaatcccaaggcttcaatggattcatgaatgagagcaagttgatggat

SEQ ID NO: 30770 - DNA, 554 bp, Glycine max
  unsure (1)..(554): unsure at all n locations
tagtgagccctgaagccatcagactcgngatacttcgagncacctgcngcatgcaagcttgttccttaattagaagtgagatgaatgaacaatatctccatttaataacgaagatcactaattgtaatgtgcaagatggaaactacaagcctatcaaatctcgaattagttatatgaagagcatcatacattattacgttatggcactcctaaatactcagctattattctttttcacataagttcaaaaacatacagnttgngcttattttatatatatatatatatctatatatatatatatatatatacatatatatatatatatatatatatattaaaaagactctcagcacccatttacaaaagtttgaaagtaacactcttgaaatattatattagaacactatgttttttacacagagaaaagctactctcaaatgatacaaggtggaagcctcttgcttacatatattctcgtgataatatatacctctcaaatcctctctgactgcctaccgctatattatacaattagctacaataacttttcg

SEQ ID NO: 30771 - DNA, 406 bp, Glycine max
  unsure (1)..(406): unsure at all n locations
ggcatcagttgaggctcgggttcttccagcttccatgggtaattgatcataattaattaaattgtntacaaatgttgtttgctttagcagtttttccattatgattacattatattttggctcttcttgtccctaaagttgaaatatcacgacactggaagagagaaagaatacttgccacaagttggtcagtggaatatgatgaacaaggtcagctaagaatgaacaaataatatattagatgtaattatcttaatgaaagaaaataaaagggaaaattacttgtttccaacttactgtaattcctgtaattntaatgcagaaagttataaatggaagtactgtaagatattgngcgtgtatcaacttctctcgaagtgtacaggagagtacagctcgtggattt

SEQ ID NO: 30772 - DNA, 428 bp, Glycine max
  unsure (1)..(428): unsure at all n locations
agctntaagcgcgaagtagaaggagttctagaatctgttatcgggcttgcagctcccctggtccttatacgaagtcactgatgtacttgggcctgtgtgctgtgcgttatggtctgctattgcctctgctatatctagtcatgatctcctcttggttggaattattgtctgatgatgttatctgtgtgatatctggtactggtgttagtgtattggtatcatttgcatggtgttttttatgcggcaaaatatataaatatttcattatgtaaattgtgatgaagttccagaggtactgttgttcatagataggatcccatagatatgtgtccttagaaaaatactaatgatctggctgacccatagaagaatacacttccctgggatctagttaaactgttcattatgaacctcctattcttaaactg

SEQ ID NO: 30773 - DNA, 426 bp, Glycine max
  unsure (1)..(426): unsure at all n locations
ngaaggcaaactggatgcattggttaactcgcgtacccagctggccttgaatcagaaatttgtacctgttgcaagggttagtggtttgtgctcctctgctgaccaccatacagaccattgcccttccatgcagcaacctggagcaatcgagcagcctgaagcttatgctgtgttagtgcttagctatactgagttttaaaagattggctaaaattttgttataacataagcacttatacaatgaaggaaagctggagttgctgcacatgatgtccaacgttattgtaaggaatcatattgtgctccacaatgcacaatgcaagatataatgtctaatgaagaatgaagctgcaggatcaccatgttgatacaatgccagacattctgccgaaatactgaccataaattgtgtatcttacagataat

SEQ ID NO: 30774 - DNA, 476 bp, Glycine max
  unsure (1)..(476): unsure at all n locations
agctggctagtattagagatattntattttatatgtaaagaggggctgatgccatggtagaatcccttcctacatacttttagttacttacagactaggatactaacacccccaccacttccatggacaatgctgcaagtcagatactgcattctcctctctgtttgcctagccttattgataacctatgatgccatcaaagcatgtgtaaacattatcctatattttgttgagaatagtattctaactatgatgctgatcttgctgactgtaagaagctgcacccagaggtatccttcccagattagatgtgatctcttcaccattattgttatgagttaaatttcgatataatgtcacgatgttcttttttatgttgtcattgagtattaactcttgtcttatgaatgttgcctgttattnttcatgctttgtgttctcttgataacaaatcacgtgtttcatctgatgatgaa

SEQ ID NO: 30775 - DNA, 363 bp, Glycine max
  unsure (1)..(363): unsure at all n locations
tgtaatcgattacacacatattataatcgattaccagagaagttnttcagaaaacattctcaacagtcacatctttntctctgattcttaagtggccatcaaaggcttatatatatgtgactagagacacgaatttaacaagagttttgaagaacaaaaaggtcttatcctcttaacaagcaaaattgtgttatcctcttacaaattccttggccaaaacactcgtgattcaataagggaattattgagtgctcaaatngttcaatctatctctntcaaaagagatttcttcttctcttcttctttattctgaaaagggattaagagaccgacggtctcttgttgtgaaaggattctaaacac

SEQ ID NO: 30776 - DNA, 459 bp, Glycine max
  unsure (1)..(459): unsure at all n locations
agcttaatactgtagaaaccgccgaaatcgctatattcttcanagccattagtaataacttctgcctctntgcccacaaaaatgttctgaattntcatctgacttaaattaccgccgccctttgcccatcataaatatggttcaaaattcaatggaaccagagggcaaagtctataaatcagcttaaaacatagttatgttactgttttaccatgtcaggtctccagataaaataggataccctacaagagaaagaatgaacaagtgatcagttaatatgctaccaaaaacaagtcaaaaaaggttacataatagaaaaccctgaacccagtgaaggcaatcccacaactcatttcccagcaagggacttacacaaccaaaaggaagaaaggtatatttcttttttttcaaatntgcaattgctacgactaaatcaattgtagcaatcaaggcacatgc

SEQ ID NO: 30777 - DNA, 319 bp, Glycine max
  unsure (1)..(319): unsure at all n locations
cgaagagggtttgttntgaagaatacttagcttatttgctngaaaaggcaagtgtaaaattacttgcggttaagctagaagtggcttggaaaataattcttgtatcttttgagttagctaacacatttatggaatctcaatagtgaatgtgaacaagtataaaaaccttgggtttttatccttgctttatttgaatcatgtctatgtcttgcatgattgtgtaaaagatttgataaaactatgttttcaaacatatcatttgccttatatacgtgttgctcttagaaatacatctcttatgagatgatataaatgtttt

SEQ ID NO: 30778 - DNA, 431 bp, Glycine max
  unsure (1)..(431): unsure at all n locations
agcttcttagtttcagatgatgcagatgggtttgtttctacctcatgcactcctctaatgactatggcatcatttctggcgctaaactgttgggagttggaggccatcttctcaattaaatttctggcttcagcaggagtcatgtctccaatggctccaccactggcaacatctatcatacttctctccatattactgagtccttcataaaaatattggagaagaagctgctctgaaatctgatgatggnggcaactggcacatagtttcttaaatctctccagtactcatacaagctctctccactgagttgtctaatacctgagatatccttcctgatggctgtggtcttggaagcaaggaaaaatttctctaagaatactctcttaatgtcatcccacctcgtgatggaccttggagcaagggaatac

SEQ ID NO: 30779 - DNA, 395 bp, Glycine max
  unsure (1)..(395): unsure at all n locations
ggctaattgaagatcttctacttgatattcacccttcgctagtagcattaccaccttggagtcgccctttgccaccagatctttaactcttgtttccctagtgagccacatgctggcatgtaatgccttatatntggctcgggtgtgggtaaggctaaagttgaactttaanggattttcaatgatgactacatcgagaccttcaaacacaattcctgctccattgcttgcactgttcatcgtgttgttgacaaatagtatccatagagataaggataccactatgtaagttccaccatgaaatctatgagggctttccctttgactgcctcttttttccaaggacaatgtcgtacttagataattctattgaccatttcatcatcctttcaact

SEQ ID NO: 30780 - DNA, 402 bp, Glycine max
cctaatcggggtcaaccatgctgagtgattttgtcggccattgatgttgtatcttgacaataaaggactgaatttggtgagtccaagttggaggaggcaaatggactatatcatctaatggtgagtgtcataccctaatttcgtccggggactattgctagatggcatgcaatcctttacttgaccgcttcaaaataccttggaaccctatgtttggccaatttgtgaaagccccgaacactcctcggatattccaaaggaagcgttgttatgcaatccgtgaaattccgtaacgtgacggaaatcaaaaggaagtattgttacgcaatccgtgagttttcgtaacttttttgaaagctaaaaaagagtaattacatgatccgtatggttccgtaaccttac

SEQ ID NO: 30781 - DNA, 424 bp, Glycine max
  unsure (1)..(424): unsure at all n locations
tctctgagtcacctgcggcatgcaagctgggttcgaggtacttacccgttgaagatcgattatcgatgaagaacgaatgatgaacgtcgaagaacggttgaaacctttgcgaaattcctcacggaaaacgttacagaaacgtttcggaagcgcctcggcttagattttcttcacggaaacaatttttccaagcaaattcgaaagagagagaagtgcctaaggggctgaacccttttcttcttcacttccttcccctattatagcanaataggggaggtggttgccgcccagctcgcccaggcgagctcagctcgcccaggcgagccaggttgcttcctccagaagcaacagccttctggaggaatattctggagggcccaagtgggcctgggtgctatttgcacccgcatttatactaagtaca

SEQ ID NO: 30782 - DNA, 443 bp, Glycine max
  unsure (1)..(443): unsure at all n locations
tggtgatgaacaaaagcgcanaacggaatataaaaatgcgaaaaattatgaccctagggctgcaaactcgtcaatcccgtgggtatggcttttgaaaggggggaaaagaagtttttgaatgcaaaaacgtcccccctttcgtcattcttataatttggtgcaagggtggctcgcccaggcgagctaacctcgcattttttttttgagaggaacattaaccatgtcccctcctttcttatggtttagtgtcttgcttaacttgaacttacttaagttagagttaggcattgattacttatttttaaaacaaacaaaaagtgaaagaaaactgcgaatacaaaggatacggtgctgccttgcagcgacgttttccgcttgcttatcgtggagaaaggggcgacgatcagtctgtcttgaccacttcccacttgcattcgttcatg

SEQ ID NO: 30783 - DNA, 482 bp, Glycine max
  unsure (1)..(482): unsure at all n locations
tctcacagtcacctgcggcatgcaagctntatcctcanatccctcttggtggactagacttataccaaacatcattattgtagcaacatatttaaaaccagaacttaatccacagatccctcatttaagactaagttccaatcctgcttcattaaagttctaaggcaacaatacatttcccaatgctaaagtcacctaactatgcacacaaatggttgatcagaccaagagcatacaaaatgtaagcactgaaagaagcattgaacacaagaaacacaatcaattagatattaaagtaattacatcagctattctttagaaatccccaataagggtgtttagccagccattacagaaaaaccttaacaataatgagattaagagtagagaataattgcttcttacacaagaagggggatccctcctcctcttctcagcatttcacaatcactctgcaactcaataatctctctctaattaca

SEQ ID NO: 30784 - DNA, 393 bp, Glycine max
  unsure (1)..(393): unsure at all n locations
aatgcctaccacatgcctgaatttcttataataggatagtttactctactacttattcttcttttgaggtagtttacagttctagtccattgtcccctcttaatatgttacctttgcttaacacttatgctatgatgaataaggatgggctttctaaagccaattttgttaagagtttgcatgataaggggaaagcacaaattgataaaaagattgaccaatatgctagatattccaataatgtgagaaagaaaatggntatcaaacacggtgattgggtatggattcactgaggaagaatangtgtacttccaaaatgaaatctgaacttcatgaaaagggagatagtccttttcaagtttaaagcgcatanactataatgcatataaaatt

SEQ ID NO: 30785 - DNA, 441 bp, Glycine max
  unsure (1)..(441): unsure at all n locations
gtcaacctttggaactgttcagcctgtatatttctcacaaggacactcacctaagctgatttggatgtttacaataaacaacatgcttaagaagttagtcttttggagctgagcagctgggngaatttggactgcattatgtgttagagttaacagcatcatattgcattggcgatgttatgtagaatttgtttgaatggcaaattagttttgttttgtggaaaggngggattcanctgtatgcgttggtacttaatgttaaacctaaaagaaaaacatgtatgaaattagcagatgtattttttttattcaccactaaagttgggaaatgggaatgataggaagatgaanaatgaaaattagtattntgctttcatcccttgcttctagtctctatactttggcgtctntatctgaatngatttgaaaatatacattaca

SEQ ID NO: 30786 - DNA, 284 bp, Glycine max
  unsure (1)..(284): unsure at all n locations
gatcttatgcagaatcttctgttatagaagaggttgatgttgtcttanaactcattaagaagacctgngttatgcttggaattaatgagatgctacactaatatttgttctcatgggtcttatttcatcagtatcttgtcactggccaagtggagaatgatcttctgtttgcatccagtaatctattggcagaagttgggaaagatactggaggctcaaaagatcctatttacacacaaatcttgaggaacacattgagtttgatactaagttgggcagagaaa

SEQ ID NO: 30787 - DNA, 484 bp, Glycine max
  unsure (1)..(484): unsure at all n locations
agctggtacttcagtcatccatanacttaattganatatattntacttggctattggtaacctacacttgtcgtaatggatataaattatcaattaataaaaaagataccttataattatggtacttacatcatccatagttgtagtatagatatgttcaaacatttgtagcctgatataatttctgttacatatgcacttgtaatgaaaaaggatgtgtgtacattangaatcctatattttggcccatcccatggcaactcaacgggcttctgataaacatcaaacaaactcttaatcaattctcccaatggatcctctcctgcaactatattgcacctttcaacatctccaaccagtttaggcagacgattgtgtgaatcctataaggttaaggaaaatgacantacactaaattatgaacaactttaacaatggacaatgactgaacatgcagaggaaataaacctatcaatacagttac

SEQ ID NO: 30788 - DNA, 368 bp, Glycine max
  unsure (1)..(368): unsure at all n locations
tgattttagctagaaatggataaagcaagcatagacaaaaatggtgaaaactactttntccaaaattgataattcctatcttaaacgtctagaataatgtgctaacttcatctattattgtgctaacctccctaggaatacgtctactcagagaaaacttcacagagaatctactcacatatagacaaattacattgcaactcaatgcacaatgcanattttgcatatatgaaaatctagctctgacagtttctaattctctatcaagcttcccaaaaactaatcatacacacacacacacacacatatnataagcacataatacaagaataataacacattatcgtttcaactaaacacatacatgc

SEQ ID NO: 30789 - DNA, 74 bp, Glycine max
atctaagactgaagagagtatgatgaactaatggacgtctatatggccacccatgaagccttggaatgagaaac

SEQ ID NO: 30790 - DNA, 482 bp, Glycine max
tatgcgcaagaaccagtccgtctagtggaatgacgactgtcaagtggttttccccccgttcttatgtcgttggtgcccaggagaccccttattctatacatgactgtgttggatgggtcgatggggtgtatgctggggaagcatgtcttgtccggaaagagggaacgggttgtctactacttgagcaagaagttcaacacctgtgagatgaactactctttgcttgaaaagacatgttgtgccttggtgtgggcggcacatcgtcttatgcagtacatgctgagccacaccacttggttggtatccaagatggacccagtcaagtacatttttgaaaagcccgttcttaccggacggttcgtccagtggcaggttctgctatcaaagttcgacatttcttatgtcactcataaggcgataacggtaagcaccctttccgactatctagctcagtagccccttaatgactaccaactcatgca

SEQ ID NO: 30791 - DNA, 429 bp, Glycine max
  unsure (1)..(429): unsure at all n locations
agcttgtgtctttttcattattgattgtgagaacacatggtgactatttatagagaaaacaattataactgcttgtaattgattaaatcgcctacataatcgatcatctcgaagaagtaattgattagattctcattctaatcgattaaaatgttcttctcaatacctgtaaagctttcaagaacaatataatcaattagattcttgatttaatcgattaaagtgttcttgtcacttctaggaacactttcaagaatgatgtaatcgattactataccctcgtaaatgattaaagcagagaccctaagacaacatacatggtctcaaaagaatagagtaatcaattacagatacatgataattgattaagatcgagttatgcactgaagatgtgtctntccttagaaacaatcttcctacttctacatg

SEQ ID NO: 30792 - DNA, 443 bp, Glycine max
agtcctcatgttgtttatgtggctctttctatctctaacaaagattacattagccacaacatcattcttagccaaatcaaatcccgaggagaagctggtcatatacctcttggtctccaatgaaattgtgagtgcggccgtcgtttatgagcatggagaagttcaaaaaccaatttatttaataacttgagtccaacacgagactgagaccaaataccaactcatatagaaagttgtgctagctttggttcatgtggcaagacgactttagaaatatttccaaagtcgcttagtagttgttagaaccacatgttctatttcaaagggtgtaaggaagcttgagctattaggaagaatgatagcatgtgattgaggccgtacccgtatatattaacattaaatatgcaatatctaggaagtgatcctatgtcgtcttccaacga

SEQ ID NO: 30793 - DNA, 411 bp, Glycine max
  unsure (1)..(411): unsure at all n locations
gagctntcatctagccatgattatacaaaggtgttacattagaacctaacggtttctaattatatgggccatcaaatctatcatgtgttgacagtaatacattagcccatgaatctactcgggagccgcacacacttcggacatggcttttgctttggctaatagacgcaggaggtcttgacttccattcaaggtcaaggcgaacctatccatccacatagtcgcttcttgatgcaatgcatcaatcaccctccctcttgcttctttttcggcgtacacttgtgcagaatcctccgctagcttttgttcatgggtcacagactgggtcaactcttccttgtattgccctatgatagctagcatgctttgctccgtggcttccaagtgttgagccaaactcctcttggacct

SEQ ID NO: 30794 - DNA, 479 bp, Glycine max
  unsure (1)..(479): unsure at all n locations
ngaagctcaaggatatagttgaagaagctntagaagatgttntggctttcacatgtccaactcctttgagtggagattttattgattgttatcttggttnttgcatcttagtatatttgatatttgtattgcatcatgcatcatcatagtgtgcatgaagaaaaaattttaagttagaaaaatttcttcatagacaaaaactctntgttttaaccgattacagaagatccgtaatcgattacaacaagctgattgaggcttatagagctaagtcttgtatcagtttaattgattatgatattactttaatcaactacactattgtttgagaaaatgactgattnttttaggagtttatgctttaatcgattaccggatgtattaatcgattacttctctcttggttaaattgttcagagataaacaagaacactnntaatcgatggtaggtcatctaatcgattacattgttcttgagt

SEQ ID NO: 30795 - DNA, 483 bp, Glycine max
  unsure (1)..(483): unsure at all n locations
agcttatgaacctcatattaacttagtgggatttgttacttattgtangcaataacaatgcatcgactaatagtctcatcctcgaaatcttatcaatcctccaaaacaagcatgagaacatattccagtacatccatgccttttcattctatttagaataattaacgaagaagtcaatgctacctaacacaagcaaaatcacaataaaggccttcatctctaaagattagctcatttaagaattcaaaactggcatcaatcctttctttctaagccaaaatatgcgcacacaagctaatagagcaaataacaacaaaacataaaatctaataaggctaatgatcacaattcacagnaaaatagagtagatagatattatcttataaagaaactaaagagttgctcacacgacgaaatgtgtatatcctcattaaataatatagtatatggatccacataaaagccttcatccaatagtttata

SEQ ID NO: 30796 - DNA, 487 bp, Glycine max
  unsure (1)..(487): unsure at all n locations
ctggcatcatctttatcttataanaggcaggtccattnggtcaatcttctatttcatacgggtgggttagaaattatggtgtgtgatagaatagaattgggtgctttctgattattgttgaaattggtcattgcactactacagaatttctcacttaaactaacataaataaatatgcctttattggccacatgaggcttcagctctgtgtgtccaagcataagcactttcattaaatagccacccttttctgtccttgaagttgaatccacaagttgataaacacaatgaaccagtcataaaattcactgcttagctaaccaaaaccatccatttcatttctatatgtctgctgaggcatataataaactagaaacttattcaaccacgcatcactaatcaaatcctaactgtctatgtatatggttcattgattaattgatatagtcatatacataagtatactacatccttagtagcaataccg

SEQ ID NO: 30797 - DNA, 307 bp, Glycine max
  unsure (1)..(307): unsure at all n locations
tatacgctctactacaccattctgatggtgattataagggcaaattatttgatgtataatcttcaataagaaactttgtaaaaggtttatattctccaccctaatctgactaaagaaacttagttggctaataaatgctaaatatgagttgttttcgataatgaaaatatcgtttaaaatgattatntagcagttattcatgcttaattgttaagaattgatgtcttttcctattcatggcttgcaaatatgaaagggagggattaaaagccttataaatgaagaaaatagcatacatttaaaaaaa

SEQ ID NO: 30798 - DNA, 442 bp, Glycine max
  unsure (1)..(442): unsure at all n locations
attntacttgtttaaaaagtatattntatcatcaaaaactataaatntattaaaaaaaactacttttataactatatttgaaatattcatatttatgacttataatttaagtatttttttaataatgaaaacaactacggttataacgattaatcatcaaaatgaatacttttgaatgcaatacaataatacattggtatgtcaatacaataatacaacaaactattgtacatgcatgattcatcttcaatggttgtagtttcctttgctaatccctcacaatcagagtttgtaagggattagaaagggaaggtttcatccctaacactactactaaaataggattttacaatgttgaaccaacaacaattttagcaaatattttgaaaanaaatagtcacaactttataaataatcgcaaatatttaaagaatggtttttc

SEQ ID NO: 30799 - DNA, 455 bp, Glycine max
  unsure (1)..(455): unsure at all n locations
acctgaatcctgcggtatttncagtaagaaacatttcttgctttagatcatactctacaaaattatattggcattggagttaattccctatgatgatgtttgtggttctcagctttggaggaatggcgaatgaggaagatggagagggccaaacaaagagaattggagaaaaatggaacaactctttctcaagcttgactttatatattctctaatatcaagtgagagtcgacatgctgatttcaatacataatgtgacaattagtagtcatttagtgtacactgtatagcatctttaagattttccacagctgatgttataaaagaatctttcttcggacagaatttgtgattaatagtttgatactattactcatctactatagttttctttatattttgaaaatataaataataatctaccatctctcttgattttgtctgattggatcttc

SEQ ID NO: 30800 - DNA, 475 bp, Glycine max
  unsure (1)..(475): unsure at all n locations
atctctgagtcacctgcggcatgcaagcttattaagttattaaattaaatcactcatgaattttnntctttttaatcttcattntatttatgttttctcatgttaatacaatacttttctctatctaaaataaaaaaatatcgtattaccattgaaatcattaattctattagtcaaatattgtcacaatttgatctcttttgtgtgcatttagtcattatattatatacttataaatttttagggaaaaacaaattattnattctanaaaatatacttttacgaaaagaaatatttgtaaatatttagacctgattaatccaacccaacccatttatgattgggttgggttgggtatgaaaaaaattatacaaacccgactagggatggcaacggngcangtcggngatgagtttgaccttccccgtcgagttttatagggtttgggtatacctgcgagtaacccactacacta

SEQ ID NO: 30801 - DNA, 397 bp, Glycine max
  unsure (1)..(397): unsure at all n locations
taacctcatggtctctcacagtctntagaattgggagccaatccaatttcttgtgtccggactctcagccacttatgatagccgccgatgatcccattactgcttcccctaagctctctgtcctttcttcacgccgcatcccatgccttgagaactccttggagtaccctcgcgttgtggtcactgaaaccccgtgcgatgaaaggcgtgatgctttcgtctgatggcactcctctcatggggtagccaagctgtcttatggcgaggacgggattataattaatacaaccccttgttcccatcaagggatcatttggacatccttcgcatgaagatagaatcctgattcttccttccttctagcgagggaaccaattaacagacgcccctccatgct

SEQ ID NO: 30802 - DNA, 406 bp, Glycine max
  unsure (1)..(406): unsure at all n locations
tctcacagtcacctgcggcatgcaagcttctcctcttgattctcatccttcttcaatcaatctctaagccattgttcctgctactnctcatccctctgattcagactggcccattgccatccgcaaaggtactagatcctctcgtaatcctcatcctatctataactctctaagctatcatcgcttgtctccttcatattcttcttttgggttctctctatcttcgcattctggcccttctaatattcatgaggcactgattcatcctggatggcgacaggctatgattgatgaaatgcacgctcttgaacatagaggtactagggaacttgtatcccttcctcctggcaagaaagctgagggttgcagatgggcttatacagttaaagttgggcctaatggtgag

SEQ ID NO: 30803 - DNA, 381 bp, Glycine max
  unsure (1)..(381): unsure at all n locations
gtggtaatcagagcacaagagcttcaagtaggtgctccttattacctccattaatttgttgctttaccttctcttccattgttgtttcttcatntttctccatgtatctcctcacatgtcctgtgctaaatgttattaacatgattctttagaatttccaccgattaatcttgctatagaaacttaatcaaaagtaaaagcgataattaaagtgcacataanaaattaaagagtgtatggaagaagacaaacacacgaagtttatattggttcgacaataatccgtgcctacatccagtccccaagcgacctgtggtccttgagatttcttttcaaccttgcaaaatcctttacaagcaaagatccacaagggatgtaccc

SEQ ID NO: 30804 - DNA, 186 bp, Glycine max
  unsure (1)..(186): unsure at all n locations
cagataattctaatgggactttattatacatttgcatcgcatcgaactattctcactgcanacgagacaccatcgatnccatttattgctcggcaactagacagctcccaactacagtggtactacgccttgagcaagacacatgattactcttactgtcacacgcacccaaataatgctcacaag

SEQ ID NO: 30805 - DNA, 315 bp, Glycine max
agtatgtattgtagtgctctttattcaagttctctctgggaaaaagcttcttgtgcaagttcttgtaaagtctataaaaattctccaaccactctcattatcttgagagatatactaagtgttgaaagcatcctattcgtctataagacgatcgagtgctaatcattatgcgatcaaaacaaacaaatcatatggattgtgtgagagctcatagtggcttggtcagataacaaatagtgtgtgtaacaagctttgtgtacagcttgagttaaggagccaacagtgacaataataaatacttgcaacttgttgaag

SEQ ID NO: 30806 - DNA, 278 bp, Glycine max
  unsure (1)..(278): unsure at all n locations
atcggttcaaagatataatctttggtgacgataatgcttttgaaatgttaatgtgnttnnctcatgggcctaaaagatatgttataacttggcgaggatactgtatcaacacagttttatctttactcgatatcataagacgacaagagttcaatgcaaaatagtggcgtaactgtcatggttgaatgccaacacttcgctattgtacatgacgacaaaccccatgtagcttccagtcccagatgcaatagcatatgcaatcacagggtctcacactg

SEQ ID NO: 30807 - DNA, 141 bp, Glycine max
agctataaaaggtccccacatggtagtatgctctgctctttcacttctttttcttctgctactataaaccatgcacctattactcacaaagtttctaaagttccttatggtgatctcaaagaactatggtcctttcacaac

SEQ ID NO: 30808 - DNA, 83 bp, Glycine max
aaatatttagacctgattaatccaacccaacccatttatgcatggcgcgggctgggtatgaaaaaaattatacaaaccccact

SEQ ID NO: 30809 - DNA, 394 bp, Glycine max
  unsure (1)..(394): unsure at all n locations
gcttcaacgagtgtccttaatggagattttccaccatggagatgcagcggaagacaaaggagaatatgtgataggatgcgccatccactacggaataagccatggaatagggagcctcaccaccaagatgaaccttggacgacaagcttggagaggatgcttcaatggaggaaaagaaacacggagagaaagagaacggngggagcactaaattgaaagaataatagaggtagagaagtggaactttgaagtatgtgttacaagactctcattcatcaaagatacaacaagtgttacacatgcttctatttatagactaagtacattccttgagacgttttcttgagaacacttacttgagaagcttctttgataacactttcttgggaagata

SEQ ID NO: 30810 - DNA, 442 bp, Glycine max
  unsure (1)..(442): unsure at all n locations
atcctctaagcacctgcangctgcagcttggtattaggtaaacaattaattaaaccttgtctttgnggtttgtctccttgaggaatctgccagcacttgtttattgtattgtatatgaaatangactggatgattacttaattgctacttgtagtcatattaagatatgtgacctcgtcttgattttctttatttgtaagaaaaattgcttgttaatatttaattaatagttgggttgcaattaaattttatctgagctatacttgttaaaataaatcatattaattagttcgtgtatagattaaaataaaattagcaagctattagaaatgttgctatatgtgtgagaaaatgaataactggagttaaattatatagctagaggagtgtaagattaaattaattaattaggtgaaggttagattatgttaattaagttagt

SEQ ID NO: 30811 - DNA, 404 bp, Glycine max
  unsure (1)..(404): unsure at all n locations
agctggcttgtggngcttctatggattctggatctttgagcttcaatgagatactttaatggtggttctccaccatggagttgcaggggaagacaaaggagaagaggtgagaggaggcatcattcattatggaataagccatggaagaangagctttcccaccaagatgagccttggataagaagcttggagaggatgtcttaatggaggataagaaagagggatagaaagagagaggggggagcactacacttgaatgagacaaagggagagaagttgaactttgagttatgtctcacaagactctcattcattanaggtacaacaagtgttacacatgattctatctatagactaggtagcttacttgagaagctgtcttgagaaaacttccttgagaagct

SEQ ID NO: 30812 - DNA, 244 bp, Glycine max
  unsure (1)..(244): unsure at all n locations
attcctaggatcatgagcaactaggtgttccctactatgacttgagaaacaaaaggtgatcaaataacaagcagaaatttaaagggtactangttgnctnctagtagcggttttttaacgtcttgagctggacgcatgatgacttgtcggtcacggacctagtactttatcttacctttggctttggacttggtcgcctgctggttgaccacagagcnnangcaacactccaacctttgtagat

SEQ ID NO: 30813 - DNA, 390 bp, Glycine max
  unsure (1)..(390): unsure at all n locations
agctngtctcagcgtctatgctatacatataccaacttgttatctatcatcgccaagtaccaagaagagttgggtctagccacggcccacgagcatataatcgcggatgagtatgcccaagtatatgcggaaaaagaggctagaggaatggtgatcgactctctacaccaagaggcaaccatgtggatggatcggtttgctcttaccttgaacgggagtcatgaactttcccgattgttagccaaggccaaggcgatggcagacacctactccgcccacgaagagattcatgggcttctcggctattgtcagcatatgatagacttaatggcccgcataattagaaatcgttaggaaacttgtatggtctctcagaccttgactagatat

SEQ ID NO: 30814 - DNA, 456 bp, Glycine max
  unsure (1)..(456): unsure at all n locations
ctgaaagctgagctctaaaagacaagagtagcgaaggagaagctgtttgtggcagccactagagttaggaaagaatgtgatgagctaaaagatatcaacatgaccacggatgaagcgctagagcgggaaatgaaaaaggccagaaaggaagaatggagcagaaacaagttctaaggggatttgttaggcagcagtaatgagctcaaacttagaaaggctgagagagacaaatcaaggatggagagcatgatgttagaggataagttaaggagttgtcagaggtgatcgaggccgtacccgaatcaaataaacatganaatgcagtaactaggaagtgatcctaggtcgtttcccaacgagcaatgataaaccaattgttcataatatacttgcagtaacagtaacgaatgtgggggtttgtttgttntgtgatttaagggagcagaacaagtaact

SEQ ID NO: 30815 - DNA, 469 bp, Glycine max
  unsure (1)..(469): unsure at all n locations
agcttgttcatcatttatattgaatntatgcntttctatatgactctctaagccactacgcttaggcttagcgagtgtttaaatttccagttttacttctaagtttgtataaacttgcttaggtggcatgccgtgctcagcgagttagtttagttaggtcagaatgtttgaggcttttggtattatgttggcggctaagcgagccgcgctcgctaagccaccatgcctctgaagtttgaataagctcgtgctaagcgagtcagtctcgctaagcccaaagcaatttagtgttctgaaattgtgttcatgcactaagcgagtcatgctcgctaagcgcaatttcttctctgtctttgaataaggcttagcgagccagactccctaagccaattatgttctagtggtcaagttgggctaagcgcctgctggcactaaacctgtgtaatgtgttgcactatgcgagtctgtc

SEQ ID NO: 30816 - DNA, 385 bp, Glycine max
  unsure (1)..(385): unsure at all n locations
tatcctanagctntatgaatgcatgaggggcatgtttcaccctgtgctgaactaggaatggctntacaagggcaatcacccncctagactctntgaattaccttgcatttacattaaaaaaaattatctgccccctccccccacaactaatattgatcttaagtattaaagaccattgcatcccatgaaaacatacatacaactcattattgcatctgtttttaaaattatgcatgacaaatatttatattgtggttcctctttactttacagaatattaaatattacaatttatgtgaaaatnttatgctcccattgtttgttattttggttatgtncncagtctcacccaaaactaccttcatactattaaatatttaacatc

SEQ ID NO: 30817 - DNA, 205 bp, Glycine max
tatttgcacccccatttttaactaaatactcccttgcttctttttggtgattctttttcccgaaacggtatgaaactttacgaattttcgaacgatgattggtttcttttcgtatggaacaaaaccttacggattacgtaatccatccctttttacccttcgggagcgtacagaactttacggattgcgcactaacactttcttt

SEQ ID NO: 30818 - DNA, 306 bp, Glycine max
  unsure (1)..(306): unsure at all n locations
tgatgcagatgggtntgtagctacctcatgcactcttctaatgactatggcttcatttctggctctaaactgctgggagttggaggccatcttctcaattaaatttctggcttcagcacgagtcatgtctccaagggctccaccactggcagcatctatcatacttctgtccatattactgagtccttcataaaaatgttggagaagaagctgctctgaaatctgatggtgagggcgactggcacatggtttcttaaatcgctcccagtactcatacaggctctctccactgagttgtctaatacc

SEQ ID NO: 30819 - DNA, 283 bp, Glycine max
  unsure (1)..(283): unsure at all n locations
gatatattaccgggactcaatcagacatccgagtaaaaagttattctcgtttgaaattgctcagggcttcggtattcaatctccagcgtatcgatatattacgggactccatcatacattcgacgaaaaagatattgtctgttgaatntgctcagagcatttacattcaatttcaagcgttccgatatattacgggactcattcggacatccgagcaagaagttattgttgttagaatttgtcagagcttctggattccatttcgagcatctcgatatattac

SEQ ID NO: 30820 - DNA, 397 bp, Glycine max
tgatgcaacattggagaggttaatgaaacaacgagatgatgcgcttcatgagaggttggatcattatggagaatagagatcataatgaagaagaaaggaggagaagagggaatgatggtgttcctagacaaaaccgaattgatggtattaaactcaacattcctccatttaaaggaaagaatgatccggaggcctacttggagtgggagatgaaaatagagcatgttttctcatgcaacaactatgatgaggaccagaaggtgaagcttgccgccacagagttttccgactatgctcttgtgtggtggaacaagctacaaaaggagagagcaagatatgaagagccaatggttgatacatggacggagatgaaaaagatcatgatgaagcggtatgt

SEQ ID NO: 30821 - DNA, 430 bp, Glycine max
  unsure (1)..(430): unsure at all n locations
cagctgcagcttagcttcgtcccaggcttcatgtagacttgtccaanatcgtgaagtaaacctcggatccctgtcagatacaatactggagggaattccatgcaaccttactacttccttgatgtacaactccactagctnttccattctatacttcatattcaccggaataaaatgagcagatttggtgagtcgatctactatgacccacacagcatcatgttcacgactagtctggggtaaactagatacaaaatccatagatatgctctcccatttccattccggaatttccaatggcttcaattctcctgatggtcgctggtgctcaaccttagccttttgacatgtcanacatcttgctacatattcagctacatctttcttcataccatgccaccaaaaacttctcttcatatcttggtacatc

SEQ ID NO: 30822 - DNA, 450 bp, Glycine max
cttagaatttgtcaatgttatcataattatcaaatggtttgtaaagtcaacataattcatttaatatagtttggaagtgtccaaacatggtttgtatatcttcaccatcttccatagtgaagagttcatacttacgtgtcaagaagttgagcttgttgcattttacttgtgatgatccttcatacatcagagttaatgtgcccacatttgttttgcatttctgtagttatggatcgttgtatattctttctcagagagggagcacaatatagtgtttcaagctttagagttcaacaagaacctttgtctttaagtgtctatccaaaaggttcgtggaatgtcattcagttgatcatccagtggtatgtagttgccatgttctatgatgtcccatagatctatatgaatattggtaaaatgagctatcatacattccttctattagtcatg

SEQ ID NO: 30823 - DNA, 458 bp, Glycine max
  unsure (1)..(458): unsure at all n locations
agctntaccaagggcattggttgctggctttgttaatactgacaaagaatttcagagcagaggtgtgaactttagctnttattcttgtgtttttttggggataaaatattgtgagggtcgaaatacagaactggaggatctggaattntaattttttctcttcgtattactgattatataagtcctcatctggttntgtccaggagaaacttcgggaaccacagctacattcctaatagtggataggtggactgtgactgttgcatctgttggagattcccgttgtatactatatacccagggtggtgctgttacctccttaactgttgatcaccgacttgaggagaatattgaagagtatgtttttatctctaaggccgtagttggtaacttctttgtatgctcttggntacgaagtacactgtatgcacangagggaacgtgtcacttctagtgga

SEQ ID NO: 30824 - DNA, 460 bp, Glycine max
  unsure (1)..(460): unsure at all n locations
agctnttanagaatcaagaatataagggtcaaccttattatgttgccaaacttcataaggaaattagaaccttaataactacattagccaaatttgtcaatggaatagataatcttaacaaactattagggcactatacaagttcctcaaacaaatctaganatggatatgatgggaagatctatgttcataataagaatactattatttgttatttctgtggtaagactggacacatgacgcccaagtgtagagatcgacctaagaagggtacaaccaatacctctatggctaacacaaaaagacccaaaaagagttgggtacctaagaaaaagattattcctattgcagatgtccttgatagcagaaagtagatgcctatcatggtactnggacagtggctgctaacgacacatgacaagagaagggtgtatgntccaatgccttactccttatcatg

SEQ ID NO: 30825 - DNA, 412 bp, Glycine max
  unsure (1)..(412): unsure at all n locations
cgatattcagcctgacgagggatcgagggtttagtaatttagggttcaacatagaacacaagaccacaattgattagaaaaatatatttctatgcatcacgcttgtcgttagaaagacccaacatatctacctactcgtaaacaatcttctaacgttgaaggagcacgatgccaatagttgttcaacaatcaaacaaatatacaatacaagaagtgcatatcgttcttccataagagacaatgatactgaaatacaacatctaatgaagcttcttgaacgagatcagtatattcattggcatatattaaaggatgaagatgttgtatgtgatatcttctagtgtcatcctgatgcaatgaagatatgcaatgcatgtaatttggtgtntttgataggtagtacctacaaaac

SEQ ID NO: 30826 - DNA, 514 bp, Glycine max
  unsure (1)..(514): unsure at all n locations
tttgcccagtggagncgttgagcaccaggatccttagagacacctgctgcatgcaagctngttgatgagcngngangatttctttagttttacaacgaagnccacgatgctctgcagagagttctgaccagctgnaacccatcatgcgactccaactacgattagatactactgtgttagtcgcagtgtagagaaaattgtcggcgatatgcagtctgcattgaacatcaagacgattatccacctaatatgtaagtctatcaataggtgactcgggagtggctggactgggatgtgatagtaatgtcaagaccgcgtgatgggtatccctcatctaccagagtgacattgggtgcgaaaccttgaaaaccaatgggagaatagaggtgaagtccactgatcctgagtggacagcgttgcctaaagaataatatgtgcactcacgagcctatacagactgtgcaaacaaggacgggtgcgtgaatgttgtgatgcccacccccctgggagaagc

SEQ ID NO: 30827 - DNA, 388 bp, Glycine max
  unsure (1)..(388): unsure at all n locations
agctngtaggctngattgacccgaatgtttgtttgttttaataatacttngcattgaagctgtatttctatttagtgctgaccatctttatttctntactgagtaaatgatgttacaaatttgataatgtcgaacaaaaataaattataaggatgtcttaatagttgtgcttttttttttcatatttgctaggcttagaagtaggtcctttntagcgtttcttcttttccatgatccgactcaaaatttgaagttttgtaaactgcatttttttttctaagtgggattctggggaagtgtgcagtggttaagaaagctgggccaaattatactttagtctattcttggtaattagcttcttgctcatacatatattatgcttttttct

SEQ ID NO: 30828 - DNA, 430 bp, Glycine max
  unsure (1)..(430): unsure at all n locations
agctcgccacccagctcgcccaggctatctaagttgttttctcctgaagcaaccgccttctggaggaattntctagaaagcccacgtgggtctggttgctatttgcacccccatttttactaaatactccccttgctcttttttggtgattctttttccgaagcgctaagaaactgtacgaatttcgtaacgatgattgttttctttccgtaatgtagcacaaccttacggattacacaatcatcccctttataccttccggagcgctacagaactttacggattgcgcactaacacttgcttgtaatttctggcatgtcacagaacttcacgaatngngctacaatactctcttttgactttcggcatgtcacagaacttcacgaactgtctagcgatgggtgccaagtacctctaagcggtcaaacga

SEQ ID NO: 30829 - DNA, 384 bp, Glycine max
  unsure (1)..(384): unsure at all n locations
tcttagtntcagatgatgcagatgggtttgtagctacctcatgcacttctctaatgactatggcatcatatctggcgctaaactgctgtggagtggaggccatcttctcagataaatatctggcttcagcaagaatcatgtctacaagggctccaccactggcagcatctatcatacttctctccatattactgagtccttcataaaaatgttggagaagacgctgttctgaaatctgatggtgagggcaactggcacatatgttcttaaatcgctcccagtactcatacaggctctctccacttgagtgtctaatacctgagatatctttcctgatggctgtggtccctgaagcacggaaaaaaatttctagaatactctctt

SEQ ID NO: 30830 - DNA, 483 bp, Glycine max
  unsure (1)..(483): unsure at all n locations
agcttagcgcgtgtntctgatggatcgcgggcttagttcacgtgttgtangcttagcgcgtgcttctgttggatcgcgggcttatcgcctgtgcttcctggcccgcttagcgcgtattggactgggcctgcttcagatattctttntttcttcaatttttctggcctttttgcttgttacacctccagtttttatatctgcagccaaaattcaacaaaacatcaattctttaatatttaagcacaaataactgctaaataattattnttaaagacaattttgccttattttctattatcaaaatacaattatttaacagttatcanaatccnccacattaaaactttgtttgttcccaagcaaatcatattaaacagcacgctccanatgcttcaacactctcaatggctgcantttctcaaattcctccaactggtcctttctgcatttgtcataatctcacaatggaagcataaattacat

SEQ ID NO: 30831 - DNA, 429 bp, Glycine max
  unsure (1)..(429): unsure at all n locations
ngctgataaactgcatcttcctctgcttctctatcaagagggacattctatttcatatatttcgcctccctctcctccagcgacaaacgtgatgtcagtctcttggctagaaattccctttctcgtttcaaagctctaatgctgcatattataaaatgtatattcaatgaaaaattctcattcataatgatgcataataactctactacacatctatctatattactacacagtgctagatatattatactcgatcaaatgttcggatcctctaagggacttctatatgagagagtgaacctcgaagacaatgagatagtaggttcttctacaacatgaggagctgggcttgcattcccaagatctgctaggtgttgctgcaaccatgtcatacgacctagttctactttcatgtatatttgatcggct

SEQ ID NO: 30832 - DNA, 458 bp, Glycine max
  unsure (1)..(458): unsure at all n locations
agcttgtaatcgattactcacatattattatcgattaccagagaangttntcagaaaacattctcaacagtcacatctttttctctgattcttaagtggccatcaaaggcttatatatatgtgactagagacacgaatttaacaagagttttgaagaacaaaaaggtcttatcctcttaacaagcaaaattgttttatcctcttacaaattccttggccaaaacacttgtgattcaataaggaattatttgagtgctcaaattgttcaatctatctctttcanaagagatttcttcttctcttcttctttattctgaanagggattaagagaccgagggtctcttgttgtgaaaggattctaaacacaaaggaaggattgtccttgtgtgtntagaacttgtacaaggaatatacaagatagtggaactctcaagcgggttgcttgtggactggacgt

SEQ ID NO: 30833 - DNA, 386 bp, Glycine max
  unsure (1)..(386): unsure at all n locations
tcattcttagaatgatgtaagtagagatacatatatcgtgaataatcttctattaagggtatgaagtatttcggactatatgcatccatgtctggacaacatatgtctgtatgtatgatttctaataaattagaactcctctttgcaccctttttagacttgttagtttgcttacccttaatgcaatctacacaagtctcaaaatcagcgaaatccanagtactaagtactccttcatttactaatcgcttgattcttcaatagagatatgtcctaatctccggtgccacaacatagaggattcttcattcacaatacatcgttttaacccaacagaaacgtgcatagaagtagcgtcattttgcaattcaatcgaataaagacca

SEQ ID NO: 30834 - DNA, 434 bp, Glycine max
  unsure (1)..(434): unsure at all n locations
agcttctcaatccgctctggatgagcataacctttgtcgtccctctgaaagatagcaatgggcaaaaagaaatcacattnttaattaatctcaggaataaagaaaacaaaaaaaatatttgatggtcaaacaaggaaattatcaacatgccttaagatacagtgtaaggcgagttcctcttggaatcagcttctcgggatctgtctcctcagatattgtatatgagctagcatttgcctccccttcccaaacatattgcttatcggattttggactctttgttgagacaaccaccttcaaacaacaaaaaattatataaataccagattaaacaaaaatatttaagagcatcacatatttacttntacaaanatgcatacccgatcagaaaccagaaaagcagaatataatcccacaccaaattgaccaattaa

SEQ ID NO: 30835 - DNA, 445 bp, Glycine max
  unsure (1)..(445): unsure at all n locations
gggatggagtatctataagaaacttgaggccaggatacaaaaagattattaagaaaagagggagctggtactccaaactctaaagctaaaatgatccgtgaaatagtaattttttccttaaacaaattaaattaaataatataaattggcagcagtgacaaatggaaccttagtgttggaactagaaattctttntctccttcaatagaaatttcagggggacaaagagcagaagataaagatgttattctattcaaaagtttcaaagaataaaaggtaaaggtgataggattagaatcttgacttcacgaagattntctaatgatgtaaaagtgaagagactaggtccaataacggacctgaataagtaaaaaggtccaagactnntttctntctaaagggttataattatatgtacacattctatagaaacctcattctgatc

SEQ ID NO: 30836 - DNA, 523 bp, Glycine max
  unsure (1)..(523): unsure at all n locations
tctgagtcacctgcggcatgcaagcttctctgggaccttgagcaagcagctaactcctcttttaagaccatgccatgtgcttgtgattggtctctctccttctttcgaagtttgagctcattgttgctgccccataaagctccacggaatttgtctcggtcgtaatcttccttgcgagccctcttggtttctcgttcaagggctcctgcggtagctgcattttcttctcgtaacctgacacactctttccggacgtctatagcgactaacttgaatttttctttggcaagtcttgcttttcctagttctgtttttagagctcggacttcttcatcctcttctggagcttcaaagttctcctcgttgataacttttaatttggagagccaatctaaccctcgtgtacgaactntcagccattcatgataaccaccgatgatgccattacagatgcccctaagttctttatctcttcttaacgggctttcccacgccttgtggactctttgtataatcttggaac

SEQ ID NO: 30837 - DNA, 171 bp, Glycine max
ttcatccgatattatacttattacgcgagcaacaatctcaaaggaccaaaactgtctaaaaaatacgcccagcctccacttattgagtctgtagaattattatcatttgtcgcatggagcaaacaactgttgatgaactgattgcactgatcatatctagatcttggttag

SEQ ID NO: 30838 - DNA, 533 bp, Glycine max
  unsure (1)..(533): unsure at all n locations
gtgtcactgaccggatctctagagcaccgcggctgcagctnttaggctataaacacactctnttatatattattaacccctaagatgaatcctattatagtnatatttgacaagaagcaccatctaatctctaacttcttatcctaactgaacaactgatttgtcatttatctagagatcgtaagattcttttaagcactacttgaaatagtatttgtaaaagatcagcttctaacttcttatattgctctctctcagactaatagaatgacagtattgcacttaccacttttagagaaagcacttatctatcatcatttcattattggagcgattaagttgactaaacacttgtagtctaagtaagagatctttcaatgttcatctgatgggtgatgaaaagtgtactatgactaacactcttgagcataatttagtatatcatgcacatcatcatcggacaatttgcatgacaataacaacacgtcttttttgaatgtgattgatgaaggcctcatcatcaaattaagacg

SEQ ID NO: 30839 - DNA, 489 bp, Glycine max
  unsure (1)..(489): unsure at all n locations
agcttgtctcagcgtctatgcgagacagataccaacatgttagctatcatcgccaagtaccaagaagagttgggtctagccacggcccacgagcatagaatcgcggatgagtatgcccaagtatatgcggaaaaagaggctagaggaagggtgatcgactctttacaccaagaggcaaccatgtggatggatcggtttgctcttaccttgaacgggagtcaagaacttccccgattgttagccaaggccaaggcgatggcagacacctactccgcccccgaagagattcatgggcttctcggctattgtcagcatatgatagacttaatggcccgcataattagaaatcgttaagaaacttgtatggtctctcacaccttgactagatatgatttcttcntttttttttgaaataaaagagttggtcccatgtttctacttcaaaaagcttgtgcgaatcaaatcactcctacatctcatctctagcat

SEQ ID NO: 30840 - DNA, 406 bp, Glycine max
  unsure (1)..(406): unsure at all n locations
gcttgaaagctgagctcngaaagacaagagtagcgaaggagaagctgatgtggcagccactagagttatgaaagaatgtgatgagctaaaagatatcaacatgaccacggatgaagcgctagagcgggaaatgaaaaaggccagaaaggaagaatggagcagaaacaagttctaaggggatttgttatgcagcagtaatgagctcaaacttagaaaggctgagagagacaaatcaaggatggagagcatgatgttagaggataagttaaggagttgtcataggtgatcgaggccgtacccgaatcatataaacatgaaaatgcagtaactangaagtgatcctaggtcgtttcccaacgagcaatgataaaccaattgttcataatatacttgcagtaacagtaac

SEQ ID NO: 30841 - DNA, 384 bp, Glycine max
gctattcttgtctatttgcgtttgtttttaaactttcccagtgtttgtaagagaattggtttcatttcttgttttaaaattaggagaaaacattattactttttttctaatttattcttcagtctcaatttagttatcttatttttaaaatatttgttttggtcatttagaatgagttcaatttcatcctttacaatgattaatgtttaagattttttttacaaaatataaaaaataaatacttcaaaaaaaattaatatttattagagacagtcttactaaaatattcttattctctctcctaatttcaataaaaattattaaatcttttaaaatatcattatttattacatgataaaattaaaataaatgtttgaatatcta

SEQ ID NO: 30842 - DNA, 463 bp, Glycine max
  unsure (1)..(463): unsure at all n locations
agcttgcatacaactcgttagctcctatacatggactatgagtcaantttttaaaattctatacatttcaaatctttaattctctagtagattgtagataacaagattattttaaaaataaaaagacaattgaacttattctattaactttgttgggccacaagatatgacaaaaaatataattataaacaaagctggcataaataaaaactaccccaccttgtatatataatatactaaaaaaccaaataaagaaagccgagctatacataactcaagtctgactaatttatttaacgagctcaattnttagctcaagtttagctcatttgattaatgaactaaattcaacgaattaattatcaaatcaagtgttgactatctgtgagttgtgttgactcattaccactatgaaatgtgactatagagttcaagaccagatctacccatttgcatgtaatcc

SEQ ID NO: 30843 - DNA, 427 bp, Glycine max
tcttgggaccacttgagcaatgtaacgtttggcgactctctgtgttatggattgttctctcacatgggccacctctctctcttcttgccacaagtcgagtcgcacccttaaactctcttcatttttctctggcagaaagaagctgaccctatgggatggttccacaatgtttgccgatatcacaacattcattccaaacgagagtgtggggatgctacaccgatgtgaagatttgcatcatctttaatagagagcgaatttccaccactcgagatgctacaaattgtgttcatgtgtttgacacaattgttgttggtatcctaaatctacatatgatctatttctagtcaaacttttcacccaatctgtcgagaaggttgtctggttccacttctacctatttggtgaagtagtccacaactactat

SEQ ID NO: 30844 - DNA, 391 bp, Glycine max
  unsure (1)..(391): unsure at all n locations
agcttgtggcaacgatcgcattnggtatgatattnttctagtntgcggcattaaccatgatctctacttagagagaccaaggcagatgagtcaacatatggtggaggcacatccacatcaacatatggtttggccagtacaagcaacaatgtggaccatgcagaattgatggtgggaatatttggagagcccataatatgatccggaaccaatgaatactcagtaagtggtccatacaaagctaataacatgaagaacgattgtagttgttcaagttcctcgtcaggagtggaagtcaagggcaagagttcattaaaatcaaacagaaggccattgactttgcctaaatagccaaccattgtaccatcaaattgtctagcagcaatgacac

SEQ ID NO: 30845 - DNA, 379 bp, Glycine max
  unsure (1)..(379): unsure at all n locations
tcaagaacactctgacaatggtgtacaaacatatacataaatgacatttttttatatagtgtacatacaatattaatatacccattaaaaaaggaacaatgaattaatacaccaattaaaaaagaaaatggacaatattaatacagcaacacacattgaatgcaattgtcaattgtctgatagaagttcanattaaattatgatccatttttaattcangtaaaagaaaatgaacaatatcaatacacgaatatgaatacatatcaagatctaacttttacaagaaagcaacgcacaatattgaatgcagttgtcaattgtttgataaaagttcaaattaaatcatatgatcatctntaattcgggtaaaagaaaatga

SEQ ID NO: 30846 - DNA, 473 bp, Glycine max
  unsure (1)..(473): unsure at all n locations
agcttgtagttcctttctctcctcttctccacctccatattcacataaggaataggccaccatatctatttcagacctctagtgcaaagcaagaatattttctgagccccttttagcttcatgatattcattgttgtggatgaacttccccagcaactgagtgtctaacatgctgtgtcgagcaccatattctcttatccttcggatcaataacgagcccatttgtttgaattttggcacgaactctaaagcatggaaaatacatttgcatcttaacctctgcgaatgcaattatctcaaacatatataaatgccttgaaccttttataacatttaagttaactactattatatgaataaatgaagagtgaagatctgatgcanacaacaccaagtgttctgatctgattaccgcatagtgaaaatgaacaatatctgtccacatggtagtgtttggtggaaaatgatttgtg

SEQ ID NO: 30847 - DNA, 304 bp, Glycine max
  unsure (1)..(304): unsure at all n locations
ctacttgttacctggttcttcgtaaggtcttagtatattgngttagatattattaggaatattgttagtgttccatcagcacgcgatgtttattgtaaattctagttgtcagcagcaacctgaacaaagtttcatagcatgcattggcacgataatattcgttgcagcaggtgtcctaatcttcgcgtatttggccacttatgggaattaggcaatttatgtatcggatcatgagtggataatggaaccaatgcattggagaagggctcacatattttagagagaaagaggacgctaattggat

SEQ ID NO: 30848 - DNA, 377 bp, Glycine max
aacagcagaataattatgatatttcaagcaacagatataatcccaggtggaagaatcatccaactctgagatgggcaagtcctccacaacaacaacaatctgtccctcctttccagaatattgctgatccaagcacgccatatgttcctccttcaatgcagcaacaacaacagcaatctcaacaaagacaacaagcaattgaggctcctcctcaaccttccgtagaagagatagtgaggcatatgaccatccaagatatgctatctcagcaagagacaagagactccattcacagtctgacaaatcagatggtgcagatggctactcagttgaatcaagctcattcccaaaattctgacaaatagccttcacaaact

SEQ ID NO: 30849 - DNA, 376 bp, Glycine max
  unsure (1)..(376): unsure at all n locations
taaagaggatgctntaatggagganaagtatgagagaangngggagcactaaattgaaggaatagaagagggagagaagtggaacttggaaatatgtctcataagactttcattcatcanagttacaacaagtgttacacatgcttctatttacagactaggtagcttccttgagaagctttcttgagaaaacatccttgagaagctttttgagagaacttccttgagaagctagagcttagctacacagacgcctctaataactaagctcacctccttgagaagcttcctgagaagattgctcaagaagctagagcttatctacacacacctctctaatagctaagctcacctgcttgagatgagaagctagagc

SEQ ID NO: 30850 - DNA, 525 bp, Glycine max
  unsure (1)..(525): unsure at all n locations
atggaccacttgtancgatgagancctggacctcaagacacctgcaggatgcaancttcctcagatccatagcactactatatcgacattgccttactttacacgtcaaaagtaaaacagaaacctgtactattaagtaataaaaaccagttaactgttatcaacacgccttaaatatatcagaatataccatatgcctaggcttaatgattttgaagcgacacacaggataatatggctattggacgcgtacacctaacaattgctgaagggtcggtctattaccactcacttgggtggtataatgcctactccttctcttcagaacctttaaatcaatatatttcaacatataatgcactagtttggaaacaaagaaacatgagatgcaattatttttcagagaccggatttttacctaaaaaccttaattctacacagtaatcatgcctttataatgacaaggaactggtctgccagaaaaccaagaatgaaagcatctctcaataagataaatgtccttgc

SEQ ID NO: 30851 - DNA, 430 bp, Glycine max
  unsure (1)..(430): unsure at all n locations
cggagaggaggcttcaatggagganattttgagggagagaaagagagaggagggaacactacattgaaggaagaaaaagggagagaagttgaactttgagttatgtctcacaagactctcattcatcaaagttacaataagtgttacacatgcttctatttatagactaggtagcttccttgagaaactttcttgagaaaacttcctttagaagcttctttgagaaaacttccttgagaagctagagcttatctacacatacccctctcataactaagctcacctccttgagaagcttccttaagaagattcctaaagaagctaaagcttagctacacacacctctctaatagctaagttcacctccttgagatgagaagctagagcttagctacacacccnctataatagctaagctcacccatatgac

SEQ ID NO: 30852 - DNA, 409 bp, Glycine max
  unsure (1)..(409): unsure at all n locations
agctactacacttgattattcttcttatcagntagcatagtacctccgatatttacttactgataatnttctgttctttgacctccaagcatgatttccaacttttcaacacacaaagggtgagtgagctgtattgaaaagaaggactctatcttatgtgatgtgtaagcaaaacagaaattgctacagttcatgtctatagctatttagattcagcattggctcatcaaattggaatatagttgggtgctgattattctataaaattgccgctaacacaccacaggaatcagataatggattctatagatgttgatgaaccacattgtatgtgggtactctccagactagtactttgactccttctttctacatgtatgttaatnttaattgtgatgaaatgaatgtt

SEQ ID NO: 30853 - DNA, 439 bp, Glycine max
tattagggtttcaaagccagcgttattgtatgtatacagatctggagtaggggtttgctggatgccctccaccttttttcatttactcacactagtcgcattttttatcctctcagttatatatttaaatctgaattaattaaagtatgtgtaatcaatcaatataatctaattttaatattgtatgaacattgatttcaattatttcaatattattattattactactattatttcatttgacaattttaattactcataatatacttgttttaacattctttctttatagtgcaataattctattagtattgtactattcattataaaaaatatataatttacttcaacggctaaatatatcttaatatattattgatagcatacaaagtggttagccgaaggacgcaagacagtcgatagcatgcggcataaagat

SEQ ID NO: 30854 - DNA, 448 bp, Glycine max
  unsure (1)..(448): unsure at all n locations
agctntcattagaccggtgttgctccanaatcccagttatagttacaaagataaaagtgcaaagatctacttcatcagaataatttgaagtccataaaattcaactacaaatacaattagttccaggtacaaaaccaaattgctacaaaacctcttgatcaatagaanaactctaagcttggtttattgaaataaaaataaagacaattttattactaagcttgcacatcccgaaatcaactggcatcatacaaagtggaattcgagtgcttataaacttggttagatcctgttctctaatattttcaaagataaaaagatatgcttcatgtacccatgtcccgttgaaaagggttatgcttcaagacacaaacatgtacaatgatatagtattataagacagagatgatgtggaaagctacctctccatcccaagtccatgacatta

SEQ ID NO: 30855 - DNA, 325 bp, Glycine max
  unsure (1)..(325): unsure at all n locations
tcttataaatatcatgtaataagcaattaagggcatgaataagatacactacattcttcttctctttgcatgcgggaggttccttgttaattccacaatntacaaagatgatagaaaaattaatacagaaagtaattccaaactatgtcaaatgaactatcgtgtgcctaaactatgtaagatagctagtttatttctcaaaattgagtataaataaaacatattatattgctttttctgtagcatctatttggttgcgaagtaaagagagagtgaaatgagatagatagggactaaagagagaaaatccatgctgaattttttt

SEQ ID NO: 30856 - DNA, 468 bp, Glycine max
  unsure (1)..(468): unsure at all n locations
tgatcctctcagtcacctgcggcatgcaagcttctanactntgtacaagaatgaagctctgatactcacttgttagacaagtggcctcagatatcttaagaagggggggttgaattaagatatcccaaactgtttcccctaattaaaaatctatttcactttttactcaagttatgaattcccttaatgacaatcttcttaaatattaattcaaatgaagcaacttgaatatgaatataaagcaataataaataaaggagattaagggaagagaaaatgcaaactcagttttatactggttcggccacacccttgtgcctacgtccagtccccaagcaacccgcttgagagttccactatcttgtaaattccttttacaagttctaaacacacaaggacaatccttcctttgtgtttagagatcctttacaacaagagactcacagtctcttaatcccttagagaatg

SEQ ID NO: 30857 - DNA, 481 bp, Glycine max
  unsure (1)..(481): unsure at all n locations
gctgactaggcgagtnngatttagccttagtctcaccttagttattagtcaattcggttaagaatgataaatcccaaagagaaaatgtccggttgattttcctctttattttactaaaaggtatatttttgttattatattattattttatctctctntgatttccaacgtggttacggcacgaccgaacggtcgaaatttattttaaccaaagtttacggatcatacaattcaaacgttcggcggaaatttattttatttttaagttaagcgagaaatgacttgagtaaaatggcttaagcacgtcaacagggggtataaaaagtacatgaaatgagaataaaaatacactaaacacaatgtggaccaccacgggtacatataatgaatcgaaaagcttggttcaaggtacttacccgttgaagatcgaagaacgatgaagaacgaatgaagaacgttgaagaacgggtgaaacctttgc

SEQ ID NO: 30858 - DNA, 456 bp, Glycine max
  unsure (1)..(456): unsure at all n locations
tatctcacagtcacctgaggcatgcaagctgtatacacaaagttagtcgtatttaccggctaacaactcccttatatntacagttntgcttgtcctcaagcanaaagagaacagctcacttgtcctcaagtgacaataacatgcagtgactatgtacaatggtgtatgaaacaaatgttactgattgcatgataatagaatgaagcattctgtactcatcacttgtctttcacaaaatatgcaactattcaaagagaagaataaaatgtaagttgtactattagatgaagttaatcataagatagatattaaggaaagtagcttagaccacagtttcacgactactgtttcactcaagcacaagtgtntaagctattcattaataacaactaacaagagatccaatctttgcacttcatctcatgccatacagccaanaatgtataaacagaatca

SEQ ID NO: 30859 - DNA, 434 bp, Glycine max
  unsure (1)..(434): unsure at all n locations
atcttcttcataacgggagtccttgcttcttgatgttcaatggaagcggaatgtataaggaagaaagatgatnggagatgccacttcaaggagaagatgagtcaagaacaagctcaccaccataagaagccatggataagagcttgaaggtaggagaagatgagtggagggagaaggagagaacgagcacgaaacttagttcctcaaatgaggtatgaactctgaagtgtaattctcaaatgatcaaagttcaaaaaatacacacatatggcctctatttatagcctaagtgtcacacaaaattgtagggaaatttgaatttctattcaaatntcacttgaatntgaaattgaatctgtggagccaaaatttcactaattatgaatagtgaatnttagttatgggtcagcccactaatccaagatcaagtccaa

SEQ ID NO: 30860 - DNA, 484 bp, Glycine max
  unsure (1)..(484): unsure at all n locations
tgcaagcttgtctcancgtttatgcgagacggagaccaacatgctagctatcatcgctattaccaagaagagttgggtctagccatggcccactagcatagaatcgcggacgagtatgctcaagtgtacgcggataaagaggctagaggaagggtgatcgactctttacaccaagaggcaaccatgtggatggaccggtttgctcttaccttgaacgggagtcaagaacttcctcgcttattagccaaggccaaggcgatggcagacacctactccacccccgaagagattcatgggcttctcggctattgtcagcatatgatagacttaatggcccacataattagaaatcgctaggaaacttgtatggtctctcataccttgactagatatgacttcctctgtgaataaaatgagtaggcccatgttctacttcaacagcctgtgccaataaatcactcctacatttatctctgcatgcatt

SEQ ID NO: 30861 - DNA, 410 bp, Glycine max
  unsure (1)..(410): unsure at all n locations
cataatgtaaattcaagtgtattctgtgaatatcaattgtattttgataataaaatnttcgaatcacgtatgatatgtntctgtaactggagatgagttgtttcacgtccaataatatgacaggtataagcatgcatataatcaaagctagttaacataataaacaatcaacaaaattaaagatgaccacagtaattatttgaatccaacgaaatccaaacattaagttcaatgacttaaaaagttccaccaaaaaatataatatataaaacgaacaaatgttctttcaaaatctgctatgctcaacacaaacccttagaaacttaaagctaggtcaagattgacaacacaactttaacatcttctcataattgaagcatctgaaccaatttcaggaaatggatcatcaa

SEQ ID NO: 30862 - DNA, 662 bp, Glycine max
  unsure (1)..(662): unsure at all n locations
tttttcagtcgtcacntnnaatcgctcanttactttcctctacttantannaactacgtatanaanactgtatattttnnnnnnnnnatnnaaatatattgagccagttcgagcnccntgatccnacacagnnganctgcangcatgccagcttggtgcacatgtgtgacatgatccttaagagtttctctgtatatttntacaaccgccaagacaacgaacaagaatcgaccaatgtatggcctgacaatcatattcatggtcgccttgaatgatgacggagcattgcacaaaccataagcgttacctcgcattcctagtgcccatggagagtgcgaaatgctgtcttggcatattggaggaatgcatcctgatttgtagatatccctgacacaagtctaatatacaaaacagctagcctacccagatattacgtagcatgtagatggtgggatatcaaagcggtaccgacagtcactgcgttcatggcgcgataatccacgcaacaccaacatggatagtcttatncgtgacgagcactcggtaagatagacggctcgtactgcgaccgatgatgcccctctgaagcataggactcaacctgcagctcaatctctccttctcgaagtgaagtgaccgatatcgacgcacatttactgcgn

SEQ ID NO: 30863 - DNA, 326 bp, Glycine max
caagccttcagcgtcccgacatcgtccatgttcttgtattcttcctgcaattttcaataagaatggatcagtaaccggatggttcttcatcaagaattaattttaaaaagtcccattagttctggaatatatatttacttattcaatactgggcgttaagagatgaacataccaggcagattgcacaagcctcttcttcttgactttgctcagatgaacagtatattgtttctgtcaaatacttggaaatcaaatcctcagacaatcctgtgctcacatggcctattctctctccaagtgcaagtagttcctggtcgagcaaagca

SEQ ID NO: 30864 - DNA, 497 bp, Glycine max
  unsure (1)..(497): unsure at all n locations
ctgcagctgtagtattgttggtataattgcctgttcctattatgctttaatgtctctagaggttacttcctcgttgacatcttttgtcttgaatggaattgccatgacaggttttgtgttactgtctttgatatttggtagttgatattgtgttgtgggaggtaatttcgactggattaactcaccatccttcacttgccaatntgttatgacatttnnttgtggattacctatgatgtctctgttccaatggtagtctatatcctttctgatggcataagcatgaaaccaatcaaagaanaggacattnaatttgactctctcgacaaattcgtagaacttgtcttggatttgttntctgtctatacccttgtaatgttggaaaaaccatctcctttaaaggtcattctccggagaatagaaatctttcctacnggttccttatcaatgctaangttgtcagatacatcataagttccattgagagtatgtggtga

SEQ ID NO: 30865 - DNA, 388 bp, Glycine max
  unsure (1)..(388): unsure at all n locations
atactaagctccgtactagatatatgatccttactaggagcggatcgcttgatacttgctacagagttntggatgatgccactttcggagaggaagataagtcagggtagacgccacaaggattaccttgataagtccaagattggttcaacaaggaacccagagagaaactttcatcaaattttatcaaatgcaaaagttcctctattgaaaaatgaaaacaacacatatagtgtatctgaacaaaaaaatagaaatagacatgggccttctaaacagtttgggccaaaattacaatataaagagttataaataaaaaatagaacatatattggcatcggccttcaaattaatctggacctttagcaaaaataatattcttggtagt

SEQ ID NO: 30866 - DNA, 455 bp, Glycine max
  unsure (1)..(455): unsure at all n locations
agcttattatccaaggctcatcttgatggtgaagcttcttcttccatggcttattccctagtggatggtgcctcctctcacctcttctcctttgtcttctgctgcatctccatggtggaaaatcaccattaaaggaactcattgaagctcaaagatcaagcctccattgaagccccacaagcaagcttccatcaagtggtaatcagagcataaaagcttcaagtaggtgctccttaaacctccattgatttttagttttaccttctccttcattgttggttcttcatttatctccatgtatctcctcacatgtcttgtgataaatgttgttaacatgattttttgaatttccaccgactgatcttgctatagaaactagatttcattntctatggctcanatatcttgttcatgttcttgaaccatgagttgtgttgagtttaagttcctttgag

SEQ ID NO: 30867 - DNA, 409 bp, Glycine max
  unsure (1)..(409): unsure at all n locations
attatgccctctccnctcggcggggatttcttcttcggcgaatgctatatagttgttggcagtgatattattgaccagccctccgaaacctactatcgagatgtcttgggccacatgggcctcgttcagaacttttactaggagagcccgatggggctcggagctcatgagtaactccaacagcgagaccctggccggggttttgttgagttgttcgataaccttgaattcgctctgctgaattatacggaggaactcgctggcttcctctagcgacacctcctttttaccatcctttttctccggaaggcctattgccggaatatctctattcgaagcgtggggtgcttcgccatcttgctcctccaccaataatccttttcccttgacgttcgcgggttggactggt

SEQ ID NO: 30868 - DNA, 403 bp, Glycine max
  unsure (1)..(403): unsure at all n locations
agcttgtgtagcactatccactgcataagtagaatgtattgcagctggatattgttgcgctcaaagtctttggataatgttgcaacctaccctacgacaagagtgtgggcgaaaagccaaaggagtgtcttccaaaaagcaaaaatgtatgggagtcgccaccaacgtttattcgaggaaaatgtttataaaaaccaaaaagaggtttgggaattttgaaaataagggttcaagagttatttacgcatagggaaggtactagcaccccacgcgcctgtcacaagggacggcggcctttaatcgagtgtgtataacgtgacttcaaaantatgtattttccttttttatttatattntnttactatattggggtcgacaagggggctgcccttactcctacgta

SEQ ID NO: 30869 - DNA, 346 bp, Glycine max
  unsure (1)..(346): unsure at all n locations
ttgttcgtgcttgcgcgcttagcgcaactctgaaccgcttagcgcgcattagtgaatatcggcttagcgcatgcttttctcgcttaacgaatggactgaagtggtgcgcttagcaggataacccttcgctcagcgaacatgcacaactcatccttcttccagattcttcctcgcgctcagctgaggaatgttgcgctcagcgaatggctcgttaagccagcagattgacttagtgagagggtaaaaatcaacacttcaaaaactngcctaattaatctgaaatngagagaaaatgattattaaacacacanaatggaagtactatgtatttattacctatctttac

SEQ ID NO: 30870 - DNA, 385 bp, Glycine max
  unsure (1)..(385): unsure at all n locations
ctttatacagtgagtntacgcttgctacttatatctaacaactctaatggtttcgtaactgcttacactgttgtaactaactaaccaagggcctaactaactaacccatggttcatacaaatcgtgacttaactatgcatgcatgcagacactgcttgagtcgttatatgtaatcctccaagtgcctatgttgcgtgatactccttcgtgggcgttcctcgtgagttccaggtggtgaatcttcaattctgcttctgctgctaacactgctaacatatgatgccaagcttctatttgtctaccgaagtagtcactttggttgttactatctccatcgaggagtgaaaaaataaagagaagattgtaactgcttgatacagcatac

SEQ ID NO: 30871 - DNA, 145 bp, Glycine max
  unsure (1)..(145): unsure at all n locations
tcagagtcatctgaggcatgcgagctcgagatgacgaagagnggaatgttgaactacctgcctgattcttacccagagggtcctggaatattctcggtggctatgataccttgaagatgtctggcgtggtgctattgcccataat

SEQ ID NO: 30872 - DNA, 420 bp, Glycine max
  unsure (1)..(420): unsure at all n locations
cggaaagaatgcttcaatggagggaaatatgagggagagaaagagatatgggggagctttaaattgaaggaagaaaaagggagagaagttgaactttgagttgtgtctcacaagactctcattcatcaaagntacaacaagtgttacacatgcttctatttatagactaggtagtctccttgagaagctttcttgagaaaacttgcttgagaagcttctttgagaaaactttcttaagaagctagagcttagctacacacacccctctcataactaagctcacctccttgagaagctttcttaagaagattcctaaagaagctagagcttagctacacatacctctctaatagctaagctcacctccttgagatgagaagctagagcttaactacacaccctctatattagctaagctca

SEQ ID NO: 30873 - DNA, 409 bp, Glycine max
  unsure (1)..(409): unsure at all n locations
atctcagagtcacctgaggcatgcacgctnttcgattcattctatgtacctgtagtggtccacattgtgtttcgtgcattgttattctcgttttgtttactttatataccccctgttgacgtgcttaagccattttacttaagtcatttctcgcttaacttaaaaataaaataaatttccaccgaacgtttgaattgtattatccattaacttcggataaaataaattccgaccgttcggtcgtgccgtaaccacgttggaaatcaaagagaggtaggatataatatagtactcaaaaagacatcttttagtaaaataaagcggaaaatcaatcggacgtcttctctttgggatttctcattcttaatcgaattgattaataactaaagtgaaactaaaggctaaaatc

SEQ ID NO: 30874 - DNA, 431 bp, Glycine max
ccaggataaatggcctcagcatacttcttatttccagaaggagattcaatcaatagacctccaatctttaatggagagggttaccactactggaaaacccgaatgcaaatttttattgaggcaatagacttaaatatttgggaagccatagaaatatggccttatatacccaccacaatagaaagaattacaatagatggaagcacatctggtgaaagcataacaatataaaaacctatagaagatggtctatgatgactaatacgagacaatacaatttaaagccaaaacataaaacatttgcttggaatggtgaaatttagggtttaaattgaagagtgctacgaatggggacactctacattacacataggactacaatgtaaaagacttgataacacctactctgatataacattagataatgaatg

SEQ ID NO: 30875 - DNA, 447 bp, Glycine max
  unsure (1)..(447): unsure at all n locations
agcttaagctccttcaactgtacaaggctcttaatatttgaagagtatccttggggaaccttcacccgacaaagacactgacaaaaacttatcttctccttnttggacaaagtatgacaagctgggggcaaataaattttcttcccatctgaccttggatgcaactgtgatcatatccccatctcagctagatcatgacgggtattcaagccatccttcgtcttgccttgaatgttaaggagcgtcccaatgacactgtcacatacatttttctccacatgcataacatcaatacaatgtctaacgtctagattagaccagtacggaagatcaaagaaaatggacttcttcttccatatgcaagtcttacttttatccttcttttgggcctttccaaatacagtattcaggtgttgaacccgctggtatacctgctcatcagtcaac

SEQ ID NO: 30876 - DNA, 413 bp, Glycine max
tgtgtgaacaaaattatcttattacccttataccgtgtcaatattatatatatggtgttatatctaataaatataataaaaataatttgtcactcaggatcaaatattgccttcacaatccattatcctcattaaataaaaagaatataaataaatcgaaaaaaaaatagcaagtcaaattcttagtagccactacagtttcggtccttccaatcatcccgtgttctggtcgacttttctcccttctccccatttgctcattctcctccccattctgctcagacaccgcacagcgaacaaatacaccattcattttcctttttcgcaacagcgcaatggctcgaagatccctcccgctcctgaagcacctcctctcgcggcggatcccggcccgatccgtgacgtacatgcac

SEQ ID NO: 30877 - DNA, 391 bp, Glycine max
  unsure (1)..(391): unsure at all n locations
ctgcagcttgaagtatttgttggtataatcttcctgttccattangctcttaatgtctctagaggttacttcctcgttgacatcttttgtcttgaatggaattgccatgacaggtttgntgttactgtctttgatatttggtagatgatattgcgttgngggaggtaatttcgactggattaactcaccatccttcacttgccaatttgttatgacattttttgttggattacctatgatgtcttgattccaatggtagtctatattctctctgatggcataagcatgaaaccaatcanagaanaggacattaattttgactctttcgacaaattcgtagaacttgtctcggatttgttntctgtttataccctttgaatgttggaaaaac

SEQ ID NO: 30878 - DNA, 394 bp, Glycine max
  unsure (1)..(394): unsure at all n locations
ctgatactagattatatgatccttactaggagcggatcgctngatacttgctacagagttntggatgatgccactttcggagaggaagataagtcagggtagacgccacanggattaccttgataagtccaagattggttcaacaaggaacccagagagaaactttcatcaaattntatcaaatgcaaaagttcctctattgaaaaatgaaaacaacacatatagtgtatctgaacacaaaaatagaaatagacatgggccttctaaacagtttgggccaaaattacaataaaaagagttataaataaaaaatagaacatatattggcatcggccttcaaattaatctggacctttagcaaaaattaatattcttggtagtgcctctacctcta

SEQ ID NO: 30879 - DNA, 453 bp, Glycine max
  unsure (1)..(453): unsure at all n locations
atatggacganagtgcacaactcctatntgttggtacgatgatggagaatctttacttcttggacctgaaatgctacaacagattaatgaacaagtgaagttgattcgagagaagataacagcatcccacgataggaaaaagagctattatgatagaaggaggaagccactacattttcaggaaggagagcatgtgtttttgaaggtttctcccgtaacccgggtcggaagagctctcaaatctaggaaggtgacgcccaagtatctaggcccgtatcagattttgaagaagattgggcctgtagcttatcatatcgccttacctccgagtttatcgaatatgcatcctgtgtttcatgtctctcaactgagacggtacaacccatatccatcacatatacttgcagtggatgaggtacaggtgaaagataacctcacctacagagcacaacc

SEQ ID NO: 30880 - DNA, 443 bp, Glycine max
  unsure (1)..(443): unsure at all n locations
catatggaggcttatntgcatactntgtatccaanaaacaaatacttaatatgaagttagccattacctgtggtagaacaaggagtaacagaaaaatcatagcaacaacattcttcaagtaatcagtataatcactgaaacctcgtctagagctttctctctatataatgtgttgtcgctagtattccataccgccgcaatattatcatcatgagtgatgatacctctagaaaacagccatgtgagatatggatcgttgggagtagttattagagacccctacatattatcctatatgtccccaaataaggggcatggagcaaacacgctctgtgccatttgttctcatgcattcttctgcgaatagcacataaattatagttatgctgtatagctagtgatatattgtctctttagagtaatgcgtcacttgttaatgcata

SEQ ID NO: 30881 - DNA, 463 bp, Glycine max
  unsure (1)..(463): unsure at all n locations
tctcacagtcacctgcggcatgcaagcttgtaaacaagaatttcatcaacgagtcaagattatgaaaaagcctgacgagtaaatctttgtttagaagtacaaatgtgggatgagtttaccagtgttagctatgttatgactctaaataattaagttttgttagtttattgtacttttttggttcatttattgtaataaaaaatctaaattactttaaattagatcggcttgaattaaataataactaattagataataaaatataaaatccaatcaataacataagacttgaataatttttattgtctaataacgataataagatttcaacttaagatttatttaaattcctcactatattaagtcattaagtcgactctattgaatgtaaagacttanacaatntgcatgaagtcataattaatacaaatctacatatataaatgaataaaattagattgga

SEQ ID NO: 30882 - DNA, 464 bp, Glycine max
  unsure (1)..(464): unsure at all n locations
agacaaatatcacaagattgtggttgaattatgattttagaaatngcaaaactttctgttcaacaacaaagttatcgtttgaagtataagtttagcaaaacaaataatagattttcgtaagaaagatntagacgatagaaatggaatttgcaaaacaaaataagtttttcaaaaaatataatcaaattcaaaccccaggtcagtttaaaacaagagatcaacanaaagatataagacattgatatttatactgatttgtctntatcactaagactatgtctagcttttggttaaccatcaagttccatgaactttaacaagttataagtattttgtcactgtcacttctggctcttacctcttaaactctatgctaagcttgacacaacccagtattctttatcctataaagctattgttggctctaaacaaatcaaaanacttatatgttgtttgacactaac

SEQ ID NO: 30883 - DNA, 425 bp, Glycine max
  unsure (1)..(425): unsure at all n locations
gctgaagattatggagtacccatcacatgtggtactatgtggctgtctggcgacggtgcaaaacaattctccacatccacaaatcacatataaacccaccatcccctgttgcccactttcaactgagctcacgtactcccacgtagcccttattctcgtttctttcaacactgggtccccatcaatgctcccgagcttccacaacattcaagtcattacacatccaatcatcatgaactaacagaaccaagcaaaataggcaaaggcagaaaactctgcccacaacacaaaccaatatcacagatgttcacatacaaataccccagtaacattctcttcgttccaattcgntaacccgtggatcgactcgaaaactttactggaagtctctagcacataaatctacattatgagcgctgggatct

SEQ ID NO: 30884 - DNA, 480 bp, Glycine max
  unsure (1)..(480): unsure at all n locations
cgtcactatacaatactctagcttccttaagaagattcctaaagaagctagagcttagctacacatacctctctaatagctaagctctcctccttgagatgagaagctagaacttagctacacaccccctataatagctaagctcacccccatgacaaanaacatgaaaataccaaaaaaagtccttactacaaagactactcaaaatgccttgaaatacaaggctaaaaccctatactactagaatggccaaaatacaaggcccacacgaaggagaaacctattctaatatttacaaagataagcgggcttatacttagcccatgggctcaaaatctaccctaaggctcatgagaaccctacggccttcccttgaatctctagcccaatctacttggagtcttctacccaatgcccttgcgggataggagtgcatcactaagtgtcacacanaattggatggaaatntgatntctattc

SEQ ID NO: 30885 - DNA, 448 bp, Glycine max
  unsure (1)..(448): unsure at all n locations
cccttgtcattagaaacaagctgatattaatcacattcacaagcaagatatcctaactacatgcaagagataagaatganaagtagaaaagggaaagagaagcttgggtgcctcccagtaagccctcttttaacgtcactaacttgacaagtcaggtgccttcaaggtggcatgaaggtcacaaagaacacatcctccttacagntncaccttttagctaggaattccatgaacttcatgtantttggaagtgcatgcaaactcattgcaaaagagaggttggtgatcccagagagaaaaacacttaattctctcttttgctctccttgcctttgcttcttgacaatcaattgatggagtagctctttgccacatcaatttcttgattgttcattacattttgattttcattagagctagcattatatgccatgaattcttcaacaca

SEQ ID NO: 30886 - DNA, 484 bp, Glycine max
  unsure (1)..(484): unsure at all n locations
ctcatttatttcanaaagaatgtcgtatctagtcaaggtctgagagaccatacaagtttcctagcgatntctaattatgtgggccattaagtctatcatatgctgacaatagcctagaagcccatgaatttcttcgggggcggagtaggtgtccgccatcgacttggccttggctaacaatcggngaagttcttgactcccgttcaaggtaagagcaaaccgatccatccacatggttgcctcttggtgtaagagtcaatcacccttcctctagcctctntttccgcgtatacttgggcatactcgtccacgatcctatgctcgtgggccgtggctagacctaactcttcttggtacttggcgatgatagctagcatgtnggtctncgtctcgcataaacgctgagacaagcttcttttgtaccttgacangcaactatactctctttcaaaaccatgctatgtgctcgcgattggtccttctc

SEQ ID NO: 30887 - DNA, 426 bp, Glycine max
  unsure (1)..(426): unsure at all n locations
ctacgtaatgcggaataagtaaaatactcggtggattaacaacaaattattgctgtgtgtttgaaattattaagatgtaacaatgtgatgaggaaactaaactcaacaaactttttgcttgtagggtctacctattatgcaaactttaaccctcaagtctcgaccatgaaataaacagtatatgtgacagaaaggttgggatggcttggatgcaaaaggtacccaaatccaaagaccaagctggcaacctatatggacacacgctgacaagcccaggactcttttttattccatatacatccganattgttnttttttttctctctctttgggtactaatgtattntgatgtgcatgttcagcatcaattaaataccagcttttagttggaggtccaattgtaaatntgcatttacgtcttggata

SEQ ID NO: 30888 - DNA, 240 bp, Glycine max
ggacctacattctatattggagtgggttaccactactggtaaccccatatgactatttataacgaggctattttattacttgcgtgggttgccatattaatagggccaattatactcaccacttatgttgtaatcattatatggactcgactgtagagtatacattacactctaaatgcctatagagcgatggtggcccatagatcatagactatgtcaatactattttatattcttact

SEQ ID NO: 30889 - DNA, 413 bp, Glycine max
  unsure (1)..(413): unsure at all n locations
agcttatccgacatcccatcagcagggatttcatagataaatattgcatgcctaggaaggtgtaggggtaggcactgcancagctagaggaggaccagcagtagccaaccgcagcagcaccgcccccctctacaggaaacactatccctggggtccatcttcactcacctatggaggttagagctctagatgcacaggtacatgcaacatgtgactagccagtaagcaactaatcataggggtcaggtgcagctaaatgagaccttctatcggtacactacgcaccaacacagtcaggacaccagtcctttccgtggcctacccccaagtagttcggagccacagttgcttggccttgagatacgctcaattntgagacaggggcangaccaacaggagccccctgggatgac

SEQ ID NO: 30890 - DNA, 482 bp, Glycine max
  unsure (1)..(482): unsure at all n locations
ntataaaacctacagagagatntcaaatatctctcataagatcatagtttactcgagagaatccttcaggatcaagtagatgtttcactggatgagtccactcagacatacgaagcttgcataactcttaaagaaaaagagtccaagctatgtcttgagattaagacaagtgccggagaaaaagctacccttcttaagaacttttaggagtgggaaaacaaactgaaagaccttcaaaaggagcttaatgaagttcataatcatcaaaaagaagaaagatatgatctttggagagtgtgcacaagcacacaaagattatgaagacctcataatgacttaacataatctttgggtggaatgtgaagatcacaagaaatctatgagtttcttgacaatgagcttatgaagaaataggaatttaggggtcacctccaaatgtatcanacttcatgaggaaatangaaccttanagaatacattat

SEQ ID NO: 30891 - DNA, 624 bp, Glycine max
  unsure (1)..(624): unsure at all n locations
ctactctcccgcaccncnanagtattacatcatatatnggtgntnnntatanannnnnannnnnnnnnnnnnnnaacttgacccctttgagccttgagagcaccgcgacaccgcagagangcacaccaggcaacaacatatgatcaacnagtgaagacttgtataaattctgacgagataatccttgatgagaagaacagatgtgggaagagcttaccagagaccgctaggctatgactctatacaaccaaagtttgttagtccaccgcactgtcgctggttcatttatcgtaataataaatctaaattactataaattagatcgggtcgagaacaaaaatactaattataatataagagactgcactccaatccataacatatgacctgaatgaattctattgtctaataacgatgatacgatgtcaagcatacgatggagtacacatcctcactatattaagtcattaagccgactctcttgaaagtaaagactcacacaatcggcatgaagncataagcaatgcgaatctacatatataaatgataagcacagagtgacgacctttttcttcatcgatacactaggacccttcataagtgcgtaagtaactagaaaaaacg

SEQ ID NO: 30892 - DNA, 448 bp, Glycine max
  unsure (1)..(448): unsure at all n locations
agcttcttttggaccttgaacaagcaatcaactcctctttcagaaccatgctatgtgctcgcgactggtccctttcttcccttcgcaacttgagttcattattgctaccccatagagctccgcgaaatttgttccggccatactcttccttgtgagccctcttggtctcttgttcaagggctcttgcggtaattgcattctcttcccgtaacccggcacacttctttcgaacgtgtgtagcagccaacttgaacttctccttggcgagttttgcctttcctaactcgctnttgagagctnggacttcttcgtcctcttccggtgcttcaaaattctcttcgctgacgacttttaacttggcgagccaatctaaacctcgtatgcgaactttcagccattcgtggtacccaccaatgatgccattacgaatgcctctaagctcttgatc

SEQ ID NO: 30893 - DNA, 414 bp, Glycine max
  unsure (1)..(414): unsure at all n locations
ctgagggtgcgtagcccaccatcttnttatagtagagtatcgataatgtgtctaccatcacgattatcgtctccctttccatcattgggggtaccacttgggccgccagatccctccaccttttatgcgtgttctttgaaagatccgtccccctttttgcaaatgttctatagttgcatcctatccggaaccatatcaaaattgtactgatactgcctaacaaaggcaaccattatgtccttccaagaatggactcgggaagattccaagttagtgtaccaggtaacagctaccccagtaagactttcttggaaggaatgtattagcaattcctcatcttttgcgtattcccncatcttctgacaatacatctntagatggttcttgggacaagtagtccccttgtacttgtca

SEQ ID NO: 30894 - DNA, 388 bp, Glycine max
  unsure (1)..(388): unsure at all n locations
acagagtttagactactctagagttctccaggacgttctagattattntacacttttccaaaaagctccagaagtttctagaacctctccaattaaggaaggatcccaacaaaagatggatgatggctcttaatggaaactattgcgtattaacacagtgatcaagcaaaaagaaaacagaaggatagaaataaacaaaaagtgtgaatattaatgaggtgacctaaatattgtgatgtccaaatatcaatgctctttccgcatcaacttatgaaaagctggatgaataatgagtattttcttgaagcaacaagctaactagccatatatataggccttatatgacccctgataatgaatatccgagagtgtggcaatcaacatgggt

SEQ ID NO: 30895 - DNA, 316 bp, Glycine max
  unsure (1)..(316): unsure at all n locations
agcttctagacaatggttttgtanactctcaacaactttatttgctaatgggttctctcaatcaaagaatgactattctctctttaccattgacaaaggtgcttccctcggtgttctggtggtctatgtagatgacattttgcttgctggccccagtgctacatgtgttcattctattcaagccaagcttcaagctttgttcatactaaagatcctttggtccttacaatattgtctgggcctagaaattgaaagtctatatagggcgttgtcttgactcagtgaaaatatgccctttctctgttagaggatactg

SEQ ID NO: 30896 - DNA, 477 bp, Glycine max
  unsure (1)..(477): unsure at all n locations
tggttgngtgaatgaaatggctatgaagtggaacggaatagacactatcaaaaggaaccactaaatccatctttnggatgcattatatagaaagccaaatggaatgaagtgttccctataacatttgtggaaagagttacataaaaatttatgaatttccaaatgacaaccaaccataatatagaaataaagttgtatactaataaccaattcatttagtttattgcctcatgcacacacaaacctgtctaaggtggtttgaagtaacaccttaaagagacttcttggcaatgaatacaagaagatcagtgacacgttagctgtagaaccgaggacaaagaaggtattagaaccaactgaattaataataataaagcatctaanaatcgtgtgattagaattttggccaaattaacaacttattgacacactaacccactatcacatacaagaaaatgttaaaggtgcatttacctg

SEQ ID NO: 30897 - DNA, 450 bp, Glycine max
  unsure (1)..(450): unsure at all n locations
ttttaacaacantaataaatgtataatgactcttttagatacaaatatggaagtcaatgttcattaatcactgccaatcaagcactntatatacacgaggtacacagagaatttcttgtgtgtgcctattattctctaccatggttaaaataaaccttagtatgccaatatttgaatctattttcacatacttacacctgtggtattcaagctacctgacgtccttgtgtgagctccccattacataacagtcaacaagcgcgccgttggctgctattttagcaagaacatgacgatatcaggatcttctggttagcatatacgaatagttgaaaagctttctaatactacaattgcatctcaattgagctgaaatgtatccacaaccactttcttagtattcaagctcacacccctttagatttaagtacggattcatgttatggataa

SEQ ID NO: 30898 - DNA, 480 bp, Glycine max
  unsure (1)..(480): unsure at all n locations
ttatgtgaaaggatgtgactcttcacatatgaatatgaatttcaattttcaaaggtactggtaatcgattaccaaaacattgtaatcgattacagcattttgaaattaattggaatgttgtaaattcaatttgaaaactttctcaaaacaattttgctactggtaatcgattacagaaatctggtaatcgataaccagagagtaaaaactctttggtaaacatgttttgagaaaaatcatgtgctactcaatttttgagaaaaacttttcatacttatcttgattaagccttctcttgattctcgattcttgaatcttgagtcttgaattcttcttgattctatcttgaactcttgaattgttcttgattcacttgagttgttctntgattaatctttgaatcagatgagtcgttctttgattgatctttgagctctatgtcatcacctttgtatcatcttttgtatcatcattggtatc

SEQ ID NO: 30899 - DNA, 532 bp, Glycine max
  unsure (1)..(532): unsure at all n locations
gtgacccatttgagccgttgatacccctctcgtacccggngatcctctacactcacctcgaagcatgcaagcttatctatatgtgtctgtgagaaccttctatgtctatgaacctataaccaacatacttgagtaccttagacgagaggaacagacgattatatgtgtctattgcctaacatgctgcccttatccaaaaacatgtggatgcatcttggggagtctagatggcactgtaagtggactaggatatactaacatgattggatgtgagctgtctcgtactccattaataatataaataacaaagtactcctatatttctttctctttttaactccgataattcgatttgtacgcaatttgttttctctagacagaatcttttaacaagatagtgactgattatacatcagaaaagcacatcgatgggcctctgcatagtgatagtctttataagtacttttctaagagactgaaaggtgataggcttctataagaaacctaacaaatatgcctgcaccatgagtcg

SEQ ID NO: 30900 - DNA, 487 bp, Glycine max
  unsure (1)..(487): unsure at all n locations
tatagcagatgatgtttcatagtgggttgtgcatattgtgtagatattacttctgagatgtnggcttccgccattaaattatccggacaggatctcacaataagcaaagttatctatactggaaaggaagtagagtggaaaagcccaatatatagttcgcagaagaggtagcctttcatctctagttaatactcaattcctctcgtgacaaattatctggtaaattatttacaacatttattgggcatgtctcgatgtcaaaccttactatggtagcctctaatgcagtgaaaacaaaacatctcagttcaaagccatccaatccattgttcctgcaagaatattcttggcattgaaaggtggtgcattcaatgaatatctatcttcattacgcgaaattacgaggtcagaagctttccgcatttcacaagaagttgaaaagaatataagaggaaggtagtgcatgttgatcaattctgtattaagc

SEQ ID NO: 30901 - DNA, 364 bp, Glycine max
  unsure (1)..(364): unsure at all n locations
ttcgatacctcatgttttctcaccatgtaaaatgggtcattntaaggtccaacgccttaaaaggacctccttccaagtaaaaagaatcgcttacttcgccctttagaaagaactacataggtctgatttcctctttgatggagggtacgtaggagcaagagccctgcttttgttgacctctaaaatataatagaaataaaagtttacgtacacaatctcacacaattctaaattaaggctgtttgtctttgggataaacgtcagagatgcttatacctaactcaaacgtaaatacaactcccgaatctggaataatcttcatgacctgtttcctttggtttttccgacgttctcaacaaataaa

SEQ ID NO: 30902 - DNA, 362 bp, Glycine max
atcccgacccaacccgggcatagtcggtcagtgagaacctgtgatgtacctaagcaggctatctcctggctgtcaacagagtaaaggaacaaacaccacaaagcaaggaggcttgtggtggctggccagctgtgaattatgtgtgatatgtggattatggcctctggtaatcgattaccaagggtgggtaatcgattacaaggcttaaaaatgaagacaggaggctgagatggtctctggtaatcgattaccaagggggtgtgatcgattaccatgcttgaaaacgaatttaggaaattaaaggagcctttggtaatcgattaccagcctgtgtaatcgagtacacagagggattggtcact

SEQ ID NO: 30903 - DNA, 408 bp, Glycine max
  unsure (1)..(408): unsure at all n locations
gttagcatggatggagcaccttacctccgcaaagatgactcgaagatgtacaagagttttcctgagctctctgatgccttgggcaaaatgtttagctccttcaccattggtaactataattaatccataatttaccatacattaactnttttttatatagaatttaatgactgatcataacttttacgtatcagtatctagtttgttttctctttaatataactaccaaaagatatggatcttaaatttgattntgtagaaagttaactaatggtgtatgtgaatataaaattgaatcgtgcagctgattcgatggtattaattattggtgtgttcttgatatatttaaggaaattgtgaatcccaaggcttcaaggagttcatgaatgagagcaagttgatggatct

SEQ ID NO: 30904 - DNA, 460 bp, Glycine max
actggatgcattggttaactgggtaacccagctggccttgaatcagaaatatgtacctgttgcaagggtttgtggtttgtgctcctctgctgaccaccatacagacctttgcccttccatgcagcaacctggagcaatcgagcagcctgaagcttatgctgtgttagtgcttagctttactgagttttaaaagattgtgctaaaatttgttaaaacataagcacttatacaatgaaggaaagctggagttgctgcacatgatgtccaacgttatgtcaaggaatcagattgtgctccacaatgcacaaggcaagataaaaggtcaaatgaagaattgaagctgcaggatccacgatgtcggatacaatgtccaggacatcctgcccgaaaatactggacacataaatctgttatatctttaacagattaatgtgcagttagcaacagatttggcgatcta

SEQ ID NO: 30905 - DNA, 293 bp, Glycine max
  unsure (1)..(293): unsure at all n locations
ctcgtataagtgaaagattggcattaccttatttaatattgcaagttaatatataacttatttgtttctatttttgtgctcacaccattccttgcttggtgtagcgtgcaagcaagaaagataaagatctccctactcaagctgaaatgatcattgaaactccacaaagtatgaatggtaaaaagccggtggatgtagaaacaaatgatgcaattgtaagtcttattctattgactntatcaaattcaatttatgatgcaataagtgaaagactggtacttcttttttaatat

SEQ ID NO: 30906 - DNA, 424 bp, Glycine max
actccagatggctgcatagaaggatagagatctgtatggtgatctgcatattaccacagactcttgcaacaggtgtagatttctgattcatggcaagctgagttactaggttgaccaaggcatcaagttttccttcaagctttttattttcagtagatgaagatgaatccatggccacctcatggactcctctaagaacaatagcatcatttattggcactgaattgtgggagttgaaagtcatcttctcaatcaaattcctagcttcagcaggggtcatatcaccaagagctccatcactggcagcatcaatcatattcctctccatgttgctaagtccctcatagaaatattgaagaaggagttgctcagaaatatgatggtgaggatatctcgcacacaatttcttgaatccttcatatga

SEQ ID NO: 30907 - DNA, 339 bp, Glycine max
  unsure (1)..(339): unsure at all n locations
agcttatcanataacattatataatanatattgttcagtcatattgcatacataattgatataaaacctatcgaatcanaggtcaaacgcacgatcacggaccaatatgatttccttgagggtagtgtttttggagagaaagctgagtgttttggtcttttcctctttgttcatgtggggtgggatatcgccagctgagaatgattttgagtggcaatctgaaaggaagaaccacacaaaaaatgggttttccttcgccggcagtcacctaccttgccgaaaatttatctggcctgaagaatttctgttctctttctttcatgaatcgagaattattct

SEQ ID NO: 30908 - DNA, 321 bp, Glycine max
  unsure (1)..(321): unsure at all n locations
nggatattcagcctgacgagggatcgagggtttagtaatttagggttcaacatataacacaagaccacaattgattagaaaaatatatntctatgcatcagcttgttcgttagaaagacccaacatatctacctactgttgttattntatttaccttgcattctatagttnttagcatacaagtttattttaaattctggttgaaattatcacttatacatgttctctaaaaaatgcttagattatgaacttaattaaggctaacattagttccctgtgtttgatactcagattcatccatcttaattttaaatacttgac

SEQ ID NO: 30909 - DNA, 386 bp, Glycine max
  unsure (1)..(386): unsure at all n locations
gcttccactccagttcccattcgagtacctatcgtatgtgattttcanacgttanaaaccaaaatacacaatacccttaagctaaccgacaagcaattgttggatgatatgtactaccggcagcctttcacgtatgcaggtaatcaatttctgtttctatgtatgcaactgaaagatgatgctgatgttaacacaatgttaatctgaaatcatgaattctcgtttgtgggtctgattgagttattatgtagcattgctagaaccccaaatggtatattaaacttacttgaagctactatgacccctactcatgatgccctgctatattacaatgggaggtggaacatgtcatgccaaaatgagtctgttggttacttgttcacagg

SEQ ID NO: 30910 - DNA, 470 bp, Glycine max
  unsure (1)..(470): unsure at all n locations
tgtagtcattacttgttgagaaccatattctcaaagtcgattggtccttgttattatgaagaattcatattgcatccttgagatgagtagtcattagagtctccatgtatcaactgatgagtccagtagcatatagaatgtctagtcttgtgcacatcaaatcgtaaactacccaccaaactcttgaactttgtagcatccacctttcctgcttcgtcgaactttgataacttaatattgcactcaatcggtgttccaattggcttgcaagtatccatcttgaatttattgagcatctggtgtgtgacatagccctctcacacttangagatggcaaagtgtctttgtgagtggtcgatgttgatggtgtgagctctagctgaacatgttgaggtgtcttatcttcttcaagtggagaaaaaagtgtattcctctcatgagctcaagtcccatgtcctctcgtcaacaca

SEQ ID NO: 30911 - DNA, 469 bp, Glycine max
  unsure (1)..(469): unsure at all n locations
agcttaataagtccatctatggatngaaacaagcctttcgtcagtggtatttaaaatttcatgaggtcatttcttcatttagctttgaagagaatgtcatggatcactgtatataccagaaggtcagtgggagtaagatatgtttccttgtattatacgtagataatattctgcttgcgactaatgataagggtatgctatatgaggtgaaacaatttctctaaaagaactttgatatgaaggatatgggagaggcatcttatgtcataggcataatgatccataaaaaaagatctcgaggcattttaggcttgtctcaagacacctatatcaacaaatctttagagagatttaatatgaaagaatgttcaccaagtgtagctcccatcgtgaagggtgacatacttgctctgagtcatgccccaaaatgatntgagcggaacacatganaatattatatgcttacagt

SEQ ID NO: 30912 - DNA, 276 bp, Glycine max
  unsure (1)..(276): unsure at all n locations
tgacagggggtctctatcggagaccaaactcctatgaatcccatggagtttgactacgatgttgacgaataaggaaacangcatgtgtgccatatgtgcagttggaaggatgcccaagtgaattcccttggaaaaatgatcaacagccaccagaatggtaatgttgccttgatatggcggaagctcgacgatgaagtctaatgacaagtcctcccacngacggcaaggcaccgacaagggacataacaaccaccgcatcttctgagcctcatactt

SEQ ID NO: 30913 - DNA, 331 bp, Glycine max
  unsure (1)..(331): unsure at all n locations
agcttgcctctaagaagtccatgattgacattgcggtcgaaagaactanttctgctcctgagtatgacagtcaccgctttacgagcgctgtacaccatcaacgcttctatgccatcaagggatggtcatttcttcgggagcgacgcgtccagctcatggatgacgagtatactgatctccaggaggagatatgtcgccggtggtgggctatcactggtcacccccatcggcctaattcaatccaaaagaattccttgagtttcatgcccatgcttggccaacataagagggcgtgcgtgacatgacgtcctgggtgacgggtccgcggatc

SEQ ID NO: 30914 - DNA, 513 bp, Glycine max
  unsure (1)..(513): unsure at all n locations
catgtcgaccaccttattaaatgaaaatatatgtttatannnnnnnnnnaaaanaaatgacctctgagccattgaacccgtgaacctcagcacctgcagctgcaactaataccaaatcacatcacttgtacaagtttcttgttaaaacctaacaacaagacttcaattatttataaatgcgattactaccaatatcaaacgacatccagaacaaccctaaatgacgcatctattaaatgaaattgaccaatacacacatttaaactacttaatttgaaaacataaaaaaataactaatctacttgtgcaatgcttggaactgatcaaacctacaatatgaacattatttttacgaaaaaatttaaaaaaggactctcagatgcctatagaacataaaattcagcactgtgagaatcctataactgaattatatttggaaaatatcacaaatacataacattgtttaatcttatctataaaggagtaccttacaactccccattaagaattaag

SEQ ID NO: 30915 - DNA, 240 bp, Glycine max
  unsure (1)..(240): unsure at all n locations
ntacaagtgattcaaatgaaatngaaggtatctnngtttaaaaagatattctcataagctctttcatgttatgcataatgatgaacacttcacttgtcagaatacggtgacccattaattgattatagtatatctgaaccatacgttttccaatattttttcttcaaatccgaataccacaacgaaaagaacagacgacatatgatacataaaccatgatgggtccatacgttcaatgga

SEQ ID NO: 30916 - DNA, 288 bp, Glycine max
ctgcagctatagaaggatgtaggggaatggctcctgttgtgattaaattggccaactttcttcttcttctgcactcggcgtttggccgcatggtttgtgggtagataacaactaatcaagctatattgctaaatataatcaacttttaactaaagcttataacgaaagggaaaatggattctatcttcagatttggtacatattcttctgcttaattgcctctgcacttatggttctcgtcatatgagttggtgtgaagttggtatctgctactaaataaaatctata

SEQ ID NO: 30917 - DNA, 428 bp, Glycine max
  unsure (1)..(428): unsure at all n locations
ctctcgaatattagttgtattctctggtntctgctaaccattatatctcgtatcaattatatttaatcgtgtagaattagacatagataatgtaattagaagtaaatttaactggtttggtatctgtacttatgcacataatgaaagtctcaaattatattcaaatggttaccaatagagagcaagtatactgtctaaatcaaagaaaaatgctcttcanaaacatcgattgccatcattaccttaattctgttgcaaaatatcacctctcttatctttgtcttcctcatgttattaatagagagttntaacaaatatccttacaatccatctttaaaagaatataaacggaaatatcattctttttaagatgcataatttttattataatcattttaccaccatatttgtcatttaagtgaaatatc

SEQ ID NO: 30918 - DNA, 469 bp, Glycine max
  unsure (1)..(469): unsure at all n locations
acaacagaatatcnactttatagcatacagcttgccgagtcatttatacctcatactcctcacccattttatcgagtaatgtggcactctgcaaccagtattccatttgcctgttagtctctaaccgccacccataaaacactctgtcatacgaaccgcggtgagctcattatacttatgtagtgttaaaaatgctggttcacctctaatgaccctatgtgtaaaagctttgctcgagtaagatcccttaaatcggtgaaagaagcttatgcgataccagaacgttgtttaagaggactggtataaatgaggcaatactacaacgataattgtacacacgtctaacgaagatgcctctctgacgccaggtgttanacacagcgtgagtactcctctctcctagtctttgcaaggctgatcgaaaacttcgtcatattctgagggatagatacggctcgtcgctaccccg

SEQ ID NO: 30919 - DNA, 202 bp, Glycine max
tctatacaatgcatatggagactgagagctacgttcatctacatccttctaacattgaggtggtgctgtagagtatgaagcatggactctaccccttgtggggaacgattaggggatatgaacagcaccgagcttagtcttccacgactataggaaattaactatttgtgtatgcgcattcagaacgatcgtatgagctaaa

SEQ ID NO: 30920 - DNA, 244 bp, Glycine max
tctaataaaatcacaactctgtagtatatactatatagtggtatagattaattgtactggagcatggtacttgaatgttcattataatttcgcgcaataattattggatcgcgtaataaattatgaaaatgctattttgatgagttaagagagcaagaataaagtaaagatcgagaggaaatattaaaaatagtatgttgagtatcatactcataaatcatatcaccatgttgtataggagtta

SEQ ID NO: 30921 - DNA, 445 bp, Glycine max
  unsure (1)..(445): unsure at all n locations
agcttgtactagtcatatatatgttacaaaacaacgaaagcaaaaaattgaatcgattattgcagatacagaaatacttaaacaaacctggcaattaggggtttttgcggcttttgcaaattccgcccatgtttctggatcaaggccatacttgactgtaggatcagatatttgctgaccttcattgtcagcaaagacaaattttgaagtcaatgaagacttaaattgcctccatcttgctgcaactgttgacatcacctttttttttgcattttcaccttcagggatatcaaatttgggctgcacaacaaaaggagttatgtaacagtatgtaaatgaatcctntaaaagtaacttaacaacaaaatcatgaatacaagtgtatttagaattacttaccaaaatatctttccatattaagctctttagatcgtcggggacaaca

SEQ ID NO: 30922 - DNA, 448 bp, Glycine max
  unsure (1)..(448): unsure at all n locations
agcttcatgcttaactatgtatggaaaaacttcattactgttgttcaagacatacaagtgagcttgtaacaaatcttctacacttggagtgatcgcatgcagtcctcttgaacccttaccacccactctgtcatcatgccgagactcaggaagcccaacaggtttagccttctctaagtattctgaacaaaattcaatggcttcttctgcaatgtacctctcaacaataaatgcttctggacgatatagattctttgtatacccttttaagatcttcatgtatcgctcaaccgggtacatccaccgtagataaacaggaccacaacatntgatttctctgaccagatgcacaatcaagtgaatcatgatgtcaaagaaagcanggggaaaatacatctgcaactggcacagtataattgcggcctcattttccaactcatcaaacatg

SEQ ID NO: 30923 - DNA, 277 bp, Glycine max
gaaaattaaaccaatttccattatttccaccttatattgggtcctgtggaccatccaatatagaaaatcctatcttttataaatgtatgatgaagggtttagaaaagttattttactcatctcttgaaataagtaatttgactttttcattatatttattcttttctatcaattgtatcaacataatttctcatttttcttcatttttgctaatccttgagtaacttactggtactaagagaaaccatttttttatgattattggaggaaaaaaact

SEQ ID NO: 30924 - DNA, 450 bp, Glycine max
  unsure (1)..(450): unsure at all n locations
agctntgtggctgatttagggatgacctttgtggatgactgagtggtgggtaatgagaaaggctgatattggttgagtaatgacactgttgagttgctaggaaatttggacatgtagaaacgacagtcacaacatgggttccttcctccttatcatcctctctatttgccctaggctttttatttgtcaaagcaggatgatcaaatttgcctcttttctgacccacttcgatccttttgccaacgaaaactaaacctacaaagcttgaaggtgtgtaacccactaccttctcatagtagaacactggtaaggtgtctactatcattgttatcatctctttctccatcattgngggcaccacttgagctgccaaatccctccaccttttggcgtatcctttgaaggatttgtgctctttnttacacatgttctgtagctacattctattca

SEQ ID NO: 30925 - DNA, 360 bp, Glycine max
tagctacacacccatataattgctaagctcaccccctgccaaaatacatgaaaatataaaaaaagtacctactacaaagactacttaaaatgccctgaaatacaaggctaaaatcctatactactagaatggccaaaatacaaggcccaaaagaaggaaaaacctattctaatgtttacaaagaaaagtggacccaaccttggcccatgggctcagaaatctatcctgaggttcatgaaaaccccagggccttctttagcaactctagcccaatcctcctggagtcttctatccaatacccttggggggtaggattgcatcatcccctccaccttggaaaggattttacctcaaatcccg

SEQ ID NO: 30926 - DNA, 445 bp, Glycine max
  unsure (1)..(445): unsure at all n locations
agcttgtgcattcaatatcctgattagggtgttccatatgttctcaagactggactaatacatttgctacccaatgaagccccctaatgtctaagaagatcatatcttaaggagttccatattgtttgttccaccatgaagccccctaatgtctaagaagatcatatctttctaaaggcttttcctcattctctggagggagtggcaaaagattggctatactaccttgctcccaggtccattttcagctgggatgaccttaagagggtgttcttggagaaattcttccctgcatctaggaccactgccatcagaaaagacatttcaggcattaggcaacttagtggagagagcttgtatgaatattgngaaagattcaagaaattgtgtgcaagctgtcctcaccaccagatttctaagcaacttcttcttcaatatttctatg

SEQ ID NO: 30927 - DNA, 357 bp, Glycine max
ttccacttttaaaatccttaactgttgagctgcaatttcttaattattaacatggcaataccattttgaactaaatggataatgctctcatgagaatggttttatttatttttttggtttactttataatgatttttaactaattaccagctcatttatgcaaacatgagttggttgtttcccacttttcgttcctatttattgtctttggttcgtcatctaactcgattacctatatttagtatcattttttttctattttaattgaacttttgtatgaggatgaagattcattcctaatttcctaggcgtgaacttggactgtgcactgcagagactgaattatttgcttctgca

SEQ ID NO: 30928 - DNA, 466 bp, Glycine max
acctgcggcatgcaagcttcggtagagaacttcattgttgatggaagaggatggaaatctgttgataagataaacacttgaagtgaaggcatggtcccaataatgagaaggcatgttagcttgagagagtaaggtaagaccaagctccactatatttgaatatttgaactgtttaaaaatctccaatgtttctgatttactttttagtatacctagcagattggcttatttcattcattgtgtggaatgaaaacaggggattcaagcttgaatgctattagagtaggtattgtcagatcggagagagtgagagaatgagaggagagagaaacagagggttggagagagtgagaggtagaggtaaggatttcgagagagacaaagtgaaactgagagagaggcaccaatacacacaaaccagactcagggataggactcagctacactacaaccaaacaaactggag

SEQ ID NO: 30929 - DNA, 367 bp, Glycine max
ttcactttagatgtcacacttctatcctacaaaagatatgtttagtattttaacaactatgaatggagcatgtgaattgaaattaattagagaagatggatcatgaaggacaatgtggctctttctgttcatttggcccgagagtcctttttaatgtctttcaaatcaacctcttgtttactgataacatattagcttaagactatcatggcattatgaattaaaacaattgttcttggttcttctcccatatacaacctcagcataccatgctactgcattttatttagatgatcacccagcattgaaaaattaattaggatgcaagtagttacatggaagtaattagaagcattgatatcccact

SEQ ID NO: 30930 - DNA, 406 bp, Glycine max
ctgcaagcttgaaaaagtggagttacctatgtacattgtatcaaatgagagaagcttaatgcaatcatccatactactcaacaatgaatgggtgactgcagcagtgaacctgacgtacaagtagaaatggttagtccaatttacatcatgaattgattatcataataaatacaataaaaaatgcacttaaatacttaaggtacggtcttgtatattaagcacaaaaataatgcgtaacgatataaaaaacctcaaggttatttatttcttatttgcaagtaacctcaacgttgcactgttctgatggatattaaaccccatatatctatctgtctctaaattcctgaagctgaaagcagaataacatagcctagggtggaaattatactgtcttatcaatccacac

SEQ ID NO: 30931 - DNA, 249 bp, Glycine max
ctaattcgcgagccataatgcttttgaaaaatgaaatctctgtcattaatacaactctcgccgcaatcttagattgatcgggcggttggtatcatgccattatttttcggacatagaatggattctgacgtttataatttttgggtcaatatgtatagatcgatgaaccaccttttttcctaaccaatccatttaggcttcaacacttacaaaggatatgagcttgaacgaaacattcacaactagggg

SEQ ID NO: 30932 - DNA, 550 bp, Glycine max
  unsure (1)..(550): unsure at all n locations
tcactccacacaacccgacatcnnnntatntctnntnnttgnactttaacctnctcgctantnnnannnnannnnnnaaggatttgaattgacgctgtcgacatcnananaccnacagcagcatcaagcanacgcctaactaagagggaaacatcatacttttgtttnacacacaanagagcctgtgacaaccctctacacctggagagagcgcatgcagtcctcttgaacccttaccacccactctgtcatcatgcgaagaccaacgaagctcaacaagaaaatacttctctaaataattcgaacaaaaaccaaaggctatctctgcaaggtacctcccaaccataaatgcgtccggacaacgaagaaactttgataccctcctagaaaacnaggaacgctcaaccggtaccaccaccgcataaaacacgaccccacattgaattttttgccagagcacaccagtgaaactgatgcaaaaaagcacgggaaaaacactgcaccgggcaaaaatagtggccctttttaccctcagaaagatagagaaaag

SEQ ID NO: 30933 - DNA, 445 bp, Glycine max
  unsure (1)..(445): unsure at all n locations
agctttcaaatgggtaaaaggctcacattcactttcttctacatcatattcaaacttgtccaaataaataataaagtcatctcgactcaaagaaagtcatataagtctcatacaattaatataaaacctatatcctaatgtcacatcctatcagagcgtggtgttcccgtgtcctctagcatgaggttcttcatagtcatccacctattcatctgctcccccgaacacaagttcaagatcatcacaggatccaaacacaacaacacacagggagtgagttatcacattcctagctaatagagaaacaagacaattaaatatacatattatataaatgagataccacttgcttaaacatagctcacgtaacttcaccacttcgtcattcanaattcacttttcaattatcaatcacattacacaagagtcccacacttcgatcaag

SEQ ID NO: 30934 - DNA, 358 bp, Glycine max
tataagaacaaaattgcctcaatcatatccaaatatgcatgtgaattaggaagcatcaacaagaatcaagccaaggctattgtgcacgcaatcaatggggcaaaacacaccaaatgattatgatgatggatggctcaaattctcacaaaggtaaactcatcactttcaaattgagctttcaaaactatcatgacatgtagaggagaatcaaggatttcaagtcacaaaatgtcaaaaacttttattttcaaaaaaattacccatttcttgaacatatcctatgattcaaagaaaaacatgcaaagtcgacgaaactaatcaacattaacaaattaacacaactaacaaattaacaaaa

SEQ ID NO: 30935 - DNA, 438 bp, Glycine max
  unsure (1)..(438): unsure at all n locations
agcttggatattcaacctgacgagggatcgattgtttattaatttaagctacaacatataacacaagagcatgattgattagagaaatatatttctatgcatcagcttgtntgttagaaaaacccaacatatctacctactactatcattttatttaccttgcattttatagttnttagcataaaagtttagtttaaatcctgtttgaaattatcacttatacatgttctctcaacaatgcttcgactctgaacttaattcaggctaacattagttccctatgttcgatatacggattcatccgttttaatttttaatacttgacgatccggtgcgcttttcggtaaacccccattgaaatttccttgagacataaatgctncaaaagtaactgcaatggggagcgatcacttcactgtaagcatttcatgatatgat

SEQ ID NO: 30936 - DNA, 452 bp, Glycine max
agcttctctctgaggccatcgctcattcgtttccgggtttatagtagaggaccagctttctagaatgtgcagccgatgataaagaagagaagggtctgaatttgataaccttttgtcctcttaacaacaaaagtggcgaggaaggccctgccactgtaaacgctcccaaagcacttccgaccaccatgcttctccacacaagtacaacaatcctcacactgacttttctatcaccttaaacccaagctgttcaatgggctgggatttgctcatttcccaagcccaataaattttcttgtgggcttcttagttagaatgtcaaccctgaaatgggtcacttggttaatcctagaagatcctctttaacttgacttgtattaattatgttttgacatgactctcgtagttgtattaaatttgtcaaaattactgtactcgtgaagtcatcatcc

SEQ ID NO: 30937 - DNA, 357 bp, Glycine max
tgcacagcatgctgatactgatcatgcatatttgtttgatgatgaccgaggaacaatttgggatcaacttgaaacttatgtgcttcaagagagaagaaaagctgcttattccactcgtgaagatgatcaaaggctggctatgaagatggttcaaactgagaaacatttggtattaccattggtttataaacttattgagctaactttgatattgccggtgtcgacagcatccgttgaaagagctttttcagcaatgaaaattatcaagtctaaattgcgcaataagatcaacgatgtgtggttcaatgacttgatgggatgttacaccgagcgggagatattcaagacacttgatga

SEQ ID NO: 30938 - DNA, 314 bp, Glycine max
  unsure (1)..(314): unsure at all n locations
gtcacctgcagctgcagctgcttggtagattcgtggtatcatttctatgatccatttcttgtccacagttgctttactgtgggaatgtccatattatgtctcatttagtaagcacgacaaaaaaccttttcctaaattatcgttntgatgtaagcaatatagaacttgggataattttgaagttaatgactatattatatataaatatagcgatgaatattcacagatgtgatggcatttgcaggaaattgcaatgcttagtcagttgcggcatccaaatattggtcagtattatggatctgagacgggattta

SEQ ID NO: 30939 - DNA, 369 bp, Glycine max
taccggatatgaatggtgctaagcaaaagcaaatccaatttaaaccgcaagaatatccgcttagccagcagattacacgctcagccctatggccctcaattctgaccgcaatgaattgcgcttggtgacattgggtctcgcttagccaaggtgaagccatcgctcaacgatcagtctgtcgcttagcggaattcaactcgaattgattttggcttagccaaaccttggctagcttagcggaaataatcaacctcaggtgccagggtggtgcgctaagcgcttgaactcgtggcttagcgcatgagtgatttatgcgcttagcgagaagcaggaacttagcgaaaggactaattttcaaaaagatttttt

SEQ ID NO: 30940 - DNA, 423 bp, Glycine max
  unsure (1)..(423): unsure at all n locations
agcttccatcaagtggtaatcagagcacaagagcttcaagtaggtgctccttaaacctccattaattntntgctttaccttctcttccattgntgtttcttcattttttctccatgtatttcctcacatgtcttgtgccaaatgttgttaacatgattctttagattttccaccaattaaacttgctatagaagctagatttgattttctatggttcaaatttcttgttcttgttcttgttcttgaaccatgaattgtgttgagtttaggttcctttgagttttgtcttgatcttttttgtggctgaaacctaaaccataaaattcttacaataatattaaagtagaagagaacctcaaaaatctagagtgatttgttcacctattgtaagtttgtcatagaagtcatgtctagtcatgaaac

SEQ ID NO: 30941 - DNA, 194 bp, Glycine max
tcaagcttcaagccaagatcagactcttgtgcatgcagaggcttctaaagaaaaaatgccaaaatccctcaaaaaatctgatttcaagcttaaataggtgggttggtccgtgctcgcgcgcttagcgcaattctgaatcgcttagcgctcataagtggattttggtttagcgcgtttctctcgcttagcggatg

SEQ ID NO: 30942 - DNA, 317 bp, Glycine max
  unsure (1)..(317): unsure at all n locations
agctntctagaaatgttttcaaagttntcaaagctgtattcgattaccaaaactacgtaatcgattaccaatgctttaaaatggttaaaaatgattttgtaagtgtgtaatcgattacacatcatatgtaatcgattaccagagcttttgaacgttggacatttgaattttgaataaaaataactgtgtaatcgattatgccaatgttgtaatcgattaccaaagaggattttcgagaaaatctgcgaacagtcacaacttttcattggatttatgaatggccatcaaaggcatttaaataggggtgacttgggcac

SEQ ID NO: 30943 - DNA, 472 bp, Glycine max
  unsure (1)..(472): unsure at all n locations
ccactacacactcccttgcantattaatcgaacgatgcccgtgattactaacaagcnnaagagagnntttgaactggtgcatccatgaaaccgnaaatttnaaaatacagcatgtcagaggtgcttagccaaatctactctcgtttggagggacaggatacccggtgagacagcaaaaaacgcgcacaccccggtggccctcaattctgaccgaaaagaatcgcgctgggtgacaatgggcctcgcttagccaaagggaagccatcgctcatggaccaaaaacgaacccaaggcgaaaaggggggtaaaggatattggcaggaacaagacgtggctaggataccggcaatgatcgaccataaggacgagggtagtgcgcgtagatcttataacggtgggacaaccgatgaccgagatatggcctaaccgagagacatgaagaaaaggaagaactgctttcaaaaagaccatt

SEQ ID NO: 30944 - DNA, 415 bp, Glycine max
agcttcacaagcaatgtatctattgcaacatgtatgaatatttattatacattaagtagattataaatataaaaaattcatatgaggaataagagttaaaattgaacctctccaaattttgaatctgatgaagtacccttttttgaatccctgtgccaagtcaacatttaaacttgaatgatataaaaaagaaaaagtaaaagtcagccacattcagagttgcttttatcatactttgcatcaacgccttttatcaaggtggagaatactcggcatttcccatctgtggatgttgtagcaagaagaatctgcagtttaaagaaaaacaaaataaaaacaaagaagatgagcatagggggttttacatcaaataacaaatatatttcaaaacacaattatctaagatttgattctg

SEQ ID NO: 30945 - DNA, 289 bp, Glycine max
ttgcttctatagttcatacctatttttccgactccaagaattttacctttgttgttgtcaccataggttacatgtccgtttttcttaggagagatagttgtgaactttgaggcatctctcgtcatatgtttaaagcatctgctgtctatgtaccactttttatttgagggctcctcttggtcactttcatgattcttggtcagggagcatacgttgtcttgctctttctcattatgattaagactttgcaattctatctcaatggtttgcaagttttcaaaataaatgg

SEQ ID NO: 30946 - DNA, 451 bp, Glycine max
  unsure (1)..(451): unsure at all n locations
agctnggaacttccaataaccaagaagattatttcttgtcttcaaaccattcattatagtccttttcaataaacaaagatgaaatacccctcacttgaccttatgtagtgactaacaagctttaggacaaataaattaactgtaaaattggaatcttgctattcttatctccattccaccatcattagaagttaattagtgggacaaccgacccttctaaactaaactgaaaccatataaataattgtacaaatatgggttgccacgtaaagggaaaagaaactaattaaatataccaaaaaagaaaaagaaaaaattatgatctatgatttaaatntataatgataatgtaacagaggttttaggtttagatacactttcctngcaaactgcatgaacataaaatataattctaagccttctttgattcccctctctgttggacagtcta

SEQ ID NO: 30947 - DNA, 354 bp, Glycine max
ttagcagcactcgagacaaaaaggaacgatttgaagtaccgaggaagggcgaataggcgagagtttggcgaagggaagaaatgcgatcggttggttggtgagtgcgtttgtaaagaaatttggagttgaaggtggcggaatcatgctgcatgagttatgttaattgaagaaatgggaaggggaaatttgaacactgaaaaccctaacatgtttggattgggattgggattgggattgggaatgggagaggtgaggctaatgaggaagatgataggaagaaatatggttggcaccccgcgtcttttatacactttttcaattcttattcctttttttatattttaaataaatata

SEQ ID NO: 30948 - DNA, 450 bp, Glycine max
agcttattgaatgtgatcaatatattcattgacataaacttaaaaatgaagatgttgtacatgatatattttgcagtcattcagatgcgatgaaattaaccaatgtctgtaatttgatatttctcatatatagtacctacaaaacaaatagatacaaattgtctttacttgacattgttagtgtgacacctgctggaatagcattttcagctgcatttgcctatttggatgataacgtataaacaatgttgtttaggctctagaatggtttcgaggtatttttctgagacgttatgcaatcccgcaagttattgttagcgatagagatttaacattgatgaatgcagtgaaaattattttccttgaggcaattaacttgttgtgtcggtttcacattgataagaatgtgaagacaaaatgtaaaactcttatgggtatgaaaaaatgcat

SEQ ID NO: 30949 - DNA, 361 bp, Glycine max
tgctaatagcataaaaataggcttctatcataatcttaaacagtattgtccttgcaatatcaaacacaggcaatactaacatatcacatccctattaaacataaagtcatatacaccattaagcatggtacaaagaacacaattcactcacaaaatgaaaggtgggtggcactcaagctgtgaaaaagctagttaccatacacaaactacaaagtcctatactcttgtgcatattttcaaatgaaattgtatttattccaccattaattaggaagaccagcataacatgagcagccaaaaattttcacagaaattgacttcatgttcttctattgagtttaaatctaacaatcagaagcaa

SEQ ID NO: 30950 - DNA, 431 bp, Glycine max
  unsure (1)..(431): unsure at all n locations
agcttcatggtgaatcaagattcattcaaagatggtttgatgataacaatgatgataacaaaagatgatgacaaaggtgatgacaaaaagctcaaagatcaatcaaagaacaactcaagtgatcaagatagaatcaagaacaattcaagactcaagaggaaagttaaagagtcaagaatcaagattcaaggttcaagatcccaagaatcaaaatcaagattcaagactgaagattcaagaatcaagagaagacttaatcaagataagtatgaaaaggttttctcaaaaattgagtagcacatggatttttctcaaaacatgtttaccaaagaggtgttactctctggtaatcgattactagattgctataatcgattaccagtagcaaaatgtttctgaanaagttttcaaattgaatttacaacgttcca

SEQ ID NO: 30951 - DNA, 369 bp, Glycine max
tgtatgagtactaggaaagattcaagaaattatgtgcaagcttccctcaccaccagatttctgagcaacttcttcttcaatatttttataagggacttagcaacatggagaggagtgtgattgatgctgccagtggtggagctcttggtgatatgacccctgctgaggctaggaatttgattaagaagatggcttccaactcccaacaattcagtgcatgaaatgaggctattgttcttagaggagtccatgaggtggccacggattcatcttcatctactgaaaataaaaagcttgaaggaaaacttgatgccttggtcaacctagtaacccagcttgccatgaatcagaaatctacacctgttgcaa

SEQ ID NO: 30952 - DNA, 309 bp, Glycine max
agcttaccaccataggagaccatggataagagtttgaaggtagaagaagatgagtggaggaagagggagagaaggggggcacgaaatttatgcctcagatgatgtatgaactttgaagtgtaatttctcaaatgatcgaatttgaaaaattgcacacacaagacctctatttatagcctaagtgtcacacaaaattggaggaaaatatgaatttcacttgaatttgaatttgaatttgtggagccaaatttggaaccaaaatttcactaattatgattagtgaatttcagctatggtttagcccactaa

SEQ ID NO: 30953 - DNA, 346 bp, Glycine max
tgccaccatggagttatccaactatgctcttgtgtggtggaacaagctacaaaaggagagagcaagaaatgaagagccaatggttgatacatgggcagagatgaaaaggatcatgaggaagcagtatgtgccagctagttactcaagggatttgaaatttatgctccaaaaactaacccaaggcaacaagggggttaaggagtatttcaaggaaatggatgtgctcatgattcaagcaaagattgaagaagatgaggaggtaactatggatcgatttcttaatggtttgactaatgatacccgtgatattgttaagctgcaagagtttgttgaaatggatgatttg

SEQ ID NO: 30954 - DNA, 389 bp, Glycine max
agcttgcatttgtggaagattaaaccccgaaagggtatattagagcacctcactgtgctattaacatcaaaccaagtaaatattatacccttgcaaaggatagtttagtacaccctcggtgaaatagatccaactacaataccacaacattaaacaataataaagaatttaacttggaataagaaaacactcatgaaatgattagatcattatagcccagtaaagggccccaagatcaacggtttcaaaaaaactgtacacgatctcatccacaaaatatttttactcacaaaattttaaaaagaaaatataaacaaaacaaactaaaaatagagagttagggggtatattgaattaggattttaaaaaactattttaacataaaaaaa

SEQ ID NO: 30955 - DNA, 361 bp, Glycine max
  unsure (1)..(361): unsure at all n locations
tcttatccaagacactctcttggtggtgaaacttcttcttccatggcttattccctagtggatggcgcctcctctcacctcttctactttatcttccgttgcaactccatggttgaaaatcaccattgaaggacctcattgaagctcaaagatccaacctctatagaagcttctcaagcaagcttccatcaattactgctatatgtaattgattacacaagtctttaagaaacttatagagagatcataattatggtttaatcgattaccatatatttgtaattgattacacggttcttttgagaccatgtctgtttttgtaggtctatggtgaagaacatctnttgttcttggagctttc

SEQ ID NO: 30956 - DNA, 435 bp, Glycine max
  unsure (1)..(435): unsure at all n locations
agctntntntgttcggtattgcctattaaatttgcaatgtagttcggctaggtttcttcgtgcgagctcaaccgaagttgtatttcggccgacgccggcattttgtcggccaggaaaacattagcccacctcggcaaaaaaaaaacatgattcaccggtattgacagaaaaaaatgctggccttagtcggccaggaaagatgaccgatcgaggtctaaaaaagaagcatgaccggattacgccgatcgaacgtttcctaatagatatcctccaagtattattcagggattgaatggaaaaaacaatagccgacatcggtagttaaatagccgtgactgatatatttcagccaacattgcgcaacttctttcacaaacgctggccgataatattgctttacgggaaaggatgctttcgttgttgggtgtcgcctat

SEQ ID NO: 30957 - DNA, 357 bp, Glycine max
ttacagcagattttagtaatgacccactaacctagaattaaaataacttaatgccattaacctagggaattaaaaaaaaaacttaatggctgagtgtaactgaaattgtggcaaccaaaagtcacccccaacagccaacaagtcagccaccatttggtctcccaaaaggctgatgcctaggttgccaattgggcccttattacaacttaaactaaacctaactaaagcccttttagttgattcacccaaaacatatttttggtcagccaactttacaaggattgggccattatttagacaaactaaacactctaaaattgagacaaagtggtgtcatttagtcctcctccatttggg

SEQ ID NO: 30958 - DNA, 431 bp, Glycine max
  unsure (1)..(431): unsure at all n locations
agctntagggatttgaaaccgagctcggatgtatactattgaagggcgaggttggtggcggagaatgttctggtggaagcaggtttggctatggtatcggacgaggcggcgattgcggaagaatacgacgtcgtatcagccgccattttgggagtatagtgtgaagtgaagctgtttgcggtgcaaaagagagttcagtggaatcagtgtggttttatgttgcaggcttttatagtgtgggaattcagtgagctgtgctaacgtgcgccgctacggtgtcggtaagtactatcatccacttgggttgtggataacccgctaccccggtggatatattaatatttgacaaaaaattgaattaaaaaacggaaattaaattattatttctaaaccctcgtgtctgcaagcgcaactgcaagcgtgcaaatggt

SEQ ID NO: 30959 - DNA, 191 bp, Glycine max
tgtggcccttttgatttttctacccaccgctttgcttggactgtcctatcccaaaccatattgaacatcatagcaactcaataatcaagtgtgctgacagcctaacccttcgatcacaaagaccctttgcagtgtaaaccttgctgtgcctatcttttctacctgtggaccgaacaatgtgccctacttgg

SEQ ID NO: 30960 - DNA, 428 bp, Glycine max
  unsure (1)..(428): unsure at all n locations
ccggattcctttcttttatcatgtgcacccaaacccaatcttcgggttcgaagacaacctactttctccctttgttggcttgattagcatagctcttattcttcctctcaatttgatctttgactctctcatgaagcttcttcacatagtccgcctttgcttgaccttctttatgcttaaaaacagaaacattaggcataggcaaaagatcaagaggagttagtgggttaaaaccataaacaacttcaaaaggagaacaattagtggtgctatgaacagctctattgtaagcaaattcaacatggggtaaacaagcttcccaagtttntaagttcttcctcaaaactgtcctaagcaaagttcccaaagtcctattaacaacttcccgttgcccatcggtttgtgggtgaccaagtggtgaaaataac

SEQ ID NO: 30961 - DNA, 366 bp, Glycine max
  unsure (1)..(366): unsure at all n locations
ntacagcagattttagtaatgatccactttcctagaattaaaataacttaatgccattaacctatggaattaaaaaaaaaaacttaatggctgagtgtaactgaaattgtggcaagcaaaagtcacccccaacagccaacaagtcagccaccatttggtctcccaaaaggctgatgcctaggttgccaattgggcccttattacaacttgaactaaacctaactaaagcccttttaattgattaacccaaaacatatttttggtcagccaactttacaaggattgggccattatttagacaaactaaacactctaaaaattgagacaaagtggtgtcatttagtcctcctccatttgggccatgat

SEQ ID NO: 30962 - DNA, 352 bp, Glycine max
  unsure (1)..(352): unsure at all n locations
agcnttgcacttcattgtcctccctcacccctctctcgcccaagtgagccaccctcccttgttgcaaataattcttatacacatttgttgcaacgagttatcaatttgatgtggtgaataggttgagttttagtttttttttaagaaggttttgcattagtgaggtgttaattcattatggaaaaactaaattgtttttggttttcaaacacaattttttgagcgaaaatgaaatcaaacatagaaaagtgttgctaaaatgaaatccatagaattcttcatatganactcattcttaatcaatctcctagttcaatgcaacanaaattcaaattacaatgaataatctaat

SEQ ID NO: 30963 - DNA, 190 bp, Glycine max
acaaaaatgccttgacagataccccttcccacatttgcgcattcatattgtgaaacggctcctgatgcagtagtgaattgttactcaaaagacatgtattgacgacgacaatcgtgcgagacctatacgagggagatagatgctcgttgatagatccattggctatcactatcaacatgcgatgattttt

SEQ ID NO: 30964 - DNA, 131 bp, Glycine max
  unsure (1)..(131): unsure at all n locations
nctcgatggncgatggncnccgnagncgtnttttntccttnagcctntgtgngctntttnnacaccgctatagtgnnctctccatnaacatgctctgctanngcctagatnnaannccnnccccaaccccc

SEQ ID NO: 30965 - DNA, 104 bp, Glycine max
caactagcgatagaaggcacaaatactgcctattaaattaaccgcgcctgcactcttacttactgtggaactaataaatttctgcacttgaacgcttccaatcg

SEQ ID NO: 30966 - DNA, 314 bp, Glycine max
ttgtttcttataacatttgtgagatggcccaatgtgtcatttttaatagggaagccattgcactccatagagaagatacttgagtctcaacaatctagattgccctttaagaagagcacttaaccacacagattagccaattaagagagaaatgcacactatactttttgaaggttattttatataaaaaaaaaaaatgatctggattttgttatgagatcacgaaccgcagggatttggtagcctttttgaaggtgatggatatgaaatatccactttataagccacaaataacatccagctctgaaaaacat

SEQ ID NO: 30967 - DNA, 435 bp, Glycine max
  unsure (1)..(435): unsure at all n locations
agctntacttacacaacananatgtgctatcgaaaaggctagattgggttatacatataacaagaagtaaaaagcttacaaaaatttctttaacttcataaaagcttctagctcacccttcacggtatgccattattgtatgaacaagggacattcttctctcaaggtatggaattccaagtgggaaatataagtgggttcccaaaggaactaagaatattactaaccaaaaaggacctaacacaacttgggcatctaaatctaccttctaaatttattttgttgttgtgtctagcaacagataaacaactatgttatcttgatagcagcttctcagagcatatgacaagagacaagtcaaagttcatgtctctaaaaactaaagaaggaggaattgtaacctatggtgataacaacaaagcgagaattcttggt

SEQ ID NO: 30968 - DNA, 366 bp, Glycine max
tgaagaggatgcgttaatggaggaaaagaaagagagaaggggggagcacaaaattgaaggaataaaagagggagagaagtggaactttgaagtcttgatggaagcttgcttgtggagcttctatggaggctggatctttgagcttcaatgaggtctttcaatggtgattttccaccatggagatgcagcggaagacaaaggagaggaggtgagaggaggcgccatccaccagggaataagccatggaagaaggagcttcgccaccaagaatgtgccttggataagaagcttggagaggatgcttcaatggaggaaaagaaagagagaggggggagcacgaaattgaaggaggaaaagggggagaga

SEQ ID NO: 30969 - DNA, 448 bp, Glycine max
  unsure (1)..(448): unsure at all n locations
agcttgtaccaattctaagaagtgccttactacttaatcttttaatattttaatgttgatacaatattaatattattttttttacactagtcatcaattaaaaatcaacttaggtatgattattaaattaattattacaaaattcaataatattatcatacatatataacaatgtataatatgataattatatataaaatatttatattatcaataaactctaattaaatttgaaactaatacagaaattgaaaaagctaaagacatattttacttaaaagttattgtaataactgccgaagttatttatcaagttccaatcataaggaataattttttgatgtgtaatcataaggagtgtatttcttaatatgttttcaatatttcctttgagaaaaacaatgactgtcctattctanaagaaaaggttcaaaccagaaatttcagt

SEQ ID NO: 30970 - DNA, 248 bp, Glycine max
tactttgaaatttgtgatccaatatgaagtatgctagtttatatatatagaattagttatatatttatttatattaatattttatgtaaataatattgtagagttgttatactataattccaaaaattattaagggttggagtttgagaatattatggttagatttgatgaacatgtgtatgttgtaccttatgaatatcattaagaatgttatgagatgttaaattgtgggtgtgatatttggttgt

SEQ ID NO: 30971 - DNA, 445 bp, Glycine max
agcttcttatccaagcctcatcttggtggtgaagctccttcttccatggcttattccttagtggatggcgcctcctctcacctcttctcctttgttttccgctgcatctccatggtggaaaatcaccattaaaggatgtcaatgaagctcaaagatccagcctccatagaagccccacaagcaagcttccatcagttactcactgcttgctatcgtgctatgagtcttacggatagcaaatgggactatttcatagtctcggccgaaagacgctgacatctccgggaagggtgctggtgacgacgttagtgactgcttgctatcgtgctttgagtcttacggatagcaaatgagactttttcgtagtgtaggtcagaagacgctgacatcttaggaaagggtgcaggcgatgacgttagtcactcattgttatcgtgccttaagt

SEQ ID NO: 30972 - DNA, 361 bp, Glycine max
ttgaacaatatacttgtccttcatttaactgtctttgggcttggcggccacgctcaacaaagtacttttgacacctactgtacgttgatttgaccaatgctgttatgggaatgttgtgacaatcctttaaaaccttattgatacattctgagaggttggttgtcatgtggccatatcgatgtccttctctatcataagccatcatccattttttctttgaaatgcgatcaatccatgttgctatggctggactcagttgacgaaatttttctaaattttgatcaaaaatgtgcttgcaaggagtgtaggctgcataaaattagttatgaataacaattttaagtatatatgaaagttaaat

SEQ ID NO: 30973 - DNA, 458 bp, Glycine max
  unsure (1)..(458): unsure at all n locations
agctnggattgattcggtctaacgagggatcgaggtttagtaatttcggctacaacatagaacacaagagcatgattgattagagaaatatatttatatgcatcagcttgtttgtgagaaagacccaacatttctacctactgttgtcacttttacttactttgcattttatagatttagcataaaagtttagtttaaattctgtttgaaattatcaatcatacatgttctcccaacaatgcttcatttctgaacttaattcaggctaacgttagttccttatgttcgatactcggattcatccattttaatttttaaatacttgacgatccagtgcgcttttcagcaaaccaaatttcccttgaatatatttgaacgaagaanaagtggaacaaaaagcaactccaggggaaatccaacacatgtgtattgagatattgtatgtatcgaaatatgag

SEQ ID NO: 30974 - DNA, 366 bp, Glycine max
tgcctaattaacctgaaatggagaggaaatgattattaaacacataaaatggaagtactaagtatttattacctatctttaacaaaaattaattacaatactacaaaataaccataaattggaggagttttgatacaatttacataagttttatacacaaaagttagttgtattcatcgactaacactcgtccccttaagcgggagtccacttttggcgctaagcgcgacaattcgcgctcaacgcaattccctctcgggttggaattacgcttagtgggcttcatgaactacgcgagaggtcaaaagttgttattttgaaaatctcaacagtcaaaacgtggggcatgtgttaggaacctatagt

SEQ ID NO: 30975 - DNA, 380 bp, Glycine max
  unsure (1)..(380): unsure at all n locations
agctntctagttcttatataagctntctcaactgaaaaatagcataacagtggtgtggcttaagccacaatatatcatgttaaagtgacgacataaataaatcatggtactatggtaggtcagaatacatgcgattacacttggaagaaattgcttaaagcatgtaaagttagatcacaatcagaaaacctaagtcaaattttcagtagtagactggtgtgttaacatgaagtggactacaactacaagtatatctaaagaccaattattccacttcttactataggaggatgaggcggttaaagtgggttagacacgtacaaagaccacaggaggcatcagtgagaagaatagatcgaatggttttaatcctatgaaaa

SEQ ID NO: 30976 - DNA, 363 bp, Glycine max
tattagttttactcgcattaacaacatatatgatttgtttcttataacatttgtgaatcggcccaatttgtcatttctaatagggaagcttttcactccatagagaagttagttgaaactcaacaatctagattgccctttaagaagagcacttaaccacacagattagccaattaagaaagaaatgcacactatactttttgaagtttatttttataaaaaaaaaaaattatctgttttttgttttgagatcacgacagcaagtgatttggcagcctttttgaagttgatggatatgagatttccactttataagccagaagataacatccaccttctgaaaaacatagtaaattaataatg

SEQ ID NO: 30977 - DNA, 433 bp, Glycine max
  unsure (1)..(433): unsure at all n locations
agcttgttgtatgagctgatgatgaatccnctttggcataactttgaggtcttctatgctctgcatagctcctgaccatctggaatcaatcatgcaataacaactacaattagtaactacttttttagtgacaatttagaaaaaaaaatcagcaaaatgcaatttgcattgtctattaagtgtagtatccacctaatatgtaagtctaccaatagttgcctagggtgtggttgtactgggatggatagtaaatgtacaagaccacgtgatggctttccctcatctagcagaatgacataggggtgcgaaaccttgtaaaaccaaggcaaatagttagaggtgcaagtccaaggatcctcaagtggcacaacattgccctaaggaattatatattgttgtcactcacccatgcctaatcacaaagctgatacac

SEQ ID NO: 30978 - DNA, 362 bp, Glycine max
tcgtgaagaggttttgaatgaccgggatttgatttgaatcaagggggctttgcattccaacccagcagccatgtctgattatactttgagagatggtttaatgtttttcaagggcagacttatattgtctaagagctccaacttgattcctactttgttgattgaataggaggacactccagatttaccaagactaacaaacggatggcagcaaccttctattggaaaggtatgaaaaagacaataatggaatatatccttcgttgtgatgtgtgccagtggcataagtatcaggccatgtcaccaaccgatctgctgcaatccattcccatcctagaggtggtttggacagatatctctat

SEQ ID NO: 30979 - DNA, 445 bp, Glycine max
agcttgagtgagagagtgcgggtgggttctatggtcattgtaaacacaaaggcaaacacacttttaagaagaaattccatgatggtcagagaaagtcgaatagaaacataaaagtaagggggttatgtgcacatgactgagaggaagctagttaataagtagtgatttcagaaataataagtaagattattcaaagacagtcaaaaggttaaacttgtggaagcaatgccttccaaggttattttgatgatgccaaagaatcaagagttaagcaaaagtttcaagcaaagattcaagaatcaagtttcaagattcaagattcaagaataatcaagatcaagattcaagactcaagattcaagaagcaagggaagactcaatcaagataagtacttaaaaagttttccaaaacattgagttgcacaagaagtttttcacaaaatca

SEQ ID NO: 30980 - DNA, 358 bp, Glycine max
ttgatgatatggtcttcaccgactaaaggatcaaaatgggtctaaaaagaggcaaatctaatcatcatgctttgataaatgcaaaaaaaaaaaaactagggcaaatgaagagggtgagaatgagggagaagcccatgctgtgactgccattcctatacaaccaagtttcccaccaacccaacaatgtcattacttagccaataacaaaccttctccttacccatcacccagtcatccacaaaggccatccctaaaatcaaccacaaagcctacctaccgcacttccaatgacaaacaccacttttagcataaaccaaaacaccaaccaagaaatgaattttgcagtgaaaaagcccgt

SEQ ID NO: 30981 - DNA, 436 bp, Glycine max
  unsure (1)..(436): unsure at all n locations
agctngatagcacgcatagactaatgtcgtcttctgcgcccttcgtcaatcgcggccgacaagcccgttgacacgcggagacttacatcatcttccacgctcacaagatctgtcatactgacttttgagtcacgctgatgggcggaaatacccgagtggttatccgtataaactttttgctgtctgtaagacgaaaagcctgataacacacaaagactaatgtcgtcttctgcgcccttcgtcaatcgcggctgacaaacccgttgacatgcggagatttacgtcatcttccgcgctcacaagatctgtcatactgacttttgagtcacgctgacgggcggaaatacccgagtggttatccgtataaaacttttgctgtctgtaagacgaanagcctgataacacgcaaagactaatgtcgtcttctgtgcccttc

SEQ ID NO: 30982 - DNA, 356 bp, Glycine max
ccgatcctcatacatatgaaaggtgaatttctttcatatccggcgaattttgatatagtgaagaagctttatgcttgagaaaaaagctcgctagattgaaaacccaaaagggctatttacgctaaagttatagcttaaaaaattaggttgaaaacccgagagggcgatctatgaaaagttggagtaacctgccaagttgaaaggagcatcttgagaaggaagacgtggaaaaagaaattagggcaaatgtgtgttaaaaatcatttttctcttaagtctattgtcgaccaatcaaagttactaacatgtgtactagcattaatattcggaaagcgtcacttcatcaacaaaatcat

SEQ ID NO: 30983 - DNA, 353 bp, Glycine max
tacatcaacatcgattgatcgatcatggaaatgatccaaagctaagttgctgtgaacatagtgtatatggaaaccacaatagagttagcttccattgtgcaactctcacaactcagggtatcctatattatgtacactctgatgtttgggggccaccccaggtactctcattaggaggagcaaaatatttcataactttcattgatgattggtctaagaaagtctggacttatctgtcgaaacataaaaatcacgcttttaagtgtttcaaacaacggaaattgcttggtgagaatcaaactggtaggcatgtgaaactgctcagaactgataatggcctcgaatacttaagt

SEQ ID NO: 30984 - DNA, 373 bp, Glycine max
tgcctaattaaagcgcaatggaagacccattttgtctcatacccacacacaatcgcgggccacggattcacaacggcacatcccgatgtaatggcagcgaacccgccaagcaagccgttacacacgtcaatcacgttccagtggccatccaataaccgcttgctgaacaacgtcgtcagagccgcagtgctcccagccaatgtcgtcgtgacagctgtcctccctatagcgctccattgaccataataccctccacttccataccccttggctattgtcagaaacgaaccatggttgaagccgtaccagccgaaccataacaaaaacgaaccaagcacaactaaagacgcgctgtggccacgtaaagcaaccg

SEQ ID NO: 30985 - DNA, 391 bp, Glycine max
  unsure (1)..(391): unsure at all n locations
agctgcttctttaggtgcatagaatgcggttaaaaaaatagtaagtgtcatgaatctctgacataagcttcaaccaattaacattgtttgaatgacaactgttgtagttggacagcaatgacatagtttgtcctccatggtatgctttatgttcctattggttatagttttggtatgctttatgttcctattggttatagntttggtatgctttatgttcctattggttatagctttggtgctagaatgttcaatttggagtccacaagaggaggatctccatattgtgctggagtttttgttggagatggtacaagacaagcaagtgaaatggagctggagcttgcagagtatcatggcaagtatatatgaaattaacccataaaagcta

SEQ ID NO: 30986 - DNA, 438 bp, Glycine max
agctggttctgggcaatagcaccccacctgacgtccccaaggtctcctgacccccgcgacatatctccaggtaccactctgtggtcaacgaataaaagtaggaagtctcacccttccccacttcctcacttcaagcttgtagaattatagggtatccatcacatgtggtactaggtggcggacgggtgatggtgcaagtcgactatccacatacacaaatcacacataaatctaccatccccagttgcccaccttcaactgagctcacgtactcccacgtagcccttatcctcgttcctctcaacaccgggttcccatcaatccccccaagcttccacaacatccaagcaatttcaacatccaaacatcatgaactatcacaaccaagcaaaaacagggcagacgcagaaaactctgctcataacacaaaccaatacc

SEQ ID NO: 30987 - DNA, 206 bp, Glycine max
  unsure (1)..(206): unsure at all n locations
catactcacactnacacggccaagggtcttgtgccatactttgtgcaaaccttggatggatcaaagacatgctacattatgattcgataggtcactaatactaatctcataaagaataccgcttgttcttatcaaagaaaagaagggtcccgttattgtgatggatgacacacctttttttgctaaaggaagaataacgtccatgc

SEQ ID NO: 30988 - DNA, 169 bp, Glycine max
agcttgtagggttaaagtctcacgaatgtcacatgttgatgcaacaattgttagccgtggctatatgagacatcttgccaaacaaagtcaggttagccataactcgcctgcgctttttcttccatgccatatgtaccaaagtcggtgatcctatcaagatagatgagct

SEQ ID NO: 30989 - DNA, 367 bp, Glycine max
tctcaataagatactaaactcgatttacatgccttctcgatggaagcatatcatagaggtcagacacttagcactgggccgggtttgtatgcttgttggttataccttctagaacaataatttttaaaaatataataaaatatgaatcattcgattattttttttattgttattcaattttgataaaatttaacataatccattttaataatatgtagatataatttaacgattgaattgataaaaattatattttatataaaattattgaatggttctataatgattgtttaagttatagtgatatcatttgatcaacttctatatgttttacgtgaaatacaaggaaaaaaaaattggacagttg

SEQ ID NO: 30990 - DNA, 443 bp, Glycine max
  unsure (1)..(443): unsure at all n locations
agctntgcaactnttcatccctggcacaattgtcaggattcaaagtattcctgcactggacgagtccaaccaaccaatcccaaacaaggtcgtattccatcgaattttttggtcatttaaggcatccatagatgtgtttgcattttgtaaacccattgtgcaaatcgatggatcaaggctatatggaagatacaaagggacactgttagttgcagttgcacaagatggcgctaacaacatatttccattggcattttccattgtcgagggtgagacaacatatgggtggcactttttttgcaaaacttgagaacacatgtgacaccacaacatggtatatgcttaatctctgacaggcatgagtcaatcaaaagtgcatacagatgacctgacaaggggtggacagtagacaactcgtcacatgtgttttgtattcgacacat

SEQ ID NO: 30991 - DNA, 359 bp, Glycine max
tggatcccaacactctgttcaggctctcctaaaatctagaggcaaatctaggatctctatcagacactatgctagatggcacaccatgtaatctgacaatctcactaatatatagggaggtcaacttctccaaggaaaatctgatattaatgggaataaagtgagtagacttggtcagtctgtcaagaataaccagatagaatctaaacctctaggagttctaggtagtcctacaacaaaatccatggaaatactgtccacttccagtggggtatctccaagggttgtaacttccctgaaggtctctgatgttctatcttagccttctgatagactaaacatgcatacataaactcatt

SEQ ID NO: 30992 - DNA, 460 bp, Glycine max
  unsure (1)..(460): unsure at all n locations
atccttaagtcacctgcggcatgcaagcttgaagaagaagctatcttgaaagcattggatgagattntgagtgattgtgaggtttctagaggtggaggagacatccccactacttgtatttcttcaatctttcactttctattctctttgttgtaaaagacgcttccctgctatggagagctaaatcctcagttgattcttcctagtgaactcgctatacgtggcgtgccggcttagtgagttcatgcaaactcagaaattaaaaactgaaatttaaaggctcactaagccgtagtacaatggattagcgagttcatacaaacatgcagaaatttaaacaaaaatgatgaactcgcttagtgggatagggaccacttagtgtgttcattagaaaactcagaaattcaaccaaaatggatgaactcgcttagtgggcatggcacgcttagcgagtgcatcg

SEQ ID NO: 30993 - DNA, 362 bp, Glycine max
tcttatccaaggcacattcttggtggcgaagctccttcttccatggcttattccctagtggatggcgcctcctctcacctcttctcctttatcttccactgcatctccatggtggaaaatcaccattgaaagacctcattgaagctcaaagatccatcctccatagaagctccacaagcaagcttccatcatcctggttggacagtcagaagcaatatgtcctctacctaagcatttgaagcatttcatgtttttggtatcggtgttggatgatgatgcaaaattatgattggctccagcattaggcattgttgactttccatgtagagactgtgttgatgggctggacaagttgcctccct

SEQ ID NO: 30994 - DNA, 458 bp, Glycine max
  unsure (1)..(458): unsure at all n locations
agctnttgcagcaacttcagcacagctccccatcgtgctgacacatgcaactaatatgtgtgtatcgggcgtctctattgtgggtgagtcttgcgaggccatttgtgataactcaagttttattgcctgcttcaactatttgttcattatctccaaattgcgtttgttttcctcttccacttctctcctccaccattcctttaggttttcattgatttctaccaattgttgtggggtgattgatgctgatgaagtgttagagccacacaatgcctgcccaaaattgattgtcacactagtcctagctacacgaatacgaccaggatgctccggtcggccaatcgcagtattcaatatgtcatcacgaccatcgggaataaagttgccttgtgttatttgctcttgtaaagaaatcctgtagagccacaaaaaggaattgcatttcaacttagatcatg

SEQ ID NO: 30995 - DNA, 369 bp, Glycine max
tagatgcaagttataatattgaaatctacaatagaaataaggttaaacaagatgttccttgaaaaagtttggttggtttgaaaaatttaaggctctagttagacttatttcttataatgagggctaattttatgcttgacctgatcatttttgaaagttcaataatttagtgaataaaatatgttttagattgttaataaattagtaaattttgtatttgtctattaattttttcttttgcattgagttcttaataacataataactttgtttttggtcatggacatttttttgtgtcctataaattagtgaattttgtgtttgttccctcatttttttcttttattatttattccctttgaaaaaaac

SEQ ID NO: 30996 - DNA, 410 bp, Glycine max
  unsure (1)..(410): unsure at all n locations
agctntatgttgactcttattgtagtcaacatttgaaatatttntaaaaggtaaataaatgtaagaatttgatactctatcataattttaatattataataatactaaaaaaattattataatttatatttacttaaatatgttgatctattagacattaaaaggttttttaaataacctaaaatccgatatttttaaccaaatatgtttttataaaagttgaaacttgatctatttttgaaagaatctaatataacctgaggttattgtgacttatcaatatataatgaaatatatgntaattgacttaaaatattttgttttttcttaattattctaaacatatgataaaatacattttttaaataattaaaccanatacttccatgcttcaaattatttattttaca

SEQ ID NO: 30997 - DNA, 239 bp, Glycine max
tgtgtgaatcaaagttgacagttgaagaatttttttttatacaagttgaagaattaatttgccccaactagatcaacgattaattcttcccttcaaataggggatttacttcccatacaagccacaaaaaagtatagcacattttttaacaatgcattcattgatacaaagagcaaaacaatagaatattagaacagtaaggtcggcaaattaccaacacattcatacagttggagtca

SEQ ID NO: 30998 - DNA, 420 bp, Glycine max
  unsure (1)..(420): unsure at all n locations
agcttgtaatggtaagaaaagagcaacacacacaatcatctaataagcagcaagtattaaaaaaaatagtaagtataaaataaaagtgtgtgctgccaattaagaaaaagaaaagctaagtgcggaaaagcaagtaatagagctggaataaaaagaaaaaggttgatctaaggatgaatgctctcctagaacctaagcttttgcatcctagaaaaaccatgaattgtttgcagcccagcctcgttacaagcctacaaaagtccttcgaattcagtttgtgtgttcttgactgtatggcatgagatgaattgcaaagattgagacttttgttagttgtggattgttgaataagcctaaacacttgtgcttganggaaacaatgactgtgaggatttggttaacgatccttccttgatatct

SEQ ID NO: 30999 - DNA, 363 bp, Glycine max
tgcctcttttgtgacttattgctacaatggcatgtcggcatggcatccctacatcaaagttgtaaaatcagcacacatgtaggttacaaatgaaaaaaagaaaaaatatacagaacacaacctgttagttgccaaactctacaagtgcatgtccattcagctaaattgacctcaactttttccccccacatgtggacctcatatctcacgcccatgttatcactacaccaaattggagtccattgattagcaaaatgaatctccttttctagtcttttgtattgaactggacataatggtccaggttttccagaaagtttaaccttgtgggcagccatggttctcgtgatgtaacatctaatt

SEQ ID NO: 31000 - DNA, 416 bp, Glycine max
agcatttcgattcattctatgtgcccgtagtgttccacattgggtttcgtgcatttttattctcgttttgtttactttttataccccctcttgacgtgcttaagccgttttacttaagtcgtttctcgcttaacttaaaaataaaataaatttccaccgaacgtttgaattgtattatccattaacttcgggtaaaataaattccgaccgttcggtcgtgccgtaaccacgttggaaataaaaaaaagaggtaaaaaataatataataatcaaaaaatatctttttagtaaaataaagcggaaaatcaatcggacgttttctctttgggatttctcattcttaatcgaattgattaataactaaggtgaaactaaggctaatatcaactcgcctagtcaagctcgtccacaaaaat

SEQ ID NO: 31001 - DNA, 355 bp, Glycine max
tctgttgttcaatttcgaacgtgtcgatatattatgcgcctgaatcgtacctccgagttaaaagttatgaccatttgaatttctcgagagcttccgttgttcaattacgaccgtctctatatattatgcgccttaatcggacctccgagtgaaaagttatgaccatttgaattggtcaagagcttccattgttcaatttcgagcgtctcgatatattatgcgcccgaatcggacatccgagtgaaaagttatgaccatttcaatttcttgagagcttccgttgttaaatttcgagcgtctcgatatattatgtgcctgaatcggacctccgagttaaaagttatgtccatttgaa

SEQ ID NO: 31002 - DNA, 445 bp, Glycine max
  unsure (1)..(445): unsure at all n locations
agcttcttatccaatacactctcttggtggttaagcttcttcttccatggcttattccctagtggatggcgcctcctctcacctcttcccctttatctttcgttgcaactccatggttgaaaatcaccattgaaggacctcattgaagctcaaagatccagcctccatagaagcttctcaagcaagcttccatcactagctccttggtcacacaaagatgagctacaccaataaagagatcataagtctgttgaggtcagagctnggtattatgacaaaccaagaggtagatgttgtgacaccaatactcaataagaggcaattgagttggttaagggatatatcacacacatattgctagtacatcatatgtgtgggctattagagcgcatntgctgtattttctctacaataccatatttttttacaagaactcaatgcatgt

SEQ ID NO: 31003 - DNA, 357 bp, Glycine max
ttcaggaacacaagatggaacttatattatttttctcacatgaagaaaatgacaagaaaaagaaaggaattacacttaaagcctcatcttctattcaagaagaaagtgacaaaaaggacttgaatgaaatagaagaagatgatgattttagtttcttcgtaaagcgattcaataaatttctaaggaacaaaggaaatcaaagaagaaaaaacttcaattcaaagaaaagaggagaagattcatcttctgttccaaagtgctatgaatgtaatcaacttggacatctaagagttgattgccctagtttcaagagaagaatggaaaaatctaacaggaaaaccttcaaagataagaaag

SEQ ID NO: 31004 - DNA, 301 bp, Glycine max
  unsure (1)..(301): unsure at all n locations
ttataagaacaaaattgcctcaatcatttccaaatatgcatgtgaattacgaagcatcaacaagaatcaagccaaggctattgtgcaagcaatcaatggggcaaaacacaccaaatgattatgatgatggatggctcaaattctcacaaaggtaaactcatcactttcaaattgagctttcaaaactatcatgacatgtagaggagaatcaaggatttcaagtcacaaaatgtcaagaacttttattttcaaaacaattacccatttcttgaacatatnctataattcanaagaaaacatg

SEQ ID NO: 31005 - DNA, 361 bp, Glycine max
  unsure (1)..(361): unsure at all n locations
ntctctgttctgcaactatgtcatcctttttttttaggtgtagaatgaagcttgacaggttcaggtgcaggtgctgctactggtggaggcacatgaatttggttttcagacctcaaggtgatggcactcacattttttggattctgcacagtttgtgaaggcaacttgtaaaattttgggactgagcttgattcatctgagtatccaactaccccatttgatttgtcagactctgaatggaagctcttgtctcttcttgaaattgcatattctggatggtcatttgccttactaattcttctatggaaggttgaggaggagcctcagttgcttgttgtctttgttgtgactgttgctgctg

SEQ ID NO: 31006 - DNA, 440 bp, Glycine max
  unsure (1)..(440): unsure at all n locations
agctggcacaatcaaattaatacaaaatatgttatattgtcaaccgacaagttcctattatatttcaaatttcaggttccattcatttagctatctataagttcttgcatttctcaatatagatgaaatctaacagacaaaccattcaataatcttcacagagagagaatgagagattcagaattccattaaggaaacacaccaaatacattaactatgatagcctcaaaatgaagacaattaaccatagacagtccacccatcgggggaaaaggtcaatgcacataaggacatttagtcaaggcaatccatgatattagcaataaataaatttagcctgctgaaccacttgatntaaatacaagtatacaacctatcctctacaagacaacttacaagcaaaatccaatatgcaacaattacatttatgatagtatatc

SEQ ID NO: 31007 - DNA, 336 bp, Glycine max
tggctaggacttagcttacaaggcagcattttaaagcaggattatgggattgagctaggtcataagccaaaattctaaaatggtatcagaacctatccagaatgcattgttaggacactcgcatttgccacacttccggctaatagccttgggcatggagggaagtgttggagattctactaaattggaggacaatccttgcctaccttagctacgagttgtacgggaattgctgttattttatcctcaacggtggcagcacatttctatgtcgactagacatatatggattaaatcttagctataaaatttgggaagacctcaatgttcaaaccc

SEQ ID NO: 31008 - DNA, 427 bp, Glycine max
agcttgtgcaaatcaagtcactcccgcattttatctctagcacgcattgtatgttggtctcgtcctttgtcacgggaagccggaaggtccatatcaccttcttaattgtacacatggggcactgcgcccccaaatgcgcaagtaagaagagataattttccgggctctcgtgtccgtaaaatgcattcatatcatgcatcgcataagcatctcttcataacatcataatggacatatcctgcatttgtccgttatcatattccggcctcacattttgcatgagtcattgcatcatcatatgcgttcaacatactttttgtttgctcatacatgatccttgtattttcctctacaaaacaaaaacaaaaaaaaaggggaagtacgaaaattcacgttgcattcttagttgcatatattcggtaccatg

SEQ ID NO: 31009 - DNA, 197 bp, Glycine max
tgacagaatactgggactgttgttgattttattgggcagccaaatgccccatctgattgggtaagctctgaatggaggctctggtctcttgctgaaactgcatgttccgcatagtcatttgcctcacaagttcttcaagggaaggttgtggaggggcctcaactgttggctgtttctggggttgttgctgttgttgg

SEQ ID NO: 31010 - DNA, 456 bp, Glycine max
  unsure (1)..(456): unsure at all n locations
agcttactcctgcttatagccacatcattttatgctatggtaacttaatgcgtgcagacaccacagtataagttatatatcaaacagatttatatggaaggcgtttggaatatttgtggcataccaaacaagtgccccaaactccaaaataattgcaagaagtgtcagtaacttgttatgaacctgtttaatgcaaaataatgagatagtgagctaaattactcataataacaagatccttatcactagtaatctctactggtgctccaagcagtctatagatttaacagagacaaacttcaacatgtttcctaagtaaaatacaaatgaaaaagagaccaagcttacctcgaacccaaacagtgacaatggcagtgagatctaacaaaatggcaggaaactntaagctttcctcgtacctcaatcaacaatactgcaactgaagacgtattatta

SEQ ID NO: 31011 - DNA, 453 bp, Glycine max
  unsure (1)..(453): unsure at all n locations
agctttntcttccttgttttcgtntttaattaattaaaaggaacgcgaaaacattntgggctagttttgaaccctcaccctacaagcatgaaaggactccctttgccgctaagctactgcaatttaattatttattagttgcagttcatgtgtatttataacttctgaaggataaatcatttatacacaaacggtttaaaattgtgtgtctctaagttatgctgaacatgcaatattatgttaaatattggtatgcattggatttgatcctttaaagtttattacatgttgaatggatatacgtacaatgttattttgaattggtatacatgtaatttctatgattcaatattgagcacatttgcattattaagtatgtttatgccaaatattattttgaatgttaagtgattaatataatnttattaaattagagaatagccacagcatctt

SEQ ID NO: 31012 - DNA, 363 bp, Glycine max
tattacgtgttgatgattataagacatatatatgtatatgaattgttaaaataaattaggaattaatagttcaaataataaaattaaattgaagaaaattaatatattaagattcaacaataaatactttcaatgcatttttagtttaattatttattaaatctttttaattgaaaataatatagttcaatttaatatatacatgttttgtgccatgtaaatattaatactgtgtgatgtttatatgattcatgaagtctgataacatgttactttgggattataacattgtgattgagattgagagtatgtgataaattaagtatgtgttgaattataagatacatgtgtattgagattttg

SEQ ID NO: 31013 - DNA, 450 bp, Glycine max
  unsure (1)..(450): unsure at all n locations
agctnttaaccatactaatgagttactgtgtaatcaaaatttgccacggacgtgattttgaaatgtctaaagtattgactaaacattaaatataactcattcatttggttgttttcctttttctgggaaagttgtacaaggattccctctactttgtaatcttttatgatttctcatgtgtagaataagttctttcttatgtaccaaaaaagaagaagaaaaaaaatgttttagcatttcattgatctagttaagacatgcattaacaaaatcttaagcatggacacttcattcccatatcggatatagatagacattggattcgtggtatcgaaattaattataaaaaaaaagacgtttactaaatatagatatgattccaattaaactaaatgcagtttgagatttagctatgttcacgtactagtatttcatttttttctaaaatga

SEQ ID NO: 31014 - DNA, 235 bp, Glycine max
tttatgtgaaaggatgtgactcttcacatttgaatttgaatttcaacgttcaaagacactggtaattgattaccaaaacattgtaatcgattacagctttttgaaattaattggaacgttgtaaattcaatttgaaaactttttcaaaacaattttgctactggtaattgattacagcaatctggtaatcgattaccaaagagtaaaaactctttggtaaactgttttgagaaaa

SEQ ID NO: 31015 - DNA, 450 bp, Glycine max
  unsure (1)..(450): unsure at all n locations
agcttcatggctgntatacttgcttcaagaacttggagtctttattggaatggctattgaatcgttagtaaacagtacatctgctattgatctagcaaggaatcctgtctctcatgaccgaagcaagcacattgagactaaatttcatttcttgagagatcaagtggctaaaggaaaagtttagctaccgcattgcagaactgaggttcaactagctgacataatgactaaggctttgaaggctaacatattcacggagctgagaatgagaatatgaattcagagtttggaggattaagatagtctgttcaataaatgttgttgtaatgttcttgttgttgattcactgtttttgaatcaaagtggggtgttacggataatactaaacacttactaatttgatagtaattgatggtgattagttactttgagatagactatatatataca

SEQ ID NO: 31016 - DNA, 359 bp, Glycine max
tatcaactctaactttcagcatataaagttttacattattagtcaataaaaaagtgtcgttagtatgatttttaagataatttatataaaagtcaataaatttaacatgcatgaaaatttgtgattggatcaaattgtaaacaacttttccatcaaaaggttggtcttgtccaactagctatggttcatgtcatacatcgtccagctcacaaatgacctaacctaaactcattgtttggggctttcttttttaaagatcgggtcaatcgataattaggctctattttatacttgtaatttaagcctaactccttctagattttagattggtgaggccaactcaatggagcatactcaaa

SEQ ID NO: 31017 - DNA, 315 bp, Glycine max
  unsure (1)..(315): unsure at all n locations
cgnaagttaatcatgttcctatatatgttatttaaaaataaaaacacatccctcgtataatcagagcctgtcatgcatgcttctttcaacaaaatgaattttctttagtactctatatattcttgatctgcttttttaactgaaaactcacgttaattgagctgaagaaaacgttgctatggggtaaaagtacatagattgtacgttgcaatttgagcaccagttgatcgtggatggatgatgttctcttgaaaccgtatatcatgaaacttttggagcatgggaaccatatagccctgataaaataaataaaac

SEQ ID NO: 31018 - DNA, 294 bp, Glycine max
  unsure (1)..(294): unsure at all n locations
ttgacatttgtcacacctttagacgtaattatgagcatctttgcacaatgtaggccaataaaaacctgattggagaaccttgacaacagttctttctccattataatggcctccataaggtgaactatggaaacgccacaatatgcttcttgcctcctcctaagttacacaccttcacaagagggtgtccgctctaattgtaaacagataaggaccatcccacacaaaatgtntagcatccctgaaaaacttattcttttggtgccaggttagatcatcatggagtgcaccaac

SEQ ID NO: 31019 - DNA, 355 bp, Glycine max
tgagatgaggaagtgtagaagggtgaaacttcctgcttttattcgttgaccacagagtggtacctggagatatgtcgcgggggtcaggagaccttggggacgtcaggtggggtgctattgcccaaaaccaagcttgaccaatcccgacccaacccgggcatagtcagtcagtgagaacctgtgatgtacctaaacaggcgagctcctggcagtcaacagataaaaggaacaaagaccacaaagcaaggaggcttgtgtggtggctagccaggtgtgaatctgtgtgatatatgggatatgggctttggtaatcgattaccaagggtgggtaatcgattacaaggcttaaaaatga

SEQ ID NO: 31020 - DNA, 432 bp, Glycine max
agcttcttagtctcacctgatgaattcgtggctactttatgcactcctctaatgacaatagcatcaattctggcactaaattgctgggagttggaagccatcttctcaattaaatttctggcttcagcaggagtaatgtctctaagggctccaccactggcagcatctatcatacttctctccatgttactgagtccttcataaaaatattggagaagaagctgctctgaaatctggtggtcatctctcccagtattcatataggctctctccactgagttgtctaatacctgaaatatcttttctgatggtcgtggtcctggaagcagggaaatttttttctaagaatactctcttgaggtcatcccagctcgtgatagaccttggagcaaggtaatatagcaagtcctttgctactccctataaagaatg

SEQ ID NO: 31021 - DNA, 288 bp, Glycine max
tcccgtatccgtacttggaaggatctgattaccgccttcctaaggcagtatcagtacaattctgatatggctcctgaccgtactcaactgcagaatatgttcaagaaagagggtgaaacctttaaagaatatgcgcagcgatggagggatttggcggcacaagtagctcctcccatggttgagagagagatgatcaccatgatggtagacactctgccagtgttctactatgagaagctagtaggttacatgccgtccagctttgcggatctagtgtttgcccgggaa

SEQ ID NO: 31022 - DNA, 442 bp, Glycine max
  unsure (1)..(442): unsure at all n locations
agcttattactttnttaaattntataaattgagtcagatatacattaatcaaggttccaataaactaattgcaaatgtcgaacagaatattgcaggcaatatggccaggtctcagaattttggtaatttatgtaggcaaagaaactaaaagtgtaaccataacctgtattttgactgaagcaccttgcattcctccaagtgaatttctttttggtaacaactaaatttttttgtagatataataatagactcaccctcccagtgagtatcttttcggtttatctggtttgctgcttcttggctgcttctagtaagggtaacaacgtctggatcatcataaattaatctaggttgtcaaactatattacaacaaaaaataataaagtgcatccaataacaagttcaaatcagcagatgcaatctatattgaacagaagtacct

SEQ ID NO: 31023 - DNA, 213 bp, Glycine max
tgaaacaaaaaggcactgaattatatattcaatcttcatcatccaaggtaacatatggatcgaatccctaaataagaatcaataaacaagtcattgggcagatgtagaatggatataagatgtaccagaggaatgtcatgaactttcagtttaggagtttaggagaaggtccatcaatacacttcactagtgaaatcctcataaattcccaaa

SEQ ID NO: 31024 - DNA, 439 bp, Glycine max
agcttagagccaattcaaacgacaataacttcttactctgatgtctgattgagtcccgtcatatatcgagacgctcgaaatttaatgttgaagctcttagccaattcaaacgacaataactttttactcgaatgtctgattgagtcctgtaatataacgagacgctcgaaattgaatgttgaagctctgagccaattcaaacgacaataactttttactcggatgtctgattgagtcccgtcatatatcgagacgctcgaaattgaatgttgaatctctgagccaattcaaacgacaataactttttactcggatgtctgattgagtcccgtaatatatcgagacgctcagaattgaatgttgaagctctgagccaattcaaacgacaataactttttactcggatgtctgattgagtcccgtcatatatcgagacgct

SEQ ID NO: 31025 - DNA, 364 bp, Glycine max
tcaagcttaacattcaattttgagcgtctcgatatatgacaggactcaaccagacatccgagtaaaaagttattgtcgtttgaattggctcagagcttcaacattcaattttgagcgtctcgatatatgacgggactcaattagacatctgagtaaaaagttattgtcgtttgaattagctcagagcttcaacattcaatttcgagcgtctcgatatatcacgagactatatcagacatccgagtaaaaagttattgtcgtttgaattcgctcagaggttcaacattcaatttcgagcgtctcgatatattacgggcctcaatcagacatccgagtaaaaagatattgtcgtttgaattggctc

SEQ ID NO: 31026 - DNA, 402 bp, Glycine max
  unsure (1)..(402): unsure at all n locations
agcttctggttgctcattaactctataattttgcaaagaaggacagatttgtatggtgatctgcagaagaacatagaccacagactcttgcaacaggtgtagatttctgattcatggcaagctaaattactaggttgaccaaggcatcaagttttccctcaagctttttattttcagcagatgaagatgaatccgtggccacctcatggactcctctaaggacaatagcatcatttcttgcactgaattgttgggagttggaagccatcttctcaatcaaattcctagcctcaacaggagtcatatcaccaaggactccaccagtggcagcatcaatcatactcttctccatgttgctaagtccctcatagaaatatngaaggagttgctcagaaatttggt

SEQ ID NO: 31027 - DNA, 271 bp, Glycine max
caaaggaacgcccgtgagaatcacctgtttcacacttacctgctggaattgcagtgaacccttacacaaacaatacagacagatgggggtgaggatgcctctcccaatttttctagaacactttagaattcatgaaatataagattcattgattaatacatacatcgtacaacataagcatgtgatatacaaatccaacattccttacttaaaggcgcacacgagatgagaatcacattggactcatagactcttatacatgtggggccat

SEQ ID NO: 31028 - DNA, 439 bp, Glycine max
  unsure (1)..(439): unsure at all n locations
agctagcttgtggagcttctatggaggctggatctttgagcttcaatggggtcctttaatggtgattttccaccatggagatgcagcggaagacaaaggaaaataggtgagaggaggcgccatccattaaggaataagccatggaagaaggagcttcaccaccaagatgagccttggataagaagcttggagaggatgcttcaatggaggaaaagaaagagggagagaaagagagaggggggagcacgaaattgaaggaataaaagaggtatagaagtggaactttgaagtatgtctcacaagactctcattcatcaaagttacaacaagtgttacacatgcttctatttatagactaggtagcttccttgagaagctntcttgagaaaacttccttgagaagcttctttgagaaaacttccttgagaagctagagctt

SEQ ID NO: 31029 - DNA, 223 bp, Glycine max
ttggacaaacaaaacatgcttactttttattaaatcaaaaactaaaaactgaaacataaatataaacctaaattataaaatgtactataagtagaataataataaaagtgctcaaaagaaaggaatatagaagtcctgtcatgggtcctgtggtgcagaaggggcaaaatccatggctgtgacatcatcctcattctcaaagagctccaacacaggcgtgcct

SEQ ID NO: 31030 - DNA, 398 bp, Glycine max
  unsure (1)..(398): unsure at all n locations
agcttgcgaatntnggcgatatcacgggacatatgcttgatgactgctgtgagaacaccaaccttccacgccttctttaaggcatgtggtttcttgtaaggtggagggccttgatctttatgtagaccaatttgaggccaccatagttcatttccagtcggtcaccatggaggaggaacacccttctctattgagaacctcctctgacgaggatcacagcgctgcataagtgctgacaagagagaacccaaagctgtgaactgtaactcttgcaatgtgtgtagtgtacgaccaatggaagtgcttccatcattctttccacgaatagcattatcggcttgatacttggctatggcatcatgaccatttctatcaaacctgaacttatccttacacca

SEQ ID NO: 31031 - DNA, 99 bp, Glycine max
ttggatttggtacaaccatgctctgctgaatacagctgtgaaattggctagtggaggaacgccccggcatttactcgacacgcttaatgtaaaccttta

SEQ ID NO: 31032 - DNA, 382 bp, Glycine max
  unsure (1)..(382): unsure at all n locations
agcttctacattcaatttcgagctgttcgatatatcactggactcaatcggacatncgagtaaaaagttattgtagtgtgaattcgctctaggctttggtattccatttcgagcgtctcgatatatcacgggactcaatcggacatcagagtaaaaagttattgttgttagaattcgctcagagcttctgtattccatttcgagcatctcgatatattacgggactcaatcagacatccgagtaaaaagtgattgttgtttcaatttgctcagggcttcggtattccatttcgagcgtgtcgatgtattacgggactcaatcagacatccgagtaataagttattgccgattgaatctgctcacagcttcgacattccattt

SEQ ID NO: 31033 - DNA, 355 bp, Glycine max
ttgagaaaattcaaacgacaataactttttactcggatgtctgattgagtcccgtaatatatcgagacgctcgaaattgaataccgaagcgctgagcaagttcaaacaacaataactttttactcggatgtctgattgagtcccgtaatatatcgaaaagctcgaatgtgaatgtagaagctcagagcaaattcaaacgacaataactttttactcggatgtctgattgagtcccgtaatatatcgagatgctcgaaatggaataccgaagctctgagcaaattcaaacaataataactttttactcggatgtccgattgagtcccgttatatatcggaacgcttgaaattgaat

SEQ ID NO: 31034 - DNA, 446 bp, Glycine max
  unsure (1)..(446): unsure at all n locations
agcttactggtgctcaggtactctctatttcttcactttaccaacaataaacaaactattctacttatctcctcttttcattatatttaggttcttctcagacgtttgaggttgttcctcagtcctggttatccctatgaagaaattttaagcacatttcacaatcagaccggcatagtcatgtgctcctacctcccaatgttcaccagctntaatagaacaaggggtaaacaaaattaaaaattaaaaatttccctatttccgattcttgttcgctatttcttataggattaagtcaacaactattaacgaacgttgtattctgcaccaggtggcttgattcaattgaaccatggcaggcctcagcctctccaatatgtggtcaatgcangccttttggctgctctttacagtgattatctcgatgctgctgatacacctggatg

SEQ ID NO: 31035 - DNA, 363 bp, Glycine max
agcttcaagacaactctcctctgctgttgtctacctctactttagtttcaaatactggcctcactagttcagctactgttgttaataactctagtgtagtttccaattctgttgtttcttcctctagtactgctaacctttggcatgctaggttaggtcaccctaatggtcatgtaatgaaacttgtcttcaatcattgtaacatttctccataaaataaaaatttcacaggtttttgttcttcctgctgtatgggaaaatctcagagattaccatttcgcacttttgtttctgtttactcccctttggagcttattttcacatatttatggggaccttctcatttgactttatatgttggtc

SEQ ID NO: 31036 - DNA, 421 bp, Glycine max
tgttggttttcttcttcttcttcttggctctgctttgctctgcgactgcgaattgaaacgtatgagagaggacacactgggtgtgttttatagcgtgaaggaacaaaacatacagagtaatttcgacacgtgcgttattgaggtggaggccaaatccatttgacaattaatttaataaaaataataaacaaaattatatttttaatctctaatcgtcttcaattccaatatgaatgataaaaatgtattatagttgtgaatgtatataataaattttattatatacaatctttctttaatttattaaccaatatcttaaatagattaagaagcctatgttattagtgtgtgacaaggtttgacattgattaggatgagcgtagccgccacgtagcagtggtggagtgggcgtggcgcacgt

SEQ ID NO: 31037 - DNA, 363 bp, Glycine max
tattattagaagacaattttgtcaagtttaagcattctctttttactcaatgattttccatatgagagaggagttcaactcaggtttgggtgacaagtgacaacgagagactggaccttgaatgatatttcatcttgttattttaatcacccttcaacttgtggaaaaaaaaatgttctcatacataatagtgtttcggtatatggttagtagtggttacctttggcattctttgattctcaagcgcatcacattctgatttttccaggggtgattttggaaggttgggtcatggcaattctagtgatttgctcattcctcagcctattatagcattgcaaggtctaaggataaagcaaattg

SEQ ID NO: 31038 - DNA, 433 bp, Glycine max
agcttgtatttgaatgttagtgtaatgaggtgggcatagcatcacttgtactttctgtttcatccattttaactttcatttaatggacattcaatttggaaaaagttgaacctatttccagatttctatttctattttagtgcactgctctttctgtcatggtttttgataggagcccatctcaggtcaatccctttaagttctattattcctgctctgatttgggggagcacttgctctcatttctttctgtgcaaatctctcgttattttcctattttgcagcatctctcagaaacaatatgtatcagtttttctacagcaatttggcatcttatctcttgtttgaatcttgcttgccattgttggcttaagtatatcggatgttgagaacttaagcctatatgtcatcaatatctactgtctctagatcc

SEQ ID NO: 31039 - DNA, 371 bp, Glycine max
  unsure (1)..(371): unsure at all n locations
ttaattnttttggaatcaaataaaaaatcaaaaattgtctcatattgtaaaaattgttcaaatcgtgtttcaatagaattaattgattaatccaatatgtataaaaaaatactcaatacaaaaagattcttcatgtttataatatcagagattgattaattcaatagaattaattgattgatcttttgtaatactcaattaattgattaattctccaaaattaatctccattgtaatactcaattaattgattaattgaatggagattgattaattcaatagaattaattgattgatctaatatgtataaaaaatactcaatacaaaaagattctttaatagaataaatttcatgtttgttttaatttaaa

SEQ ID NO: 31040 - DNA, 338 bp, Glycine max
  unsure (1)..(338): unsure at all n locations
agctntagcccttgtccctttttcttgctcactttcttttcatttatttacttttttgtttaccagggaggcagggacatatttgtctatttgagaaaaagtcactttctatttcctatttaattggtaaagatttgagggaatcatgcttccctttctcttcactctctntcatatttcctctcataccaaacaactaaacactcaatcattctgttatcacttcctttcttttttctttctcaaaccaatagagcataaaggaagtttcttataagcaaccaagtactttgggtactcacccttaaaagctagttgttaggagggagggggggggg

SEQ ID NO: 31041 - DNA, 358 bp, Glycine max
ttataagtgcgggttcgggagacaaaggtcaagcgttcgcgatatgcgaagatgatattccgagtactttggatttggtacgaccatgctctcctgatttccagctgggaaattggcgagtggaggaacgccccggcatttacgcaacaagcataatgtaaacctttacggttttaaaagctctatagttgggcctaggctttagagttttcattttgttgaggctttgtgtcttttgtttttgaatttataatacaaggatctttcttcatctgttcctggtctctacccattctcattcatttgcatgtttacttctttttctaaaacggcagattcgatgacgagtcccccgaag

SEQ ID NO: 31042 - DNA, 439 bp, Glycine max
  unsure (1)..(439): unsure at all n locations
agcttccatcaagtggtaatcagagcacaagagcttcaagtatgtgcttcttaaacctccattaatgtnttgctttaccttctcttccattgttgtttcttcatttttctccatgtatctcctcacatttcttgtcctaaatgttgttaacatgattctttagagtttccaccgattaaacttgctataaaagctagatttgattttctatggttcaaatctcttgttcttgttctcgaaccatgaattatgttgagtttaggtttctttgagttntgtcttgttattttttgtggttgaaacctaaaccataaaattcttacaaaaatattaaagtagaagaaaacctcaaaaatctagagtgacttgttcacctattgtagttctttcatagaagtcatgtctagtcatgaaacttgtcacataagatntcttatgt

SEQ ID NO: 31043 - DNA, 357 bp, Glycine max
tgtggatctagagtaaggaataacaagatatcaaatcagaatgtttaaacaggcttggcaccatttcacttcccaaggaaagcttcattatacagcaaacatatgaacacacattgatttgatatcacaaacttgagggacagacttagtgaaggtacaagggttaacattaacaagttcaagaggcaagaggagcaatcaaacatgtgggggtgtgatttcctcagtaggctcggtcgaagcattcagttttctgcccctttcacttctgctgttatcagcaaatttcaagcttgcatgatgagagcctttctccttctcctttgagttccactcagccaagtagtaatcttcttc

SEQ ID NO: 31044 - DNA, 440 bp, Glycine max
  unsure (1)..(440): unsure at all n locations
agctntgacttgagttatcaagagattataaatatgtggccatggcatgaatttcaataatcaatgatctatcatatctttcaatcaatctttcaatattttctttcatctctttcaacagattttttctgattcatcttctcttcatctttctaaaagtttttgttcaatactttttctttcaagaaaagttctttgataaaaaacttgtgttattcatctttttcattctcttctccctttgccaaaagaacgaaggactaaccgcctgaattcttttgtgtttctcttctcccttacaaaagattcaaaggactaaccgactgagaattcttttgattcttcccttcccctaaagcaaaagatttcaaaggactaaccgcctgagatatcttttgtttccccttacaaagattcaaaggactaaccgtcggagaatg

SEQ ID NO: 31045 - DNA, 317 bp, Glycine max
tttaatctcaatacaaggaagcatgacttacgcctaggaatctaatttttggttttaaatgtaaaaaggcatgaatattaggacatgtttgaaaggttttttattaggatttaaatttggctgcctcatgaggaataccttgcacctaggtagcatggaaaatacctttcaatggtatgtatatatgtgaatgtatatagcgtggaaatgtcgtgcgaagtgtgtgaatatatggcataaaaaataccttgcaaagtgtgaatgtatagcaaataaatgcacttcaaaaaaatgtgtatttgtgagtaggtagcaaa

SEQ ID NO: 31046 - DNA, 424 bp, Glycine max
  unsure (1)..(424): unsure at all n locations
agcttcaatntgtgttatctccacagtgaatgtgatttatagcttttgattactatttttgaaatcctacgtaagctttctgggtggttctaggaaagggtttttcatagattttgagagtaagcttttttcaagtttgtagggtgagttttcctatggtatccttgggtaggttttccttgtgggtgatcactgagtgaaatgaggttcactccgagggacattccacggttgagttgacaaggtaggtttcctttaataacgtttgcgcattgcagcctctaatcaattagtggaaaacttccaggcaaggattaactcctaaacatagactacgttgactgaaccagttcaaatctaatcccatgcattcttctcaagcccttatctctttatatctgcttataatcgaatggattacttt

SEQ ID NO: 31047 - DNA, 197 bp, Glycine max
aaccaattgacatttgttcaaaagatatataagctcgaaggattgagcctgatatcatgttagatgtattttaaaattaattggcattaagtgaaaattgtccaataaatatatactgcatttgaaggattaagacagttagagctgatgtgatacttgggtattttgtaataattagtttctttagaaaaaacgtt

SEQ ID NO: 31048 - DNA, 407 bp, Glycine max
  unsure (1)..(407): unsure at all n locations
agcttgccaacccatggaagctcctaatatctcccacactttntggggtgggccattcttggatggccttgattttctcagggtccacttggaccccatttctaccaactacaaaccctaagaaaactatattatctacacaaaaagtacacttctctatatttgcatagagggtgtttttcctaaggactaaaagaacttgcctgagatgtcctaatggatcatctaggctcctactgtacactaaaatatcatcaaaataaacaactacaaatctacctatgaaatcccttaagacatgatgcataagcctcataaaggtgcttggtacattagtgagcccaaaaggcatcactagccattcatacaaaccanacttggtcttgaaagcggttntccactcatca

SEQ ID NO: 31049 - DNA, 366 bp, Glycine max
gcttattcaaacctcatcagccatattgttatctttggaaatcattattagagcccattgttaaagttatatttggattcaggaagctccccattgaaaatcattgttagagcccattgttaaatgcatgtgatcattcctaagggttcgaggagaacaataaaaaaacgaaaattttgtggttcataagctctattgtcaagttttaattaagaaagtttatttatctgattcactgtattgaattctctggtatcataaaattacatcatggaatttttgtttaaaagaattggaagtttaattatgaaggcttgtgtagattatccaaatttaatgagtttgggtaaaaatcttcttataagt

SEQ ID NO: 31050 - DNA, 348 bp, Glycine max
ttatacaagggagcaaaagatgcggttatccattcatagttagctttttggtcaaaaggcttgtgtatgtacaatcatggccttcatcatgtcctcatttatacatttcattctaaaatttagagattcatgccaagattattactcacacctagtcgttcaatcacaatttaaggtcacactctcaccgatttttggttcaagcttttctttcacaatcaatctctactgactaacgattctaaatgcaagggcactttcttgctctttctttgtgtaacatacacattttctcaacttcatgaaaggaaacacaaatctcatcttaagcatgcattcaaatgaaaa

SEQ ID NO: 31051 - DNA, 441 bp, Glycine max
agcttataagaacaaaattgccttaatcatttccaaatatgcatgtgaattaagacgcatcaacaagaatcaagccaaggctattgtgcaagcaatcaatggggcaaaacacaccaaatgattataatgatggatggctcaaattctcacaaaggtaaaatcatcactttcaaattgagctttcaaaactatcatgacatgtagagaagaataaaggatttcaagtcacaaaatgtcaagaacttttattttcaaaacaaattacccatttcttgaacatatcctataattcaaagaaaaacatgcaaagtcgtacgtgcacactgaaatgacccaaaatattaaactgacaatccgacgaaactaacaacattaacaaattaacacaactaacaaattaacaaaaccaacaaaactagcaaaaccaaagaacactccccc

SEQ ID NO: 31052 - DNA, 223 bp, Glycine max
  unsure (1)..(223): unsure at all n locations
tcagcttctagtcacactccagacatcttctttattattccaacggncagatcatgtacaggtgttttgtgaagttgcagaccaaatttcgagaagatccaacggttaacgaatgctgggcagtgtttttaccgaggaagcttcatgtagctttctctagaagcttcattaagaggcttcctccagaagcttactcgtggcttctttgagaagctttctcaag

SEQ ID NO: 31053 - DNA, 469 bp, Glycine max
  unsure (1)..(469): unsure at all n locations
atccttaagcaccgcggctgcagcttttgaaagacacatctcttcaaccattttgaataggcacanagggcatatatatgtgtgtgtcagacttcaaaaagtatgagagagatattctaagagaacttcattgtcaaatgctctctcaataactcttgggcaaatacttgcaaatctattgagagttcatctaggaaaatcaaattgtattatccactctaaaggagagaaatctttctattcatctcagaaagtaagttgtaatcaagagactggttgtctcttgaattgtgagtttcataaacacaaaggaaagggattccttatgtgttcaaaagttgtaaaaaggtttttttacaaagttagtgaaaatctcaagtgggttgcttgaggactggacatangcacaggaagtggccgaacccagtataaatcaagttgcatttctctccttcattatctcatttat

SEQ ID NO: 31054 - DNA, 358 bp, Glycine max
tgcccgatggacggaaaaaatgttattataataaaaaaatgaacagaatatacctaccatatgatcctggttatatatatatatatatatagagaagaaaagagagaagagagaaatcttaggaccctctctcccagattttaaatttaaccaccaaaaatcccttataatcacaaagctcaatgagattcccagttcccaacttcaattttaaaaggtggggaacgcaaaagaggttaaaaaaatggggccagggttttaaattaaatgtatcatcaagccgtaaacccaaaaaaacccagaaaaaggggtaataatatgggctaggtaatggaatataaaaaaaaaggggcaaacg

SEQ ID NO: 31055 - DNA, 448 bp, Glycine max
  unsure (1)..(448): unsure at all n locations
agcttgaatcggacctcagtgtgaaaagttatgaccatttgaatttctcgagagctttcgttgttcaatgtcgagcatctcgacatattatgcgctcgaatcgaacatccgtgtgaaaagttatgaccatttgagtttctcgagagcttccgtggttcaattccgagtatctagacctattatgtgcccgaatctgaccttcgtgtgaaaagttatgaccatttgaatttctcgagagcttccgatgtttaatttcgagcgtctcaatatattgtaagcctgaatcggagctcagtgtgaaaagttatgaccatttgtatttctcgagagcttccttggttcaattccgagcatctcgacatattatgtgcccgaatctgaccttcgtgtgaaaagttatgacctattgaatttctcgagagctnccgatgtttaatttcgagcgtct

SEQ ID NO: 31056 - DNA, 353 bp, Glycine max
tccatcacttttcacacagaggtcagattcgggcacataatatgtcgagatgctcggaattgaaccacggaagctctcgagtaattcaaatggtcataacttttcacacagatgtccgattcgggcgcataatatgtcgagtagctcgaaattgaacaacggaagctgtcgagaaattcaaatggtcataaattttcacacggaggtcagattcaggcacataatatgtcgagatgctcggaattgaaccacgaaagctctcgagaaattcaaatggtcataacttttcacacggatgaccgattcaggcgtattacatatacagacgctcgaaatggaacaacgaaagctct

SEQ ID NO: 31057 - DNA, 440 bp, Glycine max
agcttctagctcttctattgaatatatttctcaccattattgggtataacgactcatacaataacaataacaacaaagccttatcccattagtatgagattggctacatgatcacacaaagtcactcggcttgtgtaaagacctaacctttacatatattatttaccacgagatcccctgtgaaaacctcctccaatgatatctctctcctcctcttcataggactataggacatattatatactcttctcactgctgcctcctgtggtcttctttgaacatgtccacactactttgaccgattttctttcaacttttcttcaactagtgccacaacaaaaaaaaatattctcccgatccctcttccactatcagacacagtaatgcatcgagtcatcatcatctcatgctgcacaccgagaaaactatgatgaaccttt

SEQ ID NO: 31058 - DNA, 180 bp, Glycine max
gaaactaagctgtcttcgctaaaactaccctgtctttctgttattttaccggtatcgccgatcgtgttttccttcctcgcaatggtccccaggatcacttcggcttgaatccctaataaattgaaatgaaattagattccaatgctcataatggaaaacgagactgttgaaagggaaagt

SEQ ID NO: 31059 - DNA, 470 bp, Glycine max
  unsure (1)..(470): unsure at all n locations
gatccttaagtcacctgcggcatgcaagcttgcattntaagacaaatcccccccaccctcaaagctgattctcaatccagcagtcccttaccaccttgtggtaatgcttgttattaagccatccatcaaagaccttaaaaggcttaggaccccaatcaatgctcttagatttcatgaggatagggcagtgatcagagtagttcctttcaaggttgagctgcgaactgtctggccacttagaaagccaaccatcagagacaacagctctatccaatttgcttttacaggaaccattaggcctaacccatgtgaactgcttacccacactaggaatatcttccacctccatgatagcaagccaatcattgaaatctgacatgatgctggactctgaatntccatgattgcttcccattctctctgaagggtgcctaatacaattataatcgccaataagacaccagcatata

SEQ ID NO: 31060 - DNA, 362 bp, Glycine max
taagctccttcaactgcacaagactcttaatatttgaagagtatccatgtggaaccttcacctgacgaagacactgacaaaaacttatcttctcctttttggacaaagtatgacaagctgggggcaagtaaattttattcccatcagaccttggatgcaactgtgatcgtatccccatcttagttagatcttgacgggtattcaagccatccttcatcttgccttgaatgttaaggagcatcccaatcacactgtcacatacatttttctccacatgcataacatcaatacaatgtctaacgtctagatcagaccagtacggaagatcaaagaaaatggacctcttcttccatatgcaagtc

SEQ ID NO: 31061 - DNA, 389 bp, Glycine max
agctttataacaactattaaagctctatctctatgctatgtgagacaaatcataccccttcaagacctgcaattaatgcaacccaaagaggttgcaactaacgtgggctagtggtgactgcaattgagaagtccttttaacacaccttctcatgcccaatgctatgggctttgatggaaccctgatttgtggatgcaatttttagcatccacatactgtgaacctaatcgagactcttttcagaaaataaaagggaaaaagcggaattagagaaagagatggtaacaacagccaccatcttgggagatccataagtggaggatgattcatcacaaagaatagaattctttgataagaacattaggcttcacacaagactcaacctagag

SEQ ID NO: 31062 - DNA, 361 bp, Glycine max
ttgaagatatcttaccaataatagcaccttgcctgagtaaaccatgaatttcctaaggtacaaaaaggtgttataagaaacataagagtgtatccactatcatagaagagagaaaaactctaatgctaatatataaaatcaataacaaaaggtaaactgtcattttctgaagcttcaacagtctacaatggcaggaagacagatacatatgcttcatggtcatgtcgcttgactattaaggaaaaaggggttttacctttaagagtgcatacacgtgaggaaaactctctcttggcccttcttgaaggaggatcactcaatggtatttcgagcaaaacagaggaatgagagacatttgctc

SEQ ID NO: 31063 - DNA, 436 bp, Glycine max
  unsure (1)..(436): unsure at all n locations
agcttggaggacaactgtnttggaatattctaagagacttaataaggttcgatgatttgtcctcattagtaacttagagtaaagagtaaagacaaaaaggctataatactctaagcttagcttctttaaggtacgcattattttatctctaactttttaacttttactcattctgacttgagtgttgcagcctatacactcccattgcgaagctagacaagttaccattgaaaaaccagcacatatttcgcaattttacaaaatacgagataaaaatgaaaaaaaaaatacattgctcttttttagtattccttaattagtcatggaaacaaaattgtctaaatatgaaacaggcgcagatagatactttcctaatatatactcccgttctttnttatttaaataaattaagaaacataattaatacacttatttg

SEQ ID NO: 31064 - DNA, 355 bp, Glycine max
tgtccccgtttgagcggaaaaaatgttatcaaataaaaaatataaaagattatactaccatatgttctggttatatatatatatatatatagagagagagagagagagagagagaaatctcaagaccctctctcccagattttagatttagcaacaaaatatcaattatatcagaaagctaattgagattccaagttccaactcaagtttaaaatgtggtgaacgcgaaaagtggttaaaataattgtagcaagtgtattatattacattacatataacgtgtaaacctagaagacgtgagaaaaagggtgtagatgttttggtatggatttgattatattatatagggggcaaa

SEQ ID NO: 31065 - DNA, 80 bp, Glycine max
  unsure (1)..(80): unsure at all n locations
agcttggggggctgctatttatgctgtttccgtgagcaatggggttcttgagagagggggggggggtnnccttctccatc

SEQ ID NO: 31066 - DNA, 357 bp, Glycine max
tagaatgttaaactcaacttgaatgagaggatgttattgtgcgtttttcaaaagctttaggccctttttttttttaattttatcacggatgaaaacctgggcatatatatatatatatatatatatatatatatatatatatatatatatatatatatatatttcaggcttcccttttacgcttttgataccgtatacctcgtttaaaataaaataaaatactgttcatctttcttttctattgaacaaaacacaatagaagcaagtcagaagcactcgaatgactctcataccaaatgtaaattaaataggtattgatctaaacatacaaatcaatttaaataacatatttagatg

SEQ ID NO: 31067 - DNA, 431 bp, Glycine max
agcttaatggaggaagcgaatgagagagagagagagagaaagagagtggcatggaaattgaaatagaatagggagagaagttgaactttgaagtatgtctcacaagtttctcattcatcaaagttatgtcaagtgttacacatgtttctatttatagcatggcacatgggaagcttccttgagaagcaaggaaggttgggaagctagaggaagaaagcttccttgagaagctagaggggggctactcatactcctccaatagttaagctcacccccatgccaaaatacatgaaaatacaatgggaagcttccttgagaagcacagaaggtagcttccttgtgaagcaaggaagaaagcttccttgagaagctagagggtggctactcacacccctccaatagctaagctcacccccatgccataatacatg

SEQ ID NO: 31068 - DNA, 258 bp, Glycine max
tcacatgtctgagtggactcatctagtgaaacctctacttgatcctaaaaggttttctcaagttttaaatgatctttggatagattcttgaaatcaattcataggtttttgtaagcttttgagagaatagatgagttagatagaagctcatgataatattttctaagagatttagggccatcaaaatttacctaatcttcctagtctaattcagacccctcagaagttgtatctgccatcagacatatgttggcttgt

SEQ ID NO: 31069 - DNA, 386 bp, Glycine max
agcttcagtggcttattgaagatgaagaggtatttgtgactcagcacgttgaggtgtgtctcaccattgagagatataatgacaaggcgctgtgtgatgtggtcccaatggaagcgacccatgtgctgttaggaagatcgtggcagtatgataccactgcagagcatgatggcttcaccaacaacatctttttgcgcaagctgacaagaagattgctttcgcaccgttatctcctgaagaggtttgtgaggatcatatacaactgagaggattgagaaagagtgatactcttgtgacgaaaatgagtgagacacttgataacgaaatgtgaggatagaacaagagtgaaacacttgagacggaaaagagagatcacacgtagagtg

SEQ ID NO: 31070 - DNA, 356 bp, Glycine max
tcctgggggccattcctgcgaaggcaatcatttggaaagtcagattgtaccaagaaatgctacccttaacacaaaaatggcatacaaccccctccaataaatacaaacatcaatgtcaatttagagcaagcttatgcgcacacttctttacgaacgttcacttgcacaagacattcttataactaagaaaaatgcacccatatacaatcaaggcaccttcggtacctagattattcacatgtacttccaaggtgtatttgttacctacatcacacacatttcctttgctaaaatcacatacatgcatactctaagcactttggctatcataaattgcatacgcgcacatcttggta

SEQ ID NO: 31071 - DNA, 268 bp, Glycine max
caatatgagaaactctagtgtagtgctagatctaactcttgcttcattatctccaaattgcggttcgtgtgttattcaatatgccctcctccaagcctattgtagctgcttatgtacttctatcacctccttgcttatctcatccttaattacatcgatgatttcagcatgctagtgttggctgattggtggtgaggacgtggtataagcacatgacgcttggccaaagtatgggcttaatgtgacacctgcccttgcaacatgaaca

SEQ ID NO: 31072 - DNA, 405 bp, Glycine max
agctcgtccgaagggcatggctatctccagtttcctgaaaatatctaaaaatctcgccaaatgacggtccttctccttcttggaaggtaccacaggatatggtacttttgcagcttcattcacagctttttcacttctactcttcttttcattctcatttttttcatctttttcaattttttatttcctttttatttttctacttctttttctttttcttggtcattcaattcttttttattgaccattatttgtttctctttttcctgattatttttacctctcacatcatttttccttccatcaatacctttttcttcaacaactttcttcttgagtccaacactcttctcttcctcattctccacaaaccttttacttcttgtcatcaccaacttgccaagc

SEQ ID NO: 31073 - DNA, 359 bp, Glycine max
ttataagcgcgggtctgggagacaaaggtcaagtggtcgcgatatgcgaagatgatgttccgagtatattggatttggtacgaccatgccctcctgatttccagctgggaaattggcgagtggaggaacgccccggcatttacgcaacgagcataatgtaaacctttacggttttaaaagctctatagttgggcctaggctttagagttttttccttttgttaaggctttgtgtcttttgtttttgaatttataatacaaggatctttcttcatctgttcctacgtctctacccattctcattcatttgcatgttcacttctttttctgaaacggcagatccgatgacgactcccccga

SEQ ID NO: 31074 - DNA, 562 bp, Glycine max
  unsure (1)..(562): unsure at all n locations
cctcctccccttctatctgatctcgcacgttcacnttcctcattcannangtccaaagcctagggactgaagcgtgactgacaccctgtaganccgcgacaantanagcgactgtaagctgcagctgataaaaatgtgtgcttttcattctctccacgaccggaatctcggaatccataaatcatctacaatgacgcatcctgtcggggagaaagctcaccaaaactctgccatcgaatccaaagtgtatatgatgccaacatgaaagttacaaccctcaagcacatcagccatgacatgattgctactgtgggtaaagcttgtgctgccgctgaacatctgacaaagtttcttgtggctgattccttataagaatggaaccaggagactagaccaagctcttcttgggacctaaccttgagaacgctacacctagactttggaccatattcggattcacatcctcatctgcggatcaggctccatcccagggatgttctcatcacttaggcttatccgggtgctctaccaacatgaggagagaaaacctacgcgtaggtcg

SEQ ID NO: 31075 - DNA, 276 bp, Glycine max
  unsure (1)..(276): unsure at all n locations
agcttaaacagtcaaagaaaggttctgatggaagctngcttgtggngcttctatggaggctggatcattgaacttcaatgaggtccttcaatggtgattttccaccatggagatgcagcggaagacaaaggagaataggtgagaggaggctccatccactatggaataagccatggaaaaaggagcttcaccaccatgatgagccttggataaaaagcttggagaggatgcttcaatggaggaaaagaaagaggaagagaaagagagagtggggag

SEQ ID NO: 31076 - DNA, 437 bp, Glycine max
  unsure (1)..(437): unsure at all n locations
agcttctccccttatttgctataaacaggagaagaagtgaagaagaaaagggttcaatcccttaggcacttctctctctctcgaatttgctgagaaaaattatttccgtgaagaaaatccaagccgaggcgcttccgtaacgtttccgtaacgtttccgtgagtaattatgcgaagattctcgaccattctgcaagattcatcgttcgttcttcgttttcttcaatcttcaacggataagtacctcaaaccaagcttttcaattcattttatgtacccgtggtggtccacatttcatttcatgtatttttattctcgttttcatttactttntatacccccttttgacgtgcttaagccaattatttaagtcatttctcgcttaatctaagaataaaataaatntccaccgatcgtttgaattgtatcatccattag

SEQ ID NO: 31077 - DNA, 361 bp, Glycine max
tgttgaaattgccatgtttggatgagttaaacatacccattctgttttagggttttgtgatgatgtttgtgatgttgtatgctgaaaaactgctcatggaaaactgttagagatgaaatgtagagttaacctagggttggaaagtgagaatgtgatgttatgagtggaaaaagagtgaggctttgagagttggaaggttaagtctgaattctgtggtaaatggaggttaaagtgagttaatactagcttgaaatgtcattttggacttatgagaaagcttggactgtgctagggagaaaaacaaatgaccaaagtgaaccaagagccatttctagggcaaaattgggtgttgaagagtcaa

SEQ ID NO: 31078 - DNA, 332 bp, Glycine max
gcttgtagccctgcaacattatctagatttctagttcttccaactagaatagatgataagtctgcctctgttcttacagcacacatacaccgatcacgtaaatctctgcattgagctaatatgtgattatgccaagatatcattatatttatgcacgctaaaaataaatcattccatcacattatgtcgaacccatacaaccttgttaacgtcatgaaatcgaataacgccacatatgcagatgttacacaaacatggctcaccaatgaatcccaatgtcagtgccagtattatgctaataaaatcttacaaacttaacatcatccctaact

SEQ ID NO: 31079 - DNA, 332 bp, Glycine max
tgatatcacgagcaataactttgatgcgtataaatagtacttgcacaacggcaaatgtaccctatgcaatagtcatagtgaactaaaagtccggatatcgaaccctaaggatcagttttggtaccaaacaattttggaagagctaaacaatttaagttaaattaaatgaaagatagtcgtgatcaattactcaatttattcaataagaatcaaacatagttgatgtgaaaacaattataatacgcaacctaggattgtgatttcacacttaaccctgattttcccaattgtaattctaactgttggaaccaattttttgaatttttggtccc

SEQ ID NO: 31080 - DNA, 420 bp, Glycine max
  unsure (1)..(420): unsure at all n locations
tagctngtgcctcttcacgtctggaatattaatgtatcttatagatccaaagacccttaagtgctttgttgatggcttcttcccgttccaagcttcaattggagtcttgtcttttacagacttagtcggacatttgatgagtatgtaaacagcagtgtagactactttagcccagaatgtgttaggtagtcccttctccttaggcatcgatctgtccatttccataaatgtgtaattctttctctcggacactccattttgttgaggaaaatatgtgattgtaagttgttgctcaatgccttcatccttacaaaatctttcanactcgcgagaggtgtactctctgccgcgatcacttcttagtacttttatccgttttccactttgattatcagcaagggccttgaactttttgaatac

SEQ ID NO: 31081 - DNA, 366 bp, Glycine max
ttgtcgcattgaccgaaaaaactaaggtgacgtttaccaaaaaatagtcctgacaagatgttggtaaaaaaatataatcggttgatatcgatcacaaacatcattgactaaggttgacaaaaaaatttctaaccgacattgatcaaaaaataacttcgaccgaggtcgatcaaaagaaacgtaaccgattttggccaacagaaatattttatatgatagcctttacttgcaaaaagtgtgaaccatggggcattttgacagacgtaaaacatatctcatggcagaggttgttatataaggcaaaaaaccatgaactttcttctcttgctggtgtttggagccacttcaaatgtgattgatgttaga

SEQ ID NO: 31082 - DNA, 177 bp, Glycine max
ccactagctcgtggccaatactcatggtagccacttaaacatgaacctaagccatacataagtgtttgtccgttaatcaggcccataaccatgcttttcaagcatccaaactgactggatagaaacgcgcccctccacacctgtagatcggataaggatagccttctagaaaaggat

SEQ ID NO: 31083 - DNA, 434 bp, Glycine max
  unsure (1)..(434): unsure at all n locations
agcttcctctaccggtagaaaaacattgtctgtcagcgcttgtaaaanaattgcgcaatgtcggctgaaaaacatcagttggggctgtttaactaccgatgctggctactgttttttctattccacccctgaataatacttggacgatgtcgatttggaaatgttcgatcggagtcatccggtcatgcttctttntaagacctcgatctgtcatcttttcctggccgacgtcggctagcatttttttcgatcaatatcggtgaatcatgctttttgccaaggtgggctaacgttntcgtggctgatgaagtgagagcatgccagtgtcggccgaaacacaatgtcgcacgaaaaaccctagccgacctacattgtatattttgtaggcaataccgaacagcacaacttcgtctaccataaagaaatattatcga

SEQ ID NO: 31084 - DNA, 338 bp, Glycine max
ttttctgttcggtattgcctaaaaaatttgcaatgtagttcggctaggtttcttcgtgcgagctcaaccgaagttgtatttcggccgacaccggcattttgtcggccaggaaaacattagcccacctcggcaaaaaaacatgattcaccggtattgacagaaaaaaatgctagccttagtcggccaggaaagatgaccgatcgaggtctaaaaaagaagcatgaccggattacgccgatcgaacatttcctaatagatatcctccaagtattattcagggattgaatggaaaaaacaataaccgacatcgggagttaaatagccaacattgcgcaatt

SEQ ID NO: 31085 - DNA, 422 bp, Glycine max
agcttgagcaatcctttgttaactatgtctcgcacgatatggcagtcgatttcaatgtgtttagttcgttcgtggaaaatagggtttgaggctatctggatggcggactgattatcacaatagagagttgcaggttgaacgaaggggaccggaaaatcatgaaggaggtaggtgagccactgaagttcacacgtagtagaagccaaggctctatactctgcctcagatgaactgcgagagaccgtagattgcttcttggaccaccaggaaattagagactcacccagatagactgagaagccagtgatggagcgtcgtgtgtcgcaacatcctgcccaatcggagtcactgaaagctttgagagtgagtgtaccttgagccacgaagaagatgccagaaccaggagttcctttgaggtacgt

SEQ ID NO: 31086 - DNA, 352 bp, Glycine max
tgttgagttaactctaaaaccagagttcattaatagatctaaagaaagttccataagtcgtaccaacaagaaggttggaatttttttttctgctccttgcctctttcgtctgtcttcatgcatatatatcacatttttgtcccacatggcagagaaaaagctgagtaaattttttgataaaaattatttgctgccatgctatggaaacatctttatgaaatttatctcattgcattgtttctttcttctctctaattaacattcctttttttttatctgaagggaaaacagtttgaatttttttaatgttatgcttaagggttctataatgggcattcaaatttttattaag

SEQ ID NO: 31087 - DNA, 441 bp, Glycine max
  unsure (1)..(441): unsure at all n locations
agctngaagatgttcatgatgaagttgtcatatcactagagaatctaggtcaacacgaacaaagtgctataacgctgtcagatttgttggacaaaaaaaacttgagtgaatcaagtgaaccttatagcaagtttccattgtatttgaacctactgtgtaaacattctttgagtgattagaatacatattctatcaaacatttattgttgtgaaagccaggagtggcttcgtgacaaaaaatacttgggtcttaatctcagagggatattaagggtagtgccagaagtggcctagagagtacttgttgtatcaaggagtggcatagaggatacttgtttgtaatcaaaattttgattagtggaaccctgcatgttttgaaggagaactgaacgtagcccaagagttgggtgaaccagtataaaacctctgtgtnttcttact

SEQ ID NO: 31088 - DNA, 360 bp, Glycine max
tgcctcaaagagatctaggaaggataaagcggctgaaggaactagttccgctcccgaatatgacagccaccgctttaggagcgctgaacaccagcagcgctttgaggccatcaagggatggtcatttctctgggagcgacgcgtccagctcagggacgacgagtataccgatttccaggaagagatagttcgccggcggtgggcatcactggtcacccccatggccaagttcgatccagacatagtcctcgaattttatgccaatgcttggccaacagaggagggcgtgcgagatatgagatcctgggtgaggggtcaatggatcccgtttgatgcagatgctatcggccagctcctggg

SEQ ID NO: 31089 - DNA, 357 bp, Glycine max
cacatgcataaggtcattgattctctcaatacataaacatgttcattgtccacttctacctataatacacttgttaaagtatgatactcgcacagatactgacatactgcaaggcctgcaaaaatgcaccaaaagttaagggagggaacccataaagaatctacaagtaatggtaagatgagatatatgattgactgtctatattataaatatgaatcaccttcgtatacacagtattgcaaggaccagatatatattcagaaagctttacaatatcattctcaacctctaaattgtgaagagagcttgcgacctctactccaaagccactggtaacaagtggcagatgagaagaac

SEQ ID NO: 31090 - DNA, 361 bp, Glycine max
tgttgtttgcgacgccaacggatacaactctttttcatcggattcatattcatgatcttgatcttgatcctcgtacgctggtgatgaggagcgggttgagtggccagtagttttgaaacggagtaatgtggggccagtggagtgcactgttgaagaattaccaatggggcttccatccatgattcgtgcactcgactttcctagcgtcactgctcctccctgcttcttcttcgcagccatgtgccatttcttcagagccttgtttgtgtgctcgtcaaatattgctgttttcatccttgaacccatctgcgtgtatgtatgtgtgcgtttacagcgatacattgtcgtccattagaccaat

SEQ ID NO: 31091 - DNA, 411 bp, Glycine max
agctagagaggattgatggggacccgacgttgagaggaacgaggataacggctacgtgggagtacgtgagctcatttggaggtgggcaacaagggatggtgggttatacgtgatttgtggatgtggagaattgttgtgcaccattgcccgaccgccacctagtaccacatgtgatgggtaccccataatcctacaagcttgaaatgaggaagtttataagggtgaaacttcctgcttttattcgttgaccacagaatggtacctggagatatgtcgcaggggtcaggagaccttggggacgtcaggtggggtgctattacccaaaaccaagcttgaccaatcccgacccaacccgagcatagtcagtcagtgagaacctgtgatgtacctaagcaggcgagctcctgacag

SEQ ID NO: 31092 - DNA, 355 bp, Glycine max
atcaaaaaagaacatttatgatctattgaccataaaagtgtgcctttgacatatagaagcatctatgtatcctttatgaaagtgcatatatttattcaaatatacaaagccacacacacaaaaggatgtatcatacacactaaaatttttaactgcattgccaacttctcctaacagtggacctagtagttagttaagtggctattgattagcccaccacggcaataaaatgcaactttatcttccatcaaagtgtacttaattctttgacatactattagccttgatgataatgatcaattgaaccaaaaaacaatttgtttatcactatatctgaccctagtcctacatataa

SEQ ID NO: 31093 - DNA, 496 bp, Glycine max
  unsure (1)..(496): unsure at all n locations
cggaacgtgaaccatgactgacnccctcgagnacccgagaccngcatgcacctgcaggctgaagcttagtggacgccttgagctctttaatttgtgctaangaaagaagctactgatatgaattgaatgacaaatgtatcactgcttattaaatgcggacattaattaataacttcacatttgtggatatcgatcaaaatgacagccatgctacatactctatgttattcatttggcccatctaggatgtggagatgctgcagtttttgacacacttatattcgaattgtcacggactctaacttctttctattctgatggggtggtcccatatgtattctatagatcacaaatgaatcgaggngaacagggtgagatacaagctgttctccatggtggagtgcgcacttgagctgtcataaacttatactttagacattgctttgaaaggaatcgggtcttatatacacaagagaagttgatacattcttctctt

SEQ ID NO: 31094 - DNA, 430 bp, Glycine max
  unsure (1)..(430): unsure at all n locations
tgtcccggannntttgaaccctgttgaagaaccttcgaganaaccncacnaatacanaaatactcactccagacccgtataatagcgagacatatcctttttttaaacacacgaaaggtctcataaaagtgcctactaccaagactgctaatattgcctcttaatactgcgcctttatactgtcttaatgcaatggtacaacattctttgtcccctaagaaagaagaacccactctaatggttactaagaaaagaggacccgaccttgtgccatgggctcataaatctatccttgagttcattacaacgccagtgtcttctttatcaatcacatcccattttttctgtaggattggatccacataccctaggggggtaggaatgtatcatccgctcctcctcgggaacgatcttacctcttataccaagg

SEQ ID NO: 31095 - DNA, 315 bp, Glycine max
  unsure (1)..(315): unsure at all n locations
tgcacctgaatcgttcttccgtttganaagttatgaccacttgaatttctcgagagctttcgttgttcaatttcgagcgtctcgatatattatgcgcctgaatcggactttcgtgtgataagttatgaccatatgaatttcttgagagctttcgttgttcaattatgagcttctcaatatactatgcaccttaatcggacttccgtgtgataaggtatgaccatttgaatttcttgagggcttccgtcgtgcaatttcaagcgtctcggtatattatgcgcctgaatcggactgctcggtgataagttatgacca

SEQ ID NO: 31096 - DNA, 296 bp, Glycine max
gatatattatgcgcctgaatcggttattcgtttgaaaagatatgaccatttgaatttctcgagagcactctgtgctcaattaccagggtgtcgatgtattatgccctgaaccgggctttcgggggaccagtgtagagcatttgaatttattgagagctttcggtggccaatatgaagcgtgcacataaattttgcagcggaattggacctccctgtgacaagtttcgaccctttgcatttttttcaaaccctcgctggtcaatttcaaacatattgaatgtattaagtccctaaac

SEQ ID NO: 31097 - DNA, 341 bp, Glycine max
agcttgtccataaaaataggttggggattttcatcattgcaattgctcattaagaaaaatggatcattttcaaggtccaacgccttacaatgatcacctcttaagtaaaaaaaagagtcgcttgataagcgagaactacgaaggtctgattacctcgtcgcaattgaggatacgtatgaacgaaagccccgctttcgtctgccaccccaagagagcgttcatggacgaatgccttaacgaatctctgctttcaaatacaagagatcgatagtggcccgacgccttagcgttattcccctttcataatcagatgaccgtttagtggttcaacaccttaaatg

SEQ ID NO: 31098 - DNA, 342 bp, Glycine max
ctctagctttccattggtgtattttgatcttcttttggtgctctaaattgtgggaatgtgctcatgtatgtgggtcagttttggtttgttttcttgcttgattgggttgaattgaaggtttgtatgagatggccctaggcctataatgcattttgaagcaatggggcatgccacattgtccccgttctcttgctatttatgcctaaacgcgcgcccaccaagtgttcggtgaaatgcctcaatggcatttgcgcatgattttgtaggaaaacaacctatgggataatttggattgtgcatgttctctatttttttgaacatgtgttcaatttcttgagggct

SEQ ID NO: 31099 - DNA, 589 bp, Glycine max
agcttctgtcagtctgagataagactttggctatatggagattttgctcatccagtatcacatcaacatcaggaatatgaagagcatgataccaagcattagaggagaaagaattgtcccgtagattctcaaaatacccagtttctaaactgtattgatctagccagtataatgagtgaaattcagtagttaaagcatggattaaccagtcaactcttggccagaaattggcataattctccttcaaaagcatggattttaattttaggtgataggattctattgcagcatgtggctcaggagttgtcacagagagtgattttatggcattaatccacatatctgcatgagaagcacagtaatatggttattcaagaaacaatattaatgcagaatactcaaatgactggatagtccactaattatgatgaaaataattagtcaattgtagaaaatgctagtgtgagtgttgcccaagaaaacttaaggcactcatctggaggtgggactaagaatgaaatgaatttgatataaaatctgaatcagaatgtttctgatcaaaactgactatgatgtgaggctacaacag

SEQ ID NO: 31100 - DNA, 251 bp, Glycine max
ctaagttttttggtcactaactcgcacactgttttctaactttaccgagttcaatactcacatattgcctgcttaatacatgttataattgatatttttaattgagagccaaaattgtggcttacgggtaactatgcgattacagtatgttcattgacactgaataaggagaaccatttattttcctacctgagcaatctctttaagaatccctatcctatctatcatatgttaagcattcactggatatt

SEQ ID NO: 31101 - DNA, 562 bp, Glycine max
agcttccctgcatagaaaattataagattgtgaatcttgctaaggagaatgctgtggatcactcactacatgttggaaatggaagtgatggtcaagcgagtgttaacgaaacagttggaactgcagagtcggtcatccaagaatctgctgagtatttgaaggacatgagtgaagaagaattgatggaaatgtgtgacctcaaccatttgttagatgaattgggtccacgtttcaaagattggacaggccgtcaaccattgcctgttgatgcagacttgttgccagctgtggttccaggatataaaaccccattcagacttcttccttatcggataaggccttgtttaaccaacaaggaaatgactaacttccgtaggcttgcaagaacaacagctccacattttgcccttggtaagcaagaaactatctagttaaattcatgtcttgcaatttgcaaatgtctctttctaatagatactatttgtttgctaatgcaggcagaaacagagaattgcaaagtctggctcgtgctatggtgaaactgtgggaaacaagtgctatt

SEQ ID NO: 31102 - DNA, 295 bp, Glycine max
gacatattaaataattttgaattatatcgtacgtgattaattaatgggatatactcattaattggatattttgatctataggtaaatacttaatcgaaaatagataagaccttatgccgcgagattggtcagatcatttccatttcatgatggcaatgttagagtaacttctgcagcgatgaatgattggattcttgaatttcaggttgttcaatttaaaaatgaaacccttcaataaatctaatctactcatttactctatataactgttacatttattaattttagtccctat

SEQ ID NO: 31103 - DNA, 593 bp, Glycine max
agcttgtaactcttggcaatttctttataactagtcacttaaaaagttatgacttttgtaagaatcttcagaaacaagtcacttgaagaattgtgacttttggaaatgtattttttgaaatcagtcactggtaatcgattaccattaaggtgtagtcgattacacatcaacagatgtgactcttcattttaaattttgaaaattaaaacgtttagaagctctggtaatcgattacaagtattgtgtaatcgattacacaagttgaaaatgtttaaacacaagttgtaacttttgaaatttaaaatcttaacgttttaaaaacactggtaatcgattactaccttctggtaatcgattaccagagagtaaaactctttggtaataatttgtgaaaacttcttgtgctactcaatgttttgaaaatttttttaatacttatcttgattgagtcttcttcttgattcttgaatcttgagtcttgaatcttgatcttgattattcttgaatcttgattcttgagtcttgaatcttgaaacttgattcttgaatctttgcttgaaactttgcttaactcttgattctttggcatcatc

SEQ ID NO: 31104 - DNA, 553 bp, Glycine max
tcatggtgaatcaaaaatgattcaaagatgtttttatgataacaatgatgataaccaaggatgatgacaaaggtgatgacaaaaaactcataggtcaatcaaaggatgagttcaatatgttcaagaaggaatcaagaacaattcacgactcaagaggaaaggttgaaggacacttcaaaattcaagaggaaagttgaattcaagaatcaagattcaaggatcaagcttcaagaatcaagattcaagattcaagaactcaagagaagacttaatcaagataagtatgaaaaggatttttcaaaaactgagtagcacatggatttttcacaaaacatgtttaccaaagagtttttactctctggtaatcgattaccagattgttgtaatcaattaccagcagcaaaatgtttctgaaaaagttctcaaattgaatttgcaacgctacaattaatttcaaaagctgtaatcgattacaatgttttggtaatcgattacccatgcatttgaacgtgaaattcaaatttaaatgtgaaaaatcacattctttcacata

SEQ ID NO: 31105 - DNA, 606 bp, Glycine max
agcttcataattgatatgggaagaaagacactggagatgggttttgaggatcagaagttcaattttgatctttttgaagaaaacaagccagtgccagagcataatgtttgcttgcaggtgatggaggttgaagaagaagtcctgaagatgaggaccaatatttgatcacccattgaggtaaaagcgtcaagctaatgacgttaaaggagtgcttcctgggaggcaacccggttctaatttttgctcttctattttttttatgcattgtacaatgtggaacttgcttcataatcattacattggggtatatcagcttgcttttgaatgatagatataagggtttaagattattgagaaacggactgaaatagaacttagaaatttttcttcttctgaaaatcagtcctttcgctaagcacaatcctcgtgctaagcgcatcttttgtcatgtgctaagcggagagtcgcggtgtaaatagtttggactggtttgcatgtttgaattcgctagcatgtgtcgcaacctacccttcggcaagagggcgacgcgggtcttgcgggtgcatctttcatgggaggaaaatgcacggagtcgccaccaacatt

SEQ ID NO: 31106 - DNA, 353 bp, Glycine max
tgactctatagaactctcgcgctttacggttcattctatgcgcccgaaatgtttctcgttgagtaccgtgcatatctcttctcatcttgaccacggtcaatacccacagctgacctgcttaacccatgttactttcgatattttccgatgaaatccagaatcgttatatactccacaggacatgtggattggctcttccattaactccaggaaagatgaattccgaactgtcgatcctgcgcgtcacgcttttggaaatcgattcgagatttcagatctcaagagatcactgaatcatgattgtatgaaaaggatcgtgcaatactgcggacctcatggattgggacaaaaca

SEQ ID NO: 31107 - DNA, 647 bp, Glycine max
agcttagaactaacaatggtggtgaatatgaagacaccaaatttaagaggttttgctatgagaattgaatcaaagtggagaggattgtatcaagtagtcctcaatagaatggtgtagctaagtgtatgaactaaacattgactgaaagagttagaagcttacatgtacagtcaagcctacgaaagcagttttgggcagaagctatgaacacaacaacttacttgattaaccgaggtccactagtaccattggaacatagaatactagaagaggtattgagtgaaaaaaggtcaaacttacgcatctaaagtttttggttgtgtaacttatgtgcatattagtgatcaaggaaaaaataaacttgatcccaaataaaaaaagtgcacttttattggttatggtgaggatgattttgactaccgcttttgggataatgaaaaaaaatgatgatttgtagtagagatgtgatctttaatgaaagaataatgtaaaatgaaaaacataacatagacactaacaactcaaaacagagtgagtcaatgtatgtagaggtggatgatgtcccaaaaactcttgtaattgtgagtcatcaaccagaggaatcaatggaagataacagtgaaccacatttcaacatacgagatcat

SEQ ID NO: 31108 - DNA, 379 bp, Glycine max
ttactgttttgcagtgttcatcctccaaatcttttaaccatgtattgtttcgtgtcatgaagttgttgcaccctgaatcaaaataccatcattcttctagacatgttggttgtaactcctcgtaagccatcaacaaaatctcttcttcttcatctaattcatcataatttgctttcttttccaaggcaggacactcatatgggaaatttcctagtttgtgacatttgaaacactcaatagtggctttattgaaggattgtctacctctccctctgccacgtcctcctctatacgcacctcgaccccggcctctgatgggtccatcctcttgagtgttttggcgagtgtgttcttcatgaggtgccttcaacacatgctc

SEQ ID NO: 31109 - DNA, 567 bp, Glycine max
  unsure (1)..(567): unsure at all n locations
agctttgaaggtgcgtagtccaccattttccctagtagaatactggtaatgtgtctactatcattgtcatcgtttttttcgtcattgaggtgccacttaagctgccaggttctctccacctttgggcgtattcttttgaaagaatcgtgccctctttttgcacatgttctatagttgcatcctatccgaagacattatactgacactgcctaacgaaggcaaccactaggtcattccaagaatggactcgggaaggttccaagttagtgtaccaggtaacagctaccccagtaagactttcttggaaggaatgtatcagcaattccttatcttttgtgtatgcccccatcttccgataatgcatctttagatggttcttggggcaagtagtcctctcgtacttgtcaaagtccagcaccttgaacttgggaggggtgatgatattgggtactangaacaactctcctaggttagcaaaggcataatcttcacctccttcaatggccatgagcctttcctctagatgatcccacttttccatttctgccatagcatgagggtttttac

SEQ ID NO: 31110 - DNA, 349 bp, Glycine max
aatcctgactcaccataaaccttgacccaaggtgagaatgtcaatccttaccctcggaagccaaaaagaatagaaggaaaatttccaatcaaaaaagaatagaaggaaaatttccaatgaaagcaaaaaaagaaaagaaggaaaattccccaatcaaagagtgggagaaagcaaaaagaaaagaaaggaaattcccaatcaaagaatgggagaaagttaaaaaggaagaagaagaaggaaagaaagctcctgatcagggatcgaaggaaaaacagaagaaatgtgcagagaggtctttagaccagacaatatctgaacaatacagaattgtccccaaatgaaccaaaag

SEQ ID NO: 31111 - DNA, 645 bp, Glycine max
agcttgtgtcattcaattacctttaactttaaaatactgtatcgcctaagattgaatacactactgctttaaaagatttctaagaaaataatgttttctgagttctaacaatttgttgaatcgattaagttcattaagttgcactctatttacgggagatgggatagcttttattataaccacccgtatttgtataatattttttttacatgtatatacagagaaagaaaaagaaactgtgaaataagataattagtatgataaaaaaatgtaactctgatggactaaagaaaaaggagatatggttacatgtataattggatatacagacacacacacaccctctggatacttatggaataatcttgaacgtacataaagattgttttgtcatacgtgcttgcttcgacaacaacaacaagaaatgaaaaaggcccggatcatatgtttccaattgttccagagtatttgtcgtggttctcattacttatcctgcaaattttgcattccgctgaaagttaaatcctaaatgcatctcttctgcgactgcaagacgaattaagttatggagatcgatgcttcaaacttcaaagataaatgttaaggatatttttttggttttcttaacttgattaaatggaaata

SEQ ID NO: 31112 - DNA, 390 bp, Glycine max
  unsure (1)..(390): unsure at all n locations
ntagttttatcatttttaattaagtctaattacgtaaacgaactaattatagtgggtaaaataggtgaattaaaaattttgaaattcatattattatacaaaataaatatttactaaaataaatatattattatacaaaattcagattttgaaacatatattcacccaaaaaatatcgtaaataatttaaataatataacaaaaatatttaaattaagttataaaaggatattacatagatgaattgtaataaataaataagtttaaaattaatttaaaataatgttatataatataatatttaattttaataatatataaatttttttataaaaaaaaaagaaagaagggaagtcgggggtgccagaatctgactttcatgaacgctac

SEQ ID NO: 31113 - DNA, 512 bp, Glycine max
agcttgtagttcccctgagctctattgccagtgtagatcttagcggcgatcgctctttgtctcctctctctcctcttgttgttttctctctccttccatgttggcaacctccccgtcgatccgccgccggtcatcgtttcggcgaaacgaagcttgtttgtttcgacacctcttctatcgtcgaaggcaaaacaagtaaaagatatttgttttcgtttgtgtgaggattgaagtttctttctttcttgtgctaagatgagatgaagaagtggaaacaaagggggagggagcttcgaagcggaaacaaaggggaatgggaaggggcatgatgctgggagacagtgaacgttcgattgcattcaaagtgcacacagtggagtttggggacaaatgtcacgggagcgcgcgcggcggctagctagggcttctcgggttagcaatagtaccgagtattgatacaaaatatatgaacgcaatattaaccaaacaaagacggtttttcggacaaaacc

SEQ ID NO: 31114 - DNA, 389 bp, Glycine max
tgaccaaattggacatataattggatcatgtatcagctaatatagatatgttccgggtcaaacattttctgctttaattttggatctattctatcacaaaaatactggggctactatttgcattctattttttactctttacacctcttattattttcagacatttgaaaacaccctcccctacttctatcttaaacacctttctcacctcactttaccaaccacccccaaaataacatgcatagttattgtctttgttaacaaacggtgagtaaccttaggatcacagaccatacattttacataatacacgcggacaattcatgaccatctcatatgtattgattattaatatattgtgatcgactctactgactaggtacataaat

SEQ ID NO: 31115 - DNA, 557 bp, Glycine max
agcttcagaccaaagcaactcatattctatgtatccaaaacccctcaatttaatggattttcaaggtttgagaagtgaaattgagaatggggtaaatttgaagcaaactctcacctcacacaagtctataacatcaatttaaacttgttcaaactgaacttacacctaaaatttcaccgaatcaaaatttgactcctcaacacccaaatttaccctagaaatggctctttgttcactttggtcatttgtttttctctcttgcacagcccaaactttctcataagtcctaaatgacatttcaatctaggattaactccctttaacctccaaataccactaaatccagatttggccttccaactctcaaagtctcactctttctccactcacaacaccatattctcaccttctaaccctaggttaactctacccttcatctctaacagttttccattagcaatttcagcacatcaacatcaaaagcatcatcataaaaaccctaaactgaatgggtagcataactcactcaatcgtaacaagtttagcatgctttcgtc

SEQ ID NO: 31116 - DNA, 391 bp, Glycine max
ttgaaagctgagctcaaaaagataagagtggagaaggagaagctgaaggtggcagtcactagggttaggaaagaatgtgatgaactaaaagatatcaacatgactgtagctgaagcgctagagcgggaaacgaagaaggccagaaaggaagagtggagcagaaacaagttatgagggcttttctaggtagtagtaatgagctcaaacttagaaaggccgagagggacaaatcaaggatggaaagcctgatgttagaggataagttaaagagttgtcagaggtcaaagagaagtttgaaagaatagttgagcaaaacagaagaaagtatgttgataatcattgaccaatataaagagaaagtgaacctagctgctaatcatgggcatatgct

SEQ ID NO: 31117 - DNA, 451 bp, Glycine max
agcttggattgattcggtctgatgagggttcgaggtttagtaatttaggctacaacatagaacacaagagcatgattgattagagaaatatatttatatgcatcagcttgtttgttagaaagacccaacatttctacctactgttgtcacttttacttactttgcattttatagtttttagcataaaagttagtttaaattctgtttgaaattatcaatcatacatgttctctcaacattgcttcatttctgaacttaattcaggctaacattagtttcctatgttcgatactcggattcatccattttaatttttaaatacttgatgatccgatgcgctttacggcaaatcggatttcccttgaatatatttgaacgaagaaaaagtggaacataaagcaaccgcaagggaaatccaacaaagtatttatggtgccgttgccggggaact

SEQ ID NO: 31118 - DNA, 370 bp, Glycine max
tctagcacactccagatactttctcaaagattccttcggttaaatcatggtaaattgtcttctgaagttgcaaaccaaatttcgagaagatccaacgggtaacgaaggctgggcagtgtttctaccgaggcagcttcatgtagttttctctagaagcttcatttagaggcttcctccagaagcttcattaagaggcttctagcacactacagacatcctctcaaagatcccaacggtcagatcatgctaaattgttttgtgaagttgcagaccaaatttcgagaagatccaacggttaatgaatgctgggaaacgtttttaccgaggcagcttcatgtagctttctctaaaagtttcattaagaggcttc

SEQ ID NO: 31119 - DNA, 629 bp, Glycine max
  unsure (1)..(629): unsure at all n locations
agcttccctactatggagagctaaatcctcagttggttcttcctatggggtacttgatgtaaatactttcatatctatctaatgatgttttatgtgttcactgtgctatcaatacttaattctagtgtgcctttgccttgatcatgcacttgcatgcttagctagggtcactcaacattgggaaatggtctgatccttagaacttgataggacagggctagcttatcgtattttcatgagacatcggggtacggtaacctagttttcgttatgttatgtcttaatgcggttctagttaagtttagtccaacaagagggatttgaggacgacgcttgattaggattaggctaaacatgcacgagacatcggggtttagtagtccaagagacaacatagaacatgtggcgtccctaaataatgactggtttaatagtaataaattaaatagcacaaaccatgggaatgttttttttcgtttctctctctttgtcacagtaattaaattcagaaggaaaattatcactatagagtcttgaatgggcagntcacaactctattcggagtcatttctttctgatcacttataacctttaaaactatttttgctctttcaaaaaagaaaaatatg

SEQ ID NO: 31120 - DNA, 300 bp, Glycine max
taatcttggctttttattttaatctaatggttgagactgatcattcacattctcacatcatatgatcattctcacatgatatgccttttcactgtctgtattagtgtgagggtgtgtgatatagcatctagcaacagctccggtagtctgatagaaaagtgaatctgaaatttaaaatttggaatggtacccccatttaagactagtccacccgtttagcgtatgttcggtggcatgttgattggagaatcgattgacactactgaatttattgtagagcaatttttacatattagattt

SEQ ID NO: 31121 - DNA, 653 bp, Glycine max
  unsure (1)..(653): unsure at all n locations
agcttaagtttaaagttaattatttctctttattattcaatcaaaattatatcattagtaaatcaaccaagtggttgaacataaatgattagtgtactggatttaagattgaattaatcgagtaatatccgagtttaaccctcagcgaaaataattactagatatttaagtccaaaaaaatatcattagcaaaaacacacaattagattttttttaagatatttagtaagcacatcttatacttgatcaaacaagtaataacttaaggctaagcattgtaagtaacactaaataaaattaaattggatgtgtcttaagaatattaattaattcttaaaaatcacattaaaaaaaaaaaagaaagacatcaataatatatttttaataaaaatttaacttttattcccttccctccttttttatttataagacctaagtttaaaattgtatttgtttctttttatcagatctaatctaatctataatatttttggaattaattattttaaaaatatccttcattaaaagaagataaaaaaatatattaataaataattaaaagaaaaaaatattattaacaatgataatttaaaaaaaatgatgaatttaacataattntattattatcaattaaaattattattttttttaat

SEQ ID NO: 31122 - DNA, 456 bp, Glycine max
gaaaacagtggagacaacccctatgaactttggactgacacaaagtcgagcattaagcatttgcatatttgggattgttggattgaggcgcggcctcataggccacatgaaagaaaggtggattcaagaacaattagatgctattggattatctaattttttctatctttaattaatcaatttaaattatgggacaatatcttctcttatttgatctaaattatctctcaatgtaaattactatttttctggtgagttttacaagtcaattatctttaactttatatattaatacaatgttcatctgcctacatacatacaaaacccgtgtgtattcaatactgggatttacgtcttaattttactacttgaaacgaattgatacatttgtcaatccatcaacgtaagtcagataaataatgacttaaactttggtagcttatgacatcattactt

SEQ ID NO: 31123 - DNA, 654 bp, Glycine max
  unsure (1)..(654): unsure at all n locations
agcttgtaccccagtcatccataaacctatttggaacatttgacattgtcataccctaatttcgtccggggattattatttgatgatatacaacctttgattggccgcttcaagatacttggcaccctttgttgcacaatatgtgaagtcccgagatgtgccgaaaatcaaaaggaagcaggcttacgcgatccgtgaaaattccgtaatgtgacagaaatcgaaaggaagtgtttttcgcaatccgtgagttttcgtaacttcttcgaaagctaaaaaagagtaaatacataatccgtaaggattcgtaaccttgcggaaggaaaataagtatcgttacgaaattcgtaaagtttcgtaacgttacggaaaaagaattacaaaaagggtaaagggggtgtatttagtaaaaaggagggtacaaatagcaatcaggcccacttgggccttccagattcttcctccagaaggctgttgcttctggaggaagcaaccttgcttgcctgggcgagctgggtggcaagctcctcccctattttgctataaatagggggaggagtgaaaagggaaagggttcanccttcttgacacttcttattcttttcgaattgctgaggaaaattgtttccgtgaagaaaatccaagccgaggcgc

SEQ ID NO: 31124 - DNA, 343 bp, Glycine max
aactggggccaatgaaaaaggtgaagattaaggaaaagcccgtgctgtgactggcattccaatacagccacgtttcccaccaacccaacaatgtcattactcagccaataacaaaccttctccttacccaccacccagttatccataaaggccatccctaaatcaaaccacaaaacccacctaccaatgctaaacactacctttaatacaaaccaaaacacccgccaaaaaatgagttttgcggcgaaaaaaaaaaacctgtagaattcacccaaattccggggtcctatgctaacttgctcccctatctacttgataattcagtggtagcccttaaccctac

SEQ ID NO: 31125 - DNA, 619 bp, Glycine max
agcttctcccctattttgctataaataggggaagaagtgaagaagaaaagggttcagccccttagacacttctctctctttcggatttgctgaggaaaattattttcgtgaagaaaatccaagccgaggcacttccgtaacgtttccgtaacatttatgtgagtaattacgcgaagattctcgaccgttcttcaagatccatcgttcgttcttcgttttcttcagtcttcaacgggtaagtacctcaaaccaagctttgcaattcattatatgtacccgtggtggtccacattgtgtttcatgtatttttattctcgtttttgtttactttttatacccccttttgacgtgcttaagccatttatttaagtcgtttctcgcctaatctaaaaataaaataaatttccaccgatcgtttgaattgtgtcatccattaattttggttaaaatgaattccgaccgttcggtcgtgccataaccacgttggaaatcaaaaaagagggtaaataataatataataatcaaaaaatgcctttttagtaaaataaaagcgaaagatcaatcggacgttttctctttggggattcctcattcttaattggattgactaataactaaa

SEQ ID NO: 31126 - DNA, 608 bp, Glycine max
  unsure (1)..(608): unsure at all n locations
nttggtgctttcgttacacaagcgaangataaaatactcaagccttgcctgttccacttcgattgactagagttttttttttttaaaccgcacacgaaagtcactagggcctaaaattagagcgatgaattgaaagagtttcacatttaacaccggtggatcgttatagccagaaacaaaattggccccaaatgaaaaatggagccagaaccaattcccaggggctttgtggggccgcattaacgagatcaaacttataaaagcccagagggacgaatccaggattgaaagcctggtgttagagaataagttaaaagcttgttccaggttgaaaagaagtttgatggaacctttgacccaatttcaaaagaatatgttgatagtcattgatcaatttaaggagaaggtggacttggttgcttacaatgggcaaaatcttggaaataaacaggcaaaaggttttggctttttaaatttgaaggaaaaccggaatagagggaaaaacttgtttaccccttaaacaaaggttcaaaaccattatttgtcccgggaatattaacatttttaaaaagaaaacccctattgtgaaggacttttctctttgcccg

SEQ ID NO: 31127 - DNA, 538 bp, Glycine max
gctttcatgctgatgattcattcaagcagtcacaaacaagttatcctaactatatgcagtgatgaataaaattaaaaagggttgggttgcctcccagtaagcgctcgtttaacgtcattagcttgacgcatcttacttcatatgtcttgaaaatacatgagagtggtcatcctcttaatattccctccacgatactgctttaatctctaaccatttactacccatggtctgtctagattttctaattgaggatcaaataattccacaaccccgtagggcttgacatctttgatgatgaaaggcccaaaccatttggatttcatcttgccggaaaataatttcaatcttgaattgaacaaaaaacattttgtgccctagctggaactcctttttaagcagctttttatcatgataggccttcactttttcattgacaattcttgaagactcttaggcattcatcctcattttttctaactctaagagttgaaacttccttttttctcctgctaaggactcatcaaaattaaggaatttc

SEQ ID NO: 31128 - DNA, 391 bp, Glycine max
agactctataaaacactcacgcttttgccgttcctgttatgttgacaatatttttttttgagaagctgaagacgaaagtgactctggtcattccactaatgtgatgaaatgaatgatattaacatgaccactgttgtatcgataaagccaaagacgacaatggcccgaaacgaagaatggagcacgatcaagtttctaggggctctgcggggcataagcaaccagatcacgcttacaaacgccgaaagggacgaatcactgatggaaagcatggtgctatagaacaagtggaaagcttgtccgatgatgaagaaatgtttgatggaaccattgagcaaaatgtaccagaatatgttgataattcattgacccatatatcgagacagtggac

SEQ ID NO: 31129 - DNA, 622 bp, Glycine max
agctttgatgcaacatttggagatgtttatgatacaacgagatgatgcgctccatgagaggttggatcaaatggagaatagagatcataatgaagaagaaaggaggagaagagggaatgatggtgttcctagacaaaaccgaattgatggtattaaactcaacattcctccatttaaaggaaagaatgatccggaggcctacttggagtgggagatgaaaatagagcatgttttctcatgcaacaactatgaggaggaccaaaaggtgaagcttgccgccacggagttttccggctatgctcttgtgtggtggaacaagctacaaaaggagagagcaagaaatgaagagccaatggttgatacatggacggagatgaaaaagatcatgaggaagcggtatgtgccggctagttactcaagggacttgaaattcaagctccaaaaactaacccaaggcaacaagggggttgaggagtatttcaggaaatggatgtgctcatgattcaagcaaatattgaagaagatgaggaggtaactatggctcgatttcttaatggtttgactaatgatatccgtgatattgttgagctgcaagagtttgttgaaatggatgatttgcttc

SEQ ID NO: 31130 - DNA, 380 bp, Glycine max
tggcaggaaaatttgatcaaattttctaggctaatttctttttgttggtctcttgggcaggcatctccaatcttaactgcattcattgcaggacaagctgctacctttaagatgtttgaaacgattaagaggcagccagatattgatgcttatgacactggtggttgactgctagatgatatttctggagatataaagcttaagaaggtctgctttagttatacttctagacctgatgagcaaatattcaatggattttcaatttcaataccaagtgacactactgcagctttggtagggcaaagtggaagtgagaaatcaacaattattagtttaattgagagattttatgatccacaagctggtgaagttctcattga

SEQ ID NO: 31131 - DNA, 554 bp, Glycine max
  unsure (1)..(554): unsure at all n locations
agctttaaactaattttaatcttatgttgatgtgttggatcattgtttttagattattaatgctgttttaattccatgtttgtgtttggaaatgaaaaatttgctaatgcaacaggctagaagttttcaattgtatctgcccttgggaacttaggcaaaagaaccaccaagtttgaacttgggttaggaaggagccaatcgcacgtaaaaaaatagaagcacaaattgataaacatccttgcccactgcctcccaaaatattggaaaaaaatttcccaaaatcgtctgagcctagaacacctaaaccattcatactgaagaccatgactttcacctcatcagtagttggaatataggtaagaatggtgttttcgtgactataagcagcgttgggattgaattctcaatgagatcattttgagtgcaagaattgtcaaatgcataaagactggtggaagactccaatagcttgtttttaatgtcctcttaagtctctaacaacctatgccgatcacacaacanagacatggagaatgcagcatgctttatgtcgc

SEQ ID NO: 31132 - DNA, 378 bp, Glycine max
cctcacttttttggaaatttatggtgtctattagaattgaattgattgatctacaaattgtgaatatgtttgctgaattgtgatttgagtggttcttggtaattggatcccatggaaaaattgtaaaaaaagtgaccccccttccctttgaaattatgggccaactttatttaagcctaatggattccttgagttattttgtgtgacttgatgtgctaaattttttacaagaaaaagtacaaggaactttgttacataacacttgattaagagaatttgtttaatttgtatatgagaattagaacaattgcttgaaggcaatcaaaactcacatgtggggaagttgataaaccggattttgacttcctttttatgtgt

SEQ ID NO: 31133 - DNA, 313 bp, Glycine max
agcttgcacaagcataaagctatttatttttattttacgaactaacattatcgcaaaagcaattagcatgaatatagcaaggcattcctaccttcaatgggccacaacaagaacaaggggtgtccatgttggactctttgtgctgatcgtggaatatccgacactgaaccagtatatataggagatgacatacatggattatccatctaggacatatcaacatggggtgaccacagagcagttcgttgtagatctcaataacaggttcaagggaagaataattatgtcgcctaccagccagaataacaaactg

SEQ ID NO: 31134 - DNA, 1016 bp, Glycine max
  unsure (1)..(1016): unsure at all n locations
ccccgccgccgaacgggacagcagagaacgacagcgcgatacatcgtccaacaatgacacgagacacagacacgccgcggtaagcaaatcgcaacatagcaccncaagangaannnttttgaacccctcggaaacnccngaggcgacacatagagaagcccccacgacttcggaacctgggaccgcgaacgaccgcaaaagcatttgtatgaaccggaagtccaccacccagcaaaagacccaaccccatgaccaagtacaaaacgcccacgcaaactatcaacgtagcctcaggaaaggcccgggacaggagaacccccccgaataggacccaagcagggcaggaaccaatgttacaaattaggcaacgacgcccccacaacctaaaaataactgcgaaaacaccgcctcaaggcggatgaatcgcaccccaccaaataatcaagaaaagcaatagaagcacggccttgaacgcacaacatactacttgaagtaataactactgagctatttaaggagatataacgcaatcgcaccagattacagtgaggcagggatactccacgcaaatcatggaacggacactccgatctgcgacggcacacaataccaataggagtaattcctaatagaatacgatcgcgggacccgcagcacaaaacagagtgggcaaagggaggcgaaagcgtaaaaaaacagaacctattcgctggaaaacttactccccacgaaagaaacaatcgaagggtgattcacaaacgggcggaaaacacggcggctgcacaagaaaacaccacaaatcagtcctagaacccgggagccgagaaccccacgaagttaaccgcaaactaaaaaggaaaaaaccgaagaaccccaaaaaccccaaaaaaagaacaacggaacgctaaaccgcaattgcaaaagaaaaattattaagcggacataccgccgggtcgagaagaaaaaaaaaggaatgaaacgaacacggcataaaaaaaccaaaaggcgccaaatag

SEQ ID NO: 31135 - DNA, 480 bp, Glycine max
agcttggtatccttattctgctttattattaattttatggtaaagttgaggagcataggtcatggatagtgttaagtggttcaaataaaataagacttaattattgtacttcacagcaatgtttaaatatctagtaagtttttgttttcaaatagaatggtgttatataaactcagatccttaatgatatattctacataattatggattctaaggggatttgagatgtaaatgttcaagttggtacaaattggtgaaaatttagtaagtttaactttaattagaataaaggattatatagatttgaggtaaggattttgcttttgatttagaaatgttgaactataaagctaaaaacccatttttctacatacttgaggagttcttagcataaacttagtccacgtgttataaccaagtcaaatcttttgttcttgttggaacttggaatgaagctgaaccaaagtatttgagggtctt

SEQ ID NO: 31136 - DNA, 532 bp, Glycine max
ttcctatcaactttctttcttttgtcaatttaattaaaattgaaacaaaaatcagaagattgctgcatccaaggtgaagtgcccaggatgacctagtctaaaatgctccatgaggtcgataacataggtactattacattatcaaatacattattaactagatcttaaattagattttaaattattatgtatttttatactagtatttaatttatttaaaagaaaaagaattttacatttacaatgtaattttattatttaaattaattattaataatataaattaataatttttaaaaatcttatatactatattaaatattaattttaataattttattttaaattaacaattaaagatacacattaaaaaagaaaggatgattattattataggcttatacatatatatatatatatatatatatatatatgtatatctatatatatgtgaagactactcccattttaaaaaaaaaattttttctcgatttttaatatttttaaaagaatttttttttttttttaaaaa

SEQ ID NO: 31137 - DNA, 541 bp, Glycine max
agcttgtagttcccctgagctcgaatgccagtgtagatcttagcggcgatcgctctttgtctcctctctctcctcttgttgttttctctctccttccatgttggcaacctccccgtcgatccgccgccggtcatcgtttcggcgaaacgaagcttgtttgtttcgacacctcttctatcgtcgaaggcaaaacaagtaaaagatatttgttttcgtttgtgtgaggattgaagtttctttctttcttgtgctaagatgagatgaagaagtggaaacaaagggggagggagcttctaagcggaaacaaaggggaatgggaaagggcatgatgctgggagacagtgaacgttcgattgcattcaaagtgcacacaatggagtttggggacacatgtcacgggagcgcgcgcggcggctaactatggcttctcgggttagcaatattacccagtattgatacaaaatatatgaacgcaatattaaccaaacaaagaccgtttttctgacaaaaccgtttttgtatcagactacaaaattaccat

SEQ ID NO: 31138 - DNA, 839 bp, Glycine max
  unsure (1)..(839): unsure at all n locations
gccaccataatacagaacgaanatcacatgaaccaataccctcacacaatcatgcagatagccactacacncctccaccaaggcacacaaggaaatttgaaccttcaaacacnacgagacactataaaccactccagcatggcgagaaaaatggacacaaaatcgtattttaattcacctaatggaggtcatggtgggcaggcaaacaccaatctcgaaccagcattcgggtgccatgacaaagccgctacactctagagacgtactgaaaaccattaaaaaggcagcacacgataacgacggcttatgaacactggaaggatgacaggcaacaacgatactctacgggataatataaagacacacagaagggaccgcaacttagacacaaccacccacaacacagatacagcgcaataagttaaatgggatttgtcaaacataaaggacgcaagaagacatctagcagccaccatccggtaaggagcaaacgttggaagcagagcaaaaacaaaccaattggaccagtcttcaatatggggatgaggattaatgaaaccacaaaaaccgggggggaaagtttacttgaaccgaccggacaaataaaaacgtaggcacccagattgccaaaatgccaaaaagggaatcttccctttctaagaaacccgataccaaagacacgcccaacaaaacccaccggggcgcttttggatttgacaaccaatcttaaaaaaacaaatagggggacctaccggacaaaaaaaatagtggacccaaaaaatagagggaattaaactattgcggaagggttggcctacccaacagaaacaaggaggtgg

SEQ ID NO: 31139 - DNA, 406 bp, Glycine max
agcttgctcacaaggcatgcccttgaattttactcttttggtattctttttaatctctttgatttaagtataatatgtgatgaagttcttgaaagttgaaagtacttaattgatgggtcatccaagcattgctctgcatttattttctgatcgagaatttttaccagttttatgtggtgtcacatggacggatggatgcattatgggttgggtttgttcaattatctaggaccgacttgtttacccttgtaaaatccattacacaaaaaaagaactttaaaatgctaaagactatcaatacatatattcccaacctatttattattttacttctgaattacaataaactattatggaaaacaatgataaattttaccttgaggaaactttgaatatggtctagaac

SEQ ID NO: 31140 - DNA, 1023 bp, Glycine max
  unsure (1)..(1023): unsure at all n locations
cgcacacacgcccgacgcgcgatgacgacgatggggacgaacnanttcagggaggaaaccacagcgagcgcacgcgcaatgntgatgatgaaaatacacaagaatggcgcatccaactacagacccnacacaaagaggacccaatttgagtaccccgtgtgaatacccccggcaganaangataagaaaaacaccaaggcattgcatgacctggcagggccgagagcaagaggatttctttgggtaccgaagctccgaatgacgcccggatagaggaggtcgcataaacaaaggacaccagggccggacgaatgtaaaaacgggcagaagacctgaggaaaaacaccctgggcgaataccccgaaacagacaatccgcccactgcgagacaacatgcgcccgcctattccgcccaagccaggcgggcacaaacgccgacagaaaggccgccgcacccggaaacggacaccttaccccgaaccaagggggccgacaggcgctcagaaatgggcggaaaacgggcggcgcctgcaagccggggcaatatgatcctccgacaagcgcgaaactaggggccggggaatgccgcaacaacccgcgacaaaagagtgggcacataccacaagggaaccagaaacgaggactgcctggaagagccccgccactaagattaaaaggcccaagccccgcaggacaacaccgcgggcagaaaaacagccggcgtggaacagccggaaaaacccctagaggccgcgacgacgcgattcaagaagagaagagacagagacgaacagatcgcggaacgaggcagaagaccagacgagaagaagaaacagagggcaaccacgcgccggagaagcgcagtacagacaaacgggcaatgagagggagcaagaacagcacaacggaaacacggacaaacgcagacgaacgcggacacagagcgcacacgccacacagccgacgaacaaacggagatcaccagaacgcaggaaacgaacccgacggagcgcgactacagcc

SEQ ID NO: 31141 - DNA, 171 bp, Glycine max
cgatacagtcgacctgaacgcgtgcgatgctagcttgctttgcgccgcgatatgttttttgttttcatggtctcttttatgatatccatttcttgtgaaacagttttgatctgatgatgactaatatcgtgctaatgcaaaccatgtcttgtcttcatttgaatccataat

SEQ ID NO: 31142 - DNA, 836 bp, Glycine max
  unsure (1)..(836): unsure at all n locations
atcgacacgcgcataagattcgtgtgtatatatccattcgccatctacaccacacgatcntgacggcgagaatagtacttntcattnacaccnttnaccaagacannnaaagaggnannttgagacactctcagaaaccacngagagactatanaaaactcacgcgcttgagagagcaaacacactcgacactgttttttttttactttattgagaattcaaaagatcacaataagtggctcaccattatgagaaagaagagaccagtaaaaaattgttgacaaaaaagagaagtagacctctgcaaagaaaaagagtatgcagaggacagagaaagtaaaacagggatgcgacgcaaaactctcaattaggcaaaggtgttatgtagctatctcgtagaaaataggaaagtggagaaatttcttgtccatatagaaaaaacgaggacaatatgccataactaacatcagccgtcactcacagaacatggatgattagcgtgcaaaatatgcgaaggggtcgggcttcttaaaaacaaaaggaaattggggtagggggacaagggcggggggggaggacaaacaaacgggatcgaggggcaataatggtttaccaataagaaaagggcgggttcagggacaagacggaacccgaaaaatttgggctaaaagaagggcccccaaaatccctttaagggagggggagaaagttaagccccttttttcctgcgttaaaagcgggggatttccatttccgaaagttgaacttctttactgcaaaaaaagggaagaggttcaccattttccactacgaaaagtataaaagggtgggtggcn

SEQ ID NO: 31143 - DNA, 444 bp, Glycine max
tacagtcgacctgcccgcgtgcaatcctagaagttggggatgtgtgagctttatttaacataaccttaactcctcaactttgactttgctatcgtccagctgagctcaagtgttaattactggccaattgtagccaacaccaagggggatgtccttttaggctaaaatttcaaattattcaacttactcacaaagggaatctaatacttcctgccgaggctgaatgagtaaaaattcaaagggacatcatatcgatggttatgttcgtgtacatgcatataatgtttttccccatttacaagaaaggcacaatgattgcctctatagaattgtgaaactactatgggatacccacaggtcgagactatccccaactattgacctatctttcaaaaggaaggatcttgcaatctaaatggatgcgaccttttgatcaccaatagc

SEQ ID NO: 31144 - DNA, 161 bp, Glycine max
aagaatgaaagtgcagcaaagaacaacggttatacaactgaatgaagaacaaacatgggaaaaaaacagcaccgcgatcatacgcagaatggccacaaaaaggagagtcggaccaaccccttaaatgaaaaggtggagggaaagtcgacctcacaatagcc

SEQ ID NO: 31145 - DNA, 655 bp, Glycine max
agctttaaggctaagtcttcatgttgctcccgctatctctaacagagatgcgaccgtgggtgtacttgtcttaaagacataataaaattatgaaaatgaagggatgtaaaattttattcaatgtatttgattgagtacaaattacctttgttatccttgatgtatctcgttaaaatcgctcaaatcaaaaccctaatttttctcttttgggataaagacttagataagaaaaaaagtacaacatttggttttgcattaggtcagaactttaggtgggtggcattccatattcgtggaattactttgtcatccaattcttatagtttgtatgctcaattgtttaggcatgttataaccttgaatgggtctttccagttgggacaaagctttcccgctcagggatcttttctggctttgcctcaaactcgccatatgagttcatcagttgaaaggcttgtggttgaacctttgcgttgtatctccttgctgctcaaagtttggtagcttcttctatgatcctgactatttcttggactttgtttgctgtatcgagctctatccccatgttttcttcattttgctattggtggaacaacaatctcttggtcgatggttccccgacttgaaccggaattatggcgtctgggtcattatg

SEQ ID NO: 31146 - DNA, 454 bp, Glycine max
atgacctaactcgtgtcggggcgttcccttcccctgcaactacaaggcttctcatgagttgttagatgcctctagttgattgtgcatcttacactgtgaggtcttgggtttttagtttttttactgttgacctaacagtgagcattttagtgatttttgtgtgattccattttaattgtgcatctttggtgattgtgtgattcgattttaattgtgcatcttccactggttgattatacatcttccactgcttagatgcattcgattttaatgattcttgtgtgattatcatcattcattttggtggacatgttgctttgaaaagttccctttcctcttccagatctccccttactgcttcccgcaacatcttttgaaggcattgctttgacaaaagcaacttcctttctacccttatcagatagaaccattctcttatgcccttactaaattc

SEQ ID NO: 31147 - DNA, 619 bp, Glycine max
agcttgaatcatagtaaaaatcaattattcatttttagtgcaatgttgtaccatgtataaattctataatttttttataaaaaaatagtagtgtttgtcacgtacgtgcaattaattgtctaatgactttcctgccaaaactaccactatacaaggtgacatcgcctcttatatacagtggcggaggcaggaactatgtttgagggaggccaagataaaatgcctcattaaggcctattttttcatttatcatagggctatgaaagaattttataattttgttttttaaagaagctcaaacttttgggggtgaccatggcatctattatatcacccccgattccaccttttaggtataaatatgaaatattgaaatataatcctttatgtttactgctttccttcgtttataggggtggaaataggtcaggccagggcaggctttgaaaggcctgagcctggcctatagcctatcaaacactttttatttttggctcagcctgacctttttaaaagtctgatctggcctgatagcctttttaaaagtcttctttacagtaaatatttaatatttttatggatggagtacgaacgtaatacgaaagttaaagaaaaagga

SEQ ID NO: 31148 - DNA, 422 bp, Glycine max
  unsure (1)..(422): unsure at all n locations
agactatanaaaacccaagcttataagaaaatgggctaaagaaataaaagatttttacttgtttataaggtcaaagcaggacttatgtgcttaactcctaaaaaaaaaaaactaatgtaaatgttggcaaaagaagaagtatactttgggtgaaaaagaaatgccaagggatataaggaaatctgaatatgtgaaaaacgttaatggtcttattggatattatcttctcatataaatatttagtaagaattgtttccatataaaatcggtaaaatatgtatatttcatcacctcatcatgagatggtgttacgtgtagattgcaagggtaggctttttacaatatgttatctggtgggcaaaaaactgaggtaggcatacatgggttttggtcaatatggttacataagaattggagtttgg

SEQ ID NO: 31149 - DNA, 566 bp, Glycine max
agcttgccttgccccttgatatatttgttggactcatggtcactatgaatgacaaattccttgggataaaggtagtgttgccatgttttcaaagcccgtactaaggcatacaactccttatcataagttgaatagttaagggtaggaccacttaacttttcactaaaataagcaattggatggccttcttgcatcaacacagccccaatcccaacatttgaagcatcacactcaatttcaaaagatttttgaaagtttggcaacgcaagtatgggggcattagttagcttttgcttaagaacattgaaagcttcttcttgtttctctccccatttgaaaccaacatttttcttgagcacttcattgagaggtgctgccaatgtgctaaaatccttcacaaatcgtctataaaaacttgctaagccatgaaaacttctcacctcggtcacagacttaggtgtaggccattcttgaataggcctaacctttctctcatcaacttgcactccttttgaactcacaccaaaaccaagaaacacaacatggttagtccaaaagatgcattt

SEQ ID NO: 31150 - DNA, 369 bp, Glycine max
tatagagaggatttttgactcttttaaagcccaaatcatgcttatgtgcttaactgccaaaaaaaaaaatctcgttcaaattgtctttccaaagacgaagtatactttggttgaaaaagaaatgcacacgtatataagtaaatttgaatatgtgaaaaactttaattttgcttatttttcattatcttctcatataaatgttgagtaagatttttttccatataaaatcgttaaaatatgtatatttcatcacctcaccatgatatggtgttacgtgtagattgcaagggtaggctctttacaatatgctatctggagggcaaaaaactgaggaacgcatacatggtttgtggtgactatgtttacata

SEQ ID NO: 31151 - DNA, 509 bp, Glycine max
agctttgccgaattagttttccccgacgaaaggatcaaagtgggtctaagaaacccatgatgtggctgtcgttcctacttttcgacttttgacaagtgcatcggatcgcacaagtagtataaaacggtaagaatcgagtatcgaacactcggggaacttgtgttatttggtaagctatttcaacaaataggtgtttggtgtgtaaaagtaaatgtgaatacgaacaggtgtataaactatctgtgcaaaaagaaagataatcacgcgagagaaatgatgtgtaaaaacaagtacaatacacgttggtcttcctaataggtgcctgatgctaaaacaatattctctatctaacaatgctcatgtgttcttatggtgtctcctgagatactaaaccctgattcctcatgatagtttagcctaatcctgatcaagcatcatccgcagattcctcttctaagactaaactcaaccccgatcgcattaagacacacatactcatctaacttatc

SEQ ID NO: 31152 - DNA, 328 bp, Glycine max
tatcgtgacatgtgaactcgatgtatggcatgtctccatgtggggttagctgaaacatggatgctctggtggcaagcacattagccgtctgatctttctctcttggaatgtggcggaaagagacctcatcaagaactcaattaccttcttgatgtatgcctgatagggcatcaactcgtgatccctagtttgccattctcccctcatctggcgaattaccaaggctgagtctctgctcactttaaccaattcgacatttaagtcaattgccacttggattccgagggcacatgcctcatactcagccatattattcgtgcaatcgaag

SEQ ID NO: 31153 - DNA, 650 bp, Glycine max
agcttctacttcatgttcttcttcacctttatgttcttctttcatatttttctcttttttacattatattaattatcatgtctacatttttgtcatttctttttctcggtgtatattaggagcaggtgtctatatggagtatggataatttttgtatactagaaaagtaatgatatatatcacatacctcagtaacatattttctctctttatctcacgaattctattacattatctcacttatcatatttatatacttttctcttgttggatcaagtggtctcggattaattaagaagggggggttgaattaatttttaatgtgtcttgactaattaaaaattatccttcttaatattactagattcaattaggctttactattaagttatgaggaagtaaagaacaaaaacaataacttagacaaaagtaaagcggaaataaaagtacgtagcggaaaagtaaaaagtgtagggaagaagaagacaaacacaagatttatactggttcggccacaacccatgcctacatccagtccccaagcaaccactggttcttgagatttctaataaccttgtaaaatcctttacaagcaaagatccacaagggatgtaccctcccttgttctctttgaacaaccaagtggatgt

SEQ ID NO: 31154 - DNA, 489 bp, Glycine max
ctccacgccacatctgttaatgaaatttcccaccctaaccaaggagattgtgaccatcaaggctgatcaaaagcaagcacaataatgctatgctgagagcctgaaggtaacaccctatcctcccactagggagcttgccaagcctcaccctacagcggttgaaggtactcaagtcatgaacaaagggcttccaatccgagccttcattgtttaccaaacaagcctggacgatgaatttgatatagatttgtgggagaacacttctgacagaggccaaaagcccatcgaagagcttgtcaagctgcatgtaaggacctcactagccttgaacacaagcacatcattgatgtcctatacaagaacatggacctgttctcttggcagccatctgacatgccgagaatccattccaacattatctgccacaagcttgccatttgtccctaagctaaaaccgtatcacagaagaaaaagaagatggggagaaga

SEQ ID NO: 31155 - DNA, 534 bp, Glycine max
agctttaggaggatgtggggttcaaacctttttttatgcaagaagtaaatgggtcctcaagaggaatatggattattttgcatagagatcatatcaagtataatcttattgataataatgaccaggtaatcactttctcaattttgaaaaacaacatcacctagacatgttctacgatttatgcttctcccaatccaaggatgtgtctatagttgtaggattatttgatgagggttaagaatctagtgaagggaccttggttgttaattggtgatatgaatgagatcttaagtgcttcaaaagtcatgggtggaaacttttcaactactcgagccttgctttttattaatacccttgatcatttaacatgattgacatatagactgttggaggtttctttacttggcgcagaacctaggggagtaattatattcataaacgcttggatagatgtgggtcaaatgttgattggatacatcttttaccccgttttttggtagaggtcctttccccacacaattcttatcataatct

SEQ ID NO: 31156 - DNA, 410 bp, Glycine max
gctctaggaaccttgaacggagaaagatctatatataggcttgctaagggtagagagaggaaaactagagatttggatcacgtaaagtgtgttaaggatgaagaaagcaaaggcttagtgcatgaaaaagatatcaaggaaaggtggaaggtgtatttccacaacttatttaatgatggatatggatatgactctagcagtctagacacaagagaagaggaccggaactataagtattatcgtcggattcagaaacaggaagtaaaggaagcgttgaaaagaatgagtaacggtaaggcggtggggccaaacaacatacctattgaagtgtggaaaactcttggagatagaggtcttgagtggctcaccaaactctttaatgaaattatgaggtcaaaacgcatgcccga

SEQ ID NO: 31157 - DNA, 594 bp, Glycine max
agcttgtcgcattacaccaagttgtttttggccttttgttgtctaagttgctgatccacatagcggagacggggtattccctcttgctccccaaggcttctttgtgtcacttgaatttggccactgatggcatcacgcaaacaccgaaagtggcgagaaattgttcttaaagcaagcgtagtatatggttctgctgctccacacccggcaaccatgtcaaaagatgacaccacaatctgcatctgatggcagtactgtctgtatcttttatctacctataaccagtggaaacaaggaattttttatggagtccgccattggccgacactatcatgaattcataactaactgtcttttcaatagttaaacacaccgttcaaactttggagcaacaaatgaattctacaaacattatagatataactgtagagcaatattatgtcctcttaattaatcttcattcaaatagaattaaaaacgtataaactttgtgaacatcaactatataattaatggctttatggtggtgcaccagttcaatctgacgtgacagctaacatttcaaaaccatttaccttcgttactggtttgggc

SEQ ID NO: 31158 - DNA, 465 bp, Glycine max
taacatgatgggctcttcaataatagattttttatttgccacttatttgattgaaatggaaatgatgttttgaagaatcgttgaatgaaaaatgtatttgccacattgattgattaaaatccatttcgttgtactatataactgttcaatttggtcgaccccaagaaaaagcagagaatatcctaagtaggagaaagtaacatgcttccatgcaattattcatttatggatcggttgaaaattggattagacaattaagtgccataagtagctaactgcctgtgtccagtagtactgtagtagctagtattaatataactaaatagatataagcgatttggattatatatccctttccaatgtgataatcaaatacgtaggcaaagaatttcctcattaataaagattaattattaatattgaccgatttaaaaaaaccatttatttggcctggttaaaaaaaat

SEQ ID NO: 31159 - DNA, 476 bp, Glycine max
agcttgaatttattaaggttactgtcttctgattggccagcatccctattcgtttttgccacatttgtgttctgaaatgcaagatcaattttggaagatttattcgtttggtccaattcatcaggcccaccatggttgtcataaaatctcggagggaaggaatgggaacctctatcatattcttggaaacgtggaggaggctgattaactggcttcctacttctcaaaggtctacttggaattggttctgacaaagactgatcagattctccattatctttaaaacttgagtctgactgttgaagaaaaaagtcatcggattctccaacaggatgtttgcttctgccactgcaatcatcggtaaagctgaaatggcggcacagctcaagcaatggtggcagatattgtttgcaatgtacaaaggaaactattttttcaatctgagagaaggatacatgtttatgaaccccttctcg

SEQ ID NO: 31160 - DNA, 360 bp, Glycine max
tcacacatgcttatcaaaatgagctgttgttctgacccatccgtatggcatgtatgaaattgcactgtttgttaacagtggcaccgatcaaactcttaaatattgagtgatacggattcagataccatgtcaaagacgaatacccaaatgcttaatgtgacatgggtcagcaatcgatacaacacagatgccagaatacactaatttgctaaaaatccaagatatgatacaggctactagatacattaacgtgatctaaaacaaaagcccacatgaatgcataagatctaatcatttatcattaatacataattctatcagtggatgatcatcatagtttatttaggaaatactcctggt

SEQ ID NO: 31161 - DNA, 440 bp, Glycine max
agcttccaaaagacaagagtcactgtatgttagcttatcttgggttttgttgggaatcaaatcattcaacaggtcacacagaagagtaggccagggattaacatcattggtgtttccaaagggtccactcaagctgatactcttccatattctgatgctggcgagaggaaacttcctccatttggtctctcttttgctgctgcacctacattttttctttgtttgcatctcaagatgctgatggagcagtctgcaacatgtataagattttgtgatcaaacaccaatatttgatcaggaagaccctggtttgatgacatatggatgtactagcactgatgattgctcaaacaggaattctgaagttatttttatgagaggtatggagactttgtcaaacaaggctgcagatgatggagggtcttgtgctgactcatataa

SEQ ID NO: 31162 - DNA, 296 bp, Glycine max
tgttcgatggccagcaagtgcaccggatcatgcaagtagtataaaatggtaagaaccgagtatcgaactcttggggaacttgttttacttggtaaagctgcggttcagtaaataagtgcctttggatgaaaatttggtgtgtggtatggacaggcatgtaaactaaactattcaacagtaaatcacatgagtagtgatgtgtcaagatagataaagaacgtgttggtcttcctactacatgactgatgttattaaagatgctctctacctaacaatggttttgggctctatgatga

SEQ ID NO: 31163 - DNA, 503 bp, Glycine max
agctttaaggtcaagagggctgaaggattatatatcttgcctcgttgtagatattattccttcagatcatcccgtgttgccaacaattccaagaaagaaacgtaacgtgctaacttcccttctctttggaaagaaatctcaaaactctacaaacaaaggcaccaataagctttcttctgttggtgttgtggaggaattatttgaagagggttctgcaatgcttacagagaggtaactgggaccataactgctaaatttatatttgcatgatgtcatttgaagtttaatttgtcaccatcatggtggaaagagagaaaaaatgatccttttttcccaatacatctatctttgattcttaaattttcggacttaaaatgcaggttaggcaaggattttccatctaatacgaatcctgagatgttccgctgtgcggtttgccaagcagatcagccctctgtggacagtttatcaatgaacactgggccttgtttccccccagtatc

SEQ ID NO: 31164 - DNA, 361 bp, Glycine max
tctcattactgtatgcacgtcatatagttactagttagcatgactttgttggaaatttatcatggtaataaatcctgatcataaattcacaatgagtagttaactactttgttttgtgtaagcatattgtgggtcataattggcagaacatgtataggtgttactttttttttttttttgatcagcaaaaatataatatattgatataagtaccaaaggtactataaaagttcagaggtagagccaaagtcatggttccaaaaaactaaagcagtttgaaaaggaaccatatcatggttacaaaatacaaggatctggtacagctcctaataaaagccactgaaacctaaaacaaaaaacc

SEQ ID NO: 31165 - DNA, 529 bp, Glycine max
  unsure (1)..(529): unsure at all n locations
agcttgtgtaggctccatctatccatgttgtctctccctaatctcatgcatttgtattcaagtggctgtagaatgtagagaaattgaaatccttaatgttcattcaaaatctttctgacccaaaccttaggagaattctgagtctacactggaagagagggtctgggcacttcatgtttcttcttcatctgttgctcctctataacaattttttcctcctccttttgttgatgggcaggctttttggtttggacctttcccttctgctccctaaggatccttttaacgtttatagcaaggccaaaagtttccaaagccttgtctttattagcaatagccttggccagtttcttctgcctcttttgctgaatgtcatcctagttcactagaggaataagtatgttcctcttgatgtcaaccttcattaccttcaggtttacaacactgaagtgttgttatctagtgatgaagctgcccttgttgataatggactgctangagtcatcatccattccttttgaagacatgg

SEQ ID NO: 31166 - DNA, 365 bp, Glycine max
tctcaaggaagtgtctcaaggaagcttctctttgaggtgagcttagttattagaggggtgtgtgtagctaagctctagcttctcaaggaagttttctcaaagaagcttcttaaggaagttttctcaagaaagcttctcaaggaagctacctagtctataaataaaagcatgtgtaacacttgttgtaactttgatgaatgagagtcttgtgagacacaactcaaagttcaacttctcttcccctttttcttcttcaattttgtgctcccccctctctcttttcctccattgaatcatcctctccaagcttcttatccaaggcacattcttggtggcgaaactccttcttccatggcttattccct

SEQ ID NO: 31167 - DNA, 622 bp, Glycine max
agcttctacaagaagagatggccaagatgaatcaaggatggactactcatcaaaggaaaggaatgaataaatcacaaggagctgaattggagcatgttgaagattgttgaacaactcgcttagccacaccagctcactaagcacatttccagcaattgggcttagcacgagtgtttggcttagcgcaattccaacccgaggagaaattgggcttagcgcgagatgtttagcttatcgcaagaattgggcttagtgcgagatgtctggcttagcgcaattctagctcgaggagaatcgggattagcacaaaccttgagcgtgaatttacaaaaattcttaattcttgtttatttgtgtaatgggcttgagcttgatgtaaatatgccttattagttgcttagttatcttcttaagcctagttctataaatactcaaaagctcttaattgtagaaactttttgacataattgaaattaagcttgtgcttagagagagcttagtctcttctttggtttttgactaaaaaccaaattgattcttatcaaggaagctattcctttgtgaagaattcttctttggcctatcaattttcatggattggggcgtcgttttgttcatcttc

SEQ ID NO: 31168 - DNA, 414 bp, Glycine max
tgcccaaagaaagaattcaccgaggaaatgcttaccacctcaaaagactggaaagcagtttctaatgactcctttgcggcctccacataaggcatagaggatgggcagctcaccaagaggtcttcctcgcctgatacgatgaccagatgcccttccactacgaatttcaacttttggtggagtgtagagggaacaactcccactgagtggatccacggccgccccaacagacagctgtagggggggttaatatccattatttggaaggtaacttgacaggtgtgaaggcctatctgtaccgggagatcgatctcccccctaacctctcgacgggtgccgtcgaaagcacgaaccaccattgaacttggctttaagtgggaaacattgaatgggaattttctccaaagtgctctt

SEQ ID NO: 31169 - DNA, 607 bp, Glycine max
agctttttggagtagaaacatgggacctactcattttatttcaaaaaggaagtcatatctagtcaaggtctgagagaccatacaagtttcctaacgatttctaattatgtgggtcattaagtctatcatatgctaacaatagccgagaagcccatgaatctcttcgggggtggagtaggtgtctgccatcgccttggccttggctaataagcggggaagttcttgactcccgttcaaggtaagggtaaaccggtccatccacatggttgcctcttggtgtaaagagtcgatcacccttcctctagcctctttttccgcgtacacttgtgcatactcgtccgcgattctatgctcgtgggccatggctagacccaactcttcttggtacttagtgatgatagctagcatgttggtctccgtctcgcataaacgctgagacaagcttcttttggacctcgaacaagcaattaactcctctttcagaaccatgctatgtgctcgcgactggtctctttcttcccttcgcaacttgagttcactattgctaccccacagagcttcgcgaaatttgttccggccatactcttccttgcgagccctcttggtc

SEQ ID NO: 31170 - DNA, 465 bp, Glycine max
ttaaagaagcaatgcattaccccaaatggattaatgcaatggaagaagagttgaattctattgagaagaattcaacatgggaacttgttaatctgcctcttgacaagaaacccatagcactgaagtgggtttataaagtgaaggtgaaatccaaatgaggccagacttgtggcaaaagggttcttatgaaaacctggagttgactatggtgaggtctatgcacctgtggcaagaatagaaacagtgagattggtggtagcaattgcaaatataaaaggttggtctatgcataaactagatgtgaagtctgctttcttaaatggacagctagatgaggaggtttatgtggaccagccactctttgagaaattgggacaagaagaaaaggtatacagattgagaaaggcaatatatggtcttaagcaagctccaaggggctggaacaaaaaaattgacagctttctt

SEQ ID NO: 31171 - DNA, 349 bp, Glycine max
agcttggatctgtggattcacttttgatctccactgatccatagcgaagaacattagtcgccacaaaaagaccaatccactttgacctttactgaccactcgagagtctgagcctccagatattcagaaaaactttttgtaacaatctgcccaataggttgggggaggtaaggtgtggaaattttgtgcaggaccccatactatttgagcaacgcctacatggatctatgacagaaatgggtgccttgatcactaacgatgggtctagggactccacaccttccgaacagattagactaacagaatccacaacaaccttattattatcaatagccgtgggcatggcttt

SEQ ID NO: 31172 - DNA, 753 bp, Glycine max
  unsure (1)..(753): unsure at all n locations
ttgagaccttagaacaccgngagactctataaactctcgcgcttcatggctgggggtacgagataaccgtttttggggtacacaggtctaattcacgccagtgtgagactcatgacaatcccacttggccgactgttggtctcacgtacgagactagtggaagaactccttgtccgcttacacacaactgtgaatatgcgctatgcctccacatgcccgtctattaaccagcatggcgttaagtagaccagaagacagcctctcaacccgaattcgatcacttctacatacaagactgccgcaggcccagaattggacccaatggctgccctgtattgcaagttattatttacctccccttgacggcaactctcgacgttgtgttatttatctacatcccactttgatgggtagccacttcatcaacaaactgaatctagtcttcttgagtgaccagttttatgtgttgagtcacaaaacctcccttagtaccctccgctcgggcgtatacttgacttgtaacgccagaaactgcaagcgcgcgccttttgcgtacatttttttaaatattcccgtataacccgtggcgtcgtgcccttgggttggaaaaactcacacattttgggggagccttccttgaaaaactggaaaccattccaccctctcgttaagagactcccaaaaggtaagcctttccctcaatttattgtttcaaaggaaaaatgcctttttcccaaaagggggaaatgttcg

SEQ ID NO: 31173 - DNA, 407 bp, Glycine max
agcttgctctaaatttacattgatgtttttatttatgggaggagggtgtatgccatttttgttttaaaagtaatgtcccactggtaaaactaacttttcaaatttttgccttcccccgaaatggcccccaagaaacttgcctcaaagaaggccaagaaggaccaggccacccaaagaacttattcccctcccgaatattaccatcaccgctttaagaacgctggacacccaccgcgcttctaggccatcaagggatggtcgtttctccgggagcgacgcgttcagctcaaggacgacgagtatactgatttccacgaagaaatatggcgcccgcggtgggcatcactggttactcccatggccaagtttgatccagaaataatccttgagttttatgccaatgcttg

SEQ ID NO: 31174 - DNA, 455 bp, Glycine max
ttggctgcgcacgagctcagatttcgtgtgtatttatagaagatgacgcattggaatcgattacaggtattggtaatcgattacaggcccaataagccttctggtaatcgattacaggatgttgtaatcgattacaggctgcctgttcatgtgtaatcgattacactggatggtaatcgattaccagagcctatcctaggctagtttctaaaagaatatctatatttatgctcaaatacatcctatatgtctaattttcactactaatacactaaattcaatcattcaattactatatacacaagaaatcataaattctatcataaaaacaagaattcaaacaagaatccaccaaattaatctaccatcaaaaaggtgaaaagttaattcaacccatccatcaaccaatcaatcaacccaatcatcaaacaatcaaatcctatttttctaaatct

SEQ ID NO: 31175 - DNA, 651 bp, Glycine max
agcttagagagatcctagagattctcttaggcttaatcttatatccttccctctacaagaaggttagaaccctaaggacgataatttgggcaaggaaagcttttactatgtaatttattatttgcattgtgttttgatgttgattttgtgatgctcatttgatgaatattgggtgtttaagttgtttttatcattttttggtgttggtgtagattgagggttggatttctttgtttttaggtcaaatcatgatcggcataattttgcaatctcgctaagtgagcaaatccctctgatttagaaaatttagaaatttcataagactcgctaagtgagcaaacctcactggaaaaaaagaagattggaactcactaagtgagacacacaagtttgtcttagctagaaatgctcgctgagcttgtcacttctttgtattttggctttagagtttccaaaattataattaatagttattttctcttcttagtaatgaataagattaattgtgaaattaacatagagataagatgtttggtattacaaaacttgaatagaattataggaatgttatgatttgaaaaaatagagttacgttaggaatatgctcgatctaagaactgatgatgtgtaagaatgtaaaatatctttttg

SEQ ID NO: 31176 - DNA, 400 bp, Glycine max
tacaaaaccatgcccatatgccattgatgtttttcaccgagcacttggtaggcgcatgtttaagcatgaatagcaagagagtgggggcaacgtggcatgccccattgcttcagaatgcaccctaggcctaaggccatcccctacaaccccccaattccaaccaatcaagcatgaaacaaaaccaaaattggctccctaaatttgggcatattcacacaatttaaagcaccaaaagaagaccaagatatattaatggaaagctagaaagctcaagaatgagatacttacttgatggagtgaggtacaacactaagaatggaagcaaaaacgcaaaaatggtggcctaggggtgaaaaacccttaattcccatggtgttggcattttttgagtgaggggggg

SEQ ID NO: 31177 - DNA, 592 bp, Glycine max
agcttgctgatggtggtgttgaactttttacttttgtttatcatagtaataatatgggggatggggcacttgcatagattatcgatttgttatgagttattatctacaaaagagagttctctttagtcttggggttgtggtggggacattgctttgcaatatgcatattcgcagctgtggttgtgtaatagtaatagcattttttaaagcatttttaatagcatttttgtgtaatagtaatagtttagtttttaaaataaagtaataatccttagaaaacattttctattatcgtaataaacttttgttagtttatttaaatttaaatttatcattttttaccatgatattattaaatcgatgataataaagaccacattatgtatgaatggaagaatgtcacattagctttaaagattttttcccactttttcctgatactaaagtaacagtacgtactacactcatactctctttttattatcatatagaagaaagaagaggaaaatttctaattttctcttttagtttttttaaaaaaagtatgaaagttgcgtaaaaaaataaaaaccttaaaaggaaacatttctca

SEQ ID NO: 31178 - DNA, 464 bp, Glycine max
ttctaaactttgtttcaaaactttgtttttctgcaagtggaaattctgcagaaaacaaaatgttggatcaagtggcctccgaataaattaagaaaggggggttgaattaattattaatgtgtccttactaatttaaaatttaacccttttaatgttactagatttccaattagcttttactactaactttagaaagtaaagaacataaataaaaacttatccaaaagtaaaagcgataattaaaagtccatagcagaaattaaagagtgtatggcagaataatacaaacccccgatttatactgggtctgccacataccgtgcctacatccaatcctccagcaacctgctgttcttgagatttcttttaacccttgtaaatcctttacatgccaaagatccacaagggatgtccccttccttgttctctttgaaaaacccagtggatgttttcctcccctttga

SEQ ID NO: 31179 - DNA, 544 bp, Glycine max
agcttaaacattcactttcgagcctctcgatatattacgggactcaatcaaacatccgagaaaaaagttattgtcttttgaatttgctcagaggttcaacattaaatttcgagcgtctcgatatattacgggactcaatcagatatccgagtaaaactttattgtcgtttgaattggctcagaggttcaacattcaatttcgagcgtctcgatatgttatgggactcaatcagacatcccagtaaaaagttattgtcgtctgaattggctcagagcttcaacattcaatttctagcgtctcgatatatgacgggacaaaatcagacatccgagtaaatacttattgacgtttgaatttgctaagagcttcaacattcaatttcgagcgtctcgttatattacgggactcaatcagatatccgagtaaaaaagtattgtcgtttgaattggctcaaagcttaaacattcactttcgagcgccacgatttattacgggactcaatcaaacatccgaaaaaaaagttattgtcgtttgaatttgctc

SEQ ID NO: 31180 - DNA, 499 bp, Glycine max
acactataaaaactcagctttgagcgaatttaaacgacaataacttttttctctgatgtctgattgagtcccgtaatatatcgagacccgtgaaattgaatgttgaagctctgagccaattcaaacgacaataacgttttactcggatgtctgattgagtcccgtcatataccgagacgctcgaaattgaatgttgaaacttcgagccaattttaaacgacaataaccttttactcggatgtctgattgagtcccgcaatatatcgagaccctcgaaattgaatgtggaagctctgagccaatttgaacgacaataactttttactcggatgtctgattgagtcccgtaatatatcgagacgctcgaaattgaatgttgaagctttgagccaattcaaacgacattaacttttttatctcggatgtctgattgagtcccctaatatatttgagacgctcgaaattgaatgttgaaccttttgagcaattcaaacgacaa

SEQ ID NO: 31181 - DNA, 498 bp, Glycine max
agcttatcatatgggatgattcttatacaactcataagcattactttgaagttattcacaagacttctagagatatccttcgattcattaaggttgaaagtttgaatcttccttttaggaaaatacttcttgtcattccaaagggttcaagacaagaagttatttatgctagcattaattcaacacaatggcaattttgtatacccttaacattgatgaaaaatatgaggctccaaattgggtcttcatcatttgatgttaatgagatgaaggatttctcaaattgaatactaagtattggagatggaagtattaaagaaagaaatggtagggagattgacattcaaaaactacatgatatgcttataatgaattcaagtgactctattgcttttattattgatagcacttatacattattgctggagaatgtgattatctttcattttttttttcaacatagggaaatgctagcacctacaaatgatattgtatcga

SEQ ID NO: 31182 - DNA, 335 bp, Glycine max
tgaagtgagaaagcgtggaagtgtctttcttcccacttttgtttgttgaccacagagtggtacctggagatatgtcgcgggggtcaggagaccttggggacgtcaggtggggtgctattgcccaaaaccaagcttgaccaatcccgacccaatccgggcatagtcagtcagtgagaacctgtgacgtaccaaaacaggcgagctcctgacagtaaaccaataaaagaacaaagaccacaaagcaaggaggcttgtgtggtggctggccagctatggatcttgggtggtatctggaatttggcctctggtaatcgattaccaagggtgtgtaatcg

SEQ ID NO: 31183 - DNA, 935 bp, Glycine max
  unsure (1)..(935): unsure at all n locations
acccacaaaagaaaagagactttttgggatgggaccatggaangaaaacaacgcggcacaaccataccataaacaaaatcccacacagtaacccgccacaangtgggtggataccatagcaaaacccnnntatnnaaaaancgcccaggaaagatagaaagaagcaaggaaaagcatattcttttttacagagaaacaaacctatagaaaggagagcagggaacaaaaaacggacacgcaagaagcaaatcgaggggaagaccaaacagtagcagggagaaaaaagcattaaaaacgggggacactacacgacgagaaaaggaaagcgcacgggaacaggggaagaaaaaatcaaaaaccctcacagaacgaagaataaggacagacaacaacggggaccacaaagacgaaatacccacacacacgacatcaaagatcgcaaaggacgacagcaagcaacccgaagagaaacacaaaaggactccaccaagaaaaaagagccgcgacaagagagggtgaacaaagacgcggaagggggagcaggataacgcgagacgaaaactaaagacgaagaacgcggagaaagagaaaacaccgaagaaacccacggacccgaggagaaaagacacaacgaaaatggacagaagaagcgcacagcaagaaacgacagaaaccgggaggagcgacaccacagaacaaatagggaaaaaaacaacgccccaggaagggatgaacaaagggggaagaaacagcccacaagagaaacaagcatctcaagagccagggaaaacgtggaaaacggagcgtgataagaataaacaaaagagcgcacggaagaagggcaacaaaccagggggcaccaaataagtagagaaacccagagccgcgcacccggggagagggaaggacantcgacaccctcacagggacaaaag

SEQ ID NO: 31184 - DNA, 521 bp, Glycine max
agcttccaaatgagcatccaatccccttttcttttattatggctattatctagaatattctcaatggtattgtgataggcagttctaacaatataggtacccgtaggggagaatttccaaattaccttatcattctccatcacgttcaagaggggaagagctagaattttttcagcatcatggtggctaaagattgcttccacgagatatttcttccatgcacacttattatgatctattaaatcatccactcttaagccataattttcatttgaaggaaaagtcgagacataggaattgttatcatttttaagccaaggttgggactaagcatgaatagaattaccatttccaatcctccattgctaaactccttttatcactacccgtgaagtatggatactacgccatacaaagcttgaattatgccccaattgtgcatccaaaaaatccaccgacggaaaataattggctttgaaattctttgctattatagtacttggctggccataaatcttcaa

SEQ ID NO: 31185 - DNA, 431 bp, Glycine max
ccctctaagtccttcaagtggatcctttcccttgctcttggtcatgtcctcatcactttccttaatcaatttccgcattttccatcaaggtttaatcttatacaatcctaagtcagcccttgtgccatgagggtgcatatcatttggtaatcaaagctccggttctaggatcaactcttcctttgctggaaatattgggtaacatccttcttttttctctttgccatttatattaccttcttatacatatatattttttttaagctgaaccattgcaaaagttaagccttttgatctctttgttatatatatataaaaaaaaagcagaatttcgtataagcaaaattaaaaaaaaaaatgggctgaatggttcatgcttgaagaactttttaaaaaaaaaaactctttaaggtaatatattggttgcatga

SEQ ID NO: 31186 - DNA, 396 bp, Glycine max
ggaactataaatactcaggcttcaccttttggtccttcttatagttgatgttttataaaacatgctctattttcatctcccagtccaagtaggcctccggatcattctttcctttaaaaggaggaatgttgagtttaataccatcaattcggttttgtctaggaacaccatcattccctcttctcctcctttcttcttcattatgatctctgttctccatttgatccaacctctcatggagcacatcatctcgatggttcattaacctctccatatgttgcatcaaatcttgcatttggaattgccaaagcccccctacatcattaggatttgtgcctgccatctcaaacaaacaaatcaaacgtaaccacacaattattacgtggtggttgaata

SEQ ID NO: 31187 - DNA, 613 bp, Glycine max
agctttttttccattggtgctatctgaaaatctgtttttattaatattaatcactaaacattcttcagttggttaaaaactcatgtttcatgattgaaaggtataaaagttatgacttcatattaatttcttcttggtctatgacatgatttatagtgtatttatttctcacattctaattgactttttatatgatggtgatgcacttgcagatcagaattggtccctgcatatgttcgtctgctgcgtgataatgaggctgaagtacgtattgctgctgctgggaaagtaactaagttttcccgcatattaaatcccgatcttgcgattcagcatattctaccatgtgtgaaggtacagtcacagtaaaaaaattgggattcttagaggttaacatttatgatactagtatgattacaactgataaagtttgcctactataggagttatcaactgattcttctcaacatgttcgctctgcactggcttctgttataatgggtatggcaccggtgttagggaaggtatataaattactatctaaactcattatttatactgacataaatttaacacatttaaagtcattccaaatgtggcttaagttattatg

SEQ ID NO: 31188 - DNA, 506 bp, Glycine max
tgaaagatctcatgaaccaagtcgtgcagtattctggagcagcagtcttacttagccaagctgttaggttacaattatgatatacaatacaagtcaggtaagtccaacgttgttgcagatgcgctttccagggtacctcatcccgaagcaagccagtactggttattatctatccctcacttcatcttcctcgatacactgcgccaacacttcaccaccagcactcctttccaggccatgcttcaccaagttacgagtgaccccagttcacaccccgagtttgcacttcgcgacggcttgttattcttcaataatcgaatttggttggaacccgacaaccctttcgtcgataccttgattgacgaattccactctactcctatcggcggtcacctcgactttgccaagacactccattgcatacaagtcagtttccactggaacaccctcagccgtgacgttaagcgttttattcgacaatgcccgaaatgccaacaagtcaaata

SEQ ID NO: 31189 - DNA, 653 bp, Glycine max
agcttgaaacttgcagaaaagctcgattacatttttgtttttgagacaatgactgatttattcaggagtctgtgctttaatcgattatcatgtgatataattgattacttctctttctacaattgttcataagtgaacaagaatactttaatcgactactttgagtatctaatcgattacattgttcttgagttgttccaagatgtttggaagaacactttaattaattaaaaagataatctaattgattacttcattgaattaattgattaccttgtagatttaatcaattacagacaattataattgttttctctataaataactgtcgcaacctacccttcggcgggagggcgacgcgagactcgcgggatgcgtgttccacgaaaggaatacgcgcggagtcgccaccaacgtttattcgaagaaaacgtcggaaaaaccggaaaagacgcgatctacgaacttttaagttgaaaggttcgggagttgtatttacgcacggggaaaggtattagcaccccacacgtccgtcccaagggacggcagcctttaatcgaatgtgcaaacatgactttgatttttatgttcttatatcctttataccctttttatattttttccttttgggggcgacaagggtgtttcccttt

SEQ ID NO: 31190 - DNA, 520 bp, Glycine max
tagtagccaactcctgaggatcaggcctattgtttgcaaacctggaatgagtacataagttctccccctcctccaaaattattggggtcttcagaaatgtgttaaaagtatcctcatcaaacttctctaagtgacctctcacctacttaagtgatttatcctcggggtcatagaggttggcgttaaactccttcataatagcgatgtctatgctactgtcagaaaaatcagtcagtttcacatcccaatggcgtctctcgggttcctccttgaactcatcaaactttgtataatagactaccacattcctctctagtagtagcttgtgaggcaccacaatgtctgtatatctctcccaagcctcttgggatgtgaaccaggatctatcaaatttggcttgggtaagtgtataaggagctttcctattcttagacgccctctgccaaaccttagacaaacacaagagattagcccaagttattttcacaaaaaccagaaaaataaaactgaaattttgact

SEQ ID NO: 31191 - DNA, 437 bp, Glycine max
agcttttgaatggcggaaacgttttattttacatactcacctaattttgtttcaagtcttgattggctactttttctttgaatcaagtctggccactagattgaacgagactactagcattatttgtgttagttggagattcggaatatcaggcaaacagatctgattttacacattaattggtttttgatgtaaatatttaaacataaattattgctgctgaaacacattctcaattaaaatcaattcttataaaactaagactatgtggaacaatatatttaaactagtttataatttttttaatgaacaactgatgtgactatttgggaaatatattttcaattactattcagtaatgtttaatattttttaaaacactctttgaagtagcatttttttaaatgtaaacttctatttttttaatttttctttaa

SEQ ID NO: 31192 - DNA, 568 bp, Glycine max
agcttctagccaaatggacttaccttgaattaattcctttgatagcccttttgagccttgtttccctttccttgttttgaagctcactacaagccttaagtgaaaaaccatgatatcactgttagtgcttagctctactgagttttaaaagattggctaagattttgttaaaacataagcacttagacaatgaaggaaagctggagttgctgcacatgatgtccaacgttatgtcaaggaataagatcgggctgcacaatgcacaaggcaagataaaatgtcaaatgaagaattgaagttgcaggatccacgatgtcggatacaatgtcctgacatcctgcccgaaaatactggagttgctgcacaatgcataagtcaagataaaatgtcaaatgaagaattgaagctgcagaatccacgatgtcggacacgatgtcctgacatctggcccgaaaatactggacacataaatctgttatatctttaacagattattgtgtagttagcaagagataagatgatctatcttctggaacgaattaaaagataattaaagttcgaatttcaa

SEQ ID NO: 31193 - DNA, 403 bp, Glycine max
atactcagcttggttccaggtactcacccgttgaggatcttttaacgaggagaacgaatgaggaacgtcgaagaacgggtcacacctttgcgagatttctcacggaaaacggtgcggaaacgtgtccgaagcgcctcggcttagattttcttcacggagataatttttccaccgcctattcgatagatagagaagtgcctaaggggctggacccctcccttctttatttactccgctatttatatgcgaataagggaggcgtgtgccgcccacctcggccaagcgagcaaggttgcttcctccataagccaccgccttctggaggaatcttctggagggcccaaatgggcctgggtgctatttgcacccccattttttctaagggcacccccctctgctggtt

SEQ ID NO: 31194 - DNA, 639 bp, Glycine max
agcttgctgatggtggtgttgaactttttacttttgtttatcatagtaataatatgggggatggggcacttgcatagattatcgatttgttatgagttattatctacaaaagagagttctctttagtcttggggttgtggtggggacattgctttgcaatatgcatattcgcagctgtggttgtgtaatagtaatagcattttttaaagcatttttaatagcatttttgtgtaatagtaatagtttagtttttaaaataaagtaataatccttagaaaacattttctattatcgtaataaacttttgttagtttatttaaatttaaatttatcattttttaccatgatattattaaatcgatgataataaagaccacattatgtatgaatggaagaatgtcacattagctttaaagattttttcccactttttcctgatactaaagtaacagtacgtactacactcatactctctttttattatcatatagaagaaagaagaggaaaatttctaattttctcttttagtttttttaagaaaagtatgaaagtagcgttaaaaaataaaaacataaaaagaaaccttactcaaataattatttaagtaaaagccccccatgataacgtaaattaaaatgg

SEQ ID NO: 31195 - DNA, 380 bp, Glycine max
ttctaaactttgtttcaaaactttgtttttctgcagtggaaattctgcagaaaacaaaatgttggatcaagtggcctcataataattaagaaaggggggttgaattaattattaatgtgtccttactaattaaaaatttaaccttcttaatgttactagattcaattaagcttttactactaagttaagaaagtaaagaacagaaataaaaacttaaccaaaagtaaaagcgataattaaaagtacatagcagaaattaaagagtgtttggaataataagacatacacaagatttatactggttcggccacaaaccgtgcctacatacaatccccaaacaacctggtgttcttgaaaattccttttaaccttgtaaaatc

SEQ ID NO: 31196 - DNA, 610 bp, Glycine max
agcttagaatacctgctaccaattcagttcccaagactaacaacaatttcatttccattaaatctattttgtcttgtaataaagaagctattgatatctggcattttcatttgggtcatccttcatatgatagaatgcaattgttgaaacaaacttaccctatgttgacttgtgataaaacctttgtttgtgatactttccatagagcaaaacagagaaaactcccatttcccaatagtgactcttatgcttctagtcctttctctttgatacatgtagacatttggggtccttgtgccacaactgctttgaatggacataagtattttcttacaattgtggatgatcatactagatttgtttggatttttataatgacttcaaaagttgagactcaaactcatttacaagcctttgtttcctatgttgagaggcaattcaatacaaaagtgaaagctatccgatcagacaatggtgcagaatttattatgaaacatttttatcataatactggtatcatacaccaaacttcttgtgttgaaaccccccctctcaaatggaaatatggaaagaaagccatcacatttattaaatgttactcgaacccttt

SEQ ID NO: 31197 - DNA, 545 bp, Glycine max
ttgcggatttggtctttgtcggggaaaagatctaagcgggtctgaaaagaggcaaatttgatcattgtgctttgatgaatgagaaaactggggcaaatgaagaggatgagaattagaaaggaacccatgttatggctgccattcctacatggccaaacttcccaccagcccaacaatgtcatcgctcagccaatatcgacctttctcattacccaccacccagtcatccacaaagtttgttggccgcacatccaatgtcaagcgcaaaccaaaacaccaaccaagaaatgaattttgcagcgaaaaagcctgtggaattcactccaattgcggtgtcctatgctgacttgctcccatatctacttgataattcaatggtagccataacctcaggcaaggttcatctacctccatttcttcgagaatacgactcgaatgcaacgtgtgcttgtcatgggaaagcccccgggggcgttaattgagcattgttagggcccttaacttaaggtgcaatgtctaattgatgcgggctggctgaaatttga

SEQ ID NO: 31198 - DNA, 392 bp, Glycine max
agcttgattgcctcattccaaaaatctgctctctgcttgatgtataaaccatgaacaatgttagccagtttgttggatagcaaagaaagaagtatgaaatggaaatcagaagcagtaatgatgagacacaaacccggcgctcttgctctgaagtgatggaattttcggatgggtccatgttctccttccactattttttcccattgcagtttttttgggaatttattttctgaatctggtttattttcttcccacgttcaaccgagcacaaacgtatctctgtcacgttcataacaaattcacgtccctattctcaaacccaagttctgatacaaattggttgagctctgtgaaggacagactttataaataagatggagggttctcaattt

SEQ ID NO: 31199 - DNA, 439 bp, Glycine max
tctaaagctccttcaagaatgaagctctgtttccacttgttaaacgcttggcctcatatttcttaataaagggggatgcgcctcaataacttttatggcactttattttcacaatctgatttgatctccacgtgcattacaaatcatgtttttaaaaagatgggaccacacctatattataccctcaaagatgataataacatgtttatctctactagctatcaccctatcacctgtaaggagacaaattactgggccttacaatatctctaacatacccttgtttacatgaacaaaagagtccgagctaatgcatgttattaagcacaaagctattaattttcaattatctcttgcatacatttacttccttttctctatttttagccttctcttcccataactaagatatgctttgaaccttggtagctggtacttt

SEQ ID NO: 31200 - DNA, 380 bp, Glycine max
agcttaataattgaataaattaaacattacgccaaaaataaaatgcttaaaatcttctaaaaaaattaaattcttgaaataaaataaagacaaaaaataatttaaaatttaattgaaaacaagagagagagaatgaaacattttatttaagggacttcattcctaattcctaattatatttaaaaaagaataaagttgaagagaaaaattatttttgtgtggaatctcacgaaacaggacttttatttctcgcatatatgtattttggaaaataattttatttgaaacagaacttaatattaaatatgattatttttggtaagaatttaaatcttgatttatcacgagagaaatttgtccctttaactaaaattaaccga

SEQ ID NO: 31201 - DNA, 275 bp, Glycine max
taatttcttgacagacatactgggatcttttttcatcgaatcaacaaaacactcattactcctatttggacagagtcgttgaaagcatccgaacaatatggtggactgagtgtacatatcgctttccaacctgcttatccgtttgtggaaaagatatcacctcctatgacttctaacacgaattacagcggcaagatgaagatgccggtccctttggataatgagacacctttagttgagaaagacccttgccgattcctctgatgatgatgatc

SEQ ID NO: 31202 - DNA, 647 bp, Glycine max
  unsure (1)..(647): unsure at all n locations
agcttatcgtaaggattaatctataatatttatatttatacctttatatatgtagtatattctatggattaatctttatacaaatacatgaatcagatcagcttaataaacaacaaaagtcagcattattgtgtttgcccgttaatatttacgtggtttttgcgaggaataaaattttgtattcctctgtttatttatatggcaatgtttcgtaatttgaaaaatacgttgttgcttttaaacgttcacatttgagagatataattattctcgatgttttcttcggtgttttaaaaaaagatagcgcggtaacgcacggtttcatataataaattatgtatcagatttaaaaattaatttaaaattcaagctatagttcatagaatgacaagttgacaataactaagcttgtgaaataatttattttgggcacggaacttcattnttttacaacaaaaaaaaacaaattcactatttattgtatttctttagcaaaaaatttatgccaattgcttaaaccataaggtataactaacttgatctctctttttttccagtaaaaaaaaaaacgtgatctcttcttaaaagatatatgattatttatttttaccacgtattattttcattaaaaattaataaaaatttat

SEQ ID NO: 31203 - DNA, 524 bp, Glycine max
ttattctttcatcttgaactttcactatttcaaaaaagcgtggaaccccctctggagtgcttacattctttttcaacttcggaagaagatcaacttgcttctcctgaaaaaagaaatgatatcccaattatatttatcaaacaaacatccattttaagtattatcagcacaccaaaaacattacagaaccaaatagatcatcaatcattggcaaatattattcaatcaagggtattattacagtatgcttttactccccaactaggatttaaaaggttcctaggactatactccctccaaaaccaatataaaagtgctattatcactgcgtttttaaattcaactattcaagtactacctccaatcctttttataagaaacaagtttcaatgtaaactactcttaaacttggttcttataaaaaggactagagggagtaggttaaaacccaaaaactcaagcttttagttgggaagtaaatgagtgatttcaccattttcatataaaatcttttaaaaacaaaa

SEQ ID NO: 31204 - DNA, 625 bp, Glycine max
  unsure (1)..(625): unsure at all n locations
agcttattgtatataatgtgtgctaaaataagttgtagatgttccctttgagttttgtttacgtataaatgtaataattttgggtcctaacattttgaaaaattgaaacgctcgtcagttttggaagctaaattgatggttgttaatgggtggtaatggccactaatgaattataacagccaataatgagtggtaatggctactaaatgcattcttgatggtagaatgcctatatatagcacatgtatttggtccctgaactcatctctttgaattcattctgatacaccatctagagagagcttgaaagaaccaaaacaagacaactcttcatggcaatggttggaggtatgatttaatttttcttttccgcatgtgtttcttatggtatgaagggcctggtttcttaaaaataagaatagaaatctttattttggttgatttccttgtttttggcttttgaatcatgtaaaatggtgtccaaatgactaagaaccaaccaggtctgcatatgggtggngttggcccgctagaggttgaagatgatgaatagtctaaaaaaaatgaanaatcccatgttttgggctagctaggtattgaacccatgtaaaatgttgtaatatgt

SEQ ID NO: 31205 - DNA, 406 bp, Glycine max
tgcttctatagagaagattcatccttggatctaaagccatcttatcatcagaagaaacattaccacaataaggaatttaacattgaaagcatcagaactatgaatatgactcgattttgctagcaataagctagttgtattaatgagtgggtaaatgatctttactcataatagctcagacaaaatcgccaacaacaaagtccactgattggcgcttctggtaagcttgtaactcgtaatttttagttgaaattgtcaattttacacatgcaatcttaattctcaacacactttttggatgagccttccaaggattgtgttgccttatctaacttttcttccttttccagtgataaggtaaagctaaaaaattgagtctcccaatgtttgatataagctttggaag

SEQ ID NO: 31206 - DNA, 449 bp, Glycine max
agcttgacgaactaatccacagatttcttttatctgaaacttcctttctgccaccttcctcttccactaccactccatcttcttcctttgcgaaggcactccttgcacacacacccatgccaactccaccgctcatgattactctgccgcccatgccgactccacctacactcctcagactcatgcagaagcatcccatacccttgccgactctgcttctcattgcggtcattcccctgcttgctaacaacaacccccatgcgtccttcgaacgccactgggtcacccatttccaaaaccccaaggatgacccctaacgccacaaagagctcgaccactccttcctcttttacgctactatcgacgccgcaaagtggttatactttctgaacactaaatctacattcaatcattcctttacccattttaatatggaatcccctttcaaa

SEQ ID NO: 31207 - DNA, 232 bp, Glycine max
aatcgaggaccacataggggtgatcgaagacacagcgcacattttgaagtcgaaccttaatagcggtggtaaaacataaggggccactgggaaatcgaaaacatacctctgggcaatcgatcaccacagaggcaaactcctggaaaaaaacccttcacctgaaacttccaggccaaacctttggcgacgtcagtaggaattccccctctatttaaaatacccttaccaagac

SEQ ID NO: 31208 - DNA, 653 bp, Glycine max
agcttcaacttacagggagtagtttatgcatagcgcaacaggcacttttggcacacttccaagagttcaaaaaccgtaagggattggcgcttagcacctcctggccagctaagcccagcttaaaagctcaagttacagaatggatctggggattagtgcaggataatgcgcttagcgctactacaatggaatgtttacagagaagaaatggcacttagtgcatcatccacgctaagcccacaagttaaagttcaattaccgcaaagatgtagggcttagcgcaatgatgtgcacttagcttaactattcagccaaccaatcaggggtctatgcacttagcgtgagcaagctcggcttagcacgttgtcataccctaatttcgtccggggacctttgcttgataacgtgcgaccattctttggtcctcgtgaggtgcttggcacccatcattaggcaatttgtgaaattccaggacatgcccaaaaaaaccaaaaaaatatatatgcacaatccgtaagtttccgtgacacaccggaaatcaaatggaagcatcgttgcataattaaagggaggttccgtaacattccgtaagtcaaaaaggggatgaatatgtaatccgcaaagttccgtaaacattacggaaagaaaacaag

SEQ ID NO: 31209 - DNA, 423 bp, Glycine max
atgggtccaagtggcttcttataccaatgccacgagaagtgtggtggtcagattcataaagagggaactgatttgtcgatacggactccctaggtagatcattactgacaatggcaccaatctgaacaataaaatgatgcaggaaatgtgcggggatttcaagatccagcatcataactctaccccttatcggccaaagatgaatggggctgtagaggctgcaaataaaaatattaagaagattattcagaagatgacggtgtcatacaaagattggcatgagatgctgcctttcgccctgcacggatatagaacctcggtacaaacttctactggggcaacgccatattccttggtttatgggatggaagcggtactcccatttgaggtagaagtcccttcccagaaatactagcggaatca

SEQ ID NO: 31210 - DNA, 578 bp, Glycine max
agctttgcggatttggtcttcgccagaaaaaagatcgaagtggatccgaaaagaggcaaatttgatcatcctactaggacgactgagaaaactggggcaaatgaagagggtgagaaagagggagaaacccatgctgtgactgccattcctatacggccaagtttcccaccaacccaacaatgtcattactcagccaataacaaacctcctccttaccccaccacccagttatccacaaaggtcatccctaaatcaaccacaaagtctgtctaccgcacttccaatgacgaagaccacctttagcacaaaccaaaaaaaaacacacaacaaaaaggaattttgcagcaaaaagcctgtagggttcaccccaaattccgttgtcatatgctaaacttgatcccatatctacttaataattcaatggtagccataaccctagccaaggttcatcaacctccatttctccgagaatacgactcgaacgcaacgtgtgcatgtcacggagaagccccggggcgttccattgagcattgtagggctctaaagcgtaaggtgcaaggtctaattgaaacgggctg

SEQ ID NO: 31211 - DNA, 273 bp, Glycine max
tcagcttggagaggatgcttcaatggaggaaaagattttggagagaaagagagaagggggagcacgaaattgaaggaagaaaaagggagagaagttgaactttgagttgtgtctcacaagactctcattcatcaaagttacaaccagtgttacacatgcttctatttatagactaggtagcttccttgagaagctttcttgagaaaacttccttaagaagctagaacttagctacgcatacccctctcataactaagctcacctccttgagaa

SEQ ID NO: 31212 - DNA, 605 bp, Glycine max
agcttgaaattgaaaaacggaagatgtctattaattcaaatggtcataacttatcacaccgaagtccgattcaggcacataatatatcgagacgctcgaaattgaacaacggaagctctcgagaaattcaaatggtcataacttttcaaatggaagtccgattcaggtgcataatatatcgagaagcttgaaattgaacaaaggaagctctcgagaaattcaaatggtcataacttatcacacggaagtccgattcaagagcatactatgtgaagatgctcgaaattgaacaacgaaagctctcgagaaattcaaatggtcataacttgccacacggaagtccgattcagacgcataatataccgagacgctcgaaattgaacaatgaaagctctcaacaaattcaaatggtcaaaacttgtgacacagaagtccgattcaggcgcataatatatcgagaagcttgaaattgaacaacggaggctctcgagaaattcaaatggtcataaagtgtcacacggaagtccgattccgggggatagtatatcgagaaggtcaaaattgaacaacggaagctctcgagaaattcaaatggtcataacttt

SEQ ID NO: 31213 - DNA, 484 bp, Glycine max
tcatgagagagtcaaagatcaaattgagaggtttaaataaaagctatgctaaacaagccaacaaagggagaaagaaggttgtcttcgaacccggagattgggtttgggtgcacatgagaaaagaaaggtttccggaacaaaggaaatcaaagcttcaaccaaggggagatggaccatttcaagtgcttgaaagaatcaatgacaatgcttacaaagttgagctgcccggtgagtataatgttagttccaccttcaatgtctctgatttatctctttttgatacagatggagaatccgatttgaggacaaatccttctcaagagggagagaatgatgaggacatgaccaagagcaagggcaaggatccacttgaaggacttggaggacctatgacaagggctagagcaaggaaagccaaagaagctcttcaacaagtgctgtccatactatttgaatacaagcccaagtttcaaggaaaaaagtc

SEQ ID NO: 31214 - DNA, 440 bp, Glycine max
agcttctcggtacatcacgggcttcattcttacacccatgtcaaaagttatggccctgtgaattggtccacagcttccttgttaagtttcgagcgtctcgatatatcatgtgtctgaatcggacatccgagtgaaaagttatgacaattttaatttgtcgagaacttacattattcaatttggagcgtctctatagatcatgggcctaaatcatacactcatgtgaaaagttatggccgattgaattggaccatagctttcttgcttaatatcgagcgttgttgtatattatgtgccagaatgtgacattcgacgccttagacatgaccatgggaatgtttctagaggtacatctttaattctgtgcatcatgatatactatgggcctgagtcggacatacaaggtaaaggtcatgagcatttggattatttgagaactt

SEQ ID NO: 31215 - DNA, 136 bp, Glycine max
tcttcaccgattctctataaatagggggtttattgaattgtgcactgcttcagacccttacgcacgtctatctcttgctgattttcttccaaaaaatggggccgtgaagaacatcctagccgaggcgctttcgtaa

SEQ ID NO: 31216 - DNA, 555 bp, Glycine max
agcttccaagaatcaagatcaagattcttgactcaagattcaagaatcaagagaagacttaatcaagataagtattaaaaagtttttcaaaaactgagtagcacatgaatctttctcaaccccccttcttaattattctgaggccacttgatccaacaagtggtatcagagcaattatcttgtagaaagtctaaccacttcaagattcatggcctcttcaaatcctttgtttcctgaaggaaattccattcatagaccacccattttcaatggtgagggttaccattattggaaaacccgtatgcagatttttattgaagccatagatctaaatatttgggaagcaatagaaataagaccatacatacccactgtagtagatgtaagcacaagcactacaacacaaaaacctagagataagtggacaaaagaagatagaagaagaatccagtttgatctcaaagccaaaaacattattacttcagccttaggaatatatgagtattttagagtgtcaaaatgtacaaatgccaaagagatgtgggatactctcca

SEQ ID NO: 31217 - DNA, 373 bp, Glycine max
cttaaagtgtgcccgagcgattcatccctgtttgatgtcgatgaccaattggcgatcagaatagccattccttggattatagggttgaaccatactcacgcttgtacaaaaaatgttcatcactggaaattgaaatcttgctgtgaccgtctagcaccataggggcaatagatgaatcgagtcacatcactgcttcatctactggccaacatatttaggactatcgatggacttgctacttccatttacaccttgcctaatatgactctgaccatggtgaagatcatacatgatgcaaccccatatcctgcgtgaaaagaatcaatacttgaaatgcgcatgattctcatgcatccctgctttttattggttg

SEQ ID NO: 31218 - DNA, 554 bp, Glycine max
agctttttatgaaaaaatatgactcttcacaattgattttaaatttcaacgttcagatacactggtaattgattaccaatatcttgtaatcgattacaccattttgaaatcaattggaacgttgcaaattcagttaaaagtttttgaaatcaaactttaccactggtaatcaattacaggaaactggtaattgattactagagagtaaaaactctggtgacttagaaaattttgagaaaaaatcttttgaaaaacaaaactgtgctatgcttgttttttgaaaaaaaatttcaatacttcccttgtgaagtcttcttgatttcttctcttgaatcttgaaatcaaacttctcttgattcttgaatcttcttgatttcttcttgttgacttaatcttgaaatcattccttgggctttttgtcatcatctttgtcattcattgaaaaatctaaaccaatcatacacaagacatttattgaaaaatctaaaccaatcatgaagaaaaacattgataacccaaattcaaaatataaccacataggcttattacataaa

SEQ ID NO: 31219 - DNA, 299 bp, Glycine max
ttccattcttttagaaggcatcatttgatttgccttcttctggagaatcttcattgcttcctttcctttttcctttaaaatcttgtccatgaatatgcatttgttctaaagattttacaacatcatctaaaatatcctttcttggagaaatagaattagactcattaaaggaaacatgaatagattcttcaatagacatagttcttttattatatattctataagctttactatgcaaggaataaccaaggaaaattcccttatctgacttagcaataaatttttcccagttatccttt

SEQ ID NO: 31220 - DNA, 529 bp, Glycine max
agcttgaatttggtttagacatgattgatacatgatttgggacttgtaggaattgatttgggcaagattggatgagaggaagtgtgattttcgaaatctgcacttatgcagaatttttgctgtgaaattgtgcagcagaattttgcacaagtgcagaaaaatgcttgtgtgtggttggctgtggaaagtctagtgcagaatgagttctggatgtttgctagtagatcccaacggtcataatgtaggcttatgtactagagacttccagtaaaaatttggagtcgatccaacggttaacgaattggatcgaaggaattgttactggggtctttaagtgagaaaagctgtgattttggttgatgtgttgagcagagttttctgcctttgctctgctttgcttggctgtgatagcttgtgctgtttgaatgttgttttgcttggatgctgtggaagcttgggaggattgatggggacccggtgttgagagaaacgaggatatgggcttcgtgggagtacgtgagctcagttg

SEQ ID NO: 31221 - DNA, 513 bp, Glycine max
gagcccaaatcctgactcaccataaattttttcccagggtgagaatgtcaattcttaccctcggaagcaaaaaaaaaggggagagggaaaatttccaatcaaagaggaagcaaaaaaggagagaaggaaaatttccaatcaaaggaaaaaaagagaggaaagggaattcccaatcaaagagtgggagaaagcaaaaagaaaagaaagaaaattcccaatcaaagaatgggagaaagaaaaaagagaagaagaaagggaagaaagttcccgatcaaaaaaaaataatatgcagaaaggtctttggaccggacaatatctgaacaatacagaattgtcaccaaatgaataaaaagaaggaaagggaaccatgacctaaaatggtcttccccctttagttgccaggcaaaatcttgtgcgctagcaacctttttttcgccccgcactaaaccagaacagaaaaagaaaaaagccagaaaaatcaaaagccaaaaacacacaaaagccgaaaaaaaa

SEQ ID NO: 31222 - DNA, 598 bp, Glycine max
agcttgttgtcaccatcaacaatctgtttgttcttgaagtaactagccttgccaaaaccctcctcagggaaatggccactccccatttgagtcgaggtgtgttggccgtcggactcagagttcacaacctctcccccccactcaatcattgacgcgctgtcagagaggtacgagaatagaggagccggccagtatcccataacatggtcattcccaaactgcatccaccagttaccctctttggggtcctacatacatattggttttccataatagacaacatcagatggcattgttccatattaataaattcatggaccctaaaaaataatgcagcattcacgtataatgaaatgttagtgtcagagattctcttgatttataattaactagtgtggtctgcacaaaacagtggtgttaatatattaatggtgcattatggtagtgtttgttaagtgctgggcgtatttttatgccagaatgtccaatatcaagagataatatataaaatggaaataaataaataaaaaatgtacctttcagaccaggatgctgatatcatattgggaagagctatacttaaaaaagggggagatgc

SEQ ID NO: 31223 - DNA, 503 bp, Glycine max
tagagttcaaaagggaaaaaggagtaaactttttaaccaaagggataaggatgggcaagggagtaagcactcacctccaagaacacatggatatgaactttgggcactatgtcttaagatctcttttccttctcactcttcctcttctcattctccttattctctctaattgtttctttcttgtttatctctctaattctctcttccttattctatttaaagtgtgtgtgttgagcttagcgggcctcgacccattttgggccttgtttccccatctgggtcctattattatgtatgtcaaatcctatcaagctaactattattaataatgcctaagggtatcctttaaccatttagattaaagactattccataaaagatctctgaattgggtattactaaagtccaaaaatttgggaaggtataaatattttttcaagaaaatggttgtattttgcatcataactgggaatcatctgttagaaatttgaaaagttgagttt

SEQ ID NO: 31224 - DNA, 456 bp, Glycine max
agctttataagcgcgggttcgggagacaaaggtcaagcgttcgcgatatgcgaagatgatattccgagtactttggatttggtacgaccatgccctcctgatttccagctgggaaattggcgagtggaggaacgccccggcatttacgcaacaagcataatgtaaacctttacggttttaaaagctctatagttgggcctaggctttagagtttttccttttgttaaggctttgtgtcttttgtttttgaatttataatacaaggatctttcttcatctgttcctggtctctacccattctcattcatttgcatgtttacttctttttctgaaacggcagatccgatgacgagttccccgaaggtactaatacctgggacccgtctatcgacttcgagcaagaaatgaatcaaacggaagatgaaggaaatgaggatgtgggacttcccccaaaac

SEQ ID NO: 31225 - DNA, 380 bp, Glycine max
aaagtatgccccagtcattcaacccttttttatggtggtgaagtattggcgaacagaattgccattccttggattataggggtgaaccaagctcatgcttttacaaaaaaaggtcatcaagtcaagttgaaatatggaagtaaccgtcttgcaaaattggggcaaaagatgaatcgagtcacatcactgcttcgtctactgccaaacatatttaggattattgatgtccttgttacttccagtttcaccttgacaaagatgtcatggaccatgttgaaaatctaaattgattcaaccccatatcctgcgtaaaaattcgcaatacttcgactgtacatcattcgcatgcatccatgcttttcattggttgcattgctcat

SEQ ID NO: 31226 - DNA, 543 bp, Glycine max
agcttagcgcgcatacgatgacttattttgcatctacggcttagtacacatctgcggtttagcctgcaccttgcggcttaacgcacattcacttatgtcagatggactttgcatgtgcacttcgtgcgagcacatgctggcttagcacacgatcaatatcacaaaacatgattgtgcttcattttaaaggaaaaaaaaaaggaaaaattaagcaattctttagggggacgaaaattgagaagctaagacacgagagaagagagaaaatccattcacttgggaccctttcctccattttctttcacacctcttgctttctttttgtattagtaaccctctcatgacaatgagaggctaaatcatccattgttgggagttcaactatcaaacactcttgatgtaatgattctaactatttatttaatgttatttaatattattggcttttctgtgcttaatatcatgtttatagctttattacctattctcatgtagtgttatagggtttatgcattggaaaatgtttatttcctatgaacatct

SEQ ID NO: 31227 - DNA, 371 bp, Glycine max
tgacggagtttggtgcatccgggatttttttccctttgagagagggtcccaattggattcccaattgctaacttacctatgtgaaggagacatcatggccgctaagtcccagctttccattgaggataaattctcaatacaaacttgaatatgtaggactatctaacaccgatattttagattctatttccacacagatgtgggaaacactttctcaagattagaatttaaacctatctcgtaatcatatacatggggagattgggactacattaaagaataccctatctatccgcactattgacctacaactcaaatcacttgcgtggttgttaaccctctaattaaagtaatgtgcgggaaccgtgacc

SEQ ID NO: 31228 - DNA, 532 bp, Glycine max
agcttataagaacaaaattgccttaatcatttccaaatatgcatgtgaattaggacgcatcaacaagaatcaagccaaggctactgtgcaagcaatcaatggggcaaaacacaccaaatgattataatgatggatggctcaaattctcacaaaggtaaaatcatcactttcaaattgagctttcaaaactatcatgacatgtagagaagaatcaaggatttcaagtcacaaaatgtcaagaacttttattttcaaaacaattacccatttcttgaacatatcctataattcaaagaaaaacatgcaaagtcgtacgtgcacatgaaattgacccaaaatattaaactgaaaatccgacgaaactaacaacattaacaaattaacacaactaacaaattaacaaaaccaacaaaactagcaaaaccaaagaacactcccccccccccccatacttaaacaacacattgtcctcaatgtagcacaattaaaagattaacaacaattaaattatcaaagagaatcggacaagtgt

SEQ ID NO: 31229 - DNA, 347 bp, Glycine max
atcaactatgcatctggcagaaaacatgaatggccttaccaatattagctgaatggccgtatctacacaaatatgcatcaccactgattctgtcgggaagataaagagtttcactacgaccatgacatctttaatgactaaaataggtatgattatggatgcacctgctacttgcaaagtcatctcttacgggcatgatctgcaactgttccaaacttatacacatggagagcggtattacaggaaagaaggctcctaagtcactaagagcctttttcacagtgacttctgcaattgaacagggagtattgacactgccattgtttttttgctagggtggtaagatc

SEQ ID NO: 31230 - DNA, 579 bp, Glycine max
agcttacccttatggcttgcctccggacttcactccccgtgccgctccggaagatgtgagccaagcccctaccttcgaggggcaacttcctccttatgccaattatcccctgcaagaagacgacgaaggagatgcccatctaggccctctgcttcccctcaaggatccagccccccatgaattaccccaaccaaacatagtccgccatgtcctgtcttcacccgcgcccgtaaaagaatccgttcccttcgcagaagataagggaaagattgattcactcgaagaaaggctaagagcggtagaaggcctcggcaattacccgttctcggatctagcggacctatgtctggtacctgacatcgtcatccctcccaagttcaaagtaccagattttgataagtataaagggacgacatgcccaaaagggcatcttcggatgtattgccgaaagatggaggcgtattctgcggacgaaaagctgttgatacatttcttttcagacagcttggctggagcagccgtggcatggtataccaatctggaagcatctcagatccggtcgtggaaggatttggcaac

SEQ ID NO: 31231 - DNA, 339 bp, Glycine max
caacgaactctatgaccatctccttggagagaagcatttttctaatgaacagacattcagtctctatgtgcttatttctcctatgaaagactgaatttgacgcagatctgaatagcagccggattatcagaatccaacttcatttgcaactatacacagaacctcaattcttgccgaaagtgaataccccacatgagtggacaagttaccatagccatagatcgacattcaagtgctgcactagatctatcgacgacaggatgcttcttgcttttgcgagagagacaatttccttccacgaagactcaagcgcctagggtagacctcctattaatggga

SEQ ID NO: 31232 - DNA, 517 bp, Glycine max
agcttgtgccgatcccacatggttggagcattcttacaaaacagtgtgacgctggctggtctccctatgattttaccaagcgagagtgacttgacttattagtgtgtggtttgtcttgtcatgtactcctaggcgcccgaagagatttttcactgtcatggtaccacattgcatataggattgagtcttagtgtatctgtttcataacgcttgtgtattgatcgatattgattgatttagtgatattgtgttttgatcattgagtacgtgaatgttgtgaaaatgaatgagacgtgtggtgttgtgatgtgatgttgcgcgataaagtggtgaaataacatgagttatgcttaaataagttgcattttgtttatatgatatttatacctatatgttgtcttgtttctctttattagttaggattatgataactcacttctcgtgtgctatttgtttttggatcttgtgatgatctcgaactttgtgttcatggaagcagatggttaggtgggtgact

SEQ ID NO: 31233 - DNA, 504 bp, Glycine max
ttttgatgatgacaaaaagccccaaagaatgatttcaagattgagtcaacaagttcaagataaagattaatttcaagattcattagaagaaatcaagaagattcaagattcaagagaagatgatttcaagattcaagaaaagacatcaagaagaatcaagattcaagagaagatgaattcaagattcaagagaagaaatcaagaagcaacaagtcaagacttcacaagggaagtattgaaaagaatttttcaaaaaccaaacatagcacagttttgttttacaaatgagttttctcaaatttttctaagttaccaaagtatttactctctggtaatcgattaccagtgataaaatttgatttcaaaaagattttaactgaatttccaatgttccaaatgatttttaaatggtgtaatcgattacaatacattggtaatcgattaccagtgtatctgaacgttgaaattcaaattcaattgtgaagagtcgcatcttttcataaa

SEQ ID NO: 31234 - DNA, 487 bp, Glycine max
agctttaaaatttggggtcactcataatttaactcactgttttgactaagaagctaattaaaataaggaggaacatgtgcaggggactctaattgttgtcatgttcagacatgtgttagtaaaaggattagttctctatgtgtagtgatcctatgatgacgtgttataccattttcaaaactatacacacaaggatttatatagtgataacttttatgaaattccattaagagatgattgatatatatatatatatattgattttgtaagatggtggtactacactacaatagaatagagtgtgctactttttgatttattatgaattgtgtggatttttacttggactttgggataccatgtcatgaactacattcttaatgcttattggatgatgttacatgataatctattatgagattgcttctataatgagattgctcctattatgagatttcttctattatgagattgattctataatgag

SEQ ID NO: 31235 - DNA, 483 bp, Glycine max
ttatataccctgagactaggctcaagcccttttatttacactatatcagaggtgagtgagcctattagcagtgacccctttgttctagtaattattatttgtgttgttgttcatgaagcactatctagtatgaattttaattggttgcaataggatttcaatgtaaaggtgaattttttggagaataattttcctttgatcttacttcgtctgctgaattcctaaggattattgttggtctggttttctatataagcctaaggaatcaatcctggcaaaccctatgatccgcattcccagcggatctagggtgaaccaatttggcgttcctgctttgcacatgagaaggaatgttggcttgagagttaggtccatggttgagatagtggatcacaacacaaatttcagttctcatagaatacatgcatagtgtttttgttacatgtagaaatattatttgggattgttccttcaacatttatg

SEQ ID NO: 31236 - DNA, 642 bp, Glycine max
agcttctcagggaaaaatcttgacggttaggattccaatggatatccattccaccccaaatatctcaagtttttaggtaagaattcaagaccctttggaaggtacactgaattaattctctcagagtctccattgtgagatttgaaagtgagtaatctcaggtttggcatctttctgaatactttggagcttaaatttatatgtgtaatttgagtcatatctaaccatattccttcaactgcagcagttccctgacaaataataattagaattaatgtttacatcttttgtaataatttgcattttttataccaagagtttaggaatgcaagtcaaagtatcattaacatactctattatttgtcaatacatcatagatttccacaggatcccacaatctactgcgttgccctggaaatttaacagattcttcacgaacaacttctctacccatttcttgtatcagatcgtgcatatctatgcaattgctatatgtagtagtgataagagctttgtctaaaagacttcttatccctatatcagcagaaaaatcgcagtcattaatatttttgttacatggtctctgctttgtcctttaagaaaacagctatgtctaaaaaaatgtttttctcatcatcatct

SEQ ID NO: 31237 - DNA, 506 bp, Glycine max
tcccgacaaacacttggaggagaagaagaatttttgaagaaaaaagttaaaattaacttacgaaccttacaattattagaatctttctcatctaactactccaaaagttgactgcataacgtgattttatcttagtggagaagttttatttattttacctccctatttcttctcctataggtgattgtagaatgtacagaagcttatacaaattgaactattactttgcttatccaataagattagatttatatacttgctagatgcatagtctattaaaaagtaatattacacgaagttttggattattgaatttagtctcgtagcagtttattatttattataaattgaaaatcctttttgaacactttgtttaatcgggttgtactagttattgaactaaccattacttgacctattaatggtagtatacatctcatatcatctcactggataatatttctctctgcgccataatttcaacatggaatcaaagaagtatatca

SEQ ID NO: 31238 - DNA, 512 bp, Glycine max
acagtagagccgaccggctggcatgctagcttggcgcgtcaacttacatttgacttccagaggaacctcatgttgaagaaatgatgcccgccacaacgtaaggctccatccccaaatggactgtctctgatctcaagcttctgcagattaggacatcctttcagaacatatcggagtcccagatcaatgtctccagcagaggctactgaccgcgccctaatcgacttcccatacgtgcgattgtaagtcaaagcccgatcagtccttttaccagacacagaatgccgagtgagcttcctgcgttcataacgatggcaccaaaaccctcatccatgggttctagcgactctgggcctggcctataccgtccaaatttgcacaacctaaacacctcaacatccgggcagttgttcgacatggctaccacggcagcattcgccatcctctggcacattaacagaatcgactgcagtttcctacaacctcgagaaaacggcttcaaaccccacctt

SEQ ID NO: 31239 - DNA, 336 bp, Glycine max
tgccgacgatggcggaaaaggagtgccatttctggcgtggattgcgttgcttgaatactgcttaacactgacggatttggacttctgtgccataatggaggccgatgattggattgtctaagggggtttaagagtattgcataatcttcattctttaaacactcctaagctctaatctatttgctgttgtcactggtacgtaggtctgagatgatatcccaattatttggggaacgcaatgttagaatatcaatttacagggcttgagcatgaatcattgattaccttggtaccactaggggttgtaaatagcgaattctgacgctgatcgaatgg

SEQ ID NO: 31240 - DNA, 551 bp, Glycine max
agcttcaacatgatgcttattaatttagcattcatcatatgaaaattttattgaaaaaaattataaaaggattacaagtcaattttataagcttaatcaaacatgtgccattttcatcacaagtgctaaaatatatgatagaaaatggttcctctccatgttctacctctgcaataggaggggaaaataaagagaaaaagaggagaaaaaatagagaaatgagaagttaaaagttagaagaagaaaaaaaaggaaacaagagagatgacgagagagactactatagagaggatccgtgttatggtagaaagtggtaagataaactccctttttttttaacaaaataagacaaacttaattaagtcacgtaaaatctaaatcatctaagtgtgtgattctatttccacttgttaatgtacttccaatgtgaatttatgtctctattcaactgaagtgaacaggtattcaaacacactataagccattaacttctattttgatgtaatgtcctccttcttcttttatcgctttggcctatttcattacaaaaa

SEQ ID NO: 31241 - DNA, 354 bp, Glycine max
cgcttctatagagaagagtcatccttggattttaagccatcttatcatcagacgaaacattacgacaataaggaattgaacattgaaagcatcagaactatgaatatgactcgagtttgctagcaataagctaattgtactaatgagcgggtaaatgatctttactcataatagctcagacaaaatcggcaacaacagagtccactgataggcgcttctggtaagcttgtaactcgtaatttttagttgaaattgtccattttacacaggcaatcttaaatgtcaacacactttctggatgagccttccaaggattgtgtcgccttatgaaacttttcttccttgttcagtgat

SEQ ID NO: 31242 - DNA, 230 bp, Glycine max
agctttaacattcaatttcgagcgtcttttcatattacgggactccatcaaacatacgagaaagaagttattgtcgtttgaattttctctgagcttcaacattcaattgcaagcgtctcgatatattacaagactcaatcagacatccgagtaaaacgctattgccgtttgaattggctctgaggttcaaaattcaatttcgagcgtcttcgtatattacgggactcaat

SEQ ID NO: 31243 - DNA, 308 bp, Glycine max
ttgagccaattctaacgataataactttttactcggatgttcgattgagtcccgtaatatattgacacgctcgaaattgaatgttgaagctctgagccaattcaaacaacaataaatttttactcggatgtccgattcagtgacgtaatatatcgggacgctcgaaattgaatgttgaacctctcagccaactcaaacgacaataactttttactcggatgtctgattgagtcccgaactatatcgagacgctcgaaatagaatgttgaacctctaagccaattcaaacgacaataacattttattgg

SEQ ID NO: 31244 - DNA, 392 bp, Glycine max
cagcttgtacatctcaacctatcacataatattcttgaaggggagctgaacttgactggattgataggcttgcgcacattagacttgtcaaataacagattttatggggatattgggttgaatttcccttccatttgtgccaatttagtcgttgcgaatgtctcaggtaataaattgactggtgtgattgaaaactgctttgatcaatgtctcaagttgcagtacttggatttgagcaccaacaatctgagtggaagcatatggatgaagttttcgaggctcaaagagttttctgttgcggagaaccatctaaatgggactattcctttggaagctttttctttgaattgtagccttcaaaaactagaccttttacaaaatggattttgctg

SEQ ID NO: 31245 - DNA, 126 bp, Glycine max
tcattcattcattctttaagtttgaccagatagtcatagtatagaagttcagccccttcattttgctaacgtagattctatacaggcgaaaaaaagaaacttcgtaaagaaaggattgctgtaaag

SEQ ID NO: 31246 - DNA, 505 bp, Glycine max
agcttgaatcggacatccgtgtgaaaagttatgagcatttgaattactcaagagcttccattgttcaatttcgagcatctcgatatattataagcctgaatcggacattcgtgtgaaaagttatgaccatttgaatttctcaagagcttccgttgttcaatttcgagcctctcgacatattatgcgcttgaatcggatatccgtgtgaaaagttatgaccatttgaatatctcgacagcttctgatgtttaattcgagcgtatcaatatattattagcctgaatcgaacctcagtgtgaaaagttatgaccattttaatttcccgagaacttccgtttttcattttcgagcgtctctatatgtgatgctccttaatataacatccgcgtgaaaagttatgaccatttgaatttcttcaagagcctccgttgttcaatttgagcgtctcgatatgtgatttgcctgaatcggacattccggggaaaagttaagacccttttaaatt

SEQ ID NO: 31247 - DNA, 586 bp, Glycine max
  unsure (1)..(586): unsure at all n locations
agcttattgtatataatgtgtgctaaaataagttgtagatgttccctttgagttttgtttacgtataaatgtaataattttgggtcctaacattttgaaaaattgaaacgctcgtcagttttggaagctaaattgatggttgttaatgggtggtaatggccactaatgaattataacagccaataatgagtggtaatggctactaaatgcattcttgatggtagaatgcctatatatagcacatgtatttggtccctgaactcatctctttgaattcattctgatacaccatctagagagagcttgaaagaaccaaaacaagacaactcttcatggcaatggttggaggtatgatttaatttttcttttccgcatgtgtttcttatggtatgaagggcctggtttcttaaaaataagattagaaatctttattttgtttgatttccttgtttttggcttttgaatcatgtaaaatggtgtncaaatgactaaaaacccaccaggtctgcatatgggtggggttggcccgctagaggttgaggatgatgaatagtctaaaaaaaatgaaaaatcccatgttttgggc

SEQ ID NO: 31248 - DNA, 769 bp, Glycine max
  unsure (1)..(769): unsure at all n locations
tttgagttgagtaccagttcggaaacnaccccgaggngaacaccatataaaacatacctccaagagctctggcctgttctataacgaagaaagaatgcactatcccttggcgattctctaanagcccattccctntagccatccaaaaagaggagaccatttaccctccaattaaggggatttttaacatttggaatagccatccagggaccttttgaaatattggattccgatttttggcttagccaataaagctatattgtattaatgaacggggtaaatggatctttctcataatagctcagacaaaatcggcaacaaccgaagtcccaacggatttgggggccttctgggtacagccttggtaaacctcgtcaattttcttatcttgtggaaaatatggttcaaattttttaccaaccgttggcaattctttaagttctccaacacacctttttgggataaagcccttccaaggattgtggtgccgttacaaaacttttctttctttttcccgtgaacaatggtaaaggctaacaaaaattggagtgtcccccaagggtttgaatataagttattcggtaaaaaccctcttttttaatttcaacgccaaatggggcttaaaaaaggtggaaaaatgctgccagggcctttctcaagaccaaaccatctttaaaagggtggttaacaccccatccttgagaaaattttctcaaaggaacacccctttcctttccaaaagagggaaatgaaattgggaccgaaaaat

SEQ ID NO: 31249 - DNA, 603 bp, Glycine max
agcttgaccaatcccgatttactcgttcatagccggtcagtgagaacctgcgatgtacctaagcaggcgagctcctggtagtcaacatataaaaggaaaacaagaccacaaagcaaggaggcttgtggtggctggccagctgtgaattttgtgtgatatgtggagtatggcctttggtaatcaattaccaagggtgggtaatcgattacaaggcttaaaaatgaaaacaggaggctaagatggtctctggtaatcgattaccacggggtgtaatcgattaccaggcttgaaaacgaagccgggaaacttagggaccctttggtaatcaattaccaccgtgtgtaatctattacacagagggagggctcagtggaaatctatcaccatgtgtgtgaaaaaaaacacacagcgctttttcgcatttttggtctgaggctgtgtaaattaaaattatcctcttgtgatccataaccaagaagtgttttccattatcacaaattgaaagccttaaataccccttttttttcatgaaatgggttttaaaaactttttgttggcggcatatttatatttttttggaaaaaaataccccttttttttttt

SEQ ID NO: 31250 - DNA, 889 bp, Glycine max
  unsure (1)..(889): unsure at all n locations
cacgccctgtgccaatgtactgactcatatccaacctgcgttattccttactcngnacaacgatncgtatatttacactcacntncttatagccagaagaaacccnntttttgacctcctgcagactccgaggagacactataagaatacatccangctgtgggacttttagcgtatcgctgaacttctgtatatattgcacaataggcagtcgacgatttgtgatgccgtcggacgttaatctattgaaatcttgagaatgttttgaacccataatatgccacttagccttaccttggggaacatcccacttttacacatggtgggcgtttaatcaattggaatatcttagaaatctcgcccatataacaaaacaaaaacctttctctttaaggatacaaggtgtttagttgggtattccacacacagaagcacatttaattgtctggtacctctttggggggtgggcattcttttcaacaactttttttacatatagggagataaaaaagggaggaaaaatctctttttccaattggttttttttgaatgtgggggacctttttccttttttttgttcaataccttgagaccctaaagggctaaatttttgggttccccttaaccaattcacacaaaacccccggtggaaaccaatgggcttttaaaatacccggggtcaattttacaccaatttttatttttttttgggcgaaaaataaaattttttttaaaaaattttccccacaatgtggtaccttaaacacaaaggggtttccccttgaatatttaaaaaaaacttttttttgtttcttagagaaagggggcaatgttcttacctaaaaaatattttaaatggcgttattttttttaaaaaagtttataaaan

SEQ ID NO: 31251 - DNA, 487 bp, Glycine max
agcttgtagggttaaagtctcacgattgttacatgctgatgcaataattgttaggcgtgactatacgagacatcttgccaaacaaagtcaggttatccataactcacctgtgctttttttaccatgccatatatagcaaagtcattgatcctgtcaagtttgatgagctacaaaatgaggccgcaattatactgtgccagttggagatgtattttccccctgctttctttgacatcatgattcacttgattgtgcatctagtcagagaaatcaaatgtcgtggtcctgtttatttgcggtggatgtacccggttgagtgatacatgaagatcttataagggtatacaaataatctatatcgtccaaaagcatctattgttgagaggtaaattgcatatgaagccattgaattttgtctagaatacattgaaaaggctaaaactattggccttcctgaatctcaacatgatgacaaagtgggtggtta

SEQ ID NO: 31252 - DNA, 300 bp, Glycine max
tcttatcatcagaagaaacattaccacaataaggaatttaacattgaaagcatcacaactatgaatatgactcgattttgctagcaataagctagttggattaatgagcgggtaaacgatctttactcataataactcacacaaaatcggcaacaacaaagtccactgattggcgcttctggtaagcttgcaactcgtaatttttacttgaaaatgtcaattttacacatgcaatcttaattctcaacacactttttggatgagcctttcaaggaatgggttgccttatctaacttttct

SEQ ID NO: 31253 - DNA, 552 bp, Glycine max
agcttctttggagccatttcctgcaaggacacatttgtaaagttagtttgcatgaaataccaatcatcacaacaaaggccaaacaacttaaatggtgcatgcttcttttcaccaaacgcaagtgtcaatgtgcaattagaaaacaatcacacattggggcatgtgctattttatgatatatatctatatacatgcatatacatatatttttgtgaaaggaattttatgatatatatatccacacatatatacacattttttaagagcatttccatgcatatatccacatatgtatatgatggatttcccctgcagttactttttggtccactttttctttgtacaaatatgttcaagggaaatccggtttgccagaaagcgcacctgatcgtcaagtatttaaaattaaaacggatgaattcgagtatcgaactcaaggaactagtctaagacatggttaaattcagagataaggcattgttgaaagaaacattgataattgatggtttacaatagaattaaactaagtataagctaaaaacaataaaaatg

SEQ ID NO: 31254 - DNA, 502 bp, Glycine max
tgggctagacatgatacatgtcatgtcttggtttggttcaaagataaaaagcgtgccccacattatttccatgacacaaatgcaaaaaatgatgatttggaaactttatgcaaaactggtcatgcatgcgcctatgcggacgctcaagtgtcaaatttttatggtcatgtgacgctagggctcaagattcaatttcctctattttaaatcaacccaatgtttccaaaatatgttcttttatcaatttgtgcattcatccgagtccatttcgggcgttcggggaaatttcacagtattcacccttcaagtgtacacacatttttttcaaaaactaagttatgatcaatgaattttttttcaaagaaaagttggaaatcatttcttttcaaaaacctgtctgtttttaactagaccacttattttctctttttccacctttttttcttacttgcccctcttcttttctcttttgttctcattatccatttcattttttttcttt

SEQ ID NO: 31255 - DNA, 488 bp, Glycine max
agcttggatattcaacctgatgagggatcgagggtttagtaatttaggctacagcatagaacacaagagcacgattgattagagaaatatatttctatgcatcagcttgtttgttagaaagacccaacatatctacctactgctgtcattttatttaccttgcattttatagtttttagcataatagtttagtttaaattctgtctgaaattatcacttatacatgttatctcaacaatgcttcaattctgaacttaatttaggctaacattagttccctgtgttcgatactcaaattcattcgttttaatattaaatacttgatgatccggtgcgctttctggtaaacccccattgaaatttccttgagacataaatgcacaaaaagtaactgcaatggggggcgatcagtctcacttctcaaaaggctcgtcaaacccagggtccgctcttgatgaatcttgcttctccaatggcttgtcaaaccc

SEQ ID NO: 31256 - DNA, 995 bp, Glycine max
  unsure (1)..(995): unsure at all n locations
cccccccaaacccatccatggaaactatttaattcactattacacgtacatncgccgtccggttatccaatcaaccccctacacagtacctcgagggagaaactttagtagacaactcgtagcaaccccacgaggacagactacaaaacaaccgccaccaagcatcgccgactctctcgtgagaaatgcagaaaacctgttttttgggaaagccagcagaacactctctttgagacgccatggatgcgccgcctctagcaactcttgcaatctgcttagtatccctaccaataacaacataacactcccctctaggtgaggttgtcgacaccaacacgtgtgtcccgaccactaatggaacaccggtgaaattatccacttatctctctacccacccttacctgaagggaaagacccactagacggaattagcggataacacccaatagaaagcaatacctgaaccaggctacctcaaatccgcgacacacataattttacaacaccccacacgaacccactaagaggcgccctcgtatgcctgagagaaaatggccaccctttccgtgagaaaagcaaaagaactcggcgagggaaatgtggccctcaaaaggtcgtgtaaatacctctaacccccgggaaggctcgcccatacctaagtagccacccctaaggtgaccgaaaacaacacctctccaaatgaagggaatgagacaccacatcgatgcgtgtaaaccaaaaagaaaacaccaacctcaatcttggcaagaaaaaaaaaccacgtgttacaacaaacgctcccaagaaaagagataatccaccaaaactaaagtaggttcagtacctctctcgcgaacaaaaaaaggcccccccatgatgtctcgtagcgcacccccacagaaatggcgagccggcgttgcgcacatagcattctccctccacaaaggtacacgggcgcgacccgactggactctcctaacgaagaatgcgtaccc

SEQ ID NO: 31257 - DNA, 615 bp, Glycine max
agcttatcaatctgaattcattggcatggatgggcttcttgaccttaggaattaagactatgaaggttttatttatgtaagttaggtcctttcctttgttcaaaatttgtagtgctagacttgtgatatcaacaccaataatactccaaaatttgtggtaaaaaagagtggaggtgtcatttggactaagggattttgtggggagcatttgagaaatggtgtcttgaattttagtccctatgaattcagcattcaagatattgaggagattcggtgaaattgtgttttgaaataagcttgtaactttctctgttaacaaagtcttggagggggtaaacaagtcagaaaattaattcataagaacttcacctatattctcaaaggcatatacaaatctcccatcatcctttttaagcctctgaatagtatttactttttgcctctaagataccttttggtggaaaaaagttgtgttttggtcatcgggttttagccaatttgcacaagaacattggtctcacttattttcgtcctgcaacaagacatcatcaagagtatttttaccaactattattttaccttccactttgttagtctacataggaagttggaagc

SEQ ID NO: 31258 - DNA, 432 bp, Glycine max
tgcatgcaagtgtgggtgattttattcatcatggtgcttgttgcttccctatagtcttctagtggcactatcctcaactagttgctaagatttgggatgtggtccttcctttggcccatcaagacaatcaacttatttggtgtccttttgcttctggcacactcaatcaccttcaagtttgcttatgattttatgcgcaatcatcaattaccagtggcttggagtaggtctctatggcacccctctatatatacctccatcgagaccatctctctattgttgtatccgaaattactctagattctagaagtttgcttatgattttatgcgcaatcatcaattaccagtggcttggaataggtctctatggcaccccctctatatatacctccatcgagaccatctctctattgttggatccgaaatcactct

SEQ ID NO: 31259 - DNA, 498 bp, Glycine max
agcttataagaacaaaattttctttattatttccaaatatgcatgtgaattaggacgcatcaacaagaatcaagccaaggctattgtgcaagcaatcaatggggcaaaacacaccaaatgattataatgatggatggctcaaattctcacaaaggtaaaatcatcactttcaaattgagctttcaaaactatcatgacatgtagagaagaatcaaggatttcaagtcacaaaatgtcaagaacttttattttcaaaacaattacccatttcttgaacatatcctataattcaaagaaaaacatgcaaagtcgtacgtgcacacaaaattgacccaaaatattaaactaaaaatccgacgaaactaacaacattaacaaattaacacaactaacaaattaacaaaaccaacaaaactagcaaaaccaaagaacactcccccccccatacttaaacaacacattgttctcaatgtagcacaattaaaagattaaaaacaa

SEQ ID NO: 31260 - DNA, 78 bp, Glycine max
gacttcaattattgcatgtcaatcaggcaataaaccccggacgaaataaggggatgacaagagcccctctttacttac

SEQ ID NO: 31261 - DNA, 457 bp, Glycine max
agcttgaccttggtttagacatgattgttacatgatttgagacttgtaggatttgatttgggcaagattggatgaggggaagtgtggttttcgaaatttgcattttgtgcacatttttgctgtgaaattgtgcagcaggattttgcacaagtgcagaaaaatgcttgtgtgtggttggctgtggaaagtctagtgcagaatgagttctggatgtttgctagtagatcccaacggtcacaatgtaggcttatacactataaacttccagtaaaattttggagtcgatccaacggttaacgaattggatcgaaggaattgttactggggtctttaagtgagaaaagctgtgattttggttgatgtgttgagcagagttttctgcctttgctctgttttgcttggctgtgaatagcttgtgctgtttgaattgttgttttgcttggatgttccggaagct

SEQ ID NO: 31262 - DNA, 1035 bp, Glycine max
  unsure (1)..(1035): unsure at all n locations
gccccaccacccactctaacaacgcagaaaacaaataatgaccacaattacctcgccgtatcattacaggacactacttaccgtatgctacacccaaaggaacaacgccacacttgagaccttccaaacctcngcgagaccttanaaaaccccaacgcgtgccgtgcgcacacccaacaagcaaggtgtttttctcagaaacgacaaacggggggccgaaacattaggacggcacacaaaggccaggaagcaagatatacccaccttttgccaaaatacaccacccctgcgccatatgcggagcaactcaagtggtcacaaaaacatatacgaaaacgtgaacgcaaatggcgctaacgattacttactcttcccttctcgaaaaagggaccccaaatgcccttcaccagaataataatggcactcatactccctattttgggggcatttcaaacacgaaaaactaactagaaaaacctcatcgcgggggtggtcaaccatactaaaaacacacctatctaactccccgtaattataggctgcgacaacacaatctacagtggtatatttttcaaaacaagacctataaactacacanggaccctacagacgataaactgttttatgagtaactaacacataggaagaacacgtggcggacaagcgcaacacttctcccatgttgtaaacaatggacaagcgcggatcgatctgccagagagtcttataattaacgaattcacacaacccgagacacacgtcgaaataattacgatctgcgggtttatgatgaacaccaacaacactgtacctccctctctcgatatacgtaacatgcgaaccccttctctnntgccatgtgctgggacgacatattatagtgaatgcgatagaatgcgctctagacagaacatatagcgagaccacactctggatattgttttaggttaacaggtgaccatagacatccgtctcatgtcacgatggagagaggaacaccgcacgtcctctctccagtccatacgtccgcaaacc

SEQ ID NO: 31263 - DNA, 601 bp, Glycine max
agctttacacaacaaatatttaattgttgtgtgatcagtgtaaattactattttttatcctaccagataagaccaaaatttctcaagtgcaaacacaattgccagtaattctttctcagttgtggcatagttaatctgagcatcattcaaaactttgctagcataatagatggtatggaatattctacctttccactgcccaagtacagcacctactgcataatcacttgcatcacacatcaattcaaactcttgcccccagtctggtgacgtaatcacaggagcagaaaccattttagctttgagagtgttaaaggcttctagacactcttcattaaatacaaacacagcttccttgttcaatagattgcttaagggtttagcaatcttggagaagtctttaatgaatctccgataaaaccctgcatgtcccaaaaagctgcatatgcctttcgcattgactgggggtgggagtttatcaataacatctaatttagctttatccacctttattccttttttagaaatcttgagtcctagcacaatgccttcttgaaccataaagtgacattttttcatactttagcaccatattggattc

SEQ ID NO: 31264 - DNA, 322 bp, Glycine max
gacaatgactaattaattcaggagtctctgagttaatcgatgaccaagtggatcaagggattacttctctctaatttacctgttcacaactgagcatgaacactttaatcgattacttacagcatccaatcgattacattggtcttgagttatttgtagatgttgggaagaaccactttaatcgatgatttatataatgtaatggattacttcgaagatgtaattagtgacaaatggtcataactattttctctataaataaaccagctagtgttcccctctaaaatgcatctaaagaatacttcacatgtagaaaatagcc

SEQ ID NO: 31265 - DNA, 553 bp, Glycine max
agcttcccgctgatggtatttatagtttaatgataccattgcttcctttggatttaagggaatcattgttgatcaatgtatatatttaaaggtcagtgaaaataaggtaatattttttattctgtatgctgatgatatcttgcttgcaactaattatcttggtattttcgtgagattaagaagtttctctttagtaattttgaaatgaaggatatgggtgaggcaagctatgtgataggaatataaatattcagagacaaatcacaaggactattaggcttgttctagaaaacatatatcaataaagtactagagagtttcaagatgaaaaattgctcagcatcacccattccaattcaaaaagagacacatttagtcctgcataatgccataagaatgatttggaacgaaaacaaatagaagcaattttgtatgcatctgttgatgaaagtattatgtatgcttagatttgtacttgactagtcataagctttgcaacttggatgttaagaagatatcaaagtaatctgggaattgaaacattggaaaaact

SEQ ID NO: 31266 - DNA, 533 bp, Glycine max
tagcgcgatcacctggaaattagaaatcttcattagaagcaatgaactcgcttagtgcagcatggcgcttagcacgttcatcgctatttccagaaaaaaaaaaaccccaggggttttcacccctttttcagcaatagcccctaaactaaactacattactcctacagtgaaaccctaagtttattctaaccataactaacctaacaacactaaacctacacagaaatacaacctacaaactactaagtcctctatcctaaagtttgcaactttatgtagaagcaaagcttcatggtgaatgtgattcaaaggtgttttgatgataacaatgatgacaacaaaagatgatgacaaaggtgatgaacgaaaatctcaaagatcaaagaacaactcaagtgaattaaataacatctcaattgaatcaagaacaagtcaagagctcaagaaaagaatcaagaagaattccagacttaagaagaaagcctagaatcaagaatcaagatttcaggttcaaaaatctcaagaatcaagat

SEQ ID NO: 31267 - DNA, 610 bp, Glycine max
agcttttctttgagaaaagcaaaggcttgctcttgtttttcaccccaggtaaacgccatattcttcttcaccagctcattgagaggagatgcaattgtagagaaattaggaacgaaccttctatagaagcttgctaacccatggaagctcctaacatctcccacactttttggggtggaccattcttggatggccttgattttctcagggtccacttggaccccatttctaccaactacaaaccctaagaaaactatattatctacacaaaaggtaacttctctatatttgcatagaaggtgtttttcctaaggactgaaagaacttgcctgagatgtcctaagtgatcatctaggctcctattgtacactaaattatcatcaatataagcaactacaaatctacctatgaaatcccttaagatatgatgcataagcctcataaaggtgcttggtgcattagtgagcccaaaaggcatcactagccattcatacaaaccaaacttggtcttgaaagcgggttttcactcatcaccctttttcatcctgaattggtgataaccacttttaagatcaatttttgaaaagatattggcaccatgccactcatc

SEQ ID NO: 31268 - DNA, 1053 bp, Glycine max
  unsure (1)..(1053): unsure at all n locations
tcgcgaccctcacgcccacgaaggacgtagaccgngngaagagagatccgcgggaatacatacacacacgacgaaacgatcaccgcgcaccaatcaacactcnantaaataccagcnaacaccaacacacanttggattggaatgcactccgcaaaacccgaaggaganaanaataanaacaccccacaaggccgggataaacaacagagggaggacgggcacggcacatcaaaattcttgcacggaaacgcccacaccagagaaaatcacgaggaggggcaggagaaagtcaacacacaagcgagacgnaaccgagaaacacaaccgagccactaanacgatgaggcacaccaaaggccactggccaacagnatccggacgcaaaggcagcacgaaactaccgcacagagcaagaaacacaagcggagcagcgccaccgggcgagcaacgccacgagaccagnacaatcgggaccaggaggccaagagacaaacaaaaaacacgcggaagacggagagcggaagaccaaacaggcggtggggaacaaaaaacccggaaaaaaaacggagacaggggcgacaacgaaaacagcgcgcaacgaacagggaggggacaacgaaaacgccacgacaggcccagacaaacggcgccgcagaaacgtcgccacaaaaaaccgacacaaaactgggaagcacccgaacaagaaagagacgcaacaaccgggcagcaagtacacgaggcccagcacagggcaacaacaaggacaaacacgacacggacaaacaagcaaagagcgaaaaggcgcacgacaacaaccgggaacacacgggaggcaccgcagcggagggcggacaacgcgacaaaaggaggcggagaaaacacggacgaccaacggggagagtccacagacagcaaagaccatcaggcacaaccagcggcgagaacaccccgcgacaacgagacagacacagggaacagagccccgcgggaaggtgccagaccaaaaaaacgagacaaggcgcaacgagcagaaaagagggaccgaacaccac

SEQ ID NO: 31269 - DNA, 509 bp, Glycine max
agcttgatgatgaatcaatattgtttcttagagtttcgatgataacaaagatgatgacaaaaagctcaaaagtcaagaacacttcatgttaacaaagatgatgacttcacgaatcaaagaatgaattcaagattgaatcaaaaacacttcaaggatcaaaaggaaatttgatttcaagaatcaagaatcaagtttcaagattcaagttccaagaatcaagatcaagattcaagactcaagattcaagaatcaagagaagattcaatcaagataagtattaaaaaggtttttcaaaatctgtggagcacattaatttttctcaaaaaccttttaccaaagagtgtttactctctgggaatcgattaccaaattgtagggatcgattaccagtagctaaatgctttccaaaaagctttccactaaatttacaacgttccaattgatttcagaatcgtggaatcgattatcatgattaggtaatccattaccaatgtgtttgaacctttgaa

SEQ ID NO: 31270 - DNA, 876 bp, Glycine max
  unsure (1)..(876): unsure at all n locations
accggccgcacaccatagtcgggagggaataccatagatcactctaccgctacaagctgtgccgtggatccacatcattcacgaccactcncctcccaaggcaaacgggaanannnttggatcccttccgaaacacagccgangcgataanaataccaccacgcccaggctgagggctggataaaagcgaagcaaaaaactctttctccaactctgcaacaagggcgaaggcacacgcgcacgctatagacacgaaaggggacgccgcccggagacaaacaacataataaaccacacgcgattggaaggaaagacaacacctagagcctcaagagtgggaccaaaggcacaacagcaagcgagcatacaagcaggccaggctggcttatcttgacaaaaaaggctgactgggcccaaagcacgacacatgacatgtgcctaccacacaaaactcatcagaacagacaaccaaccccccatgaaaacaagccccacaaagaagagggcgccacttacaacaaaccctgcacctcaggaagaaaccggtgtggacgcggaatgaacagatagcggaaacacgccgctaccagcaaggagacccaggagccgcccaaaacacagaggtaacgcaaccaaagggggacaggtcggctacgccaaacggaaacaaccgggcagtccgcagaaaggctggacaagctgcgggtccccaagggggccccaaaaatcccctgaaaacgtggggtgcgcatttccatttgaggccccgggaaaggcaaaggtcaaagaaaccctcaaaccccggagcaaccattccgccaaattggcaaatggaaaccccgacccaaactttcaccgcgacaatccaagaaaaag

SEQ ID NO: 31271 - DNA, 451 bp, Glycine max
agcttaacacttcacagctctaatcaatctgaagtagattgcttcatatacaccaagtgaaggttcaattcctagtgtgtccaaggtcagaccgtgtagtatcttcagtcttctattctgatgcttctcatcaaagcttttcatggatagatttagttttcatcaagtttggatcttctaatgtagttagcattcactttttgatgtttcctcagtatgtgtggtagtgtgtggaaagtgaagtgttgtccacctcagtcttttgatgtgccctcagtatttatggcatcatatagaagacttgtgttgccccttgaaaaccatcctgaggtggcattctaaaatcaattctgaagttcagtctctagaggcatgttcttcatcattctaatgtagaatctgagatagcttcattttgatgtttgatgctctctatgtaatcttcttattt

SEQ ID NO: 31272 - DNA, 905 bp, Glycine max
  unsure (1)..(905): unsure at all n locations
cccgccctcccgacacctcatacaactacaaaattcagttgttctcagtacttacgatgggtaaaatgctcacaaactaacaccggcaccgcaggtttgatcctgcaacacgcgaaggaataagctccgcactgctggtccgggactacattttatttgttgaacgggagaagctcacctgattatgtacgaaactgattactaattaccgactatgccgggatgggtcgggaatagtcgatcaagggtatgggtaactctggccacctgacgaccacatgagacctggatgaatctcccagtgacaataaccttccaagcagccaacagccgatggccctatcgccacttaaaattatatgtaacgaacagagtgcttatgtgacacagcctattcttcaccttgcgaaggcgantctttagtacattagtgaagtgacgacgcgcgctgcatcaacgtcggggaacatatcgatgtgccgaaaccgnaattcgtaatgcgtcgctaaaaccttcaatcttttataccctaactcattgcacaacgntgctataacagcctattataaccctccagcacaatttaccctcgcaagaacgctccacccaccacttggtacacatatatggaaagcgttccaccagcctacatatcctttatcggagtattgcacacattcaatacgcactctcggtttgccttctctcaatggcaagctggagggaaaaaccttccataccaaaccccccgggtgccaaaagaatatgcgcaccacccatagttgcgcgaaaaaataattttctggtgggccccccctaatccattggaaaagaagcgcccttaaaacaccctggaaaatcagggaggcttaaaggaaaaaaaaaccccctgcccccacatacct

SEQ ID NO: 31273 - DNA, 469 bp, Glycine max
agctttttgcaagttccttatagtgatttctggatacattcatcaggaaactgtgtactgttaaatccagaattgatgtaagacaaaccattattgaagtggtctacaaatctttgttcaaaggattttgataaaaaaaaaatcctttaaaagtttcagcttgtgctcggagatcgaatatttattgataaaagaaagaggaatatttgatataaactatgatatgatcgcaaatgtgctttctgcaactgctatgaggaggagaccagcggccattttttttggcttagaatattttgtatgcagtatgaagcttactgtatgaatggctgagacttcgtagaaattgttcacaagtgatgatgtcctggaagtgtaaaaaagatgatgtaactgatcaaaattaggtttaattaaactgttgaacataatttaaagaaagatttacagttatttttattattttttt

SEQ ID NO: 31274 - DNA, 488 bp, Glycine max
tataataaatcgatacgctagaaattaattttcgaaaactctcgagaaattcaaatggccatatcttttcacaggatgtctgattcgggcgcataatatgtcgagaggctcgaaattgaacacttgaagctcttgagaaattccaatggtcataagttttcacacggatgtccgattccggcttataatatatcgatacgagcgaaattaaacatcggaaactctcgacaaattcaaatggccataacgtttcacacggatgtccgattcgggcgcataatatgtcgagaggctcgtaattgaacaacggaagctctaaagaaattcaaatggtcataaattttcacacggatgttcgattagggcgtatcacatatagagacgctcgaaaatgaaatattgaagcttttgagaaattaaatgggcataacttttcacaccgaagtccgattcagggctataatatattgatacgctccaaattaaac

SEQ ID NO: 31275 - DNA, 158 bp, Glycine max
  unsure (1)..(158): unsure at all n locations
tagtggttaaaagtgctcaattttgccaatntcatgagacaatgtatgctcggattcacgcttgttntcttgaattggagggttgtangggatggccttangccaaggttgtgttctggaataacggtgcaagtcacattgcccatattctcttgtta

SEQ ID NO: 31276 - DNA, 390 bp, Glycine max
  unsure (1)..(390): unsure at all n locations
gggagaatggaatgagtgaacgttatatctngcatatattctatcttgtatcttgatttcaggaattaaattgtcatcatcaaaaagggggagattgtagaagcaaagactttgactttcatgttttgatgatgccatgtgatcatgcgcttctcaagtttaattcaagacaaaaatccaagaaattcaagatacatcatcaagaagatttctagtgatttaggaagggaattccaagttgaaacagcaagaggtttcgccaatgaatttaagcaaaaatgtttttacaagagatttactctctggtaatcgattaccagaggatgtaattgattaccaatggccaaaacactttctgaaacatttttaaaataatttttaatatttttg

SEQ ID NO: 31277 - DNA, 347 bp, Glycine max
aacttaaagtagctgcttgtcatcagtcgtgactttttcgtaaaaatgacatcgtagacatcaaagagacattcctagaacgcacgcggcaggtacatatagcttaaaacctcagaatctgaactcaatgaatggcggtcatattatagatgaatgctgcgccattgactcttgctctctgaaccatagactaaacttcattcctcttcgtccctggaagagacaagcgaaacaggtatgcatcttcacactctccaatgtccacaagccccatggttggcccaatcccccctgtagccacagttccagtcaagccaaaaccattcttggtagcagccacaatatca

SEQ ID NO: 31278 - DNA, 281 bp, Glycine max
  unsure (1)..(281): unsure at all n locations
gcttcttcttcttctccgcgagccaagcgccaagcttcttcttcttctccgcgaacgaggcttcgaggttagtctccctaactccnctttgcttgtaatatccaacattgttgtagcaatgaaagcttangatagtaaccttatggtagaagacgagagtagaagacgccaganaaaatggggaaaggcggcttacgacggcggcttccggaagatccgttaggggttcttccggaacttccggaagaagctgttgccgaaacattctggaagaagtattc

SEQ ID NO: 31279 - DNA, 294 bp, Glycine max
  unsure (1)..(294): unsure at all n locations
ntggaaaggctgtccgttaggtaatctcaaatcatcaaaatatagttcacagttttataattgcagtattaaatttgtattcttgatactgagctgaacttccacttctttttcaaaatataaatctgctcattgctatttaaaattagaggatattttggaaacttattgccaaaaaggctttaaagactatcttccactgtaaatgaagaaattcaagatgtgatttttgtagtgaaaagtatcattctattatagaattgaaatgtgtagtccaaatattgaattttagtg

SEQ ID NO: 31280 - DNA, 417 bp, Glycine max
  unsure (1)..(417): unsure at all n locations
tgctcttctntgagagnttgtgagtgagcatggagctctgcttgaacttgcctggtctgctatgatacagccacactggccactattgagtgttgactatcctgctaaacataggttgattatagtttcatttgggagatgatattgccaggatgaattcctatttgttntgtcaattngaataaccaaacatcagatgtatntgttactntntgtggaggggcatctggataaatccagacctatggatgcctaattcttgcaatacagctggtattangacaccatangtctacacatagtatgacaacagtgtaaatataacagtaccacttgtactaatcttaatattataatacatattactntnntgctgatanaaagtctctctggtacccttgattactacattttcac

SEQ ID NO: 31281 - DNA, 340 bp, Glycine max
  unsure (1)..(340): unsure at all n locations
tgtgatgaaganaactctntcttgcaaaaatggcaagaaaaagtcttagcctcagatgatttctcttcattgttgttctcatctcttccttcattgttgttagtcctagaagaagatgaaccccccaagctcattggattgaaaaaatccaattccactttcgaccctcgaattgaataatccttggatagcttaacaaaatccaacaccatgtgggaattggaattggaagcctgatcttgttcagatttgacatccttctccttcatagttgtcacctcatcatgaattcttctcttcttcagcacttggtttatgggaaatgcttncgaggtggcag

SEQ ID NO: 31282 - DNA, 209 bp, Glycine max
cttagtaaatctctgatattgagaatttcaattgtctggtgaatatcatagtaatagttggagtgatactgaatcatgctatgtttctgcttggatgtagaaaggagattatgtgaagcttcttctgctcctacgtcaaattcacgaatctctctttgtttgttgcaactttgtcatgatggaatttatgttatgcctgtagtattata

SEQ ID NO: 31283 - DNA, 402 bp, Glycine max
  unsure (1)..(402): unsure at all n locations
tganattggtttgcagtaggtggaagggatagattggggttatttgacaatgacatcaatttcttgaattgttgtgtttctaaatgtattattgaattgttgtgcttcattgtgttaattgttatgaagcaagaattgatagaataaaaattggaagatgtggatgctactatattagttgtttgtgtagctcttacaaaggctatgaacaattaaaaatatcatggtatgtatgcctattggcatgtggttttgtcgttttgaaatttctgaaaaatcttcctaaagttaagtcttcttcccaaaaagtgaacctagtaaagagttgcaatactaaatccaagtcacactacaaactctagcattatatgtaacaacccgtctcatcactacaatatcatt

SEQ ID NO: 31284 - DNA, 236 bp, Glycine max
  unsure (1)..(236): unsure at all n locations
gatatatacatgattgtgattaatgaaatgtaaattatatatatttacattatngggcataaccattaactataaataatatataatattctaacttgtttaagaaatacaagggtggtaaaatatgagaaatctactatctaaagcanatgttgaagaaaaatacttacagcttcacctctaatgatatggtctgcagcattcaatatacaacaattgctagtggcacgtgctat

SEQ ID NO: 31285 - DNA, 418 bp, Glycine max
  unsure (1)..(418): unsure at all n locations
tgttatattcatggacaagagaatgatcgttagtcaagatagcatagacaaaatctccaacaacaaagtccacaaattgacacttctagtcaggttgtaacttgtatttnttagtggaagttgtcaattgagcatcagtctgttcgtgcacctgatgaagttgggagatgaactcctaagcgatggtataggaacacacttgactagggacagtcagcaagtcaagggggccacgaggaatcatgctataaataacatggaaaagactttgcccgatattgtgattaacaacatggttgtgagcaaattcaacttgacacaatttaacatcccaagattacaaatgatcaccaaccaaactctgcagaagttaccaagggaatgattaaccatctcagtctgattgtagcttttggat

SEQ ID NO: 31286 - DNA, 515 bp, Glycine max
  unsure (1)..(515): unsure at all n locations
gctangtaanagatggtgagaccttgaccncaataaaagtggagatgtttactnnntgtcctttcatcaacaacagcactatganagggnattgaatntcctaaaggagcagcaagggtcatactcanatntgtctgtgccaatgaatcatatatatctcgcatntctgtctctggcttacagttctctgctntggaagccttagacgatccattagactcacaatgaaattgtgatatcaatgtgtntccaagttctccaactganggtaaatttcttgtttcattctgcaaanggccatctgttcaacgtgtgagtttaaccacactgaactcatatctctgctatgcctacttctaccctacagtaatggtaccagaatgcactgtgtggtctgcatttgactttgagccaatcatangtttcttgttgatctgcaatatcatgcatntagacatacgtnactgaaatcatataccaatatcatactgaacataccatttgaccaattgatn

SEQ ID NO: 31287 - DNA, 379 bp, Glycine max
  unsure (1)..(379): unsure at all n locations
tgtgatgttntccggcgatgctgaatttgttgatggtgctcataatattcttaacaaagacagtgaaataggccgtggaggatttggagttgtttattgcactgtccttagagatggtcattgtgttgcaatcaagaagcttacagtgtccactttgaccaagtctcaagaagactttgagagggaagttaaaatgcttgggaagatcaagcatcaaaatcttgtggcacttgaaggttattattggactccatccttgcagctcctaatttatgagtacctagccagagggagtttgcaaaagcttctacacgatgatgatagcagcaaaaatttgctttcttggagacaaaggttcaagatcattcttggaatggca

SEQ ID NO: 31288 - DNA, 377 bp, Glycine max
  unsure (1)..(377): unsure at all n locations
cacaagttattattaattcatgtataacataacttataagaactctactagattaactnttctaagagttgtntctattntattataaataaacttatgttattcttcttattctcttctataatgatctataaatactgtttctcaaacagaactcaatgagagaagaaaaaatgaaggccacctttccataatatgctgttngattcgtccactgtccatcctaataaacataccaatatcttaattctgttgtttgtgatatgggatcaatgtgattattataatanctttcttagagttcatgcaanagtattaaagtctcactattcaatnnttattaatcattcacanaataacttanacatatcttatca

SEQ ID NO: 31289 - DNA, 259 bp, Glycine max
  unsure (1)..(259): unsure at all n locations
ntgttgtcgtgacaacgatacaaggattacattatattttgatgcaatgacatatcccatgtccattatatccatccgcttgtccacactaacctaaatcacaaaaaatacatgtgtgaggcatgtaaacattatttatatataaaaaaagcataaacaacataccttggataacccatccacatgtagggacaacctcaactgttcaaatctctccatgccaccaaagagctttatgtagtcttgcgaccatttgcca

SEQ ID NO: 31290 - DNA, 373 bp, Glycine max
  unsure (1)..(373): unsure at all n locations
ttaatcttganatacatagctacctgacacagctgatgttatagatccatatctctctagactcttcctctgcacaatntagccagaataacccacaatntgttttacaagtcaatatctcttggtaacatcataattctaaagataatagggtaccatctaagaatagcttataccttcctatcatctttaatattatccattatctgctctctgacacctgcatctccacataaacacttaggtcaatagaaataacatggacatagctagagatataaataatcaagagaatttaatcttcttacctaatatgctttagtgcctaagatgatatttagagatcgaagtattatggcaggcttaagtaata

SEQ ID NO: 31291 - DNA, 263 bp, Glycine max
  unsure (1)..(263): unsure at all n locations
ntataaggaccatattaatcatatctatagtcaataggataatgcacattaaccatacacctgtggtaaaagatttcaatatttaaattatctgtttcatatgtttaagtaacagacaatgggtattagagcagatgaaagtatgaaaatcaaataaaaagaattaactccataagactatttcatttttggtcattatgtcttgggataaaaaatttatacaagtgaaattttattaaatttgaattacatgtctatttttc

SEQ ID NO: 31292 - DNA, 383 bp, Glycine max
  unsure (1)..(383): unsure at all n locations
agtgcggaacatcagtagcatntcgatgccatcanaggatggtcattcctcagacagagataggngcagctganggatgatgaactnttgcacttccttggaggaggcanagccatacaaccaggatcgccaaacttgcgatntatccttcattactgctttcagttattctgttatttcccttgtgaattgacatcatctgcttccaattattatttccattgtgattgaactgcacatgcagttatctgtcgcattgtgagtaatntaccactnttggaatatggtcgtacttacttttacgatgattgtctaanacgcaaaaatgtgtgtaagtctggtgtactttcgttcacacanccttntcaatanaatgtaatctc

SEQ ID NO: 31293 - DNA, 395 bp, Glycine max
tctaaactttatacaagaatgaagctctgataccacttgttagacaagtggcctcagatatcttaagaaggggggtttgaattaagatatcccaaattacttccccaattaaaaatttatttcactttcttttcaagttatagattcctttaacaatgaacttcttaaatattaattcaaataaaacaatttgaatatgaatgtaaagcaataataaacaaaggagattaagggaagagaaagtgcaaactcatatttatactggttcggccacacccttgtgcctacgtccagtccccaagcaacccgcttgagagttccactatcttgtaaattccttttacaagttctaaacacacaaggacaatcattcctttgtatttagaattcattta

SEQ ID NO: 31294 - DNA, 335 bp, Glycine max
tgccacccagctcgcccaggcgagcaaggttgcttcctccagaagcaacagccttctggaggaaggatctggaaggcccaagtgggccagattgctatttgcaccccctttttactaaatgcacccccttccatttttttggtaattctttttccgtaacgttacgaaactctactaattttgtaacgatacttatattccttccgcgaggctacgaatccttatggattatgtatttactcttttttagctttcgaagaagttacggaaactcacggattgcgcaaaaacacctcttttcgatttccgccacattacggaatttcacggatcgc

SEQ ID NO: 31295 - DNA, 367 bp, Glycine max
  unsure (1)..(367): unsure at all n locations
cggatctctgagtcacctgcggcatgcaagctntgacatctngntctcaatgtantcaacacaacaacaatgcaagatggacgtgcaatacatgaatacaatgcgtcccacgaacaagacaagatgtttggattgacgcgaatccaaaactataccacanacacacatgaatttgatatgttgtactaaataataataatatatttcaacgcgctaacagaattgtggagatgttatgaagggagaaaagacagaggtgcttattttagtatcatgggatgaagagttcttggtntgtttcggtaagaggttacgttttctattattttctttgttctagaagacagactangaacggagagcgcat

SEQ ID NO: 31296 - DNA, 241 bp, Glycine max
ctagtgcccttaattttcacgcaatatttgacattcccataatgtattccctgacatttcctttaccttgatacttcatggaaattaagttctgaagaagattacttgtttttgcaaagtgcttttcaatatcagcaaggagttatttggcactagttatatcatctgaaataatacccctaaagacctcacgaataccacgcttaatgatcataagactcatgccatttgagtgatccca

SEQ ID NO: 31297 - DNA, 179 bp, Glycine max
  unsure (1)..(179): unsure at all n locations
gctcanaagtcaagaacacttatgataacanagatgatgatctcaagaatcaaagaatgagttcaagattgaatcatgtacactttaatgatcaagacgaaagttgaattcaagaatcaagaatcaagattcaagattcaagaatcaagagaagactcaattcagataagtattaaaaa

SEQ ID NO: 31298 - DNA, 417 bp, Glycine max
  unsure (1)..(417): unsure at all n locations
ntgcttatttagttttcgttgatcgaagtgggtctgaaaagaggcaaatttaatcatcctgcttggatgaatgagaaaactggagcaaatgaagagggtgagaatgagggagaaacccgtgctgtgactgccattcctatacggccaagtttcccaccaacccaacaatgtcattactcagccaataacaacccttctccttaccaccacccagttatccacaaaggccatccctaaatcaaccacaaagcctatctaccacacttccaatcacgaacaccacctttagcatgaaccaaaacaccaaccaagaaatgaattttgcagcgaaaaagcctgtagaattcaccccaattccagtgtcctatgttgacttgctcccatatccactcgataattcaatggtagccataaccc

SEQ ID NO: 31299 - DNA, 537 bp, Glycine max
  unsure (1)..(537): unsure at all n locations
tgtgccccgtccgatcttgagcacctgngcatgcagctgcgccganacttcacctcaccgctgcgctcaacgtagctactctcacgaactctttgcnatgccgcacgaaanagagaaaacaagaagcataactctttgataatggaggtaagaagctttccagagaaaatggcttttaaggaaanaggtgaacgacaatttggctttatagtttgtggggcacacataatgctgggccctacaacactcattttaagtcaaggcattttatgtaatggcttatatatagtgtcattgtgatatgccactgcgtgagattctttgcaatctgtattgtacattgatacagttacatcgaagtgatgatgcgtgatgatgtcattataataactgtacgactgtattcatgatgacatcatattacaattcataatgcttctatttatatcggattagtgcactctggtcataggncttacatttatttatttaaaattcacggacatctgtataaatggatattatctccactatacn

SEQ ID NO: 31300 - DNA, 429 bp, Glycine max
tctacatgaaggacaaagaatctatggatgatatgtttgggagactgcaagttcttctaaatggacttgaagctctatggcacacctttaccaaagctcaaattaacctaaagattctagataactttcctaaggtgtgggaaccaaaaacaacagccatccaagaagctagaaacttaaaaaccctagcataggatggattgttaggtatagtaagggttaatgaagtccaccttcataatgaggatcatctgcctaaaataaatttcactaccctcaaccagttctaaacgagaagaaagaaaaaactcatctaaggctttgaaggtgcagatgactaagtctgacagctcagataacaattttcaaggatccacaactgatgaagtgacccttatgtttagaaaattccaacaaatgaagaagaag

SEQ ID NO: 31301 - DNA, 420 bp, Glycine max
  unsure (1)..(420): unsure at all n locations
ccttcatgaatacncaacactcttctgaagtccttcaatccatccganaatagaattgttaccgtctcttctaacctttataaaatgtntttcttcattgtaatcaaacgttacatacagtgngtaagtaagaccccagtgtctgtgatatgctaatggtatttgaatgaagttntggaattatacatcaattacatggttaaccccacaatagtagatataattcttgtgttcatttcatacaataaaatgaataagatagtcaatatgaaaacacatattctatcaacgtgganaacanattgaaatctgtatataactgggttgccgaagaaactgggtgtngcctaaatgacgaaatgtgtcatagntaaaactttggcagacatgaagcanataagtggtntgtatatatatgga

SEQ ID NO: 31302 - DNA, 250 bp, Glycine max
tcaacttgtgctacatgcaacattccgcatgaaagatcttggccaactcacatgttttttaggattggaggtacatcatcgatcaaatgacatatttttaaaccagcataagtacattcaagatttgataactttggctggtttggaaggcactacttcagttgatactcctatggaagtaaacgtcaaatacaggaaagatgaaggggatcttttggctgatccaactctctatcggtgtttggtggga

SEQ ID NO: 31303 - DNA, 405 bp, Glycine max
  unsure (1)..(405): unsure at all n locations
actcggatgtctgattgatgtccngtatcatatcgagacgctcgaaatngaatgttgaacctctgagccaattcaaacgacaataactntnttcacggatgtctgatcgagtcccgtaacatattgagacgctcgaaattgaatgtngaacctctgagccaattcaaatgacaataactttctactcggatgtctgattgagtcccgtaacatatcgagacgctcgatattgaatgttgaagctctgagccaatacagacgaaccataacttttactcggatgtctgattgagtcccgtaacatatcnagacgctcgaaagtgaatgttgaagctctgagccaatactaacgaccataactntttactcggatgtctgattgagtcctgcaacatatcgagacgc

SEQ ID NO: 31304 - DNA, 265 bp, Glycine max
tcaacattcaatttcgagcgtctcgatatattacgggactcaatcaaacatccgtgaaaaaagttattgtcgtttgaatatgctcagaggttcaacattcaatttcgagcgtcttgatatattacgggactcaatcagacatccgagtaaaaagttattgtcgtttgaaatggctcagaggttcaacattcaatttcgagcgtctcgttatattacgggactcaatcagacatccgagtaaaaagtttttgtcgtttgaattggc

SEQ ID NO: 31305 - DNA, 262 bp, Glycine max
  unsure (1)..(262): unsure at all n locations
tccatctagttntntaatccgtgcgatgcaccgtgaaaacagaggaattgngtgtttttatataattctaatttttttgtataactataaaaatgaacatgtctgtctggtaaataataaccaattttactttgattttntaagtcatttaattaaagtatacctcatatatatgttataaagttatgtgcgcatttgaactctngtgtcgcataaaagagtatctaaatatatttgtcttataattactaactacactact

SEQ ID NO: 31306 - DNA, 434 bp, Glycine max
gggagaggatgcttcaatggaggaaaagaaagagggagataaaaagagagaggtgagcacgaaattgaaggaagaaaaagggagagaagttgaacttagagttgtgtctcgcaagactctcattcatcaaagttacaacaagtgttacacatgcttctatttatagactaggtagcttccttgagaagctttcttgagaaaacttccttgagaagcttctttgagaaaacttcctcgagaagctagagcttatctacacacacccctctcataactaagctcacctccttgagaaacttccttaagaagattcctaaagaagctagagcttagctacacatacctctctaatagctaagctcacctccttgagatgagaagctagaacttagctacacaccccctataatagctaagctcaccccatgacaaaa

SEQ ID NO: 31307 - DNA, 170 bp, Glycine max
  unsure (1)..(170): unsure at all n locations
tgcagatcaagttgatccgcaagattcatggtttagcatacggatcaagtacaatgtatatgatccgcatgnagtattgtgatgaattccttcatgcggatcaagttgatctgcgagctntatgcgaatcaagttgatccgcatgaagcttgcgatcacttgatccgcat

SEQ ID NO: 31308 - DNA, 384 bp, Glycine max
  unsure (1)..(384): unsure at all n locations
gtggcaatcacattccaagtggtcttaccctacagttttatcccaagactttactatatatttttttctttcattacaccctgctcatacatattngaacgaatntaaattgtgatcttggatgttggtgtgtttgggtggccctggtcagaagatgttttattaaagtgtttatgtaatgcaaggatggtcagtttggttttgcactaatgtatgattactttgtggaatatacttatagttgaagaatttttagaaatctgcattttttcttgtatatgtgtaatcaggagacttgttgtgccttggtgacttgttggacatgggttcgaatccggaaacagcctttttgcatatgcaaaggtaggctgcgtacaacattcc

SEQ ID NO: 31309 - DNA, 151 bp, Glycine max
  unsure (1)..(151): unsure at all n locations
acaactganaaaaaaatctaagtcttttctatccatntcttcacatgagcttaaaaaaaaccccttgtcactactaaacaagctacaaaattaatcacaatcacaagcaattattcctaactacatgcaagagataagaatgaanaagaga

SEQ ID NO: 31310 - DNA, 415 bp, Glycine max
cgctgccacccagcttgcccaggcgagtagggttgcttcctctaggggcccaagtgggtctggttgctatttgcacccccatttttactaagtacaccccctgccttttttttggtgattcttttttcgtaaagttacggaaacttacgaatttcgtaacgatacttgttttctttccgtaatgttacggaaccttgtggattacataatcatcccctttttgacttacgaaatgttacggaacctcactaattgtgcaacgatgcttccatttgatttccggtgtgtcacggaaccttacggattgtgcatcaatattttcttttgttttccggcatgtcccggaatttcacaaattgcctaatgatgggtgccaagcaccttacaaggaccaaacaaaagtcgcatgtcatca

SEQ ID NO: 31311 - DNA, 596 bp, Glycine max
  unsure (1)..(596): unsure at all n locations
agattaaaacctanngacatgcacgngacatctgagtcacctgccgcatgcacgcttganaatggcgagctcttctaactaatttaagttatttgatgtatacgctcgccanacatgtcacatctactaccgatatctttgtaagaaatctctacagtctcattatcgctagaacactcactatataatcacagatagaagctattcttctacgatctggatctgattgcaccatctaatgactgaagtctgattattcatctaattgcgtactgacatgtacaacacaaatctccttgtataggttagtatgtatatctcaccatatcttgcatgtcctatatgcactatcgacacttactaccgtttctcactccacgtgtccatctctttgtcctactatcagctcgacctcacatactatatttgtgagatttacctattcattaaggacctcttatctgcatgcgagattatcatgtaggcccttcatctgatgcgctcaccttcttcacaggtgattcagccaagactctaaccgattgtcctgttatctgcctgtatgcctcccgacatcacctatttgtcgatctccg

SEQ ID NO: 31312 - DNA, 164 bp, Glycine max
cggtttatcgattgcattaaaattctttattctatcactttgtcctacttctgcaacttgtctatttagttatagcatccccattttcctaaaacgatttccactctgcattgaacactatataagcgccgttagcttctggatatcttcttcattcttatcac

SEQ ID NO: 31313 - DNA, 349 bp, Glycine max
  unsure (1)..(349): unsure at all n locations
tgcttacaaagttgagctgcccggtgagtataatgttagttccaccttcaatgtctctgatntatctctntntgatgcagatggagaattcgatntgaggacaaatccttctcaagagggagagaatgatgaggacatgttcaagagcaagggcaaggatccacttgaaggactnggaggacctatgacaagggctagagcaaggaaagccaaggaagctctccaacaagtgctgtccatactatttgaatacaagcccaagtttcaaggagaatagtccaaggttgtgagttgtatcatggcccanatggatgaggactaaatgacaccacttttgtctcaatttaga

SEQ ID NO: 31314 - DNA, 264 bp, Glycine max
tctgagttaaaagttattgcagtttgcatttgctacaagcttccgctttcaactacgagcgtctcgatatattactggactcaatcgatcatcagagcaaaaagttattgtcgttagaatttgttcagtgcttccgttttcaatttggagcgtctcgatatattacgggactcaatcggacatccgagtaaaaagttattgttgttagattttgctcatagcttctatttgaatttgctacgagcttccgttttcaatttggag

SEQ ID NO: 31315 - DNA, 416 bp, Glycine max
  unsure (1)..(416): unsure at all n locations
ataaacataatgtaaactgagttatataacataaacttatttgttgnatcttacgtacatataacataaccacttagacacgtagaataatagcgtggactatatctaatagttatgagtattaactaactatacctgtattgaatattccaaagaaatattatgtctctcaaaaaatatacatctattaatactggcggtctcgaacagaaaatatacttacatacatacaattacaatataagaaagcaacctaatacatattgctgcatctgacagaaaaaatgagttataattacaaagtcacactcgtctaacctctattgactactaattgacaactcaacaagtcacagattttaccaccaagtttttattctgctccaaccaagaaaaaagagctacacacaaacccc

SEQ ID NO: 31316 - DNA, 443 bp, Glycine max
  unsure (1)..(443): unsure at all n locations
tctatgtggcggtcgcgcgaaggtgcacaacaagtnttccacattcacaatgcgcgcataaactcaccatacactgttgtcacctccaatgaactcacgactccacgacccatacctctttctctccaccgggccacatcaatcctcccaagcttncacggcatgcaataaaactgcttccacagccacgcttcacagtcaatcatacagactaatcagaaactgtgctcacacataccaaaacacagctttctccttaacgacacgtacaatcttcatcaatcaaaccgtgagcacgcatattatggagcaaagctaactgtgacgcggtgaacaacccaactctctacttcgtgacaaagccccacaatgtgaggagaatttgtgcctattgaaaattgatgagaatcaagagctcttacaatttattaacaaaccaaaan

SEQ ID NO: 31317 - DNA, 395 bp, Glycine max
  unsure (1)..(395): unsure at all n locations
ttgagccaaaatctctgactcaccatatttcttgacccattgtgagaatgtcaatccttaccctcggaagcaaaaaaggaagagaaggaaaatttccaatcaaaggaaaaaagagaggaaaggaaattcccaatcaaagagtgggagaaagcaaatagaaaagaaagaaaattcccaatcaaagaatgggagatagataaaaaaaagagaatgagaagaaggaaagatagctcctggtcaatgatcgaaagacaacagaagaaatatgcatagaggtctttggaccacacaatatctgaacaatacggaattgtcaccaaatgaacaaaagaaagacaaggaaaccataacctanaagtggtcttctccctttgataccaaccaaaatcatgtgc

SEQ ID NO: 31318 - DNA, 257 bp, Glycine max
  unsure (1)..(257): unsure at all n locations
tgtctacatgtgaattgcaccgtcttcacctncagtaaaaaggaagtccnctgtatggctctgtgccaaagcataagtattaccaacatgagccttaggatgtccatactacacatcaatactatatcgtcccatagaagtcttactgctagactcccttttccacagaaaggtccctccatgacttatcatcatccacaacacctgaagccacagncaaggaagctggcggaagtcccacccttcatactatatta

SEQ ID NO: 31319 - DNA, 235 bp, Glycine max
tcaccatcaccatagccaacacaccccagaacattcaacaccttcgatctgcactttcttcttctactactcctaatcatcaaatccatcttgctgagttagtacccttcaactctacccaacactccaacaaagacaacaacacacaaaaggctcctctcactgacctattgaaacttggctatgcatcactcacccttgagcctccttttcgctccttgatatcacagatcac

SEQ ID NO: 31320 - DNA, 226 bp, Glycine max
  unsure (1)..(226): unsure at all n locations
ctctagaagcttggttgatcaatttcgagcgtgtcgatatgttatgcacctgaatcggacttccgtgtgacaagttatgaccatntgaatntctcgagagcattcgttgttcaatttcgagcatctngatataatatgcgtccgaatcggacttccgagtgacaagttatgaccatctgagattctcgagagctctcggttctcaatttagagcatctcgatacgt

SEQ ID NO: 31321 - DNA, 394 bp, Glycine max
tctcgatatattatgcgcctgaatcagacttccgttacataagttatgaccatatgaatttctcgatatattatgcgccttaatcggactttcgtgtgacaagttatgtccatttgaatttctcgatagcattcgttgttcaatttcgagcgtctcgatatattatgcgcctgaatcggacttccgtgtgacacggtatgaccatctggattgttcaagagcatccgttgttagatttcgagtatctcgatatattatgcgcctgaatcggacatccgtgtgacaagttatggccatatgaatttctcgagagcattcgttgctcatattcgaacgtctcgatatagtctgcgcgttaatcgaactttcgtgtgacaagttatgaccatctgaa

SEQ ID NO: 31322 - DNA, 578 bp, Glycine max
  unsure (1)..(578): unsure at all n locations
nctatagtcatacgatagtcttatattatgcatctatggattttactatactntcgtctatctataaatacagaatgtgtcatgctataactcaagaattgttcaagccgcacaatacgtatatgttgttgcattcagacgtatatcatcttaacaatcatgctactgccccgtgctgcttacgatcagaagacaagagacctgaccaatatgctcgacgtctatgtattaacaccttggaagacctagactatcaaacgtacgccttgctatcgaagaatgcgagttaataaatctcacacctctatctcgtactcctattatagaagcataatcttatantctactanaaactcacacgtcgcgtgctcatgcagtgctgatctccgaagtctatgataagtgcgatcacgatacatccggtacgaaacttcatcatccactcttgtcacaatgtcgtaatatggcgaactctggtgcctacatatatgaccatcctgctcgtacaatcgcgtcgcaccactaggacggtacatgatgattctacttagcgtcctgatacactatttgcgcatgcc

SEQ ID NO: 31323 - DNA, 263 bp, Glycine max
actcaagcttctccgaagattataagctctgcgatgtatatgcaagatgtttatccaatacttaccaaataccaaaccgatcgaagacgcataactagacaaacaataaataacatattataagtaactagactaagtgcagttgtgtacaataaaattgaactataaggatattataccaataaaacttatttaatagcatcgcagtactgttcataatattaaaaagtcctcttacataagggaatccataattgcaaata

SEQ ID NO: 31324 - DNA, 415 bp, Glycine max
  unsure (1)..(415): unsure at all n locations
atgaagatgatgatcttagcctttttgtannaaggttcaacaagttcttgagaatcagaggaaatcanaggagacatnaatttatacctaatagaaggacaaaagattcatcctctactccaaaatgctacgaatgcaatcaacctagacatctaagggttgattatccgatcttcaagaaaagaatggagaagtctgaanagaaaaatattagtgaaaagaaggcaaaaagggcctacatcacatgggatgacaatgatttggaatcatttgaagattcanaaaatgaattaataaatctgagtctaatggccaagagttatgaaagcgatgaagaggtaacatcttcaaataaatctatcntctttgatgaaatacaagatgcatttgctgatttgatagagaataatcaaac

SEQ ID NO: 31325 - DNA, 335 bp, Glycine max
  unsure (1)..(335): unsure at all n locations
ntgtgctcaatttccactggaagatgacatgcctttccaaagacaacccgataaggagacattcctatgggtgctttgtaggcagtccgatgcacccagagagcatcatcaagcctggtactccaatctttcctgcttggctgcacaatcttctctaaatttcgcttgatttctcggttagaaatttctgcctgtccattggtctaggggtggtatggtgtggataccctgtgtaccaccccgtactttttaagcagggcatgcattgtcctgttgcaaaaatgggttccttgatcactaacaattgctttaggtactccaaacctgcaaaacaa

SEQ ID NO: 31326 - DNA, 458 bp, Glycine max
  unsure (1)..(458): unsure at all n locations
gcttaccgatgtgcatgtgctgctgatcgaactggacatgctntattgttcactctctatggccaagctatgagacataatacccagtnntgtgtggaatatatngcattggatcttgtaatgaatagtgatggtaagttgttgcagacaacatcttgactacacttatattgcaatcaattaaactaattaagtcttagcattcattggccttgatgagtaaatatcccatgtacttcacattacttgatacaaattgtaattgtgttatctcttccaatggtaatggctctattaaacaagcattcaatggtagaaaaanatgtctgtcttggttgatgtgcaagttacctatttcttctatattgatatgantgcacttcgcagagtgattgcttgatatgacgatggacactacatcgttaagctgttcacaatttggccagggtacaatttct

SEQ ID NO: 31327 - DNA, 417 bp, Glycine max
  unsure (1)..(417): unsure at all n locations
atacctaacattataaggtacaacaagaattataaatattttccgtcaaaaaaaaaatcttcatctcaaaactaaaaattgaaagtcaggatggatttatgttggaccgttatgtgattttaaactttttttttatgattttaatcttcataaatgccactacttattaatgacatgacatatatttataagaataaaaaacatttcaatgtaaagtaaaattgcactaattttcatcacttaagagcatttgttataaagttttgtagatttgagttttataaaattaattttaagtgatggaaagtaattgagatgtttgactaaatcaatttcacccataatgtggaaaattaattcttggcattaaataaatatgtcctanatctaaattgaaatgttggaagcagtggactt

SEQ ID NO: 31328 - DNA, 346 bp, Glycine max
  unsure (1)..(346): unsure at all n locations
tctctcattgaaantaccccaattcactatgcacgtcaagtgtntgataaaatactcanatgcaaatntcttacttatctcatnntaattttatgcaattggcctcttatttggttacttaaattctctcaacatacgtagtctataattatacaattaatacctaattgttgcacaagttcatatggaaacaactntacttatcactattgttacttgagcgaactagtactcttgccaaaaatcccaacaagtnttggtgtcattgttgggaactatgtctagtgatagacaaatnttagtattttggtgagttacacattctttattctttggatttatttat

SEQ ID NO: 31329 - DNA, 400 bp, Glycine max
taagctccacaagagcttgcacatcaatggagtccctttgagtcacttgtgttttaagtgctaagttctgttgcttgtttatcaattttgattatgtttgaatttgtctctgtgtctctatttgatcaagaaatatggtatcttttaatagttgtaatggtttttatatgaatgaaatgttatggtcttttcccttttaacatcatatgtttttctgtttttattctataaataactgtgactttttggccttgttatgccaaaaagggggagaaagaattgcattacattgtatattacattagcattgcattagaaaagattagtgcactgcatacatacattcataaataactatacttaatgatgatgatgatatgaattgatacttctcttagtg

SEQ ID NO: 31330 - DNA, 218 bp, Glycine max
  unsure (1)..(218): unsure at all n locations
acccctccctcttagtctntntgcagtatgcaagcttaccttngtagttgcttgtagccgtatatctttagttgagacanaagaaaaagaatgtntataaagaanatgaatattcaataagctttaatctgaaggatatagccaaatgggcagaaattgattattcacagcatactctagctagcatgaattttaaatgggtatgattcataatcatt

SEQ ID NO: 31331 - DNA, 373 bp, Glycine max
  unsure (1)..(373): unsure at all n locations
tagtcctataccattgttcactgaactcttcagaactgatggggaacaggtccttaagtttcccacacctaaagtaattcaaggtagtacattaaaagcatattcctgatcctagcaatatttatattcataaataaacatggtaagctgatacatcttttgaaatgtnttttatttggaacagtgaatctgtctggatggatgactgatgaagagtttgcaagagagatgattgctggagtaaatccacacattattaagaaacttgaggtaaatttactattgaactgttaagtacataaaactataaacnatttatccacttgttaaatttgcagttgataaccttaactcattgcaaattatatttatt

SEQ ID NO: 31332 - DNA, 309 bp, Glycine max
  unsure (1)..(309): unsure at all n locations
cgagacacncgacattgactaaaggaagttgtcgagatattcacatggtcacaacttttcactcggatctccgattcacgcgcataatatatcgacacgctcgacattgaacaacggaagctctcaagacatctatatggtgataacattgtactcggatgtncaattccggcatataatatttctagacgctcgaatatgaataactgaagctctcgggacattcaaatggtcataacattctcgacagatgtctgattcatgcgcataatatatcgagacgctcgatattatcatcggaagctcact

SEQ ID NO: 31333 - DNA, 256 bp, Glycine max
  unsure (1)..(256): unsure at all n locations
cggactgtgctagagagaanaacatatgaccaaagtgatctcaagagccatttctagggcaaaattgggtgttgaagagtcaaattttgattcggtgagattttaggtgtaaatccagtttgaacaagtctaaataagatgttatggactggagtgaggtgagagtttgcttcaaatttacctcattctaaatttcacttttcaaacctagaaaacccattgaattgaagggtgttggacacctagattctgtgtt

SEQ ID NO: 31334 - DNA, 577 bp, Glycine max
  unsure (1)..(577): unsure at all n locations
cactaacctagaattaaataacttaatgccattatacctatggaataagacatacttaatggctgagtgtaactgatattgtggcaaccaaaagtcatccncaacagccaacaagtcagccaccattttggtctccanaaggctgatgcctaagttgccaattgtgctcttagtatcaacttgaactaaagcccttttagattgataacccaccacatatttttggtcatccaactatacgacgattgtgccattatatatacaaactaaacactctagaattgatataaagtggtgtcatttagtccttcttcatgtgcgccatgatacaacttacaacctcggactttattncttgaaacttgngcttgtattcatatagtatggacagcaacttgtgaagagcttccttgctttccttgctctaaccttgtcataagtcctcaaatacatacaagaggagcctttgccacgcgtctggacaagagctcatatattatcttctctctgggaagagattgctctcanatgtggacttctctctgcttctcaatgaatgaatatnatgcagttaagt

SEQ ID NO: 31335 - DNA, 285 bp, Glycine max
  unsure (1)..(285): unsure at all n locations
ntctccactaagttgcctgatgcctgaaatttcttttttgatggcagtggtcctggaagtaggaaattttttttttttctgagaatactctcttgaggtcatcccagctcgtgatggaccttagagcaaggtaatatagccagtcctttgccactccctctaaagaatgaggaaaggccttcagaaatatgtgatcctcctggacatctggtggcttcatggtggagtacacaatatgaaattctttcagatgcttgtgtgggtcttcacctgcaaggccatgaa

SEQ ID NO: 31336 - DNA, 214 bp, Glycine max
  unsure (1)..(214): unsure at all n locations
tatgtttatatatctccagcttcaagtatatatgttgacacagtgtaattcatattagatgctgatactggcgaaatcttattcacgatggcacaacatcgcaacttgagcatgtgtctattcgaggcaccanagtcaagtacgaatcatatgtttcgaagtgacatttttatttcatatacaatcctgcaagatagtatacctcaatcatgtg

SEQ ID NO: 31337 - DNA, 349 bp, Glycine max
  unsure (1)..(349): unsure at all n locations
tgtgtatttatattcttatggcgttatcacatttttagtgtacttttttntaatacatcttatttgtatatatttcttaatttatgaagagatgaataaaagttgaaacaacaactctagttacatatgatgaaagcttaaaatgatatcccaccttccaaagagaataggggaaaatgggtggttagtaagaagaagttatggttgaaattaatcatttaaaaacgagggaatatgtattttggttatataagcattttacacagtttttatctttttaaaagggtaaaaatacacattgttaattatatgtctacgtgacaagtgatgcaaaaccatgtgacaccac

SEQ ID NO: 31338 - DNA, 516 bp, Glycine max
  unsure (1)..(516): unsure at all n locations
atgttatgaccatnttagtttcgcgtgagcttccgttgttcaatntcaagcttctcgatatatcgtgtggctgaatcggactgtcgctcgataagttatgaccatatgaatttctagagagctttggatgtccaatgatgagcgccctgatatataatgcacctgaatcggactatcgtggacatggattgaccatatgaatctctagcgagcactacgttgtacaagtggtgagcgtcatcaatatattatgcgcactgtatcagacattcagcgagacgggtntatacaccttcgaatnttcattagactctcgtcggctagtcaaagctctcgatgtatagtgtctgcatcgacattatgggcgagaggataacttagcaatctccgacctttgttgccatcctagcactcgaatatagtgcgtacttgtatccttagtcctatacctctagtctaaaagcatttcgtagttaaattaacaattggccgagtgaacactcgacatggtcttct

SEQ ID NO: 31339 - DNA, 90 bp, Glycine max
  unsure (1)..(90): unsure at all n locations
tctcgatatattatgcgcctgaatcagacttccgntacaaaagttatgaccatatgaatttctcgatatattatgcgccttaatcggact

SEQ ID NO: 31340 - DNA, 338 bp, Glycine max
  unsure (1)..(338): unsure at all n locations
gcaacgcgaacctcttgccgcctgcccggtcggtcgccatgtatcatgttcgacaacctatcttcagatgtatgcccttcattcgtcttatatataatatgtantgcgcacctaacactccgtttcagggaacacatagctgtctttaacatatatacgcccgtcctggctttctctgcaaacttgttcgaattattcagcgctttctctacttgagacctatttatcagaatgagtactctatctcatcggctctgccttgtctacttggtaatattcgcctgggatacagcgcgaatacttgcctttctacttctataataactgacatcacaccc

SEQ ID NO: 31341 - DNA, 426 bp, Glycine max
  unsure (1)..(426): unsure at all n locations
gtgtagctaaactctagcttctcaaggaagttntctcanagaagcttctcaagggaagtttcttaagaaagcttctcaaggaagttntcttaagaaagcttctcaaggaagctacctagtctataaatagaagcatgtgtaacacttgttgtaactntgatgaatganagtcttatgagatacacttcanagttccacttctttccctctnttattccttcaatntcgtgctcccnccttctctctntcttttcctccatcgaagcatnctctccaagctttntatccaaggctcatcttggtggtgaagctccttcttccatggctnattccctagtggatggcgcctccctctccctcttctnctttgtcttccgctgcatctccatggtggaanatcaccattaaaggacctcattgaatctc

SEQ ID NO: 31342 - DNA, 427 bp, Glycine max
tatcaaaatgcgcttaggcccactccaattcttttagcccagacttttccagaatccttaaagaggggacctatacttcaaacggtagtatgacttccattccatacaccaaagaaaacggatttgccccagttgatgtgcgcactaaggttcggtaaccatgcaacgcgaaagggagcatctcgtgccaatctttatatgacaccgtcatcatctgaatgatcttcttgatgttcttattggccgtctcaaccgccccattcatctagggcctgtaaggcatggaattctggtgttggatcttgaaatccttacacatttccatcatcatcttttattcaggttggtggcatcgtccgtgataatcttcatgggcaacccatactgacagattatctccttcttgatgaatctaaccaccacgctc

SEQ ID NO: 31343 - DNA, 425 bp, Glycine max
cgcatgttctttattgtttgtcctcctttaccaattacttgaccaacctgcataaaataaccgtaaaacatcccagccaaaacaaacccaaagaattaaagcactaaatacatcacataaatcatatgtgtacacacaacccctttgcacaccttgttattagggatctttgacacatactcatcagagccagcttgtccagccactcgtcgagcaataatgccagaacctccagtttcagcctattaaaaacaccatgttaaaagcaaattcttttctaaaaatccgcttcaatcataatggcttttctaatgtgtgcccatgtgcaagtaataagaagtcaacaacaacaaaaaatattttccatggaaacaaactatttatcatgtcgaaatcacaaaagccattcaacccttaacattttc

SEQ ID NO: 31344 - DNA, 369 bp, Glycine max
  unsure (1)..(369): unsure at all n locations
acattatntccatgacacanatgcananatgatgaaattggaaatntatgcanaactggtcatgcatgcacctatgcggacactcaagtgtcaaaattttatggtcatgtgatgctagggctcangatttatttcctctantttaaatcaacccaatgtttccaaaatatgttcttttatcaatttgtgcattcattcgagtccatttcgggcgtccggngaaatttcacagcattcacccttcaggtgtagacancgttttttctcttcaaaaatcggtcatgatcaatgaatttttttntcgaagaagagttggaaatcatctcttttcanaagcatgtcnggttttagctagaacaacttatttct

SEQ ID NO: 31345 - DNA, 277 bp, Glycine max
ctaagcttataacaccatttttcacataaatattttcaggcttaacatcaagatgagctattcccttcttatggataaattgcaatgcactggcaacctgcccaaaatttataccgcaaatgaaaacatgaacactgaacagaaacaacagattagggacaaatttaagtaggaattttaaaggataatgaaaccagtacagatacatagtatgagacttccattatgtgtaaacaatatgtttggtgctattactatatgatgttagtctgaaatg

SEQ ID NO: 31346 - DNA, 242 bp, Glycine max
  unsure (1)..(242): unsure at all n locations
attcatacatanttctctggaggctcttgtggtactatcatgtaagtaataaatattttttggaaatggaagtgttgatattaagactttgcttcaaaatgagcctaattgagctaagctggtcctggtaaagaactctctttgatgatgtgaatgtacattaacagtactttagttcatctatagagcagttgactgcaatagattatgaactataagccataacttctctgcagttacct

SEQ ID NO: 31347 - DNA, 348 bp, Glycine max
tggtcttgtacttataccaatgcgctgaaatgttcgttatgttctgctgcaagctttacatgacctgtgtcattttaatttattaattcatgatcttaggacactggttacttagaaccatttttttatgtatataataatatcgctcaattttataatagtatattactgtacttaaaattgtgtaaatgatactacttccctatttttgccccaatgtctcgattcattatctccctgaatttatgctctcgtttcaacaatatacgcaactcactgtcttttgtgtttcgttgaatgataataagacaacttgagaagagcccacatgttgagtgaggtttgatg

SEQ ID NO: 31348 - DNA, 330 bp, Glycine max
  unsure (1)..(330): unsure at all n locations
gtcacacgggatatacataaccaannaatgactacaaattataaaggaggtctattttgttgtcangacaacttacaatgcaagcaaatagagggttntcaaggttcaaggagaatggtttccttaagatacanaattagttgggttgattggaacatataccaaataccagttaaggtttacatacttgattccaccgacaaagtgaggtcaaatggttccaaaatacttcatgattgtctggtagataatgtttccaagacagtactttatgataaaacaatatactcttcaatcttatagagtgagtgaacaanagtaaatctaatt

SEQ ID NO: 31349 - DNA, 390 bp, Glycine max
  unsure (1)..(390): unsure at all n locations
ntctcatttccagcctcttttcctgtcccatattttggtgttgatgtacataaagtccttccatcctaaatggtaggagaacataaattttagagttgaagatgcattgttatatatgaccttttacaatgatatggaattagaaaatntattgaacaaaaattcattcacaaaaagtttcacaagattaatacgtagctaataacaaatggtttataagaatggcgaaaaatattgttcatcacctgtccatataaagttgcatttacaacacctgaatgcatatgagcagtgccataaattagataacctcctttttccattgggatgttttctttttggacatgaggagaatcaccaccaccaccagttgctggaatggtatactct

SEQ ID NO: 31350 - DNA, 224 bp, Glycine max
  unsure (1)..(224): unsure at all n locations
agggtccgtagcaatctgagagaagatgttgatactctatccatctcctcttctcttctaattatgagtgaagtagtgaacctcttctntcacaggggtgtgtgtgtgatacgaatgaangcggtgccatcagcaagcatgaatgaatgagtgccatcagcaatgcccaacatgaaaagcacantaccacagtaacggctgagtggtgacgtggccgggcttgt

SEQ ID NO: 31351 - DNA, 358 bp, Glycine max
taatattatctcagtggggaatggttctcttgtactgatcagaggggaatgcacaaaaaacaaagatgctaacttcatcagagattgtgctgcatttattttgctggtcctggaatgctgaattacgttggcatttgagttgatataagagtcctcttttcgccattgaaattaaatcttacttttcacttatggcatgcttgtaaggacagcgatttagttcaaagaattggagctgctacagcacttgaagttaaagcttgcggaattcactataattttgctccgcgtgtggcggtaagaaattgcaatcagctagtcattctatgtctagatgagttatgcccgagagcgacat

SEQ ID NO: 31352 - DNA, 399 bp, Glycine max
  unsure (1)..(399): unsure at all n locations
tcttctctttcacttcatgtatgctatangatacgaacaatcgtatgaagatgggtatagttgaagagagacatggcctctatcacctcataccagaccanacagacanaagccattgctcgaccattattcaccctanatgcaatattatcccaatagaatctttggcattttgaatgggccatctatcaacagaaagactgcaatgtatgaaaccttattatcccattatgagaaatgataanaactntgtgtgtaatacatgtcactatgcgaaacacaagaagcttnctttttctcgagcatttcacatgcatcacatacttttgattacttcacatggatatatggggtccttggtcanaaccatctatgcacgggcacaagtatttcttaact

SEQ ID NO: 31353 - DNA, 390 bp, Glycine max
  unsure (1)..(390): unsure at all n locations
tttgttctaattntatttttcttttatgtaggtgaaatgatgggtgttggtgtcactaatttggaggaatgatcaagatttatttgctgaagaatttaaggtgtttcgtttttaattttattgtgtaatttgaaagaatgaaacatgtttaagttgataaattagaacttgaaggacaaccaacatagtatattagtgtctctttttttgctaaacagaatcatatactactttttgttgggacaacatatatttagatggtactgtattttaggagaaattaaatacgcatgtccttaattcctcatgcaatacccaaatnttatgattntaattgaattgattgatttgttttagtaattttttaaattatgataatgatctcatatt

SEQ ID NO: 31354 - DNA, 311 bp, Glycine max
  unsure (1)..(311): unsure at all n locations
gtagatgataaagcacgacaagaagggtccatttgtaaaggataccttatgcaaaatatcttgacatattggttaagatatctagatgacaatgaaactagatggaatcgacctcgtcatgtagatgatgaaccaattaatggtatacaacatggctaacaagtagatgacttatttcctctagttggagaaccaattgacgactcttcatattacaccctcacacncaaagataagttacatgctcatagacatgtgttaacaaattggtcctttaattgatctcctattgcagtangttaatcttatca

SEQ ID NO: 31355 - DNA, 285 bp, Glycine max
  unsure (1)..(285): unsure at all n locations
tgttcttgattntttctaagttctttaacaagcttagatcaatatacttgtccttcatttaattttctttgggcttggcgaccacgatcaacaaagtactttcggcacctgctatatgttgacttgaccaacgctgttatgggtatgttgcgacaatccttcaacaccttattcacacattctgagaggttggttgtcatgtgaccatatcttcgtccagatgtatcgtaaaccatgctccatttttcttttgaaatgcgatcaatccatgttgctatggctgga

SEQ ID NO: 31356 - DNA, 300 bp, Glycine max
  unsure (1)..(300): unsure at all n locations
atgctgngatggattctcgacatgttagatggctgctaagcgaagatgtctgttctgtgtagaacatcggtgatgtgctggtgatcatgaatagtgaggtccttactgagctgcgtccactgcctgtgtttgngtccaagctgcagctagatgagctcttcattgngctttacgcctctatccgaagtgtcatcatgcggatctgtactgaattcattggtctgacttgcttggtagacgatcagggcttgtataggaggcctttcatccacgctcatgacttgagtgccttcatccaca

SEQ ID NO: 31357 - DNA, 405 bp, Glycine max
tgtcgtgccatccccgtttcaacctaaacctattccgggctcatatccgtccctcaacataacccgagccaccatcaaagcgacaccagataagcgtggctacaccagaggagattccacataagcactactcacaatttccagtgcttggaatgatgtttccaatgactcctctgcagcctcaacatacgacatagaagacaaacaacttaccaatatgtcttcctcccccgatactataaccagttgcccttccactacaaactttaatttctggtgcagcgttgacgggaccaccccaaccgagtggatccaaggccggcctaacaagcaactgtaggcagggcttatgtccattatttggaaggttatttgacacacgtggggcttatggttgtgaataag

SEQ ID NO: 31358 - DNA, 592 bp, Glycine max
  unsure (1)..(592): unsure at all n locations
anacgatatataatnatatgtggacaagataagataagaatggatgaaatanaatctggacgaaatanaatctagatgaaatanaatctggataagataagaattgataaaatanaattgtctggtctcttcaagtccaagctcaattccggattcaaggccaatcgcttataattcttctgaaattaaattaanaacacaaaattagtcaagtaggcccaaatgaataaactgcataantatatttgacaattaaggctaatcagtaattaaaaatggtgaccaaaaagggtaagaaatangagaaaataatgacacatcatactactatctcaaggcagcgttcttcttcccaaggtcttcatctcttgagatttctttttgttgagtgtgtccaatctccttttgcaggtgacgatcaanacatgatncgcaggcacctaacgcagaanggtcaccatgggtgtggggactctcattttcanggtctcatgatagacgtccaagtgtgtggatgcatgctccctgtgngggtgttcttgtctggttttngntgtctggcaccgctaaagcacttatataggactaaagn

SEQ ID NO: 31359 - DNA, 415 bp, Glycine max
  unsure (1)..(415): unsure at all n locations
tcatgcttatctatgtatggcaaaacttcattactgttgttcaagacatacaagtgagcttgtaacaaatcttctacacttggagtgatcacctgcagtcctcttgaacccttaccacccactctgtcatcatgctgacactcaggaagcccaacagctttagccttctctaagtattctaaacaaaattcaatggcttcttctgcaatgtacctctcaacaatagatgcttccggacgatatagattttttgtatacccttttaagatcttcatgtatcgctcaaccgggcacatccaccgtagataaacaggaccacaacatttgatttctctgaccagatgcacaatcaagtgaatcatgatgtcaaagaaagcagggggaaaatacatctncaactggcacagtataattg

SEQ ID NO: 31360 - DNA, 489 bp, Glycine max
  unsure (1)..(489): unsure at all n locations
tgccagctgtnaccnatgattagccatgacacgngactctctgagtcacctgcggctgcagctacatgctgatggctcntncattgacatctactgatcctataggtcacaatatcttcgtaactacactgaattacaaacatagttgaaggacaatttgcttggagagatgaaacgcctgatgggctgatctctatcacctctataatctgaattatatgagaacaggatgtaccataacataagcaacagggtcactgtatgtgagcaaagcttgggatactgaagtcacatgtctagcctttgactgacacttacattgagaatagatcagcataagtggtattgtatcatgttgaatcccttctgaacagaatccctagtggataacaaagtcgagaacttattggtacacaaaacggaccaaagatgtgtggtcacgcacactggatttagctagtgcttaaaacctcctataaaaggttccct

SEQ ID NO: 31361 - DNA, 383 bp, Glycine max
  unsure (1)..(383): unsure at all n locations
cgtaactcatattctcacatcctaactgttggaatattctaaataatatgtgagataaatgtccttcgcacgtatctntctttatactacatacatacgaacccatcccagtgaagctatgattttggactcattcaccattggatcattgagtaatttgaacaccactttattaaagaattttctaacatcctaaccatcggatgtgtgaaataatgtctacgctgagagaaatgtccctcacacgaagacaatgaaatgaaagctccaatcccttttccttctccctaatgctnggaaatactagcagagcaaccagaggataagcttgagaaatcttataaaactactagagatgccgctatcactttcagattagacat

SEQ ID NO: 31362 - DNA, 305 bp, Glycine max
  unsure (1)..(305): unsure at all n locations
tctctcctatgtgagtgaggtctaagatgtgacctatgccttccttcataatagtcacgaagttcttcacttangctcttacaagagtcatgactgctatacgaggcatgtntntcttttcttaactctnttagtattttccttctttcttcttcccttttattgttcctcttgtctcgaattatatcaaccctctctttcccttntctttgttttctaaagtttttccataacttganggaactcaactcatctaagattctagatagagggtccttaagactagtaccctcaccactaactct

SEQ ID NO: 31363 - DNA, 257 bp, Glycine max
  unsure (1)..(257): unsure at all n locations
gacctatagaaactcagcttaataaaacttacatcagttnttactttatttggttttattttttttttttttacatattacttttatatcatgtctttagaatttttttttctcatgatcccagtgacttttaaatatgaagataagtaatatttatttatttaatatagaaacaatgcacacatttgaggaacatcacaatgaaacttatattcttaaaacatgagtgaatagtgatgataagtttaagcttacca

SEQ ID NO: 31364 - DNA, 211 bp, Glycine max
  unsure (1)..(211): unsure at all n locations
aagagtaatgtcccacttaaactaactttccaaatgtttgccttcgcaggaatggcaccgaggaagctggcctcanagaggtccaggaaggacaaggcggccgaaggaactagttccgccccggagtacgacagtcaccgctttaggagcgttgtacaccagcagcgtttcgaagccatcaagggatggtcgtttctccgggagcgacgcg

SEQ ID NO: 31365 - DNA, 178 bp, Glycine max
  unsure (1)..(178): unsure at all n locations
ctggtggcctgtgtaagatgatttgtgtttttactgcattgtataatgaatgatcgaggccgtacccgaatcatataaacattataaatacagtatttangaagtgatcctacgtcgtctcccaacgagcaatggtcaaccaaatgttcataacagatagtaataaaacagtaacgaa

SEQ ID NO: 31366 - DNA, 362 bp, Glycine max
tgccttcaatgccactctcaccctctccaatacaaggcattggaactttgcttcaacgtttccctcaaccgtttgccagcatccacaccaaaccctcttctgataagtcctccatataattccaccactactactccctcactttccaatgccttggttgcagccttcaaacgtgctcaggctcaccaacgccgtggatccattgatcagaaccagcagcaacccattttgactttaaagattaaggtggagcagctcatagtctctatccttgatgaccctagtattagtagggtcatgcgagaagctggtttctctagctcccttgttaaaacaagggttgaacaagctgtttcaatgga

SEQ ID NO: 31367 - DNA, 394 bp, Glycine max
  unsure (1)..(394): unsure at all n locations
gctgcccaagtttcatgatcttgtaggtgaagatcctcataagcatcttaaggagttccatattctntgttctatcatgaagccccctgatgtccaagaagatcatatctctctgaaggcttttcctcattctctggagggagtggcanaagattggctatactaccttgcgccccggtccattttcagctgggatgagcttaagaggggttcttggaaaattcttccctcatctacgaccactccattaganaaacattnaggcatcatacaacttagtnagagagcttgatgagtactggaaagatcaagacatgtggcgagctgcctcacaccgatttngcaaactcctctcatattctatgaggactggcactggaaggagatgattgtg

SEQ ID NO: 31368 - DNA, 252 bp, Glycine max
  unsure (1)..(252): unsure at all n locations
tacgcatcccttcaactgctcataggtctcttaatatttaggagggatatcctatgtgcgaacctatcaccctgacgaagaacactcgacaacaatacttatcttgctcctctcttaggatcaaaatctcagtanagtatggggggcgaagtacaacatttctatgctaatcgaacactgtcggatgcgcacgtgtgtatcagtatactccatcatcaggataatatctgtgacgagatattacaagcccat

SEQ ID NO: 31369 - DNA, 452 bp, Glycine max
  unsure (1)..(452): unsure at all n locations
ttctgaaacatgtgtgatttgacttcttgttntctgctntcaagaaataataacactganaatgtattcttatantttgcttaaattatattctctgtcactgcatctctaatttatccacaatgaggttcgtggtttcaactganaatactgaaaatgagaatntattatntccagctnntggttcattcgagacaacactttcactgaaaatgaanacaaaaattcaaccaaacacattgtaatcaccattttatatntccaatgaaaacaaaaacagaaaacaaccaaaccaaacaccctctaatatntttcaacttcaaaattactagcangaataaatagtgtgtgtatattcagactactctaacgaatatctatagtatccaaatgagaaacaaatagatgctacacgangatgttaaatataatcattattcatatgtatatta

SEQ ID NO: 31370 - DNA, 279 bp, Glycine max
tagaacaataaactcggccttctcttaattgtctttgggcttggcgaccatgatcaacaaagtacttttggcacctactatatgttgacttgaccaacgctgttattggaatgctgcgacaatctttcaacaccttattcacacattctgataggttggttgtcatgtgaccatatcgtcgtccagatgtatcgtaagccatgctccatttttcctttgaaatgtgatcaatccatcttgctatggctggactcaattgacgaaatttttctaagtttt

SEQ ID NO: 31371 - DNA, 332 bp, Glycine max
  unsure (1)..(332): unsure at all n locations
gctctcattatatgcgcctgaatcgactccgttgaaagttattccatttttatctctcgagagncttggttcttcaatntcgagcgtctcgatatattaagcacctgaatcggactgccgtgtgacnatgttatgaccattgaatntctcgagagcttccgatgttcaatttccagcttctcgatatattatgcgcctgaatcagacttccgtgtgaaaagttatgtccattggaatttctcgagagctgtcgatgttcgatntcgagcatctcgatatatcatgcgcctgaatcggacattcgtgtgacaagttatgacacattgaattct

SEQ ID NO: 31372 - DNA, 419 bp, Glycine max
taacaaaaggcatgcgaagtgatgagaatcatgaaactggccaaatacaggcttaatgcccaagtggagaaggacagaggcctaagtggagaaggacaaagcccccaagtggagaaggatgaaggctcaagtggagatggatgaaggcccacaggcagagacactatcaagacaattaattgttgctgaaggcccaaactatttgaaggcccaagttaaatatgtccttacgaataatgattatttattgcagatttggcccaacctatttacaatgcccatgtctatttttatctttttgttcagatacactatgagtattggtttgtattttcaataaaaaagacttttggcattttgataaaatctggagagagattctctccaagatccttgttgaaccaattatcaaacttatc

SEQ ID NO: 31373 - DNA, 121 bp, Glycine max
tatatataccatgtcgcatggttattcttcatactccatgcgttctatatagagagaatgacatggagacactctctactcaatgtatgtcttgtaccatccttatgtctgaatgattatg

SEQ ID NO: 31374 - DNA, 327 bp, Glycine max
  unsure (1)..(327): unsure at all n locations
tcatgttagcaactaagaacctacttttatgcttncatcttattctttctgttcaatattacttcatgggtaaatatttccctatttcatggctggcacgatgcagagtgctaagtttggttcatcttgtgtccatatttaataaacctcttttgatgggtggtcaggccaccagttggtcgaaccccaattaataattatcatgcatttgattacaaaggattaacgaatcacaaaatcttcataaaattactatctggccactgtattgctttcaaacaaaatgttaaaccatataattctggctattattaaatgtattttcag

SEQ ID NO: 31375 - DNA, 285 bp, Glycine max
  unsure (1)..(285): unsure at all n locations
tcgtctcgatatattacgagtctcaatcttacatctgangataaaagttattgttgtnntgaattgctgagagcttcaacattcaatntcgagcgtctcgatgtattacgggagttagtcagacatccgagttaaaagttattattgtttgaatntgctgagagcttcaacattcaatttcgagagtctcgatattgtacgggactcaatcagacatccgagtaaaaagttattggtcgttgaattagctctgaggttcagaatacaatttcgagcgtctcaata

SEQ ID NO: 31376 - DNA, 324 bp, Glycine max
gtgacctatcaaactcagctttcagcaaattcaaacgacaataactttttactcggatgtctgattaagtcccgtaatacatcgagacgctcgaaattgaatgttgaagctctcagcaaattcaaacgacaataacttttggctcggatgtctgattgagtcccgtaatctattgagacgctcaaaattgaattctgaacctctgagcttattcaaacgacaataactttttactcggatgtctgaatgagtcccgtaatacatcgagaagctcgaaattgaatgttgaagctcttaggctattctaacgacaataactttttt

SEQ ID NO: 31377 - DNA, 383 bp, Glycine max
  unsure (1)..(383): unsure at all n locations
caatagacctccaatctttaatggagagggttaccactactgganaactcgaatgcanatcttcattgatgcaatagacttatacaattggagagccatagatatatgaccttatatacccaccacagtagatagaaccacaatagatggaagcacaacatgtggaagcacaacaatagaaaaacctatagatagatggtctatagaagaatgaagacgagtacaatatatatttaatagccacacacataattacatctgccctgcgaatggacgaatatttatggttncaaattgtagagtgctaatgagatgtggacactctacaagtacacatgaaggacaacagatgtttaagatctggattaacacattaactcatg

SEQ ID NO: 31378 - DNA, 233 bp, Glycine max
tggtgtgatttaaacaaggaaataacttaagacttgctattgtaacttacctcttcatctcttttatgttaaagttgttgacattgtgcatggcacaataaacaaggaaataattgctgcctgctcgtacaaagatgctgcttccaaggattctgtagaagaacttgtgatgtccccagcacaaactgctagacatgaatttttagcatgctaaaaattgtcctaccccaccc

SEQ ID NO: 31379 - DNA, 403 bp, Glycine max
  unsure (1)..(403): unsure at all n locations
gcagctctannaatgtatcttatctgatanatagggggggtgcttctctatctcggtatctcttgctcacaagtcatgcactttattctttatatatgccatatatttgtatgcgaaggcagatgatattgctagtgattgtgtgtatgtgctactgtgcttgcaacaccttgcctgtaagcagcaatagatatgtgctatatcttaattccacttnatttcaatgtgtagaatagaaaactctgttgctttacaagtctggattgaagactggcaagttcatgaatcattttctttgtcgtttggtttatcaggttccagccaagctgcaactatcattttcattctggaacatggngagatcacaacctgagtcagttcctcgtcatcactgatcgtttga

SEQ ID NO: 31380 - DNA, 273 bp, Glycine max
  unsure (1)..(273): unsure at all n locations
tcagattcacagtagttcttgcattgccactgcttccattatcacgacttctagttgnaaccaatgaagcatcaagagatggcaccaaattatcactacaaatcccattcccaaacgttaaactgtagtctgccttcaccgaactaacagctttatgctcttcttcaatcataggaggaagtttactgacccagaggggtaagaagttttctgaaatatatccatattgtaacattgccatgcaaataccattgtataccggtctatgttgtt

SEQ ID NO: 31381 - DNA, 299 bp, Glycine max
  unsure (1)..(299): unsure at all n locations
tgcgtcacgtnntaaacacagctcgatggtggtgcgatgccttgatggtactcgacgggaagtggatgggganatcgacattctcattcagatagggccccacacttgcaacgtggtgtttcaagtaatggatataaatcccgcctatagctgcctcttgngaagaccatggattcatgccctgngagtggtcccttcaacgcttcaccaganagtgaagttcgcagtgggtggactnttagtgatagtgtcnggtgaagaggacatgttagtgagctgcccctcttcacaccatacat

SEQ ID NO: 31382 - DNA, 370 bp, Glycine max
tataattatgagtcttataattgtacaattttctaagttaaaagttgtaagttactaagtcaaggttgtgagttatgaagtcttgtagttttccattagcatttagtatcttggaataaggtattaaacatttatgtgattagtcaaatggtcactctattctagtataaataggggatcatactcttgtatttggtgtggcaaagaaataaaatctttttcttccaacaaagtggcatcagagcttgagttctagagtgttgagagagaaacactttgtaagttgagagatggcaagcaatggcttgagtatgtttcaattccctcgtcttaccaaagggaattatgataattggtgtcgttgcatgaa

SEQ ID NO: 31383 - DNA, 282 bp, Glycine max
  unsure (1)..(282): unsure at all n locations
cgatatcaagcgatatgtcgaagagaatgttgtgatgtgtggcagctggcttcttcctgagtggaaatatccggtacacaaggaaccatgatatggttntgctccgatgtgtggatgccagtgagggtgagcagatgctagtggaagtgcatgacggatcctttgggacacatgccaatagacatgccatggctcggaagaatttgagagcanggtattactggctcactatggaaaacatctgttgcatccatgtgagacagtgccacangtgccaggcct

SEQ ID NO: 31384 - DNA, 339 bp, Glycine max
  unsure (1)..(339): unsure at all n locations
taaaaccatgacgacatgacatataacttgatggccactattagctagctatgtcaacacaagaaagatacatagaagaattccacccttaatatccaatgccagcaaagcattctccacctcttctactaccaccgtcactgtcatcaccaccaccagtgtcagttctaccgccaccatagccaaaactgctgctaaccccatttcctatcccaacaccaccttgagcaccaccacttccactcccaattccacttcctgagcctactccaaatccaataggagtggaagagngggnggggaaccagcggatggagttggtgatgtaagggatgttgg

SEQ ID NO: 31385 - DNA, 114 bp, Glycine max
  unsure (1)..(114): unsure at all n locations
agcgtctcgacatattactggactcaatcttcatacgaganagaagttattgtcgttnngaattgctctgagcttcaacattaatatcgagcgtgtcgatatattacgagactc

SEQ ID NO: 31386 - DNA, 229 bp, Glycine max
gtgagccaattctaacgacaataactttttactcggatgtccgattgagtctagtaatatatcgacacgctcgaaattgaatgttgaagctctaagcctattcaaacaacaataacgttttactcggatgtccgattcagtgacgtaatatatcgggatgctcgaaattgaatgttgaacctctgagccaactcaaacgacaataatgttttactcggatgtctgattg

SEQ ID NO: 31387 - DNA, 417 bp, Glycine max
  unsure (1)..(417): unsure at all n locations
ccctgtntctctcccnctgtggcaacatcaaanagccanagcacgtggtaagcaacataaggcagaagaataataatcaaatataactaaagttcacataattattcttaagtcanaaccaaatagaatccattcatatgatactaagtgccacatactgaaatataaataaagttcagagaataaagacttaanaacgtagccaaatacacggcttanaataaaagataataataatcgaactctangaaggtggtggaaggtcanagcaccgacgaagataactcacatcatcttcaaactgagtgatgcggggtatcaagtattcttatgagtaataaatagtgtccaagtatatctagaataatatcaacaatgacaagtgcataatagcttccaccanaactcataattcta

SEQ ID NO: 31388 - DNA, 424 bp, Glycine max
  unsure (1)..(424): unsure at all n locations
ggctatatagaaacaagtgcnttgattntcatgtggtgtttccaatttctgcaactctattacagatgttctcaaaacaatatgtggttgtcggtacgagtggcatgatataattttaagcttgagataaatgctttaaaaatgtgaccatttgctcaaaaaaaattctgcacacatcatttacttatatgtaatgcgttatacataaaacatgggattgtgacacaggatgactgattctgcattttatataatttattcataaatacataggaaagtaacacaaataggctgagtacttttaaaatcacaacttgtatttaaacaaactctattgaaaatatataaaatgccactatatcaaggcttataaagtattgtagatttttagttaaaatcagtattacagtaccatatgtatgat

SEQ ID NO: 31389 - DNA, 383 bp, Glycine max
  unsure (1)..(383): unsure at all n locations
tatgtacatacatcatgttnttgttataactagtgttagaatttaggattntnttanatatgttgtctaatttnttaataaccncaaattaatctataaatntaagagcagaaccacatcatataattntcattntgttnntgaaatagttttaccagaaattccatccaaaattgcctaaacactaattgggttcattttaactntcaaataataggttgcccactggatgggaagcgtcttcaatctccctacttctaatggtctagtatcattgaaatattgcatgatatantanaacatangtcaataatatataataccaattataacaaaatgaaatatgtttgaattanacaatttatcgtttccaatcattcttg

SEQ ID NO: 31390 - DNA, 355 bp, Glycine max
cgaagtgagaaagtgtggaagagtcagtcttcctacttttattcgttgaccactaagtggtacctggagatatgtcacgggggtcaggagaccttggggacgtcaggtggggtgctattgcccaaaaccaagcttgaccaatcccgacccaactcgggcatagtcagtcagtgagaacctgtgatgtacctaaataggcgagctcctggcagtcaaccaataaaagaataaagaccacaaagcaaggaggcttgtgtggtggctggccagctatggatcttgagtgatatttggaatatggcctctggtaatcgattaccaagggtgtgtaatcgattacaaggcttaaaaatga

SEQ ID NO: 31391 - DNA, 267 bp, Glycine max
  unsure (1)..(267): unsure at all n locations
tatcttctttttgttgcctttttctggcagtttccatgtgataaacctgcccanatggaagaactagggctgcaacctatggatcataatgaatcaaggagggatgaaagtcagtcactcaagctaanaataagagatagtcagcagaatcacagtgtctcacctgttccaagacaagataataatattgatggtcatgcgaaaatggataataagttaattgatcttaatacgacgccactgcggttaaatggagcagcaccaaac

SEQ ID NO: 31392 - DNA, 243 bp, Glycine max
gccgaaagacatttgcgatttcattgctaccaactttattgaaaggtgaaattttctcagcctattcaatttctttcccgtattaagtaaatgttagcaacgtcctcatctgaacgtaatttgtttatccatcatcagaaaattaggattttaatatcatgaggagccagaattagcaagtcatctctatacacatataacccatttgtgggagatcgagaatccgcatgcagtctggaaatt

SEQ ID NO: 31393 - DNA, 381 bp, Glycine max
  unsure (1)..(381): unsure at all n locations
tgtagagacagccacttatactttcctacaacaccacanaaactcagaacaatattatatggtacaagcgcaatntaacgaactgacaacatatataacaagctactanaaagacactgtatatactcatcatacgctaaactcttcaaaccatatttgttacacgagtgagctctgactctcacctatacaaatgttcccgacaccttcgattctctattataatctatgagtttatgtgtggatgatttgaacactaaacctgtgaatcaactttgaacatgtataactcttaaatacatgttactgttgacctaacgaanagtcaaaactagtatgcgactggacaatcatctacatcatcgagttacactctaacta

SEQ ID NO: 31394 - DNA, 352 bp, Glycine max
  unsure (1)..(352): unsure at all n locations
actcaaatcatatatacctatatcaaacattggacacttatattgttaactatatatcgtaatgaatattaattattagctgataaaatatacacctactaaaccgaatttacttacatcatccacagctgtagtataaatatgttcaaacatttgtcacctaaaataattctagttacatctacatgtgtgaagaaaaagccatctttacattgggtatcccaaattatgtcccatcccatggatcaactccagccactgcattgtccatttcagcaaatccaaccaattttggcagatgctnntgcgaatcctacatggttaatgaaaatacaattatgctattttattt

SEQ ID NO: 31395 - DNA, 552 bp, Glycine max
  unsure (1)..(552): unsure at all n locations
cgagtgactatcgtgatatatctttncacacgtgatcatcanagtgtcattacagttcatctgacttcaatgatatccgcccacatcatacatcgataatatgttcagcagatatacaccatatgaacaactaactatatataaatctcagcgactataacgtctctataattctcctatacacagatcctctctgtaacatacacgctcattagttatttaagtcaaagaagtgacaatattacagaacatagagagcacctgacttcaacatatcatattatcggagaggtattgtgtgcactacacgatncaccaanatacaatacaattgactcggtaggagtcatctacgagccaggatattatctactaccctctagagcacggactaatatcgtttatacacaaattatgatgatggcacacgtgttttgacagacataactctaactgacactatgaaggcataacataacatactcctaaacacctcacacgnacattgatgcttaaggatatcgtcataaactatcacacactaccgtatcg

SEQ ID NO: 31396 - DNA, 248 bp, Glycine max
ggagtcctgtatcatgaagagtgtgtttctgcgaacaattatatttggctacagacttcaccgatgggtgctgtaatggggagtgatggtggtcgcatctgtggtggttgtaatggtagtggtacaggctcatatggtggacatggaagaacgtggtgttttgattaacgaaatgatcccagtctagatatcgacggatgcttactaccaaaacattatctatgctaaccccagggatgctcttttgc

SEQ ID NO: 31397 - DNA, 174 bp, Glycine max
aattactacttatattatgcgtttaccaatgatattcaaagctattgaactacaataacggcaaaattggttccaaattatgttgattatggtgatttgaggtaaatgcacttgtaccaccagcttgtgggcaatattattgttcgaacgcaaaacatgaatgattgggcctga

SEQ ID NO: 31398 - DNA, 394 bp, Glycine max
tgtctcctccactacatcctgatttgttgtttctcctctataaccagtattgggttggatgcgcaatccttccttgacgctgtccaatatcctgtgctgctgtggacttattatattttgttgttgctggatgcttcgtttgtgtaatgttgggccaatgtgttgggcttcagaaattgcccatccctccttcacttgcttttgacacctcctggttcgagagtacaccttccaagaggtagctgtagctgacttattaattggcgggctggaaacttggggtgttggggttctggcacgcgtgtgaatagaaaaagccatgttatttgaaacttcctgttccaccgtggctcacatgcctctttttttttctactaaagtcccgtgcctatac

SEQ ID NO: 31399 - DNA, 299 bp, Glycine max
  unsure (1)..(299): unsure at all n locations
acattatntccatgacacanatgcannaatgatgaattggannatttatgcanaactggtcatgcatgcacctatgcggacgctcaagtgtcaaaattttatggtcatgtgatgctagggctcangattcatttcctctantttaaatcaacccaatgtttccaaaatatgttcttttatcaatttgtgcattcctccaagtccatttcgggcgtccggggaaatttcacagcattcacccttcaggtgtagaacacgtttttcttcanaaatcggttatgaatcaatgaatttttttc

SEQ ID NO: 31400 - DNA, 383 bp, Glycine max
  unsure (1)..(383): unsure at all n locations
tgtgcaaatcaaatcactcctacatttcatctctagcatgcattttttctttacccactcctcacgtttggttttttagggaaaaacaccataactaaacgcgccacaaggcatccctatcgcaccagatccaaatctagaacgatgggtgatcaagaggagacacatgaacagatgaaagccgacatgtcggctctgaaagaacaaatggcctccatgatggaggccatgttaagtatgaagcagctcatagagaagaacgcggccaccactgccgctgtcagttcggctgccgaagcagacccgactctcttggcaactgcgcaccatcctccttcaaacatagtaggacggngaagggacacactgtggcacgatggcag

SEQ ID NO: 31401 - DNA, 328 bp, Glycine max
  unsure (1)..(328): unsure at all n locations
acatcgttcgcgtgtatgatatccactccacaatggttgaagtagaggagagcttcaaccctataacgcaacatggcggacaaaagtgnngcagtaaacttgaatggtcgcattgtcaatgcggaaggtattctgcgcttcactatccatgttcacacattattgcagcttgtggttacgtgagcatgaactactaccaatatatagatgttgtntatacanacgagcacatcttataagcttactccgcacaatggtggcctcttgngaatgaagcggctattcctccttctgatgacgcatggacacttatccctgagcaactaca

SEQ ID NO: 31402 - DNA, 277 bp, Glycine max
  unsure (1)..(277): unsure at all n locations
ntagttcattgcttcaagtagtgctaatatgcttctagaggaaaacacgttgccaaaaagttactattaggccaagaagatattgtgcccgatgggtatggagtatcaaaagattcatgctttccctaatgattgcatactttacagacataagtttgaaggaatgcacaaatgccctaggtgtggggtatcacgatacaaagtgaaggatgatgacgagtgtagtagtactgatgaaaactcaaataaggtccccccagcaaaggtgttgtggcat

SEQ ID NO: 31403 - DNA, 346 bp, Glycine max
  unsure (1)..(346): unsure at all n locations
gacaacttaatggatgaagagnaagtagttntaactttacatgttggcatagacacgctaccanaactctctttaaaagaccatgaacttgaagcactaactactnttacttcaaagatattggtacctctatatgagactagctagctaaaagagcttggtgtaatgtcaagtgtgtatttgagctaattaaatctagatattgaatatggatatctaatacaatgaaaaaattctctgtatcttcttatgaatggtccatgacatccatatcatgtttgaagggatatacggtgcaatataatgatgacgatatgtatagatgatcgaggaactactatagtat

SEQ ID NO: 31404 - DNA, 299 bp, Glycine max
tcaagaaaaagatggcctcaacaaactccttatttccataagggaattctatcaatagacctccaatctttaatggagagggttaccattaatggaaaacccgaatgcaaatttttattgaggcaataaacctaaatatttgggaagccatagaaatagggccttatatacccaccacagtagaaagaattacaatagatggcagttcatcaagtgaaagtataactatagaaaaacctagagatagatggtctgaagaggatagaacacgagtacaatacaatttaaaagccaaaaac

SEQ ID NO: 31405 - DNA, 214 bp, Glycine max
  unsure (1)..(214): unsure at all n locations
catccctgcgtgcatatagcggatgctaaacacaatactccatatagtntattaatatcttattatattcgaacatcattatatactgtataatagatatcattaacataatgcatctgtgatttcacacggcttaattntcagatacaattatcgaaaaataagtaactacttttgaaagtaatctgttatgaaatataatatatatgtgaac

SEQ ID NO: 31406 - DNA, 357 bp, Glycine max
  unsure (1)..(357): unsure at all n locations
ntaaatatctgatgacgggaatcctcatctgggagtggtatataaatcaattggtgcagacgacctgttcgcagaagcgcgggatctataatgtctggtcgattagtggccccaatgatgaacacagctttctttgctgacatcccatgcatctctgtaagcaattgattcacaaccctgtcatcagcgccaccagcatttcttacactgctgcctctctgcaagatgaggcacacatgttttctacacataacaagacattactgtagtcttaagtactaagtcacactaattagctatgttttaaatttttttaaatacatacgaatgcctgagaaacccatacttctatctgat

SEQ ID NO: 31407 - DNA, 330 bp, Glycine max
tattcaagctcagacctaactattatttttatatgccttttgagctacaacacaccaagtattctttggtttcccttattatagcctacaggatcagacccgtattccttttaacttcaagtacaacgtgagtattgttgagatcaacctgactcaaactcacgtattatatccacaattgtcttcctcctccaacctataggctctcttaagggaggcacgatccctatgatatttctacaagcctagaacaccgactctcctgtctctggttaacaagcttgttcaggctctaacccaattttgatttcagcacgctatgattaacat

SEQ ID NO: 31408 - DNA, 234 bp, Glycine max
  unsure (1)..(234): unsure at all n locations
acaagactaagcttcgtaataagatataagataaacttttattaaatacttattagtatatattgaaaataaaactgttgaaacttattattgattatctttgcaacatataagaacgaccatatgtgtgttaattcagtgatacggattatgagttcntaactatattgattacattgaactcaatatattttgataaaataagttatgtgtagagattatcacaaaaaaaag

SEQ ID NO: 31409 - DNA, 250 bp, Glycine max
tatgttatttatagctttcatctccaagagttcattatctcacaattggtagatttcttcacttgttcttcgtctaatgatattgatcattggagaatttaatgattgcattaaatgcatgtcctttctccatgcaaagagtccactctggttgacttttgtgttgagcagttcaacaaaaagttagttttcatttgtcaaagcaggtctacatagcagagcgtgtcatttgatgaaaattgctactttt

SEQ ID NO: 31410 - DNA, 374 bp, Glycine max
  unsure (1)..(374): unsure at all n locations
atctanngtggaggaatcatccannattgagatgggcaagtcctctacaacaacaatagcctgtcccttatntccaaaatgttgctggtccaagcaagccatatgttcctcctccaatgcatcagtagtagtaacaacaacaacaaagacaacaagcaactgaggccccttcttaaccttccttagaggagttagtgaggcaaatgaccatctagaatatgcaatttcagcaagaaacaagagcctccattcanggtctgacanatcagatgggtcagatggctactcagttgaaccaagcttagttccaaaattctgacaaattgccttcacagactgtgcagaaatctgaaaatgtgagtgccatcaccttg

SEQ ID NO: 31411 - DNA, 408 bp, Glycine max
tatctgggctcgagtcaggttgctatcataaggcggctgggcaatgggtctataatagggtccgaggtaaggccaccctcatcatcatctacaatcaacaaaaatactttataagcgcatttgtggccacgatgatatttttcatcacaattaaagcaaaggccacgttcgcgacacagggtatctcctcggaggataatcttttaacaggcactggggttgatggttttaaagggttgagcaacgatgaccatggaaaggaaagggtggacgaatatagatctgaggcatgtggaaaaaaattgggagcatgaatggcgttgggacgaccacggaagggccgacgagtgtcaagaaacttctctttctaaagacaagctaaccccgccgcttgcaccaatgtcaacg

SEQ ID NO: 31412 - DNA, 430 bp, Glycine max
  unsure (1)..(430): unsure at all n locations
tatctaaaccctcaatttagtggatttcaagctntgagaaagtgaaatgagaatggnngtaaattggagcanactctcacctcacacaagtctataaccttaatctaaacttgctcanactgccaccgaatcannaattgactcctcaacacccaatctaccctagaaatggctcttgtcttcactttggtcactcattntcctcctttgcacaacccaagctntctcacagtcctaaatgacatttcatactangaatacctcactctaacctccaattaccactaaatccagatttggcttttcaaatcctcaaagcatcacacttcttcactcatatcactacattctcactgtntaaccctangntaactctacccttcatctctatcagttcttcatcagccatttcagcacacaagcatcatca

SEQ ID NO: 31413 - DNA, 333 bp, Glycine max
tgaagtaaaagcaaagcctccacaaaatggaaggtgtgactaggtggaaaattacagcgcaagtgatggagatacaaaaatgaaaaacaaactgagaaaagacaaaaacagaggaagtagggttagagtaattgaagcaatggtcgagaatgcatcccaacatgcatgaaaaaaaaagataactctcaaaggcagatgaagatgcacaaactgaagattagacgaaaacaacagtccaaataatcaatatagttcctaatctagaataattttagaaatgtcgaatgaacgtcaactataaaacataaaaatatattggtgcatgaattgaaa

SEQ ID NO: 31414 - DNA, 365 bp, Glycine max
  unsure (1)..(365): unsure at all n locations
caactcaagggtttgaagtgtgtgaactcggagaaagctgatcgtgagaataaaagaaagataganatagaagagatagaagaaaaatgggaggacatgattnttgatatgtccgtanaagatgatgaannatcaagcttgaagaagaaggtacaagaagctaataccgagttagaagattctaggcaacaaattattaaggtaaatgttctgttctaagaaaatccttattctaatccttatactaaggagacacttttagttcataatttatttaaacctttacttttaatttntaacttcatgaaaaagtaattcatttttactcttacttngtatcatanagggtttttaagtgaataata

SEQ ID NO: 31415 - DNA, 321 bp, Glycine max
  unsure (1)..(321): unsure at all n locations
tcttgcgtagccgctcttggtgctcaaaanatcccaaaaacaaatccctcttattactagctattttgaattctttagctcctgaatgtacaaccttcaaattgttgctcgttcccctctttcttttctgcaaaaaagaaaatcaaatgctgtgaaaacatggatgaagtcctaagaaaatcaatatcaaagaaaacatggatgaaatcacaattaaaaagcacaactacctatctttcagagtcctttgtttaatttgtcttgttttcctatgtggtagggttttggtttaataatatttnattttgccttccaaaaaaa

SEQ ID NO: 31416 - DNA, 440 bp, Glycine max
  unsure (1)..(440): unsure at all n locations
gataacagagataatgacatatagctcanaagtcaagatcacttcgtgataacaaagatgatgacattcaagaatgagttcaagatcgagtcaagaacacttcanaagattcaagattcaagaataatcaagatcaagattcaagactcaaagattcaagaatcaagagaagacttaatcaagataagtattaanaggttttcanaacattgagtagcacaagaaagtttacaatatcattaccaaagagttctactctctgcgtaatcgactaccagatatagntatcgactaccaatgctctaanacgttagaatttcaatattaaaatgaagagcacatctgtgatgtgaatcgatacaccttatggaattgataccatgactgtttcgaanattcatttcagagtcacattctcagtgactgttctgagatctttc

SEQ ID NO: 31417 - DNA, 263 bp, Glycine max
ctttcaatttaatgaggttgaatgacaaacttgcttggtaccaaaagcgagcaatatgttaatgcacctttcaatacttcattcttatccattgactctcttatgttcatttgcctcagcatctccatttttctccgattgattgcattttctggattcttacaaaatttgtccattggtccttttttagtcccacactttgtctttgcacttgcagcagcattacaagagttcgcaaactcatcttcttcacttccatcaca

SEQ ID NO: 31418 - DNA, 270 bp, Glycine max
  unsure (1)..(270): unsure at all n locations
ttgagacgctcannattgaatgcaggagctcttaccanattcanatgccaataactntntactcggatgtccgattgagtcccgtaatatatctagatgctcanaattganaacagaagctctgagcaaattcaaacgacaatagctnttgactcggatatccgattgagtcatttaataattcgagacgcctcaaattgaatacagaagctctaagcaaattcaaatgacaataactttngactcgaatgtcncgattgagtcatttat

SEQ ID NO: 31419 - DNA, 345 bp, Glycine max
gagcgtctagatatattacgggacacaatcagacatctctagtaaaaagttattgccatttaaatttggtgagagcctctgtattcaatttcgagcgtcaagaattattaaatgactcaatcggacatccgagttaaaagttattgtcgtttgaatttgcttagagttactattctcaatttcgtgcgtctcgatatactacaggactcaatcggactttccagtaagaagttattgtcatttgaatttgttgagagcttctatattcaatttcgagcgtcttgaattattatgggagtaaattctacattcgaagtaacaattattattcgttcaatttgctga

SEQ ID NO: 31420 - DNA, 395 bp, Glycine max
  unsure (1)..(395): unsure at all n locations
gatgtctctctatgggtggcataataactcttcattaactctgtntaacagctntacccatntacttgttgtctnttntcagacatccctaaanagtgatgcataagatagtctctattcagagaaactntctntacacaaaccttgactaatatcaaccatcttataacttctaaggagttatttactttcataanagcaaaattaattaacagatacgaaccttcaactatacagatcattgaggttcttattcagatagcaaagaatgaggaaattgatctatccgtgagatttgctgcanaaatcgctacacaatctaagcagaacctcagagaagcatcatggctcttgaagcatgcaatgcacacaagtanacttgctgactgacacat

SEQ ID NO: 31421 - DNA, 403 bp, Glycine max
taataaagtccttaggattcacattgtgtatatatgattgcatggaatgagatggagtgcaaaattgggaattgattgttagttgtttgcatgaattgacacttgcctaaactctgagtttttgtgtagtaggtgccttaaactactaattcatactgttttgatggtttattttgtagagatacaagcaagcgatagagagagaagttgaagtctgatggttcgcgcttagcacactaggcttgcttagtgagctgttgtcgcttagcgggagggtgtccgctcagcgtgaagaagcggcatagagaacttgcagtcaagcaaaatggcgcttagcacacatggcttgcttattgcccaaccacttacttgcgctcagtgcgcatacacgctcagtgtgtag

SEQ ID NO: 31422 - DNA, 200 bp, Glycine max
  unsure (1)..(200): unsure at all n locations
tacaacacggatatggctcctgatcggaaccaacttcagagcatgaccaagcgggagcatgagcccattaaagaatatgctcanaggtggagagacctagcggcccaagctgtcccacctatgaccganaggggagatgatcacgatatggtagatacgttgcccacgttctactacgagaagctgataagatatatgcc

SEQ ID NO: 31423 - DNA, 323 bp, Glycine max
  unsure (1)..(323): unsure at all n locations
ntaggagaaaccattaaaactaaagtagttcctaaacaaaaatcaattgagggagcttcgccaagtgtccccatcgaaattgaaaaacctttattcaaacctttcaaagttagtgagaaggctaaacggaaaattagggaacttggaaaaactaaatccttaactgagggcgtaggtgacaatcatagtgaattactaaacaagattggtagtttacttaaggtcattccagatactccccaagccttggaaaatacttctaaaatggtaacaagaagtacctccaaattaattaatgttataaatgaagatagtgaccaaaa

SEQ ID NO: 31424 - DNA, 155 bp, Glycine max
  unsure (1)..(155): unsure at all n locations
ctctatcttcacagtntagttagattaagatatcttataactgttagaaggaaaaatggtctcttaatgagctcatctcatactgtgtgtaagacgatgaaaggctgaatcaagaaaggattgaaagtgctcatgctgtaagtacctctaaagac

SEQ ID NO: 31425 - DNA, 238 bp, Glycine max
tttcaaatgggtaaaaggctcacattcactttcttctacatcatattcaaacttgtccaaataaataataaagtcatctcgactcaaagaaagtcatataagtctcatacaattaatatagaacctatatcctaatgtcacatcctatcagagcgtggtgttcccgtgtcctctagcatgaggttcttcatagtcatccacctattcatctgctcccacgaacacaaagttcaagatc

SEQ ID NO: 31426 - DNA, 229 bp, Glycine max
catcgttcgcgtgtatgacatccactccacaaggttcgaagtataggagaccttcaatcctattatgcaacgtggcggacaaaagtgggcagttaaattgaatggtcattattgtcaatgcagaaggtatacagcgcttcactatccatgttcatacttattgcagcttgtggtacgtgagcctgaactactaccaatatatatatgttgtttacacaaatgagcacat

SEQ ID NO: 31427 - DNA, 257 bp, Glycine max
tgccacccagctcgcccaggcgagcagggttgcttcctctagaagcattatccttctggagcaatcttctggagggcccaagtgggcctggttgctatttgcacccccatttttactaagtacaccccctctgcttttttttggtgattcttttttcgtaaagttacgaaaacttacgaatttcgtaacgatacttgttttctttccgtaatgttaccgaaccttgcggattacataattatcccctttttgactta

SEQ ID NO: 31428 - DNA, 144 bp, Glycine max
  unsure (1)..(144): unsure at all n locations
gtaccgataatgtgtctaccatcacgaattatcgtctcctttttgcacatgttctgtagttgcatcctatctggaaccatatcagaatagtactgatactgcctaacgaaggcaaccattangtccttccaagtatggactcgg

SEQ ID NO: 31429 - DNA, 392 bp, Glycine max
  unsure (1)..(392): unsure at all n locations
ttaactaattcaaaataagcaggcaatttcataagacataaaaggaattagatttgagttttgaaattcctgaatgcattcaaaactctcattggaaaacaaatccatgtttatgaatttagcatcaataatggaacgagaggagaaaaggtttatgtaccgtatccattgttcttctgatgagaacaacaaggaagaggaaatggaggagggaatctgtgtttcctgcgcctcggagtgtcattggcttcgactcgaagaacccttgcattntttttatggttctgccatttgagggagttatttgaaatttcaatgaanaagaagaattttgggatttgtgggacttganttggacaagatatggcagaaatatgaattgggaacgatgc

SEQ ID NO: 31430 - DNA, 308 bp, Glycine max
  unsure (1)..(308): unsure at all n locations
ctaactaacataattcacatcgatttaccaatcattgtgtaacatcacttgtcctaaggatntaatcacanaatcatattctataccttcacattaatcacatgttcataacanaacatctcaagtacaacacaacatctctcacacacaattcattacccaccatcacgtagcaagtcacaatgatcattacacagatgttatgaaacatatatactaagactcaatcctatattgaatgtggtatctcgtcagtgaanaataacactacggcacctangagtacataataaaatacaccacacaat

SEQ ID NO: 31431 - DNA, 359 bp, Glycine max
  unsure (1)..(359): unsure at all n locations
ngatgtcattcaaaacactatgtagacctaaatgaagactaaacatgcattgtttatgtaattgtattcattatgcgatataatttgttgtaacccgttactaaccaattaatattatcaagtactcgtttggttaagcaaggaaattgttggtccaacaaaaatcatttacgtgtgcagcatacatcattgtcataattgacaacacataatgacatgcatgcgtattacagtttgagcgcgacaacacattggctgacttcagtacacattctgaaactagcagtcgctcgacaacacattggctgacttgactacacattagcgacaacacattggctgacttgactacacattta

SEQ ID NO: 31432 - DNA, 642 bp, Glycine max
  unsure (1)..(642): unsure at all n locations
ttgcnnactgtgagcgtcttgatnncccctgacacgngacnctctgagtcacctgcggcatgcanngctaccactagcncaatantgtcatcgctcagccaatatcggnccttctncttacncaccacccagtcatncacanaggctatccctanatcatccacanagtttgctggccgcacatgcaatagccaagcgcaaaccagaacaccaaccaagaaatgagatttgcagcgaaaaagcctatagaaatcancccaaattccaatgtcctatgctgatttgctcccatatctactntgatattcaatgggtgccataactcangccaatggtnctcaaccttcattttttcanggatacgactcgaacacaacatgtgcttatcatgggaagggccgcggggcattccattgagcaatgtaagaaccctgaagcgtaagggtgcacggcctattanatggcggcttactgaaatttgaagggatcactgttgaatctcacatgaacaaaaatgccacatggggcaattgaagtggtgtataagccttatgctcattatatttcaggtatggcatattgaaccacagttcatgctataatatgatnaattgacacctgctctcatcccataatacaccn

SEQ ID NO: 31433 - DNA, 261 bp, Glycine max
tcacttgaaattaagttatttaattatgtgggttcttgtattagtccctattttctctcctcctttggcatcaacaaaaagccaaagtgcgtaagaaatataaaaccatacataaatgactaatcatacaagagaatagaaaacaatcaaacaagataacttaaccatccatcaaactagaaggataatacttcatagaatgtcatataatccagaaagtcattcataataaccaaataaaaatacataccactagtcata

SEQ ID NO: 31434 - DNA, 197 bp, Glycine max
  unsure (1)..(197): unsure at all n locations
tattcttctaagtttatactgctatntattttaggtaactatntatgaggaanaagattattcctaactntttatacttctatttttagggcaactattttgaggaaaatattcttcctaatntttttaaggaattcttcttaactcttatactctaattcattttgggtaatatntaataatatcaatntttgaag

SEQ ID NO: 31435 - DNA, 418 bp, Glycine max
tgtttcaaaccatagatggatttatttagtttgcaaaccatagactttgagtcacctgatacaaagttttctagttgcatcatataaattgtttcttcaatgtcaccatttagaaacacagtcttaacattcatctgatgtagctctaaatcataatgagctaccaatgccattattgttcaaaaagaatcctttgaagatattggaaaaaaggtttctttatagtcaatgccttccttttgggtaaatcctttagcgactagacgagcaacattgccctttgaatcccttttggttttaaatatccatttgcaaccaataggtttcacacttttaggcaattcgacgagatctcaaacgtcattgtcttgcatagatttcatctcatccttcatggcattcatccacatttgagagt

SEQ ID NO: 31436 - DNA, 417 bp, Glycine max
  unsure (1)..(417): unsure at all n locations
atgcgagacggagaccaacatgctagctatcatcgccaagtaccaagaagagttaggtctagccacggcccacgagcatatgatcgcagacgagtatgctcaaatatacgccggaaaagaggctagaggaaggttgatcgactctttacaccaagaggcaaccatgtggatggatcggtntgctcttaccttgaacgggagtcaagaacttcctcgcttgttagccaaggccaaggcgatggcggacacctactcctccctcgaagagattcatgggcttctcggctattgtcagcatatgatagacttaatggcccacatanatagaaatcgctaggagacttgtatggtctctcagaccttgactagatacgactntctntntgagatanaatgagttggtcccatggttctact

SEQ ID NO: 31437 - DNA, 348 bp, Glycine max
  unsure (1)..(348): unsure at all n locations
ctcagcttgccttgctccttgattattgagggactcatggtcactatgaatgacaaattccttgggataaaggtagtgttgccatgttttcaaagcccgtactaaggcatacaactccttatcataagttgaatagttaagggtaggaccacttaacttttcactaaaataagcaattggatggccttcttgcatcaacacagccccaatcccaacatttgaagcatcacactcaatttcaaaagatttttgaaagtttggcaacgcaagtatgggggcattagttagcttttgcataagaacattgaaagctttttttgtttnttttcccatttgaaaccaactttt

SEQ ID NO: 31438 - DNA, 392 bp, Glycine max
  unsure (1)..(392): unsure at all n locations
caacattattgtaacaacatatnntagagaaaaacttaatccgcanatccctcttgtatgactaagtttcaattctgcttcattcaagttctaaggcaacaatacatttcccaatgttaaaatcacctagctaggcacacatatggttgatcagaccaagagcatacataatntatgtactgaaagaagcattgaacacaagaaacacaatcaattagatattaaaataattacatcagctgctcattagaaatcccctgtagtcgatgaatacaactaactnttgtgtaagaaatctgtgaanattgatctaactcctcccatnntatggttatttgtaatgttgtaattactnnttgttaaatataggtaataaatacttagtactccca

SEQ ID NO: 31439 - DNA, 262 bp, Glycine max
  unsure (1)..(262): unsure at all n locations
taatacanaagtgggtcactctcaaaagagactgttcgattaagctgagaatctagaaggggggttgaatagattctttgaaaatctttacctattcgttcttaacaccgattaaaaacatccccttaaatcaatcaaagtttcttcaaaaattctttagaaataagaaactattatttgggcccttaagatcaattccacaaccaatatgattacaaaactcagagtaatagagaatatgagaaatacataagactttata

SEQ ID NO: 31440 - DNA, 481 bp, Glycine max
  unsure (1)..(481): unsure at all n locations
tgcattccagctttaatagatgtacatgtgtgaatattataaagtggaaagcctacactacccctctaaatctaccccanagtaactttttaataaaaatatntaatttttattntaatatgtattgttaattaatagtattacacaatagtgcattgtttcattgaacttgatctacatcatggaggaggataaaagcaatgggatatataaattaacctacacttctttntaagttgtcaattaattaaaaatcaccttttatatagctcttaanatatctatagttcctattacaatatctattatanaaatataaaataatattatcataattatgattaataatataataaaatactgcagttattacatatatntctatgaagctttaaaggctaatatgatagtggctagattaatgtgcgatgacaattatttgtacaaagaataatatctcctgatgtgtgatatgttgtgt

SEQ ID NO: 31441 - DNA, 429 bp, Glycine max
tgatgcaagctccattggagcttgtaggcctaggatcttcttcatcaatggattcctttgcttcttggaagataaatggcagcggaatggagaaggactatatggtaatgatgctgatgttgcacctgaattttctcctttgaaaattgttgaatttggaaatccttctcatgacactcttgacccaagagatagaggctttggaggaagactatggagatggaaatgggaaaaatgaatcaaggcaatatattgaggggttaatggatcttgaatagagattcaatggattggagatagtgactaagaaattataaagatagcaaaatttggtcactattgaacaaattattcttataaaccaaatctttagcatttgttaatatgttttacttatttcttatactagcaaaattacatgtatgaatg

SEQ ID NO: 31442 - DNA, 209 bp, Glycine max
  unsure (1)..(209): unsure at all n locations
gatgtgattagacaaatgtctatcttaatacanattcacataacacatcttaacttgatatatgtgtttatatggtgtatncattcatgtatataacaatatccctggaatacatgaaatactaactagntcccttcttttcttcgggaaccagtacgccatgcctatgtctaatacgcgatgtctatacaaaaaaagtctatacgtga

SEQ ID NO: 31443 - DNA, 302 bp, Glycine max
gttgaataaatcacttatggatttacttgatggaatacatgtatgcataacaatgctctttatcacttttaatctacttgtttgcttctgatatttgtgagatgaagggatctggatcttctcatcataagcatagtggctagagacaagataagatttaggcttattggttttttgtgattgaaaaagaaatctatttaagaaatggagagaacaaaagtagaggataaggcatcctaacaagaaacttaaagaagaaaaaaattagaaactcatagattgagtcatgtagaaaggcatgg

SEQ ID NO: 31444 - DNA, 457 bp, Glycine max
  unsure (1)..(457): unsure at all n locations
agctagcacctggaatccggacgctccatcgaccaacctgcgatgacatgcaaagggtatgtgtctnntgggcatgcnctatntagatcagtgtagtcaatgaaccacttgccattgccattggcctntntgaccatgactaaattggcgagctaggtggaaaacctgacctctctaatgaagtttgcatggaggagcttgtcgacttctccttctttgacgactnntacatcgtgttctcccatcttccttttcttctgtgatatanggttggccggngagcagatagccagtntgtggcagaatatgccgggatggatccctgatatgtcagatagctaccagccaaataaatatgtattnttacgtagcacattagcaatgcgtcgatggtcatgattggtgaggtccctactgagccgcatgcactggcacaatntatgggtcgagtacaact

SEQ ID NO: 31445 - DNA, 400 bp, Glycine max
  unsure (1)..(400): unsure at all n locations
tgctctaaatntacattgatgtttgtatttattggagggggttgtatgccatttttgttttaagggtagcatttcttggtaaaaactaactttccaaatgtttgccttcgcaggaatggccccgaggaagcttgcctcaaagaggtccaggaaggacaaggcggccgaaggaactaattccgctccggagtacgacagtcaccgctttatgagcgctgtacaccagcagcgcttcgaggccatcaaaggatggtcgtttctccaggagcgacgcgtccagctcagggacgacgagtatactgatttccaagaggaaatatggcgccggcggtgggcatcactggttactcccatggccaagttcgatccagaaatagtccttgagttttatgccaatgct

SEQ ID NO: 31446 - DNA, 146 bp, Glycine max
tctcgactcagtccatgcacgcatctctgataccactggttatacagcatgcctattatctcttaggatagtgggggtagcctctggagactcgcatcttccatccctcttaaaaaatctatcgctcttgctactaactacatgag

SEQ ID NO: 31447 - DNA, 198 bp, Glycine max
  unsure (1)..(198): unsure at all n locations
ccacagagtggtacttggagatatgtncgcggggtcaggagaaccttgggacgtcaggtggggtgctattgcccanaaccaagcttgaccaatcctgacccaacccgggcatagtcggtcagtgagaacctgtgatgtacctaagcaggcgagctcctggcagtcaacagataaaaggaacaaagaccacacagcaag

SEQ ID NO: 31448 - DNA, 287 bp, Glycine max
cttggagtttccaagtgccaattcgtcttcttcttttgtccagtcttcttctgacttcaattcatcagtgggctttccttctgtgtccagcatcttgggatgttcccagcctttgatgacagctttccaggttctgctatccagtgatttgaggaaggccaccatccttgctttccagtattcatagttggttccatccataattggtggtctgttcactggtcctccttctttctccatgttcatcagaatttatctccctagatctcactcagtgacttcgagtg

SEQ ID NO: 31449 - DNA, 384 bp, Glycine max
  unsure (1)..(384): unsure at all n locations
catttcataagtcatcataatgaaacananacctctagcatatgttctcttaataatgtaaacattanacatcagacagagtacttgcctctagcacagtgtaatgatggatttgtatttattatagttataataatcatatatttaagaataaccgccatttatgaatacaggacaaccaaacaaacttaanataacaacgcatgcacgcaaacacatacatggngcatgtnctgcaacctttgattaacttgtaatattggccatccatagcttattcaatgggtggttagtgttacgcttcatattcacatcacaactaacaacaggaataaagtcatatccatatcacaactaacagcaggaacaaagacaacaggtcac

SEQ ID NO: 31450 - DNA, 419 bp, Glycine max
cttgtccttagatccctcttgttggactagacttagaccaaacaacattattgtaacaacatatttaaaaccaaaacttaatccgcagatccatcatttaagactaagtttcaatcctacttcattcaagttctaaggcaacaatacatttcccaatgctaaagtcacctaactatgcacacaagtggttgatcagaccaagagcatacagaatttaagcactgaaagaagcattgaacataagaaacacaatcaattagatattaaagtaattacatcagctgttctttagaaatccccaacaagggtgtttagccagccattacagaaaaaccctaacaataatgagattacaaaacctaggtatctctgcaaaagttgctcctcttactgcctcaagagctctattcccaaaatag

SEQ ID NO: 31451 - DNA, 249 bp, Glycine max
ttagcactgcgctgcactggctctgtgaatattgcttatataatctctcaatctgagggagtatcttctaccctcctcttgactgtgaatcatgaaaagtttttttatgaaatattgtaaataatattattaaaagcttctgtttttagagggacttttaaaattttttttttttcaattttactttattttgaactttttcccccggggaaaaggccttttatttaaacaaaaaataagggcttaaaa

SEQ ID NO: 31452 - DNA, 339 bp, Glycine max
tcataaacgtcagacacaaggcacacaacatttatgaaagaaacattttattgttattaaaacaaataagttatgtgttcacattcccagaaagaaaaatgatcaatttaagtctacaaccgagttaaaataataaaatcagtaaccttaggcctgcagcatttcacactgtagcttagatgatggtttcttttatctagaacatcctcccatttatcactgccgagcttctcatccaaaatctccattaaaaatttcaaatctgcatctgtcacaaaatttgaggttctgcttctgcaagagtagaataatcaaataatcttattatgcacctgactc

SEQ ID NO: 31453 - DNA, 344 bp, Glycine max
  unsure (1)..(344): unsure at all n locations
ctcgtggcttctntgagaagctntctcaagaagcttctntgagaagctagatccttacctatccacacncctctanttaactaaattaacctccttaaaataattatggatgaaaataacgcaacanataatcaaacaccaaacataattactaataatatatagatatatatatcagggtgttatagaacatgcagtttcagcaggagactagagcctcaattcagagtttaacaaatcagatggtgtagatggccacccagctgaaccaagctcaatcacaaaactctgacaagcggtcttctcaatctgtccagaatcccanaaatgtgagtgtcattaca

SEQ ID NO: 31454 - DNA, 265 bp, Glycine max
  unsure (1)..(265): unsure at all n locations
ntcggaatgttacagaaactgacggattgcgtaacaataccaccttttgatttccgacatgttacggaatttcacagattgcgtaacaatgcttccttttgatttccggcgtgtctcggaacttcacatattgtacaacaaagggtgccaagtacctcgaagcagtcaaaacaaggttgcatgtcatcaaacaatagtccccggacgaaattagggtatgacaacggcctatctgccaactgttttgcccgctgtcccacttgga

SEQ ID NO: 31455 - DNA, 300 bp, Glycine max
  unsure (1)..(300): unsure at all n locations
gagaagagagtgatagaatgcagaaattcaagtagtggggatgtctcctccacctctaggacctcacaatcactcacanactcatctcaagctctcagaacggcttccttntcctgctctggtctctatagatcttcanacaacaaaatctctcanactctctttgaacttgacctttctctctctagaactctctagacatgcagaagcatcaagaanaggcccannaactccctcaaaatctgattcaagcttaataggtggcttgtcgcctcatcgctagcgcattctgaaccgcta

SEQ ID NO: 31456 - DNA, 401 bp, Glycine max
  unsure (1)..(401): unsure at all n locations
ntatcaaatggatgttaaaagtgcttttgtaaatggcttaattcaagaagtatatgttgaacaacctccaggttttgaaatatcagataagccaaatcatgtttatagattgaaaaaagctttacatggtttgaaacaagccccctagggcatggtatcaacgtctaagaaaatttcttttagagaaagatttttctagaggaaaagtggataccacactattcataaagagaaagtatgatgatattctgttggtttaaatatgtgttgatgatataatatttggatccactaatgattcattgtgcaaggagttctctcttgatatgcaaagcgaatttgagatgtcaatggtgggagaactaaattactttctatggttacaaatcaaccaaactaaa

SEQ ID NO: 31457 - DNA, 413 bp, Glycine max
  unsure (1)..(413): unsure at all n locations
ggctgcaatgaagcatgaacncggacttaancacttagccgcactctaagacatcgctgcgacttcttttcaatatcaagaaactacacttatgcggatatcaaccttgaatctctgcccttgattaccgacttaaccatcctgtaatgtattgctgactgcttataaggttaatactgggtacactatcatgttatataacagagtacaatggcttacctgacttgtatatgaacaacttcacaaaacccatggacaccactttctacacaagtattacttccctgactctatctgagtaggcttgagactcaagcaccattcagtcacactatcactttttcacaacatgaactatgtgtataaggtatattaggaagctcttgtatcatctgataacacctgaatggtta

SEQ ID NO: 31458 - DNA, 236 bp, Glycine max
  unsure (1)..(236): unsure at all n locations
aaagaatgtntcttgctcttttttgctatggttcacatattgctatcatatctaattctaatatttgtaggatcgggctctaattatttaactgcctatgaggatngtcaatctccaactaatcaacctgtaatcaacactgaaggtaataactataattatgatttataatttcatatatcagtgcacatgctcttaagataatattcacaattgttatcatcatattgtactat

SEQ ID NO: 31459 - DNA, 472 bp, Glycine max
  unsure (1)..(472): unsure at all n locations
atctcttagtcacctgcngcatgtagctcgttgtagctgctccacagagctcacttaacttgtttcagccgtgctcttccatacgagccctcttggtcttgttgtcaaacgctctggttgctgctatattgatatctctcaattcggcattctcctttccgattgtcagagttggtgataagaacctttctttgactgtttgggcttgctcgagttctgccctaatggcctgcacctcttcagcttcctccggagcgctaacttcctcccttttagcggttctgaaactcatgagccaatccaatccttgcacgtgtgctttcaaccacttactgtagccactgatgggcccattgttaccagccctgagatcttgtccttcttttgcaccacctccatgccttgcggaccttatgaagtgctccatgttgtcttattgaacctcgtatatgacacgcgcgagctcctcctc

SEQ ID NO: 31460 - DNA, 520 bp, Glycine max
  unsure (1)..(520): unsure at all n locations
ccctccacttaantcgtantganagacagaacaccgacaatcgtgcacttattngtactacagcaggngnattgatacatctgaccgtgatctttgatcacctgcggcctcaacttgtattgtacgattgatatactttgctttgagttcaagaagatgttttgattaccatgactaaatataataacctctatcagctcaatgaaagattgacatagcatattactattcgaatattgaactcaatctatttagccagttttttttttttaatatggacatttttttgactatctttcattcattgaatgactgcataatgggactacagtacctattgatgtcctctatcctatttaatggatgagttacacaggcctatatacccagacatactttgcatagtgatcgattccagttgcttatattggacatactatggactaatgagcttgacagactgctataaactaataaggtaccctaaacttgcaaaccgtaagaaacctcatagttaagc

SEQ ID NO: 31461 - DNA, 113 bp, Glycine max
ttatttaagttttaacattcttcacaaacatctctttcatagatcctcattatcaattttagtcttcctaattattacctcacttaaatcaatcactcatacattttcttaat

SEQ ID NO: 31462 - DNA, 188 bp, Glycine max
cactaaggaagagaagtctttccaacttggaaaagaaccatcttagtgcaccaaactatgatgccagatgagtacaaaggtagaagaatccataagccacgtactgaccatgaatgttgacctccttgcatggtcagccttaaacatgccgagaataaatcccgaagtctactatcactggctagcta

SEQ ID NO: 31463 - DNA, 229 bp, Glycine max
actctagcaattcctgtccaatctcattattgaccttgatggcattaaaatatttgacaatgtgacttggaatatttctgaaatctctctggtatccattcagacttggtaccgatacatgctctaaatttgatataagacatataataattgctagtaatcgattaccatccatgtgttatccgatacatagtgtaaaattagattcaaacttctaatgactgtgata

SEQ ID NO: 31464 - DNA, 575 bp, Glycine max
  unsure (1)..(575): unsure at all n locations
cggctgcgccttanngctgtctcatcattagtacctatgaatctaagctggtatcgatacacatatactgaatctattaccagagcagattattcgaaatattcgtaacagtcacatgcttttatgtggttcttgaatggctatcaaaggcctatatatatgtgacttgagacacgaacttgcgaagaagttttcagaacaaaaaggtcttatcctcttataaagcanaatcgtgttattctcttacanattccttggccaaattacttgtgattcantaaggaattatttgagtgctcaaactgttcaatctatctctttcagagagattcttcttccttcttctcattctgaaagggattatagaccgatgtctcttgtaaagaatctaaacacaaggaaggattgtcttggtgttagaacttgtaaggagttacaagaagtggaactctcaacgggtgcttgggactgacgtngcacacggtgtggcgaacatataatactagttgcttntctctccttaacccttatattattgttatattcaatcaatgttattgatctattagagatat

SEQ ID NO: 31465 - DNA, 192 bp, Glycine max
gtgtcatatatggatgataattcaaagtggtgaattgttgggctgtgacataaatccatatggaagtctattctgctatttttctgtggtcgcctctgcctatataaggcaaggatgccctatatttttaagagataggattagcttccacttgtatattgcagccataatagacagctttatgtttccctc

SEQ ID NO: 31466 - DNA, 571 bp, Glycine max
  unsure (1)..(571): unsure at all n locations
tattgcttgtaannccttatagcagtggttcacccgaccatagatctcannctganatgtattgcaaagaatactctataatcctatagacgctactcataagtaatatacatggagcttgtaaaggcttaaagaatactaatgttacgagcttatggtgcttcgaaataaaaaacaattataattgtgggtgcttggtctatgtggagaaagtctataggtgcatgtagcggatgtagcccatgttacggtgaaccatgtataattgcttggtgcgattgtaacattctttattgcttcttcttaacttatgcagatgtggacttaacacttcgttctgataaactgtgttttctaaaattatagctctgatatttaatataatgttttctctaacaatttattattagaagcagctcttactctacacgaaagagtaccccaacttgtgtattctaatatagattttgaggtgtgttatagagacactacacatattggatgtatacgtaataatcttttccattctttgaggaacgtttctcaatagtctttattctacagatgttcn

SEQ ID NO: 31467 - DNA, 448 bp, Glycine max
  unsure (1)..(448): unsure at all n locations
agctatccatganaactgatatataatcacggcgctggttctgaaaagaagcatagataacaaagcagtcatagatatattntatctattgaacagaactatcaaagatagtagtcactatataataatctgaactacatctcacctgaaagtcaatgaagtaagcatgctgtataaaagtgaaagtaaaacataattacaaagtcagccaatttattatcaatgaaatgaaataatagttttaacggcctcaaatccactaacacaaagtaaacttgattagtacctcccaaacatcaatggtaaggagtggctgcaagaaatataaatgaaaccttgtcaggcattctaaccatgatgcttcagccttaccctagcactcatggttgaaaacataanatgaataatggatattataagtaatcccttactacttacatgatagtag

SEQ ID NO: 31468 - DNA, 664 bp, Glycine max
  unsure (1)..(664): unsure at all n locations
cctctacatctccacttatancactcatncatcttataattttaattttttactattcantatctnnatnnnntattgtcnattatnnnattatcgcagttgggacagacgcggtggatctcatcttatccccaatactatctgcactacataccctcttatcttatatggttcatttctatcatgaactggtttgatctttggtctcctatgtattgattagacttatanattatcgtacaactctcattccaaccgtttgacagtatcattataaactctgatgttatcatgaagataattcatatttattttgactgcttattgcaactgacctaagcaaaatgatatgtatccatcattgatctgtaactttacatacagtctcattaaggttttatatcacacaaattgagtgttatgcatggaacaacattaacttccaattatacctgctgcatctattgtgtcaaattactcctctattgtcttgaaccatcactgatgctctccgttctcttcttttcataggtaccatgcgcaatctatgggttctaacactcttcgtagactgtctcaaccatacactatcatatatattttgctgtactgcattcattacaccttgactgcttatagcttgatccattatctctctcaagcg

SEQ ID NO: 31469 - DNA, 344 bp, Glycine max
  unsure (1)..(344): unsure at all n locations
agcttagagaagaaggtggattcacccctgattattgtgggtcagctggctctggattgacctgcacaggtgtgggcttangcgaagcagcctcgttgggtctcaccaaaggaagttgagcttcaggccaggctacttgctcaagaaaatgctccatagatatgattggcctattgtgagccaactcttgtaggctgtgcatgataataaactgtccatggaatcagctntgtagcatanggactaaagttagtgagctntggacatcctatcttacggttactgatggaggagctggaggggatgatgaanggatgtcctctgttctagctctttttctcgat

SEQ ID NO: 31470 - DNA, 393 bp, Glycine max
  unsure (1)..(393): unsure at all n locations
ctgattgcacgtccattgatttaatggtgtatccatacaaatattggaatcgataccagcggtataaacgtgaaattcaaatcaattgtgaagagtcacatctattcatanaatgctttgtgtgatcgactacatggttttggtaatctaataccagtgacaagatttgaataaaaatcaagagatgtgactcttccaatggtttttctcaagattttctcaaggttattactgcttcaatggttttcttgaccagacatgaagagtctataaaagcatgaccttgacttgcgatttaagaacttgatataacttttcatatatacttntaccacctatgaatctcttgaacatcttatgaacttctattctcttcttctttgccaagcttct

SEQ ID NO: 31471 - DNA, 567 bp, Glycine max
  unsure (1)..(567): unsure at all n locations
tggatgtcancttganagcattgaannnccccnnntttgaatcctctcgacccggaactcttagtcacctgcaggctgcaagcctattaatgtcatcacttaattctggcagaatcttttcttttntgatagtcaaggtgagccttggagtttgaagggtttggttcctgttcttgaacatcagnttattctttggattccagcaactccatctgatgaggaaataaaggaagttgtcttttgcatgggaggaatgaaggcacctggaccagacgacattcatgcgatttttttatcaaaagaactggactaaggttggccctgatattngtttgttaatcaaaaatattttttccaatcgtgattatctcaatntggtgaatgaagtcaaccttgntcttgtgcttgaaagtgattgtccttctcaggcgacccaattcagaccgattaatctctgtaaccgttcttattaaattgtaccaanggaattgctaagaagcctgagaaatcattggatttttagtcatgcctaccanagagcnttatccangcagacatactctgacn

SEQ ID NO: 31472 - DNA, 261 bp, Glycine max
  unsure (1)..(261): unsure at all n locations
gaacaccgagactatttagtctcacaaatgcaagaactacgtatgtctgagttcctcatcacaaattgaggatacgtaggagcaaaagccncgcttttgtcgaccacctcgccttttgctatcgtgacctgtgagaacggtggcacgcggaaacacccgatggttattcgcgcacactatatgctatcccatgacctatgagtccggtggcacgcggagacacccgatgggtatccgcgcacactctatgctatccaatga

SEQ ID NO: 31473 - DNA, 250 bp, Glycine max
  unsure (1)..(250): unsure at all n locations
gaggacctaacacctctagatatatgttttcacccttacttgctcacgtntattgctntgtaattagaatagaacatactcttactttcattcataatcatgattactgtttggaatgcctgcttattgaacaaacacttaccgaatgaacaagatacctgagttcgatactcggttcacaactgtttaattatatacttgacgactcggtgcacttgccgatagaattcgcatccacacaaacaagtag

SEQ ID NO: 31474 - DNA, 263 bp, Glycine max
  unsure (1)..(263): unsure at all n locations
actagacgtaatctctgtggttgagacgaaccaatataaattcttgtgtcttgtatcttatttgcttcattgtgccttaaaatgacctanggtttgaatttcttttgacaactcgttntggttaccaagtttgatttcattgttcgactaagtcttttgtgaatatatgctatctatctactgagaatggagatcacattcctcactaagtaatacacattattgcaattctcagtggttgtagatgatttcatcgtctgact

SEQ ID NO: 31475 - DNA, 348 bp, Glycine max
  unsure (1)..(348): unsure at all n locations
aaatttgcacantttcttctgaaacatcacataaccctacggaatgcacgacaattagtgtgaagcaactcaattcngctgacaagaatccaaatgttggcaaacgatcattctcgaacgaaattatggtatgacagtacaagaaacataaaatgcttcaaatgcttaggcagaggacatatngcttatgactgtccaaccaggaggaccatgattatgaaggcagatggagcaatcacaagtgaatatgacatcagtgaagaagagatagaagtggaagaagagcttgatgaggaagctatgtatggtgatatgttaatggtgagaatgctcttgagaagtcaaatg

SEQ ID NO: 31476 - DNA, 276 bp, Glycine max
  unsure (1)..(276): unsure at all n locations
gaatgaattggaaaagattgattgatagaatgaatgaatcgattggaaaatgcanaacaaaacctggcttttatagactcttcgtgtctggttaagaagaccatntagaagagttataacttttagagaaacttaaaaccaatttgaagaagtcaaaaacctttttgaagaagttacatctttgatntatcaganacaatcactgggtaatcgataccanattagtgtaatcgattacacaagggctttaagtgaaaggatgtggctcttcacatt

SEQ ID NO: 31477 - DNA, 454 bp, Glycine max
  unsure (1)..(454): unsure at all n locations
tctgttagtttatctttaaagatgaagggtattgatactattttccaggatgtttatagaagttttgaactagtgttaacaagaactaatctgatacatgaaaatccatattatgaatttatgattattctgcaaactctaggaggaaaatagtcttctctacaaatttcttgtttaaactatggtaaatgtcatgcagctaaatgcttgatgccttgtcttgttgtcactaatgcatgaaatattaatgttctcctccaacattttgctcatttctttgaattatgttttcagctcctttaaagcgcacaagtagctggtgtnttgatgaanagctctttgtgcagtcactttacaaggtgatttaataactgaaaacgtatnttagaagttcttatttaaatngcatctaacgacaaccttnttggcagcatctacgtgagatgagtataac

SEQ ID NO: 31478 - DNA, 236 bp, Glycine max
  unsure (1)..(236): unsure at all n locations
gctattattgtttcttttcaaatccgcttgttttctcccatttaaccttgttataaataagttctatattnttgaaaatactagctgaaatttagaattttctttttcatgaatattagataaattatcagaatgaaattcatattctgaaacgcaaataagaatgacattcattgatgagagtatgtaattatatgcaacctgttctaaatgtatattaactagctaaacaaaac

SEQ ID NO: 31479 - DNA, 593 bp, Glycine max
  unsure (1)..(593): unsure at all n locations
tgtgctatccccctatangcctgcacncattgataangcgcactatngagtactaagctttgcctctagcgctcgcacctcatatcttttcttcgaagctataacctcatcgnctctcatagtcattagattagggagccaatccaatccttgtgtnccgactctcaaccacttatgatagccaccgatgatcccattactgtcttccctaagctctctttcctttcttcattgccgcatccatgccttgcgaactacttggagtacctttgcattggggtcactgagaccccgtgtcgcaacctacccttctgctggagggcgacacgtgactcgtcggatgcgtgtccacgaaaggataccgcggagtcgcaccaacgttatttgatgatacgtctgaaaaccgggaaagatcgatctacgaactttaagtgaatgttcggagttgtattacgcacgggaanggtatggacccacacgtccgccaaggacggcagcttaatcaatgtcaacatgacttgatttacgtcccttatgtctaatccttatacctttatattttcttttgggcgacacgttgtccatagctcacg

SEQ ID NO: 31480 - DNA, 299 bp, Glycine max
atggcactcacatttttcggattctgcacagtttgtgaaggaaatttgtcagaattttgggactgagcttggttcaactgagtagccatctgccccatctgatttgtcagactctgaatggaggcttttgtctcttggctgaaatgcatattctggatggtcatttgcctcactaactcttctaaggaaggttgaggaggagcctcagtttcttgttgtcttttgtgtgattgctgctgctgtattggaggaggaacatatggcttgcttggaccagcaacattctggaaaggagggac

SEQ ID NO: 31481 - DNA, 329 bp, Glycine max
  unsure (1)..(329): unsure at all n locations
ttgagatcttataccacttattggtggatctcccaacacccatgtagaatgaagatatctcacattntttttctttagtggtagatctcattttgagatcttagatgagtcccacatggactctaattttaaatattttatttaaaattttaataaattaaaggcttaattacaaaaagagttcttttattnttttcatttcactaaattgatctgtattttntaatttattatcacaagtttcatattnttcaaaatttattatattagaccagaggaaaaattgacattcactggtcacttgctaagagtttattactccccttttc

SEQ ID NO: 31482 - DNA, 453 bp, Glycine max
  unsure (1)..(453): unsure at all n locations
aatagaaccaacaaaaagaatgaaaaaaaaaagaagggtgactgagcgaactggaacggggggaaaaaaagaaaggggagatttaaagggaaggttaagaaagaaagaaaaaggggggaaaaaggaagaagaagaaaagaggaggaaagagaaaaagggataaaaaagggggggaaggaggaggaaaaggaaaagagaaaaaagaaggagaaggaaggaggggaaagaaaaagangaaggaagaagaggaaaagagaaaggggaggatgataaagaggaagaagaaagaaaaagaagagagaaaagcagaagaagaaaggaagaggagaagaagagaaagagagggagaaaaagaggaaggagatgaaaagaaaaagaggagaggaaagaagagagaaggaaagggaaagaaaagaggaaaaggataaaagggataaaggaaagaggaacgag

SEQ ID NO: 31483 - DNA, 613 bp, Glycine max
  unsure (1)..(613): unsure at all n locations
agagttgacccctttaannncatgatcgccagtcatgttgtgccactatagangtctcacgctgggatactcttctagtacggaatctatcctttctaagatggagccgatctcagccaccgtcattaagaactagctcttttcttcctctattgcctgtagttgaatacacctttgtatggctctctatatggttcttaaccctctcatgcaacttctgtataaactctgacctagatgccacttctctatgtataaaggaagtgtccagtgggaggggaataaggtgatgcaatcctatcccgcatgggcattgtgtagaagactccaagtagatcgtgctatagatccacgggtaggccctagggttctcatgagccttacggtagatntcgagcgcatgagctaagtatgagccacgctatctgtgtaaatattagaatatgtttatgctatcgttgggcctggatataggcactctagancatacggtctaacctgtattcaggcatatgagagtctttgtagacgacttgtgttgatttcatgatttgtgcatggggaagctagctatataggcgtgtgagctatgtcaactctatcttaggagcag

SEQ ID NO: 31484 - DNA, 591 bp, Glycine max
  unsure (1)..(591): unsure at all n locations
tcgcgcgactgtttataggtctctagatctttngatgtgtacnccttcantanaanttgtaagttgttagatgaanacttgggnaccggaacgatgtaaacatctcngnntttgtatcgtgctcagtcccgggattctctagagtnctctgcttgcgtgccagcttctatacattgatccagaatgaagctctgtatccactctgtacacaagtggcctcagatatcttaagaagggtgggttgaattaagatattccanacgtttctccttattaaaaatctatcttacttcttacttaagttatgaattcccttaatgacaatcttctttaatattaactcaaatgaagcaacgtgaattatgaatatcaagccatattacttaagggaatatagggaagagaaatgcaaactcagtttatactggtcgggcacaccctgtgctaccgtcagtccccagcaaccgcttgagagccacttacttgaaatccttttcaggtcaacaccaagacaacctccttggttaagatttttcacagaactacatctttatccttaagatagaaagagagacaattttctgaataatn

SEQ ID NO: 31485 - DNA, 598 bp, Glycine max
  unsure (1)..(598): unsure at all n locations
tattgccttgatnncnttgtnncgtggttatggcagcgattngcacctatgaatactaagcttcacacatncaagcttatcaacattcacacagcacatgctatcacatggcgagcaaaacagagcataggcagaaaactctgtcacaacaccaaccataatcacagcttttctcacttaaagaccccagttacaattacttcgatccaattcgttaaccggtggatcgactccgacattttactggaagtctatagtgcattagcctacattttcaccgttgggatctactggcgaacatccagaactcattttgcactagagtnctcacagccaacctcacacnaagcatttctctgtacttgtgcaatagtttgctgcacaatttacagcatatattctgcatatgtgcagaattcgaaaatcacacttngctctcatccaatgctgcccanatcaattctacaagtcacaatcatggttaatcatgcctanacaagatcatgcttatagcacagcacacctatctaggtgtcacaccctgcatcatggctttctggttgaaggggaattaaatgggaatttaccaactctccct

SEQ ID NO: 31486 - DNA, 627 bp, Glycine max
  unsure (1)..(627): unsure at all n locations
tatatgacgacgtatanggctgattcattctaagcctcgacggcaccgtcggacgtagaatgggagattgatctccaattcatatnggacatcacatctgtcagatcactttccaagtgatggataacaacccggcctatagctgncttttaggccgaccttggattcactcagtcggngtagtcccttcaatgttccaccaaaggttgaaattcgtggtggaagggcagctaatcataatcttcgaggaggaagacattcttngtagttatccttcttctacaccatatgtggaagccgccgaagaatccttagagaccatccttccaagcttggaagtggtaagcagcgcttatgtggagtactccccagtgaaaccgcgctcatccgacgtcggtattaatgtanggcatggatacgagcctgaaaagnggttggccanaacagtgatggcgtggccagcttgtagagttcaaggagaactatggaanggtctggctangatataagcctacacacgccgatgtgatgagaagtgccctatanatgaanggtagaaacattggccagctgcaggaccacaagtgtaagggactcccttatgcacatcacgagagttttgtcacn

SEQ ID NO: 31487 - DNA, 454 bp, Glycine max
  unsure (1)..(454): unsure at all n locations
aagccccactcatcattaggattagtacctgacatctcatacaaacaaatcaaacgtaacaagacaattatagttgctgtttgaatacctcacccactcaagtgtatcacacaatgatggctgttctctaatgaaacactcttgccttttaccactctaattccccttgagttcttatgcaattcaagagattatggccacaacaaagaacaattcaccaatatgtgtaagggaacgctatagagacaaggaaaacgttaaccaagactaaggctaacaatgttgttatgcacacatgaaggaaataaaatgcagagattaggaattcaagtaacaatccttcgtgcaaccaatatattaccttaaagagatgnttttttatagttcttcagcatgaaccattcagccaattttttttatatgcttatcagattctgcttctttttttttatta

SEQ ID NO: 31488 - DNA, 142 bp, Glycine max
gcatggaaaaaaccttgcaagagtgtgcatatatatgtaaatataaggagcatgaaattcctagcacagtgtgaatgattgtcttcctaaatgaatgtatgatagcacgaaattcccttttaatgcaagtgtgtgcatatga

SEQ ID NO: 31489 - DNA, 445 bp, Glycine max
cacgtacctgctagtgtatttgcctgtagtgtttgaatacaggttataatacatggtttacacatatacatgtatatataaaaagtagtaacaatgtgctttacctgtacttgatataatgaaacatcttccacaagaacaccaatggacaaaccaacttctactacaacaaagtaattcaccttcacctggagttcatataatgagtaatggcattataagaagacaaagccaaaccaacgttcagtacaacaaactaattcagctttttctcaaccaaactatgtcaaactatttgttgtctattaaaaagtgttagtattcatgtgacagacatactatactagattctattcatcattaagattcacacagcacatatagtggtctcatagcattaccacacacagacaggggtgcatatagcagccacaggcccacaatc

SEQ ID NO: 31490 - DNA, 529 bp, Glycine max
  unsure (1)..(529): unsure at all n locations
atgaanacccattgagacnccgngatcctttgagtcccttgaggcacgcgcttggtgctattatcagaggcgacctcttgttgacaccatggcttgtaatnacttatgctggcgaaatattagacctcgtatatccataatcgatttcattcatgagtgcgtggtcctatagaggtgagtcacggcttcccttatttacattataggcaccctcgtggcatatgcattataaaactgcttgaagagattaaccactgcaacgctactactagcacgtgctatacatatatatagactactatgggtcattagattgcgaccatcactatgttagttatggtgtccaaacccttatcatctctccagaaatagtggttagtgttgacagtgtcaacattcatctacttctttttgattcatgcacaccttattgcttgtgcgagacatcttaatgtatcagggaattcttctcataagagttttcgaaagtcagattattcacgtttcctcaagcattgaaacttaaccg

SEQ ID NO: 31491 - DNA, 348 bp, Glycine max
  unsure (1)..(348): unsure at all n locations
tgcatactgcatcttttaaatattgcgaaagtttctatttacgcagccaagcttacactgttatacctattttcacaactgcataattaaatttagtcaaatttactttagaattttgcataaagtactccagttntgtttagagtttaaattgctcacataaacttcattttttatattntcaaaatttactttaaatgttttaataaattgtgaaaaacttaaatagttcttaaaatgtgggtttgagcctcttaacctcaaaaagtaacttatagggtgaggctngtccttcacttatatactcattctatcttggccttatctctagccgatatgagacttatg

SEQ ID NO: 31492 - DNA, 550 bp, Glycine max
  unsure (1)..(550): unsure at all n locations
gagtgacccctganngcctgtcgcatgatangcgacctggagactcagctttcttcttagttctctcactatgtgtctagggtttcactttgtcacaactgaaccccaagaccctttatatagagaaaactgatagaataagaatagaacctcttcagtcaagaacacgtaaggtactaattcattactttgtcacaggggtgtcttttatacataagtgttgtagataagctcaatgtcataatctatgcaacagtgaagaatcccgccttggatttgactgtgtataggtacgtgctactgtcattattctggttgatatgtgacagaacatcttctctgcttggatttcccatacagagatgtccgatgagcttcattgaagatcgtggtggaaacgagggtatgtgccatgacatcgttggttcgtnatctcctatcttttctcttctggagaatgactagttgtgtgtatcaacggatagatgaaacttcatgatatggcagaaacttggcagagtcttatagacacctgtatcgatcggaaacc

SEQ ID NO: 31493 - DNA, 241 bp, Glycine max
  unsure (1)..(241): unsure at all n locations
tacattctctggtaatcgattaccacagagtaaattttttgtaaaagaacttataatttaattttcttggccaaaccttctgatacttcaatnggaactccctttctatttaatataccctctctaagactctatagactgtcgtgatcatctatcttgaatatctttaattgctntgtcttgaataaagctttgagacgcatgtgatctttggcatcatcaaaacatcggcttgatcctt

SEQ ID NO: 31494 - DNA, 359 bp, Glycine max
  unsure (1)..(359): unsure at all n locations
tcatatcacatagaaggttgtactanacattcttcttcccatctgcctccttgaggttctttccgatgagagctattggaatgtggctcttatagtttctctcaatcttcttggtatgtgcttccttccctgatgcaccctgtgacttatgtaatggactccatggataacaccacctctnttccaagaaacctggacataatggtcttcttatccttgagttgagcattcctctagaacatccggatgagttatgggtatatcagctgtagatcattgnaatacctactgatgccacacaacagtagagtatgttgtatgttgagaccaagaccttccacatttctatgtcaaaaaat

SEQ ID NO: 31495 - DNA, 334 bp, Glycine max
agaatcaagatcaagattcaagactcatgattcaagaatcaatataagacttaatcaagataagtatgaaaaggatttttcaaaaactgagtagcacatggattcttcacaaaacatgtttaccaaagagtgtgtactctctggtaatcgattaccagattgctgtaatcgattaccagtagcaaaatgtctttgaaaaagttttcaaatgaatgtacaacgttccaattgatttcaaatagctgttatcgattacaatgttttggtaatcgattaccagtgcctttgaacgttgaaattcaaattcaaatgtgacgagtcacatcctttcaca

SEQ ID NO: 31496 - DNA, 224 bp, Glycine max
  unsure (1)..(224): unsure at all n locations
tgactatgatcatttctaccttacctattntccattatggccgtggttngtgtgtctagaatgacaccaaagttctaaatagacaatatctttgattgcaagcttagcaacagtcccaaaacccaattttttccgaaaccaagtggtatgatttctatattaccaattttgctagctgttaatggtgcatcataagtttggtatctcatctacctttgggttca

SEQ ID NO: 31497 - DNA, 184 bp, Glycine max
tctacacttacgagggatcgaggtttagtactatatgctacagcatagaacacacgaacatgattgattagagaaatatcctcatatgcatcaacttgtttgttagaaagacccaacgtttattacctattgttgtccactgttacttacttgcatttactgtttttaccatagaagaagttta

SEQ ID NO: 31498 - DNA, 320 bp, Glycine max
  unsure (1)..(320): unsure at all n locations
ggatcttaagtactgggctgcagctttacttatttaccctaaacttccggcaaatgcataataacatgtgagttaaagacctttaatcccttttaatcaactgacctacacttatcaagttttggtcaatggtaggtacataaagaacatctgatattaatttggtacctgaacacgttgaaattgcaacagttccttttccttttacaggaatatagtcaccattcccaattctaacctttgagacactnagtggcttcaaatctttgaataagtcttatcatatgtcatgtggttcgtacaaccactatcaatcaacc

SEQ ID NO: 31499 - DNA, 629 bp, Glycine max
  unsure (1)..(629): unsure at all n locations
cgcgtgntancctttnnnntattgatcccatcattgatgcccactatagantgctcacgcttgatactggaatctcgaaagcaccactgcatcaattagatatgatgctgccatctcatacaaacaattgacacataaccagaccatgtttgtgtgtgtctgaatagctcactcactcaagtgtatcacacaattctggctcttctctgatgaatacagtcttgcctttgaccactatagttaccctacagatcttatgctattcaagagattatggncgctacatagaacaattcaccaatatgtgtaaggaaaggctagagagacaaggaaaaggtataccaagaanaaggctaacaatgttnttaggcacaaatgaagganatanaattcagaatttatgaattcaagtaacaatccttcatacaaccaatatattatcttaaagagatttgttttttaaaaagtcttcangcatgaaccattcaacccaatnntttttntttaattttgcttgtcgaattcagctnttttattataacaagagatcananggctaaacttttgcatggtcagcctanaaaaatatatgaataacaacgtatataatgcaatggaataagatggtg

SEQ ID NO: 31500 - DNA, 462 bp, Glycine max
  unsure (1)..(462): unsure at all n locations
gcttatgcgcatacttcttcacgaacgttcatttgcacaagacattcttataactaagagaaatgcacccatatacaatcaaggcaccttcgttacctatattatttacatgtacttccaaggtgtatttgttacctacatcacacacatttcctttgctaaattcacatacatgcatactctaagcactttggctatcaaaaattgcatacgtgcacatcttggtatttctaatacctatacatacacaaacttcatgatgaatcttgactatctacacaataaggtgctacatttcatgcccttttctttntcaagtgtnttttatttttcttttttttttttactacctaaagccgcatgcaaattcaagtatattntcttgtgctcactaaaactgtattcaaattaagagggtattttgtaatgtattttttttacataacgtgcaacatatttata

SEQ ID NO: 31501 - DNA, 520 bp, Glycine max
  unsure (1)..(520): unsure at all n locations
ctttannataagaaatggcatcccgcagtanaatgtgatacanaccacttaatactgatatcaactnttcacttaccctcgtcttgatttcngtgtggtattgaccatcactcaaaatgactnttgtcataccctaatttcgtccggngaccatttcttgatgacatgcgacctttctttggtccttgtgaggtgcttggtacccatcattangcaatttgtgaaaattcaagacattgccgaaaaccaaataaatattgatgcacaatccgtaagtttccgtgacacaccggaaatcaaacggaagccatcgtgcataattaagtgagggtccgtaacattccgtatgtcaaagggggatattatgtatccgcaaggtccgtacattcggaaaaanacatgatcgtacaagatcgtagttccgtacttacgagnaagataccaataacactanggggtgactagtaaaatgtgtgcaatacacccagccactgtgcctcataattcttcagaagtgtgt

SEQ ID NO: 31502 - DNA, 409 bp, Glycine max
  unsure (1)..(409): unsure at all n locations
catagtctcttttcaacatcaattaatttttgtactgatacattctactaatatatggagttggtcactgtnttgcctgaggatgacaattcctagaccataacaatgttagagccggtcaaggacaatggtcttttacataagcatgttatacatgcacacacaattgtacgttattataacacaaatgattgcataaattaanaaataggattatcttgaatctacctgaacagaatgattgtcatagatgtgaccaatgcactatttgcgaagcacagaagaatctgttggtggttgacttctaataggaaagaacgtcatggctttgtttatagacaactatacaatggatacattataccttgatgcatgacatatctatctcagtttatgcgtgcactattca

SEQ ID NO: 31503 - DNA, 211 bp, Glycine max
  unsure (1)..(211): unsure at all n locations
agcatgaggcaagaggagtatgacttggaagtgaagatgggagaagatgtcataccacatgttactaagtttaaatatatgggatcaataatataatacaatatcatgaggaaattaatgaggattgtacacatagaatacaagcaaggtggttaatatggagaaaggcgtcaagggttatttgtgattgcanaataccaactttaaatgc

SEQ ID NO: 31504 - DNA, 390 bp, Glycine max
  unsure (1)..(390): unsure at all n locations
cacaaagttcactgaatntgtctcggccatgatcttccttgcgagccctcttggtttcttgttcaaaggctcttgcggtaactgcattttcttctcgtaactcggcacactctntccggacgtctgtagtgactaacttaaatgtttctttggcaagtcttgcttttcctagttcggcttttagagctcggacttcttcatcctcttctggagcttcgaagtcctcctcgttgataatattcaacttatagagccaatctaacccccgtgccgaaatctctcacaaggaaaggagagaggctctcttccgccggtgctcccctcatggggtaccctaactgtcttatagcaagtgcgggattgaagttaatacaacccctcgtgcctatc

SEQ ID NO: 31505 - DNA, 601 bp, Glycine max
  unsure (1)..(601): unsure at all n locations
tgtggtcactatanggcactatgatacgtggcgncgctagcgcgcgatagaccgttaacgaggttggcagatctgatnagcagtaactctcgctaagccaggctctatccagcttagcttaaatgatgcatcttacgtacagaggagcatgcgcgtatatgataaggactcacttancgctcacattgcggcaattgatntagcttaacttgcatgactggcgcttagctttacgaaccctagttatggctgtaaggaaattagcttggcgacaataggtcttgcttagccaaggataagatgtcgcttagcgatcccggctgaagcttagccgaatttagattgaattgagttggcctagctcatccttgtctagcttagcgaaccanatcagcctcagatgcaaagggttggggctaagcgcttgagactctctgcttancgcatgaccaaagatgcgcatagcgcgaagctggcgcttagcganaggactattnttcattaaatggttttataagtattntcagtcccttcctcacaaattgaacccttatatcaacattcaagatggctgattactctatgacacatatgagcagtn

SEQ ID NO: 31506 - DNA, 365 bp, Glycine max
  unsure (1)..(365): unsure at all n locations
aacaagaataagccaggctattgcgcaagcaatcaatggggcaaaacacaccatatgattatgatgatggatggctcaaattctcacaaaggtaaactcatcactttcaaaactatcatgacatgtagagaagaatcaaggatttcaagtcaccaaatgtcaagaacttttattntcaaaacaattacccatttcttgaacatatcctataattcaaagagaaacatgcaaagtcgtacatgcacacaaaattaacccagaatattaaactaacaattcaacgaaactaacaacattaacaaattaataaaaccaacaaaactagcataaccaaagaacactcccgctcatacttaaacaacaca

SEQ ID NO: 31507 - DNA, 388 bp, Glycine max
  unsure (1)..(388): unsure at all n locations
atttttagaaatggcgagactatntcctaccatgttcgctcattcatttgaccagnggtgagaccctagttagactcgattaatcaaaattcttgctgaaacatggtgatcgatagggtccataaatttctggactcatgtctggcttgaccaagccatcattgatcttgctcaaattcctgaagatgttatgttattactgaaagccaaagtttctgagtttattaaagatgatgaatggtgcatccncactaactntcagctntattacccgtagatctcagccgctattctcgccacagtcatccncattattcctgagcctgatgtattaatatggaagcagttnttgaaagtgatggggcctgaggccgacgtcatataagtc

SEQ ID NO: 31508 - DNA, 477 bp, Glycine max
  unsure (1)..(477): unsure at all n locations
tgttttatcatgatcacgaaggtgatgacatatagctcaaccatctagaacagggcgtgataaccatgaagatgaccttcctagtcatagaatgagatctagattgaatcacgcacactaccaggctcatatagaagatgtgagtttacgaatctatactcttgtttccagatcaagctccgacgattgngaactggattctagactcaagattgatgagctaacatgagactatctcaagatcagtcttgaagactttctttcataaactgagtaggacatggatccttctcatatcttgtgtacctgagagctattactctctggagatcgataccatagtgatggaacgatcaccagcagcaaacgttatggaacatgtttctctgattgacgcatgcaattgattccaaagttgaatcaataccaaggtatgtaatcgataccactgcgcttggcgctgaatataactctacn

SEQ ID NO: 31509 - DNA, 547 bp, Glycine max
  unsure (1)..(547): unsure at all n locations
cgtgccnatgaaaccatgaaanccggancatgataccatctcgaccggacctctgaggacacctgctgcatgcgagcttatattccttntncnanatgtgcattttatacatgtcattacttcactatcttccacaacccttctgtgtattaaacatctcatggaagtttcattttggaaacattgggccatctgcatctgtcttatatgaggattaaatttctttcaaatgagcgacaagcagaagacttcacattctgcgtgtctgccagtaaggcatactactatgtagaaccaataggatcgcgctataaaataacaagagtcctttgagtcacataacaaagttgccgtggtgtaagcgaaatacatggcagatttattttgatcgcaagaaatcaatcgattaacgttgaaatatgtttgtggtttccggattactatataaaatatcgtaacataggctccctctatctgttagtgtggtgcgcggatattgggctcaagccactatttggggcgtagatatattctataatatacactc

SEQ ID NO: 31510 - DNA, 630 bp, Glycine max
  unsure (1)..(630): unsure at all n locations
tgttgatgtgccnttgnangcccctgatcgcaatctattangcgacactgtagagtctcaagctnttacangcnganagacgtagggaaatgtgagcatttggttgaagttgtgatcttctagaagaaatctactacatttacaagtcctggaccgcagatgagggaaaaaggagctgaaattctctttagctattgttagatcctttgttgcactgtttaaaatgaattcgaagttagcaatgctgtatgcatagagtataggtacatagagactagcagagcaggagttatatgctgactataagcaaacatttctgttactttattgacananaatgagcattccatattcatagagcatttaacatagagctacatgagtcacgttcatatctgcaagaagattggccatctcatattcatatagtactttcaattccagcatgtacctnggttgctcatagtaatacatgactttgtgttcttagaatggtggatagataatcaatatctatgtcattgtattatgattaaccttccatatgtattggcttgacatcaggaaagtcacaggaggccgagttgttacagttgcaaagatcacggatggacggtcgaatttataatg

SEQ ID NO: 31511 - DNA, 216 bp, Glycine max
  unsure (1)..(216): unsure at all n locations
ctgtgaagcttgattgatatgtgagatatggtctctggtaatcgattaccaagggtgggtaatcgattacaaggcttanaaatgaagacagggggctaagatggtctctggtaatcgattaccaggggatgtaatcgattaccaggcttgaaaacgaagtcaagaagctaagggagcctctggttatcgattaccagcctgtgtaatcgattacac

SEQ ID NO: 31512 - DNA, 364 bp, Glycine max
  unsure (1)..(364): unsure at all n locations
tacccatcacatgtggtactangtggtggtcgggcgatggtgcacaacaagttttccacatccacaaatcgcacataaacccaccatcccctgtngcccacctccaactgagctcacgtactcccatgtagcccatatcctcgtttctctcaacaccgggtccccaacaatcctcccaagcttccccaacatccaagtaactcaacattcaaacaacacaaaccatcacagccaagagaatagggcagaggcagataactcttgccaaaacaccaaccaaaatcacagctnttctcacttaatgaccccagtaacaattccttctttctcaattcgtaaccggtggatcgacccaaaatttact

SEQ ID NO: 31513 - DNA, 344 bp, Glycine max
  unsure (1)..(344): unsure at all n locations
tcacctctaatgagctggtgaagaagaatgtgtgcatttacctgggtgaaaaacaagagcaagcctttgctttgctcaaagaatagcttactaaggcacctgttctagctcttcctgactnttctaaaactattgagctagaatgtgatgcctctggagtgggagttggagctgtattgttacaaggtgggcaccctattgcttatcttagtgaaaaacttcatagtgccaccctcaactaccccacctatgataaagagctntatgccttaataagagccctncaaacttgggaacattaccattgttccaggagattgtcattcatagtgatcatcaatcac

SEQ ID NO: 31514 - DNA, 305 bp, Glycine max
tctctcacagaaactatgatgtcacacaagttcactcgtcaactcaaacaatagatcaaatgattaagatgcgagttgaacgacccggcacagaaagttgaccttaaaattgagacctacaagttgcagcaaaggatgcttcaaaggttgatcgaaattcacgcaatcacagcaaaaatatccttcgaaaaataagaacgatgatttggattataaaggagaggaaggttaccagagagaggataacaacaatggaaaggaggctaatcgattggagtatgtatcttcattgttcacaacttaat

SEQ ID NO: 31515 - DNA, 601 bp, Glycine max
  unsure (1)..(601): unsure at all n locations
cgcttanancnnttnnnnnatgatcccatcatgtnngcgcgcgttngancactcaagctctaacatatcctagtatanaacaggatgtgaggatgtgtagtactatgttgtanaggatattaaataatcgaccacanatttggcctaccttggcaagtgtgtcaccaatcagcttcttcaaaacacctcgtcctggatcctactttcaagtatgtccatgaaccangtccattataaggtaanaactgaattagaaatagattatggagaagccttttcattttccttattttctttacctaaaagtggttttggataagtntatccagacaggccctatatattctatatagtttgaagttcaaaactntattccagacttatttgacaatnntattgttgagatntgaatgcagaaaatagctttctacatcgctctaanacaataagttatgtagcttttttgagacatcanattcagcataaccatcttgtaatatatcatctaattatcttaaccgatgctactaatgagtgagatcctggtgaatataaaatctaaccaatataccgggacaatataatttgctatgctagatag

SEQ ID NO: 31516 - DNA, 315 bp, Glycine max
  unsure (1)..(315): unsure at all n locations
agcttattgaaatctgcattntgttggatcatgtggcctcggaataattaagaagggggggttgaattaattatgaacgtgtttcgactaattaaaaatctatccttcttaatgttactagattcaattaggcttttactactaagttaagacagtaaagaaaagaaatagaaatctaaccaaaagtaaaagcaataattaatagtacacggcggaaattaaagagtgtagggaagaagaagacaaacacaagatntatactgattcggcacaaactgtgcctacatccagtccccaagaaacctgtggttcttg

SEQ ID NO: 31517 - DNA, 314 bp, Glycine max
cgactgagagcatatgcttgtattgattatggaaatgtaagtggtgaccgagtttctactatcattcgcttgtgcttatagtatacttcacaactttctttatttactatatcataaatctttttctttaccttcaatcaataactagaaattgtatgtataggttcttcaatcaagtacgtagttcttgcaatttgaggggggcactgtgaaacggaactcgtgaggcgctcgaagatgaaagtggaagaactgaggacattatgtgtattattttaactggtgggctcgatccaattatgtttttcattata

SEQ ID NO: 31518 - DNA, 476 bp, Glycine max
  unsure (1)..(476): unsure at all n locations
ntgaggcattgannnctgtacctttagagcgcgaagcttgagtatcttcggtgcaactccgagattctctataagcctggttttgatctaacaggactcaccttttacaagctttaatgctggagaaaaggacttctcagacggagcgaatgggaaaacatgaataagatgaaaatttttacttagcgtagggctaaaggatgaatcctatattatgcaattgcatattgctcatatttgtcactctctttctatgcaatgtggcacaccctagatctgtgaaagcaatgggacataccaagttgaagccagcgcttttgtcaatattcaaccttaaagtgtttaaaatgtctcaaaatgtagagggctacaagatactaaatttcagctacatcacttttcagggttagctatctggaatctactgcaaaatgtaaagtactcaaatggtgatataatcagtgttgcttgtgaan

SEQ ID NO: 31519 - DNA, 602 bp, Glycine max
  unsure (1)..(602): unsure at all n locations
cggtatcnccattgtgngncnttatatccantgtttatacacgactcatntgngcacactatananntactatgctttttggagtagatacctggaccagctcatttatttcagaaaagtattcatatctagtcaacgtctgatagaccataccagttctctaacgatttctaattatgtgtgccattaaatctatcatatgctgacaataaccgagaagcccatgaatctctttcgtggcggatgaagtgtctgccatcgacatgagcttggcaaaccatcgcgagagttctttgactccgttcaaggaaagagcaaaccgatccattcacatggctggctcttggtgtatagagtggatcacgctccctctagtctgtttatacgcatatactngtgcatactcattcagcgattctatgctaagtggccgtgcgcttacccaactcatcttgtacttggcgatatagcaagcatgtggtctctgtctccataaacccctatacaatcttcttatgaccttgacagacatcatctctattcaaaccatgcttggcccaactgggtcatcttcatcgcacttggtcatatagtgctcaacg

SEQ ID NO: 31520 - DNA, 432 bp, Glycine max
  unsure (1)..(432): unsure at all n locations
acagagaaacttttgaagatagttgaaaagntttttcaaccactgagtagcacatgagattttctcanagcctttttaccaaagaagttttactctttggtaatcgattaccagattattgtaatcaattaccagtagcagaatggttntcaaaaagctttcaactaaatttacaacatttcaattgatttcaaaatgttgtaatcgattacaatgttgtggtaatcgattaccagtgtgcttgagcgttgaaattcanattcaaatgtgaagagtcacatcctttcacaaaaaagatttgtgtaatcgattacactgatttggtaatcgactaccaatgatagtttctgaacaaatcagaagatgaacacttacatagttttgactcttcaaatcggttaagttttctaacgcataactttctatggtctc

SEQ ID NO: 31521 - DNA, 210 bp, Glycine max
  unsure (1)..(210): unsure at all n locations
aacaacttttcatccctagagtgtgcccccatcttgcgacaatacatcttgagatggttcttatgacangttgtccctttatacttgtcaaaatcaggcactttngaatttgggggaggacgacatccggtaccaagcaaagatccgtcatgtccacgaatggatagtcaccaaagccttcaacaaccctcactctctctgagaggagat

SEQ ID NO: 31522 - DNA, 345 bp, Glycine max
  unsure (1)..(345): unsure at all n locations
attgagtgtcctcattgatatgttctcaaattggtttgtctgaatatctaatcgtcataacatataattcatggatatgatctaggcattctttctttctttacagccactggccaaatagctatcccaatatatattattttaccatttccattccctttaagctaaacacttgatattttgttggaacactaacctaggataaaagtttcctaccttaccttacgattaggagagcaagggtgtcttgatgggaatntctatcgattggcggctaatgtcatgtaaatacttatattttatgggtattaaaggagattaaatatttattacaaaagaaaagaa

SEQ ID NO: 31523 - DNA, 354 bp, Glycine max
  unsure (1)..(354): unsure at all n locations
gcttcttagtttcggctgatgaagatgaattttggctacttcattcactcctcttatgacaatagcatcacttctggcactaaattgttgggagtttgaagacatcttctcaattaaatntcttgcttcagtaggggacatgtctccaagggctccaccactggcagcatctatcatacttctttccatgttactgagtccttcataaaaatattggaggagaagctgctcacaaatctggtggtgaggacaactggcacatagtttcttaaatctctcctagtattcatataagctctctccactgagttgcctaattcctaaaatatcttctctgatggtcgcggtcctgga

SEQ ID NO: 31524 - DNA, 561 bp, Glycine max
  unsure (1)..(561): unsure at all n locations
cgagtgacccccttgtnngccttggtgccatgtaaactgcacacggatgacatgttaagctgattgagtggagaanacaatggatttcacagtacaacaaatgtcatgantgtaatgagctctacccggtaaaggcccaaggagatgctctgaccatctctcangctctctattgagaagtatttcaaataagttgataaaccattaaactggagaatatgagtgcacagaactatttacattgttccatattcttcatacaaaagtaatattgagccccctaccaatatgggctggttgtgtgtgttctgagatacttgcaatatttcccaatgcttgacagtgttgacatatctcagcaatgagcttcagataaattgcgttcgaatgatcgtgagctattattcacatgcgttactaagattaatttattttggacctaaatatactcatttttcgatcacacccagtattatttatgtggtctgacatctagctttacattacacctgtatagcttattagtgtgagagaccaccgcttcttgcactgtgtgatatg

SEQ ID NO: 31525 - DNA, 434 bp, Glycine max
  unsure (1)..(434): unsure at all n locations
aaagatgactatacagagccgcactggctggttaaatttatgttgaacttatnggcaagagtttgtttgctgaatcactaaaatcctgcttttttctccctaacatgcttagtaaactatgcatttttttgctgaataatagggatccttaagatctagatagcacatacattactcttgctaagtggatagatacttaagttaccaaataatgaaacactgaatggaaaccaagccaagactgaatatttaaacacttgacagacaggggttcttacctttaacacaaagttgacagatgaagtgcttcaccgttgcttcgcagaccttcaagtgagagacgacccagccaaagcttcagtgacacagaaagggggacttctagggtcacaactatgaacataaccacaaattctatgagggtcacactaagt

SEQ ID NO: 31526 - DNA, 441 bp, Glycine max
  unsure (1)..(441): unsure at all n locations
atcttagagagagtgattctcctaaattcttgagtgattcaagaacactctggctgtatcaaaggactttcacaacctctgtgtgttgccctcgctggatagagtgattctttccttcctttcatcttcacccttgntctttcaaaccacaattccaatatatccacctctgcccagacatatctagtggccataactnccattgtacgcactcaaattaagtgattctcgaggctaaattgaatttccacacgagacctttcacctcgtattggaatcacctcatttggatccctttagcttcagttattgccatttctatatttctgtacangcaccacttaacctacgtttaccatcccattattcatttattccagaacaccttattagaccacgaattaccacctatttccttctttcttatcaattcgcatttca

SEQ ID NO: 31527 - DNA, 399 bp, Glycine max
  unsure (1)..(399): unsure at all n locations
tactccgaagagtccattatggcctttccctcctgattcacgatcaacccataacacattctatcacacagacactatctatgaattatacaaaacacacgactcctcaattgttctcagaatagtattaactcgtcgcccttaaagggtcttagcattaactcgacgcccttatagggtcttagcattaacccgtcgcccataaaggggcttatagtcctgtgattgtacaatccatagtttacacctcaatgcacacgacatctcaatgcacatatatatagcaagtcacgtcatgctcaacttatcacatatattcgagctcaatcacaatggtataatctcacagtagcatgttatcacacctcatgaatcatatacactntacctatgaactat

SEQ ID NO: 31528 - DNA, 307 bp, Glycine max
  unsure (1)..(307): unsure at all n locations
tagttagtttggttntctggtattntcagttagaaggaccaatctgcaagttaactttgtattacaagagcagagtggtccctatgttggctgtataaaagtgacaccaatnggntatatgaatagcaatgatctctnttcagtnttatgattagatctctgggttcattctttttctctcttatctccatcatttaagactaaatctctntatttctgatttgagggtgcagtaagcatcatgtctgacagtatggaattgcactcgttaatgttgattcgtgatagttctatgctccctccattc

SEQ ID NO: 31529 - DNA, 451 bp, Glycine max
  unsure (1)..(451): unsure at all n locations
acttacctagaataanagaacttaatgccattaacctatggaattaaaagaacgtaatggctgagggaactgaatatgtggcaaccaaaagtcacccacaacagctcctcaagtcagccaccatttggtcttccaaaaggttgatgcctatgttgccaattgggcccttatacaacttgaactaaacctaactaaagcccttntagttgaataaaccagaagatatttttggtcagccaactttacaaggattgggccattatgtagacaaactaaacactctaaaagtgagacaaagtggtccatttagtcttcctccatttgggccatgatacaactcacaaaccttgactttntctcttgaacatgggcttgattccatagtatgacaacacttgttgaaaagctncttggttncttttgtctacccttgcataagtcctcaagtctn

SEQ ID NO: 31530 - DNA, 603 bp, Glycine max
  unsure (1)..(603): unsure at all n locations
cgcgtacgcccctgtagncttgtcgccatatgaggcacgctgtgatctcagcttctttggccttgacaagcatcaacttctcttcagaacctgctatgtgctcgcgactggtcccttcttccttccaacttaagtcactattactaccccatagagctccgcgaaatattgtccggccatactcttacttgcgagccctcttggtctctcgttcaagggctcttgcggtaattgcattctctttccgtaacccggcacactccttccgaacgtgtgtagcagccaacttgaacttcttcttggcgagttttgcctttcctaactcgcttttgagagactggacttactcgtcctcttctggtgcttcaaaagtctcttcactgacgactnttaacttggcgagccaatctatacctcgtatgcgaacattcatccattcgtgatacccaccaatgatgccattacgaatgcctctaagctcttgatctttccttaacngnnngttccatgcnnctatggatctatgataatctctgaatattgtgcgccgtaatcctcacatagaagganacatgcttcttccgcngtgctcactcatgtggg

SEQ ID NO: 31531 - DNA, 615 bp, Glycine max
  unsure (1)..(615): unsure at all n locations
ccaccgccaccgatacagagaccactagtcactaggactacctacgaccacactagtatggannnttganaccgtggagnnnannnnnntttgataccatcgagtacccggacctctagatcgaccgcagcatgcaagcttatgttactagatgcctnggataatttgttaactcanctggccttgaaacanaaatctgaacctgacgcaagagcttgtggtttatgctactctaccgaccaccatacagaccttggccgtgaaggaaactagatgccttattaacactggaacccaactggccatgactcaaaatctgacctgccgaagagactgtggatatgctcctctaccgaccaccatacagaccgttgcccttctgtgcagcaatctggagcaattgaacagcatgaagcttatgctggaaacaactagaatagaccccctcaaccttagcagcagaactagccacaacagaaccagacgcgcatgagcacgccatcacagctccagtgtatgtcacccactacgagtgacaaacatgcaagagcgtattgccatcaagaactcatagggtccacgcatgacgactgcacagaagcagagcgtatgccc

SEQ ID NO: 31532 - DNA, 116 bp, Glycine max
aagctgacttagctactatacatgctaaagagagaaattcttttgacacgtcatatataaaatacaagtctattatgctacgtctgaatcaagggtctatggtgcaaggttaacac

SEQ ID NO: 31533 - DNA, 369 bp, Glycine max
  unsure (1)..(369): unsure at all n locations
tttcaaaatccattattagatatcacatatactcagccatagagcaatgaccttctatacagacgaagcanaactattaataatatctgtagaagttgaaataatttactgaatgaatttgttgctacatcttcatcgtgtgctacacacacagataatgaaagccatgatcatagcattgtacctgaacacacaaatgatcctcttgatcagacatatgaaggctatccaaatgaaactactcgaaatgcaggtaacaataataatcagactattataaanataatattgcattattaatggtgggtntatgcagaaaccaatcantaattactagatgatgatgatgagctatangatgggattgat

SEQ ID NO: 31534 - DNA, 564 bp, Glycine max
  unsure (1)..(564): unsure at all n locations
tttganacccgtgtatnnaccnnanatgattatanacccttganannncttgtagcgatgctagtacccgngatactctatagtcatctgttgcatgcaagcttattgcatagtctctcttggngctcanaattatccacaaacacatccctcttattactagctattttgaaatctttagttcttggatgtacaaccttcagaatgttgcctcggtccctctttcttttctgccaaaaagaaaatcaaatgctatgaaaacatggatgaagtccttaaaacaaccatatcatagaatacatggatgaaatgactaatcataagcacaactacctatacttcagagaccttttgttaaattgtcttgtctccttatgtgagggggtcttggttaaatatgttatactttttgccttccanataacaactatcacttattctcgtttcattaatacaattatgatgttaatgatataaatcattggttctcacctgcctcactacttcttctctattgtagtataagagaagagatctttatctaatattcttgattttaatccg

SEQ ID NO: 31535 - DNA, 608 bp, Glycine max
  unsure (1)..(608): unsure at all n locations
ncgaccaccgctctccgcagctcatgtcacattgacacancttcgcaananncaccnnagattttgataccctttgnangancttgnnantcgatctagctaacccgagatgctctanagncatcttcaggcattcgagcnctgagtgtcactctttgatcacttctctgctgacccatcatacatataaacttctcctgcagacttcttgtcttgatatagaagtagggctttatacatacatctttgccttttccttctagacttctcaccttttaaaacatttttcttgggggacccaatcataatccctttttcacaatgaggtttgatggcactattaaaaaatacactctcaacatcggttatctagaacattctacattgattctaaacccgagttgaaagtgccgatgttgaatgttaacatgtatatgacaacatcggttctttaataccctgtgttaaacacaatgaacaaccacaacatatgtgtacacatgatgaacgttgacatcagctcatacgaataacaagctttaactaggtgtattctatctatctccatatctacgcacagttaatcgatattttattgagtgtttacc

SEQ ID NO: 31536 - DNA, 420 bp, Glycine max
  unsure (1)..(420): unsure at all n locations
acatgggaccactcatttatctcaaanaggatgtcgtatctagtcaaggtctgagagaccattcaagtttcctaacgatgtctaattatgtgggccattaagtctatcatatgctgacaatagccgagaagcccatgaatctcttcggtggcggagtangtgtctgccatcgccttggccttggctatacaatcgggaagttcttgactcccgttcaaggtaagagcaaaccgatccatccacatgtgtgcctcttggtgaaagagtcgtcacccttcctctacctcattttcgcgatactnggcatattcgtcgaatcctatctcgtgggcgcgctaacctaactttttggacttgcgatatactacatgttggctcgttccataacctgaacaactttttggactgacagcactactc

SEQ ID NO: 31537 - DNA, 293 bp, Glycine max
  unsure (1)..(293): unsure at all n locations
acgagacatctttgtcaacaaagacacgttagccataactcacctgtgcatttttaaccttgccatatatagctaagtcattgatcctgtcaagtctgatgatctacnaaatgaggccgcaattgttctgtgccagttggagatgtattatccacctgctttctttgacatcatgagacacttgattgtgcatctacacagagaaactaaatgtcgaggtcctgttgatattcggcggatgtactccggtgagtgagacatgaagatctaagaggggttacagaaatctatat

SEQ ID NO: 31538 - DNA, 478 bp, Glycine max
  unsure (1)..(478): unsure at all n locations
tcttgccttatnngcctgttccatgtatctccagatatattgncttattnactgctatgggctggggtcacatcatcaagacttctcaccattgttgttgattgaccacgctgntatggaatgtgcgacaatcctcaaaccttactgatcattctgaaggttggtgtctgtaccatatcactccttcttataaaagcctcgccattttctttaaatccatcatccatgagcttggtggactccctacaaaaattctaatttgataaaaatgtgtggcagaggtagctgataattactataatacaattagttatataactaattacggacctaatataatctaccaattttcacatcctttgttgcaattgattgcatgaattgttgttggcgatcagaacataaaccggaagtgcaacagtgctgtacccaagactttactgtgacacaatgaaaatactatattgacggtaccagg

SEQ ID NO: 31539 - DNA, 346 bp, Glycine max
  unsure (1)..(346): unsure at all n locations
atatatagagacgctcgaaattgaacaacagatgctctctagagatgtaaatggtaaaaatttttcactcggatgttagattcaggcacataatatatcgagacgtttgaaattgaacactaaagctctggtccaattcaaacggccataacttttaacatgggtgtatgattgacgcccatgatgtatcgagatgatagaaattgaataacggatgctctcatgatatacacatggtcacaagttntcactcgtatgtcagattcaggaacataatatatagagacactcgaaattgaacacggaagctctggtccaaatcatatggcctaaactattgacatgc

SEQ ID NO: 31540 - DNA, 320 bp, Glycine max
  unsure (1)..(320): unsure at all n locations
tatcttagtgagagtgattctcctaaattcttgagtgattcaagaacaccctggctgtatcaaaggactttcacaacctatgtgtgttgccctcgctgganagagtgattcttttcttccaatcatcttcacccttattctgtcataccacaattccagaagatccacctctgcccaaaattatctcgtgaccataactcccatattacacactcatattaagtgattcttgagcctaaattgatctcaaaacgagaccttcacctcgttttggaacacctcatttgagccctgtactgcatattgcattctatattctg

SEQ ID NO: 31541 - DNA, 453 bp, Glycine max
  unsure (1)..(453): unsure at all n locations
atggataatgggagcttgtatgaacaataatacattacccttgtctcgaataatttggcctaagaggaataattctcaagagcattggcatgctgcaacaaatngaccctgggaccctaggtcgaattggcttcactgagagcattcagaaaccttattaaagactaaacgatgaagtacagtgagtggtggaaacgaataaaggaacaataatacattacccgttgtctcatttcaatagcaaccaaacaatatattccctgcagattcagcattcaaagtcagatgtaacgaaataataatcatgagtttagattcagtgatgcagataaatgtagagaacagcaatgacatancataccttagcttaattctggaagagaaatgcgatagaagagacacnnctagaaaagtgatcctttcttcgttcactgactgtcctctatcatcacg

SEQ ID NO: 31542 - DNA, 330 bp, Glycine max
  unsure (1)..(330): unsure at all n locations
ctgatgtttcttacataatcaaacaattgntaacatctccacctgngtttacactgtggtcatgtattcgtttatagaattcattcacaatatttgttgntgattatcgtctcctaatcaattgggtgttcattatgttattggttgctcatcttccaatcatgtcttgtcaaactacttgataatctgtcatggtgttacttctgttatgaatagagagagacttcgctcttgttaatcacgttaaggtgtttcgagaggaaaatacctgagtaggcatgatccttgttacctattgatgaaagtcaacttagtaagtcatgtacctgt

SEQ ID NO: 31543 - DNA, 400 bp, Glycine max
  unsure (1)..(400): unsure at all n locations
tctttagactgggctgttcatgcagtcctcttagacccttatctgccactatntcgtcatgccaaggctccagaaccccaacaggttttgcctattagatgtactcggaataaacctcaatagctncttccgcaatgtacctttcaacaatatatacttcaagacagtgtagattctttgtatacccttttaagatctccatgtattgctcaatcgggtacatccaccacaaataaacgggaccgcaacgattaatttctctcaccagatgaacaattaagtgaaccatgatgtcgaanaacgaaggagaaaaatacatctccaattgacacaagataatagcaacctcatnttttacctcatctaacttaagaggatcaatgactatgctacatttgac

SEQ ID NO: 31544 - DNA, 262 bp, Glycine max
  unsure (1)..(262): unsure at all n locations
catatcccattatcgcanatgttccaatntctattacaagcctcgcattctagcatcttctataggactctatataaaggaatgtngagtatgtaatgggtataattaaaataaaacctcactcttcttctctcgttgctcgaagagggacctagctntctaaacctaggttctgcatctttgtttactaacaatacttggtgctntcattgagcatctcgcatggcggagtccactcgctctaaatacaattggatcgatc

SEQ ID NO: 31545 - DNA, 273 bp, Glycine max
ctaccatcctcaactcacggtcaaactgaacggaccattcaatccctggaggaccttttgaggtcatgtgtcttatagcaaaaggggagagctctctttcattgatagagttcacttacaacaacagttttcactctaccattggcatggctccctatgaagctttgtatggtagaaggtgtaggacacctctatgttggctaaagccctgagaagacctcaccttatgacttgaagtggtacatcaaaccaccgagaaggtcatgttgatcc

SEQ ID NO: 31546 - DNA, 594 bp, Glycine max
  unsure (1)..(594): unsure at all n locations
agtgctgatanccttgatangcgctgttagcctctaagctcggacggagtcatacctcacanaatatatatatatatatatatatatatatatatatatatatatatatatacatatatatatatatatatatatatatatatatgtctacgtagaaagataccttggatatgcatgtatgtagcaaaaaaatatttcacaaaatatatatatgtatgtntaggtagcaagataccttggatatgcatgtatatagcaaaaatatctcacanaacatatatacgtatgtttatgtagcaagatacctgtgacacacatgtatatagcaaaatacctcacagaaatatacgtatgtttagggtagaaaatacctcatganagaanagagagcgcgcgagaaaagatatagaagacataaatatagatagaggaatatgataaaatataacaataatatgtgtgtctagctaaacacaacatgctcgtgaaagagatacttcagctcttcttgaaaatgactgacataccagtttgaaacaatggtgcacattgaggtaatgcttaaagtttccacccagatgaccgagatgcaag

SEQ ID NO: 31547 - DNA, 321 bp, Glycine max
  unsure (1)..(321): unsure at all n locations
agacttctagagaaagcagaanaatatgacaattgtcaactcatgacaacttacacaatcattatgaggaacaagatatatttntacattcataatatgtaattagtatcnttatcttaatttgatgatatgaactaagtcggccccttgataatcaaattgatttaatttggaatgaatgtgataaatttaaaaatccataccacatcaaataaattaaatataatccattaggagttgattccatcctaaatccaaacccaactaatggtaatcaatttggttctcaaaataattatttttctatttgaaccaatccga

SEQ ID NO: 31548 - DNA, 333 bp, Glycine max
  unsure (1)..(333): unsure at all n locations
attaaattcctaaatgttagcttcatttttcagcacaatcgttcgggtggtttcccctcaaaattacctcgtttagccaatcatacgaagtatatgattntgtacattgtgaagcatactgtagacaaggttatacttttgtctacnagaagggaagaaanaaaacttaatacccaaaaatgggaatttgaagaggtaactgtactttcatatgaacatcatgggacgagaatgatgtcgggaccatcgattatcaacaggtacttatgctctgaattgtgtccctaataaactacctagctatgagggtccaattacagcttgcacacactg

SEQ ID NO: 31549 - DNA, 356 bp, Glycine max
  unsure (1)..(356): unsure at all n locations
cttaatcgtcaccttattcaactggcgggagtctacacacaacctcatggtcctatctttcttctttactaacaacactggtgctcccatgggagatacactgggtctcacaaactgcttctccaaaaactcctctaactatntcttaagctcggctaactctataggagacatcctataaggcgctatggatataggtccagcaccaggtaccaggtctatggaaaactctatctctctcttgggtggtagaccaaatatatccttagggaacacttcangaaactctnctgacatagggagatcacacatggaaacctttgtctctatttccaggntagacaagatcatgtaca

SEQ ID NO: 31550 - DNA, 233 bp, Glycine max
tctttctctatttctatattaggctttgatatctatcaaaaagttagaaaaaaaaaaatgacttctagcaaatactagccaataataaaagttttattaaaacttataaagtctacatactagctatcagcattattttgttcttttaagactctaaactccccagcgcagtatttaatttaaaaggcggactctacgacccgtacaaacaaacacttaaataacactaatga

SEQ ID NO: 31551 - DNA, 247 bp, Glycine max
caccaagatgtttgtggaagctgcacgagtggcttcaaattggtaaagaaaagaagtttaaggaggccatagaagcttttgataagtcttggttgaacgtattgcatctaaacgcgaagagcaatgtagatgctataatcacaccaaaaaagaagatgacaatactcattctgacctgataagggtgctaatggaggaacgagctgaaaaagggaaaataatggatgacaagtatcttagagacact

SEQ ID NO: 31552 - DNA, 557 bp, Glycine max
  unsure (1)..(557): unsure at all n locations
tgagctgtnanncnttatangncctgatcgcatcatgtaggcacgctatagantactcaagcttgagagagcanattcagagagncaggagcatgctgaggaggcaaattttgacactgattcaatcataaatatntatggtaataagttgtaacaaataaccacagaaaaattaatttgtgaaaagagtgttaccaaatattgaacaagtgtatgaactgaatgataatggactgacaatgaactggtgatgatggacatggaaaccgacaatattcttaattcaagaccaacactggcatgangataacagcggctggctattagtganaaaacccagggataactcacggatgccctcgcaaacacagagcaaaggtaacctcctacttagctatatgagcgaacgggcactacggagcatgattcttttgcagggctgagccattcgagggtacacctgtacgttgagcgacagttntgaatgctgtcattgtgtgcttatggagatacgcacttacgaaacacgctcccggtgttgcgttgagacactgctg

SEQ ID NO: 31553 - DNA, 262 bp, Glycine max
  unsure (1)..(262): unsure at all n locations
gtgagtttattcacaagattagagtttatctcttttatctcagtgagagtgattctcccaaattcttgagtgattcaagaacaccatggttgtatcaaaggacttccacaacctttgtgtgttgccctcgccgaaaagagtgattctttccatcctttcatctttaaccttgttctttcaaaccacaattccagaaaatccacttctacctggaattatctcgtggccataactctcattntacgaactcaaataaagtgat

SEQ ID NO: 31554 - DNA, 547 bp, Glycine max
  unsure (1)..(547): unsure at all n locations
ccanaccggtactaaacttatcaaagcttgatcatgttgctggactatcatgcatgtcangtgtatgtaaccactntngtntatgcttatggcttgctggtttgcagtaagaacgcgaccaaatgagtctggtgtctgctcaagctactcaagaacaagaggtatgcaatagcaaggcaactgataaagaactcgcttgagctaatacaaagtggccatgaagagactgcatataaccaggtttggtagttaatgctacatactcatttgttaaccactgcttgcataagtatattccttcatttgtcttcattatttcttgtntcttctcaatctttattccactgagagaagaataaggagttgtgtgtttataacataaccaactgatctctngtttgcaatacattatttagaatgcatacgtatnnttatacataaccaactgctcgtactttatgttccttgttgtcctactctcaccactntttttttctgattaatacataacaacacatatagcttgattgtcatctacactccacgn

SEQ ID NO: 31555 - DNA, 360 bp, Glycine max
gcttgcctgtccgatgcagtagtaatgatggcccgagttatgttggggaacggttacgaacccggaatgggtttagggaaagacaacggcggcatgactaacctgataaatgccaaaggaaatcgtgggaagtatggtttatgctataaacccactcaggcggatataaagagaagcatcgtgggaagaaagagcggtggtcaaagctcgcggttgatgcaagaaagtgaatgaagcccgccctgccacataagtagaagctttataagcgcgggtctgggagacgaaggtcaagtggtcgcgatatacgaagatgatgttccgagtacattggatttggtacgaccatgccctcctgat

SEQ ID NO: 31556 - DNA, 156 bp, Glycine max
gttgagctcgcttataccggtcgggcgagtagctaccaagcaaatgtttcggtcttggaaggtcacctgcctcgattcgctggaatggcagggagaccttggagtcgcgacagatatgaagcttacgattagagctttactggcctagcttatagt

SEQ ID NO: 31557 - DNA, 612 bp, Glycine max
  unsure (1)..(612): unsure at all n locations
ccgcgcaccccctcgcttgctacatgcttattgcttatcgtccatcaattcntccctagtcctggatttgaanacatgtaganagngaagntttgaancnttttannntttgatcgttgtagnacgcggagcattgagcttctgctgcaacaagcttggctgatttatgtctctgagcaatagcttcataggtgtcgagtatatcagtttcataaatggtaagacaaggactcataggtctccagctcaacatgttcaaaacatttgataggaaataatgagcctcttctccactagctctctaatcatatgggttctaccccgatgtatcatggaagtggtaatgaactgtgtcagaaatgttgctttctctgtgatgcttaatggaaatgcacataaagaggtccagccgcaaaggagactcacgcatggagattctctttatcttagtgtggagacagattctactatgatctgcaagtgtgtcactcacgagctttcatggatccaattggccacgagcacacacattcacacttattcttacagatgacattggatatntggagagcacaacaaaagaactctccagttagctacagtctgtggacg

SEQ ID NO: 31558 - DNA, 274 bp, Glycine max
cttcaactagcttagactgggcttcatgcttctttgctggggttcgaaatccattagagagataaattaataaataaactttgaaaccgtgctaatatttatggtgagaatttgatattgctctgcgtctacaataaacatgataaatgtttaagaaactctgccaagggaatcagatctttatcttatttatacgagacacattgtctgcttcgcactaatctatgagggattttttatcttcatgaatttgacctcatgtcttaatcttcct

SEQ ID NO: 31559 - DNA, 382 bp, Glycine max
  unsure (1)..(382): unsure at all n locations
ataaatagttctcggaggtccgattcaggcgcattatntatcgagacgctcgtaattgaacaacggaagctctcatgaaattcattggtcataacttttaactcggaggtccgattcaagcgcataatatatcgagacgctcgaaattgaacaacggaagctctcaagaaatttaaatggtcaaaacttttaactctgaggtccgattcaggcgcataatatatcgagacactcgaaattgaacaacagaagctcttgagaaattcaaatggtcataacttttaactcggaggtccgattcaggcgcattatatatcgagacgctcgaagatgaacaacggaagctctcgagaaattcaattggtcataacttttaactcag

SEQ ID NO: 31560 - DNA, 128 bp, Glycine max
cttagcaccctttgttgcacaatacgtgaagttccgagacatgccagaaatcaaaatgaagcatcactacgcaattcgtgaaattccgtaacgcgccggatatcaaaagaaagcattgatgcacaatt

SEQ ID NO: 31561 - DNA, 430 bp, Glycine max
atcaactactttttttggttatgagtagattaatcaaattaattaacttcacctttttgaaattgtaagtgctcaccctgcgaaaattcagtccaatttactacacgaactgaaagaagtagctagaagctgcaaattaagcaacttaattgataaagaaaataatctttagcgaaatagtcttcttctctctttcacgtgaagtgagtgagttattatttattgtaaaaaatttctactccaatgttctataggtccattatctaatgtcaactaacattatttagatgtagaccagtaaagatcactcttagaatgaatataagaagtctaatctctcctcatttatatattctaatgtgatgtgtattttagacgatatgagacttatatatttctcaatataccctcgcatgccgaacacttcttg

SEQ ID NO: 31562 - DNA, 329 bp, Glycine max
catacccattctgtattatggtttatgtgatgatgtttgtgatgtttatatgctgaaattgctgatggacatctgttagagacgaatggtagaactaacccaatgttagaaagtgagaatgtgatgttatgagtggaataaaatacaatgagactttgagagttggaaggctaagtctgaattctgtggtaaatggatgttagagtgagttaatactagcttgaaatgtcatttagaacatgtgagaaacgtaggctgagctatagagaaaaacaaatgatccaagtgaacacagagccattgctagggcaaatttgggtgttgaagag

SEQ ID NO: 31563 - DNA, 382 bp, Glycine max
  unsure (1)..(382): unsure at all n locations
ctgccgacaaagtgaaggggtcgtcaatgattgatggataatcggagcttgttagaacaataatacattacccttgtctcgaaaaatttggcctatgaggaaatattctcaagagcattggcatgctgcaacaaattgaccttgggaccctangtcgaattggcttcactgagagcattcaaaaaccttattatagactaaacgatgaagtacagtgaatggtggaaacgaataaaggaacaatactacattacccttgtctcaatttaatagcaaccaaacaatatattccctgcagatcaatattcaaattctaatgttacgaaataataataatgaatttatattcagcgatgcagaagaatgtagaataaagcaatga

SEQ ID NO: 31564 - DNA, 315 bp, Glycine max
  unsure (1)..(315): unsure at all n locations
atcaacaattgtaacatctcacctgngttacactgtggtcatgtattcgtttatagaattcattcagaatatatggtggtgattatcggactctaatcaattgggtggtcattttgttatttggtgctcatcttccaatcatgtcttgtcaaactacttgatgatctgtcatggtggtacttctgttatgaatagagagagacttcgctcttgttaatcacgttaagggtgttcgagaggaaaatacttgagtaggcatgatccttgttacctatagatgaaagtcaacttagttagtcatgtacctgtgttcct

SEQ ID NO: 31565 - DNA, 420 bp, Glycine max
cacccatcacatgtgtactatgtggcggtcgggcgattgtgcacaacaagtttttccacatacacaatgcgcgcataaacccaccatcccctgtagcccacctccaactgagctcacgtactcccacgtagcccatattctcgtttctctcaacaccgggtccccatcaatcctcccaagcttgcccaacatcaaagttatacaacattcaaatagcacaaactatcacagccaagaaaacagagcaaaggcagaagactctgccaaaacaccaaccataatcacagcttatctcacttaaagaccccagtaacaattccttcgttccaattcgttaaccggtggatcgactccaagattttactggaagtctctagtacataagcctacattttgaccggtgggatctactaacaaaca

SEQ ID NO: 31566 - DNA, 350 bp, Glycine max
  unsure (1)..(350): unsure at all n locations
tatgggccaatgaacggttattataaatatataaccgtggtacccataaaccagggctacaatagaaactgatgatgtacttacacagttacactatcctagcatgaataatatcctaagttgtttagaatttatgtaagtcgctccagtgccgtgagaccatgccataagaaatcaattaatataacaatgttagaaactaaatactcatgacaggagatgctacatgtgactacaataaaattaaacaaaatacanatatatatctttttaattaatggagatcaatatagaacanacatattgttgtgatgatcatagcaatcagagacctattataacaaagaata

SEQ ID NO: 31567 - DNA, 427 bp, Glycine max
  unsure (1)..(427): unsure at all n locations
agctttcataagcgcattggccactggtaattgatacatctttcggtaatcaattaacagagtgtaaaactcttttaataaacatgttaagttaaatcctttggccaaacctttgttatttcaacttggaactttcttcctaagactctangaattatcttgatcatatttcttgaagttaatggatatcttggactcttgtcttgaataaaacttgagaagcatgttcctttggcatcatcaaaacatcaaatatctttgcttctacactgttgactcatcgatgatggcccacatatttccttcaatcttgcttaactgctgggacaagcctctnttcgacctaaggcaagcctttaactcgtcatttatgatcatgccgttgacccgcgactgatccatatcatctctttggagcttaagctca

SEQ ID NO: 31568 - DNA, 258 bp, Glycine max
  unsure (1)..(258): unsure at all n locations
atgtgaatgtattntgatgatgtcataagaagaatcaaacanggctcattttgcttcaagaataatacaagattgtttcaacaaacacagccttgattcaagatttcttcaagatcaagtcttgcctcacaatgaaaggtttcatgtcattcaaggcacatgtaatcgattaccaatacatgtaatcgattaccaatggtttgaaagtgtgtaatcgattacacatcatatgttatcgattaccagagactctgaatg

SEQ ID NO: 31569 - DNA, 262 bp, Glycine max
  unsure (1)..(262): unsure at all n locations
cttctctctctctctcgaaattactgaggaaaattagttccgtgaagaanatccaagccgaggcgcttccgtaacgtttccgtgagtaattacgcgaagattctcgaccgttcttcaagattcatcgttcgttcttcgtcttcttcagtcttcaacgggtaagtacctcacaccgagtgtttcaattcattctatgtacccgtggtggtccacattttgtttcanagccaaagggtagcaaagtactatgttcatgaccgac

SEQ ID NO: 31570 - DNA, 463 bp, Glycine max
  unsure (1)..(463): unsure at all n locations
aggttgtancttgtnntatgtcgcatcattagcgaccttgnatctcagctattgctacagccactacacagcagcccaagaactattctatgatgccagaccaagtgcgtatgtaaaaaatgtatgaccagtgaaggtgcaatgcaaagaaaatgaaagctatgccagcagcccaaaaaaaaggaggaagtggtcttgacccggtgtgatcttggactttaggacaatgtttccaagaaggaggatgatgaaatatgaactgccaatcagtctaagcccagtggaaagacaatgccattgaaagacaagtccgatggaaagataagccaatgaatgataagccaagcgaaccttaaacatatgtgctagccaataatgaggcattaaagtcatagtatattattatgattgcactgtaaagccagtattttttgtactccttattggttgttaaaaaaattgc

SEQ ID NO: 31571 - DNA, 291 bp, Glycine max
  unsure (1)..(291): unsure at all n locations
ctcttaggcacttctctctctctcgagattgctgaggaaaattattttcgtgaagaaaatccaagccgaggcgcttccgtaacgtttccgtgagaaattacgcgaagattctcgaccgttcttcaagaatcatcggtcgttcttcgtttgcttcaatcttcaacgggtaagtacctccaaccgagcttttcaattcattctatgtacccgtggtggttcacatgttggttcatgtatttntattctcgttctcattttctttttatacccccttttgacgtgcttaagtca

SEQ ID NO: 31572 - DNA, 228 bp, Glycine max
  unsure (1)..(228): unsure at all n locations
tcatatgagatatgtcgtgctcttctctgaatgttgtggctatacttangcctgcaaaataaaccaacgatgtntcacctcttcagcaggacaaatgaaaagtaatagctgaaattgaactattaaacctgaataaacccaatgagtgtcgctcaattaagcccaaaattactgctggtgttaaacccaatgagaaattcattattgctgctattaaacccaatgagt

SEQ ID NO: 31573 - DNA, 498 bp, Glycine max
  unsure (1)..(498): unsure at all n locations
ctgcttcgacagaatgtgatgaagnaaatgaatagcacaagttntcagtttnanataaccaganaactttataaagctctgacataggaagacgatgaagatgttcanagagacttatatatcactgtggacaaaattgctcgtgattagaatgaactcggaacgatagatgtatataatgcgcaacatagcgtggcttctttaactcttcatgtctggcgagagatcctcataagagtttgattttgagaaacttataccaatctgagaagtctcaacttcttgagagtacatcttttgattgtcatgaactttactgggaatttcgacccaatggcgtatctttactccagctttctttgaaggtggtacctctcctttgatattaattatcgttcaaccactggtatcgttcccacactggtacggttcatctttgaaactatgtgtggtgaattatgtagcttttgaaccattcgccctgcgtaatttaaatcg

SEQ ID NO: 31574 - DNA, 594 bp, Glycine max
  unsure (1)..(594): unsure at all n locations
tatccntgtgnnnnctatcgcatcgtgtgtgactgtganactaagcttgcttgcctaagtgntattgaaagaggtgcatgcgaccagntactccttaggctctatcactttctctcccttggcaatattgaggcttgtagtgatacattccctcgccattatatcttcacttacaaactncatcaccagacaaggagtctaaatgatggcccctaactctgtgagcgaaggatgtcctatcaatatattataagagggtaaggcattcagtatgaggtacataatcatgatggactttgactccctttcatcttccaaagtggttacactactatgaaagtaatatcttatgacgcacattctaagacggttattngngacccatctagaatgtgacgcggcggcaaactngtaattaagatatctggagattgctttcataacgcacatctaagacgggtgtaataaccgcctaaaatgaagttggtgggcaaattgtatnatngacaaatatctacgacagtctaagagaaaccgtcttcgttttggcacaatgacaagacctntgttttcttctctctacaaaattcatag

SEQ ID NO: 31575 - DNA, 477 bp, Glycine max
  unsure (1)..(477): unsure at all n locations
nctacattcaatntctatacttatcgatatataactgtactcaatctgtcattcgagataacagttattgtagatagaatacgctcacgggtatccgcattctatcatcacgcgactcgatatattaccgcactcaatcgtacatcagtattaaaagttatcgtagatgaaatgcacagagctactgatatcatttcaactttccaaacattcgggactgattatcaatcgaataaaattattgtcgttaatacgcgaggctcagtctacattctagcgtttaatattatgaataataaacatcagtaaaaggattgctgttgatatctcaaacattgcattacctctcgcatttcaatattcggactaatccacatccgacagacgtatgtagctatataccaagcttgaatcaatctatgactacatatcgactcaacaaatccgataagaattgacttgactctcaagcaaccc

SEQ ID NO: 31576 - DNA, 383 bp, Glycine max
tgattctgaagcactcatttcatgcaaaacaaaccactgcatatcattttcaatcacttcactggtcaaacatgcttttggtacaagcaaacaactcaaagtgttgaaatttaaataactgaaaattaaaagaactgcaatatagaaactcaaattaaaatgactgaacatatatcataaaataattgaaaataaactaaaatgttcaagatgcataaatttaaatgtcctgctcctgtggctgctcttgtgcatgctctataaacgtccaacccctgagcaactgatgaatcctgagagatatgctggctctactccgatgctggtgcacatggaatggcatcatcaagtatgggtgctggggatggctctcggatctgatc

SEQ ID NO: 31577 - DNA, 410 bp, Glycine max
  unsure (1)..(410): unsure at all n locations
gctgctgctcgagccatcaaatgtgtnttcttggatattccaagttacagaaaggttaccaatgttactctcctattcataatcgttattatatctctgcagatgtaactntttttgaagaaaaaccatactttgctccctccatggttgagtccaatactcttcaagaagttgttcctattccctatcttggtccatcaccttctttgcaggaattagagtcaactatatagtctaccataaatattcctgacaatcttccgcttgagcagactcaaagatcacccatcgtatatcaacgtcgttctcaaattcctgatgtagaacttgaaggtaatgaaaggccagctgaatcatgtcctactccagtagacaacccgaccatggacctatccgaagagaatcttgac

SEQ ID NO: 31578 - DNA, 429 bp, Glycine max
  unsure (1)..(429): unsure at all n locations
tggtagaatatggtgttaaactatcaccttatattgcatgagtgttttctttgtgccaacatctcttaaagaccaactacgaagaataatgaatagcttttggtggggtttgaaatatgcaaattcaagagaataatttggttgaattgtgataaaatgtctatgaaaaaaagagtttggaggaatggaattccgcaacttgcatggatttaatcttgcaatgcttgggaagctagggtggcaatttaccacttataatgatgctaccatgacaaaaattctcaaagcaaaatattgccccaatggcgatttcttggatgcccaactngggcatagtccaagctatgtatgacatagcatccatgcttcacaggtcctcgttagaaaagggtttcaatggagattagatgatggtgataaaatcaacat

SEQ ID NO: 31579 - DNA, 680 bp, Glycine max
  unsure (1)..(680): unsure at all n locations
ctatctagtctcactacctatctcntatacacatactantattaattaantatttnnnttttatnnnactaatgattaaatgaggattgaannccttganangtcctgtatacactactatgcgtcgcgatcgagagcatngctgctaaatacttgggaaaatagctatgattcaatatctacatccttctgttatcctttcttaatatatgcaagcagccacaaagagagagagacatatttgcgaaatgttaacagttacggcgatggattactgctaagcaacctagcaatctatataaatggtcatatgtatccaagctgccgaatggcccatccttggaggactcccagcaatatcacttgaatataatacacttggcctatgtgcctgaatgctcagaatgttggagttggaagacacgtgctcttgtacaatctacagggaaagtatgcacacacttccatcagttacggtatgtatattaactataatataatgagtgtaggatcaatctataataacctatgtcatcattcactaactagacagcactacaattgatataagataaaaaactataataatgcatctagaatttacagtacataataacaacaatttatctcaaatatacaatgacttgcatgtctcaatcgcaaaccaactagacccatcn

SEQ ID NO: 31580 - DNA, 137 bp, Glycine max
tagacatgtatgtctacactacatcgtctggtgatctctatggcgtgtgtagcttctgatatttatctctggacttacactacctctaaaatcacacttctaatcatatgtaactgttgatatctacactttgatag

SEQ ID NO: 31581 - DNA, 274 bp, Glycine max
  unsure (1)..(274): unsure at all n locations
aaacggctcttggtgctttatgagactctatggcatttcgtgcattcccagctttcgatttttgggctaacggaaaggtgaaagagctctacatatgcagttaaaagaaaatagcacatgcaataatcaccaggaaccccaactcaaatgcttctactagaagagactagtcttgcacaatatggtgaattaatgtttatactgatagtgagagaagtgttcacanttaatctttgaataaaaacttgtgtttgaaaaactacttgtgtgagac

SEQ ID NO: 31582 - DNA, 413 bp, Glycine max
  unsure (1)..(413): unsure at all n locations
tatgcatgtgaattataaagcatcaacaagaatcaagccgaggctattgtgcaagcaatcaaaggggcaaaacacaccacatgattatgatgatggatggctcacattctcacaaaggtaaacttatcactttcaaattgagctttcaaaactatcatgacatgtagaggaaaaacaaggacttcaaatcacaaaatgtcaagagacttttattttcaaaacaattacccatttcttgaacatatcctataattcanagaaaaacatgcaaagttgcacatgcaaacagaattgacctattatattaaactagaaacccaacacaattaacaaatttaacacaactaacaaaattaacaaaactaacanaactagcataaccaaagaacactctgtccatacttaaacaacac

SEQ ID NO: 31583 - DNA, 217 bp, Glycine max
  unsure (1)..(217): unsure at all n locations
tctcacgatgtggagggtgagccatgttctcagtataaaaattagtagtggatgctcaanatcagaatatttagaatcaccctcaacagaatgctcagaatgctcanaatgcacagaatgaccaggatgcacactatgcctaactaatctatgagaggttctatctatttcaggatcaaagggttgtaaatcacttggattgaccctagttatgcac

SEQ ID NO: 31584 - DNA, 443 bp, Glycine max
  unsure (1)..(443): unsure at all n locations
agctcttttcaatctttattatttaagacatatttctcattatatttggcgacattntatcttctatataactccaagcaacaataacgagagagtgagtataaaacagacaagctttacaagataaagaaagaaccaattatcattgtatgtgtcgagaatcacgaatntaatgtacaacgatgtgatatctaatttagaggaacctgaatatcctctaactatgtgtaatcaatactacctgtctatataaacaatcatctgttgtgtactctgatacacagtatacacacaaatatccctccatatntttctcttatattacagtatgcttcctgctatacagaactttttacctaagtttgttaccanaaccctatgatctagtgattggttctatactatangcctagatctcctaaatccanataactcatttcatt

SEQ ID NO: 31585 - DNA, 521 bp, Glycine max
  unsure (1)..(521): unsure at all n locations
tatgcgtgttnnnnctgatnactttattggacanttngtgtnataaantccgctcntacaangggtatggtgtatnatgaagtatggatgactacatcctgcaatatatgggcgaaagaaggagcgtgtttcattattgcttactccaccgccaaacacatttatggccgtctatgtccctgttactttcaatattaccttgacaaagatgtcatggaccatgttgaaaatctaaattgagcaacccctattctgcggaaaaatcgcatacttcatctgtgcatattcgcatacataatgatgtcattggtgagtgctcatgatctttcttcataaaaaagagcatatcattgtttaaaaaaactgattacgggccgcatgacctgtgctaactaatatggggaggtaagcgataaaaaataaagcggctgaggctgaaaacaatgcccctatgagtttttactgaaaaaatggaacatcgtgcatgctacctctgtgttagtaccactccatccgaaccg

SEQ ID NO: 31586 - DNA, 410 bp, Glycine max
  unsure (1)..(410): unsure at all n locations
agcttgtctcttgcctcactcaccgnctttttggtttcatttctagctatcttatacttatcccaagtatcagaatttctacacctagaccactccttgaaacactccttctttactctaactttgctctgaacattntcattccaccaccacgattctttacccctaggtccaaaacctctagactcacccaacgtctctgtagccactttaataatctcttgtgacatcttgttccacatatcatttgcacattcttgtgattgtccacaccaaccctcccatatcttttgttggaagattccttgtttctcacccttcaagtgccaccatttgatccttggtgctaccagaggacntcttctgttngccctatctataattcttacatgcataaccaaaactctatg

SEQ ID NO: 31587 - DNA, 204 bp, Glycine max
  unsure (1)..(204): unsure at all n locations
tatcttaagaaggggggggttgaattaagatattccaaacttttctcctaattaaaaatctatcttactntttacttaagttatgaattcccttaatgacaatcttcttaaatgttaattcagatgaagcaaccttgatataaatatatagcaataattatttaaggagatttagggaagagaaaatcaaactcagtttatact

SEQ ID NO: 31588 - DNA, 286 bp, Glycine max
  unsure (1)..(286): unsure at all n locations
ccctatatatatatgcattattatctatatcttaatatacacataggcattagcgtatcctcaccccataactttaaggactgaaaatcatgacanatacattaccttaagcaagtggctcagaaactacataactntgagtagcttgcagcangtccattggtgtacttcatgatatacctacttaccaattaaatatttaaattataggcactatttacctatgttcttgcatcgcgatcaccacattcgttcctggacactatattgatcatcatcacacgta

SEQ ID NO: 31589 - DNA, 100 bp, Glycine max
atgccctcctgatttccagctgggaaaatggcgagtggaggaacgccccggcatttacgcaacgagcataatgtaaacctttacggttttaaaagctcta

SEQ ID NO: 31590 - DNA, 583 bp, Glycine max
  unsure (1)..(583): unsure at all n locations
tggtttctgctgactgacgccagtatangtgctgatcgccatcatgtacgtcgcactatagattgctcaagcttcacatagaactggcatgcctgtaactgcacataagttatgcatagtcaaatgttggtataaagggacaccaaatagtgctgctaaagcttcgtcataatacttgccaanatattgcatctangtgaaagaacactctttgtcccttttatatgtatcttttcagttgtttttgcataataatttctaacccaaataccttaattactttacaataatgtatgcactacaaagataatgcatgatctctcttataaggagtagatangaagactagtacacattaattaggcgggaaagtaatcaagtgaaaaaagagagcctgagtcccaataattctaaaggtagtttcgctatataaaacagattgtaacanattaatgctctactatattactaagctttttaaaggcatgagtagtacagagtctattttatgatgaagagaatctttccaaacaatgctatagagaaaactttatggcaccctttatctatacactgactacag

SEQ ID NO: 31591 - DNA, 220 bp, Glycine max
gctgatgcaacaattgttagcccgggctatacgagacatcttgccaaacaaagtcaaggtagcgataactcgcctgtgctttttcttccatgctatatgtagcaaagtcattgattcagtcaagtttgatgagttggaaaatgaggccacaattatactgtgccagttggagatgtattttccccctgctttcttttacatcttgaatcacttgattatg

SEQ ID NO: 31592 - DNA, 244 bp, Glycine max
agaatgaagaagatgctatgaagaatatgaactacacgaacaaggatatgtctcacttgaagacaataaaatgatgattatatcgaggagaaggaggaccattcatgtcctttcagctagaagcgttacctttccagatagttagtatatgacaattatatttggtagatatatattagcattcgaaaagaaaaatatattgcaaccatgaaccaccatgctttgctacattgaccgcaatgtc

SEQ ID NO: 31593 - DNA, 371 bp, Glycine max
  unsure (1)..(371): unsure at all n locations
gacttattccctagtggatggtgcctcccctatcctcttctcctttgccttccgctgcatctgcatggtgaaaaatcaccattgaaggacctcattgaagctcaaagatccagcctccatagaagctccacaagcaagcttccatcacatggcttttgtcataccctaatttcgttcggggaccattgttcggnggcatgcaactntcgtttgaccactttgaggtacttggcacccatcgttaggcaattcgtgaagttccgagacatgtctgatatcaaaaggaagcattggtacgcaatccgtgaaattccatacatgccggaaatcataaagaaatattgttatgcaatccatgagttttcgtaaca

SEQ ID NO: 31594 - DNA, 338 bp, Glycine max
  unsure (1)..(338): unsure at all n locations
tggaatgaacaaggaagaaagatgatctgaggcnccacttcgaggagaatatgagtcaagaagaagctcaccaccatacgaagccatggataaaagcttgaaggtaggagaatatgagtggagagaaatggagagaagaagcacgaaattttgtgcctcacaagaggtctaaactctgaagtataattctcaaatgatcaaagttgaaaaaatacacacacatggcctctatttatagcctaagtgtcacacaaaattggacggaaatttgaatttctattcacatttcacttgaattagaaattgaatctgcggagccaaaatntcactaattatga

SEQ ID NO: 31595 - DNA, 609 bp, Glycine max
  unsure (1)..(609): unsure at all n locations
tgtgatgaccccctatagnctatancnttttgatcgcatcattagcgacctatgatactcagctggcttctcattctctcttgaagagaaggatattacatattgaagtcctatagaganaactcttaatgggatnntgcaagtgtgttggcccaagagtattctttttgagaagagccaatttggcaatgagatntctcctggaatatactctctcatattccttttgagaggataatacattntgaacaagccaaactctctctttaatattcgtgcccaagttacctatttgtatgcctntgatggccattcacaaattcaatcaaaagatatgactgttggcagattatctgaanactctncattggtaagtcgatacacagttataattggaagggttatgaaatttgaatntgaatntccanagtccctttgctgtaatcgataccaacatatgggtatcaatacatgttcannaatcaaattgagaacccttttcacaactcttttcattcttccttctggtatcgatacactcctgtaatcgataccaagccttgatgacttgaacccttgtttgggcaggcttgacttagtgatttgacg

SEQ ID NO: 31596 - DNA, 394 bp, Glycine max
  unsure (1)..(394): unsure at all n locations
cacctgggctgcagcttccagatgtatagctgcagctgccncgacctagttgtcttgaaagatatggaccaacaactnttcgtccgcagaatacgcccncatcttccggcaatacatccagagatgcccttntggacatgtcgtccctttgtacttatcaaagtctggtactttgaatttgggagggatgacgatgttgggcacaagacataaatctgccaaatccgagaaagggtaattaccgaggccctcgactgctcttaacctctcttcaagcgcctcaatctttcccttatcttccgcaaagggaacagattcttttacgggtgtgggtgaggccgggatatgacngactatgttcgggtggggtagttcatgcggggatggatctttg

SEQ ID NO: 31597 - DNA, 333 bp, Glycine max
tctcaaggaggtgagcttagttcgtagaggggtgtgtgtagctaagctctagcttctcaaggaagcttctctaggaagtttcttaaggaagctgcataggctataaatagaagcatgtgtaacacttgttgtaactttgatgaatgaaagtcatgtgagacacaactcaaagttcaaattttctccctcttttcttccttcaatttcgtgctccccctctctttcttttcctccattgaatcaccctctccaagcttcttatccaaggcactttcttggtggcaaagctccttctttcatggcttattccctagtggatggcgcctcctctca

SEQ ID NO: 31598 - DNA, 373 bp, Glycine max
  unsure (1)..(373): unsure at all n locations
gtcacctgatgcatgcaagcatatacagatcttctagacttgggctgataacatgcagtcctcttaaacccttacctcccactttttcgtcatgccaaggctccagaaccccaacaggttttgcctatttgatgtactcggaataaacctcaatagcttcttccgcaatgtacctttcaacaatagatacttcaggacagtgtagattctttgtatacccttttaagatctccatgtattgctcaatcgggtacatccaccacaaataaacgggaccgcaacatttaatttctctcaccagatgaacaattaagtgaaccatgatgtcgaanaacgaaggagaaaaatacatctccaattgacacaagataat

SEQ ID NO: 31599 - DNA, 332 bp, Glycine max
tgcgtcagctcttgtcccttatcgtgcggcaccatgcaattctgcaatacactgtgcattgcgtctctgttttttcatatcccattatcgcaaatgttccaatttctattacaagccttgcattctagcatcttctataggactctatataaaggaatgttgagtatgtaatgggtataattaaaataaaacctcacttttcttctctcgttgctcgaagagggacctagctttctaaacctaggttctgcatttttgtttcctaacaatacttggtgctttcattgagcatctcgcatggcggagtccactcgctctaaatcaaatttgga

SEQ ID NO: 31600 - DNA, 369 bp, Glycine max
  unsure (1)..(369): unsure at all n locations
gcttcatgatgaatcaagaatgattcanagaagttttgatgataacaaaggtgatgacaaatagctcanagatcaagaacaattcatgataacaaagatgatgatctcaagaatcatagaatgagttcaagattgaatcaagaacacttcaaggttcaaagagaaaatttgatttcaagaatcaagaatcaagtttcaagattcaagttccaagaatcaagatcaagattcaagactcaagattcaagaatcaagaaaagacttaatcaagataagtatganaaagttttttttcaaaaactgagtagcacatggattnttctcanaacttgtttaccaaagagtttgtactctctggtaatcaattac

SEQ ID NO: 31601 - DNA, 335 bp, Glycine max
tagagaaacatttggcgccaccgagctcatccaaaagctcgtcaatggtgggaattggaaagcgatcacgaacggtaatggcattcggggcacggtagtcgacaaaaaaccgccataacccatcacttttcttcactaacaacaccggagaagagaaagggctcatgctgggttgtatgaggcccttttggagcatgaggtccacctgaccttctggaaatgcaggtaacgatacggccgcatgttgatcggagttgattgtggaagaaggtggatatgatgatcaatgttgcgctccggcggtaagcaccatggttgttgaaacaagtgcgtga

SEQ ID NO: 31602 - DNA, 338 bp, Glycine max
  unsure (1)..(338): unsure at all n locations
agcttaagtgaacctaagggtaataagaagttctcacccggtaggttcataacccanaaagggaagcctagganaaagttagggtataattataaggaaaaaaagagaagcatgtttattagaggttntatctcanaattcaaattataagagtctccgtcaagatacgaaatgacacatagtcatgtttcttcatcccaatcactaatttatgccttgctactcactatgagccaaaagtataattgttatttttaaataataataataataataataataataataataataaaaaataacaaaataacatataaataatatatataacaaaacaa

SEQ ID NO: 31603 - DNA, 335 bp, Glycine max
ttcaaaaattaagaaaaataaacaacatggtaatgatagaaatgtgcataaatcaatgtcgattaatgaatatatcaaaaattaaaataaatttaataaagaacatctaatacttttgtttctctataaaattgaaaatataatacaattagaatatattaataaaaattaatgacacgtataataattaattgataatatctccttttaaaaaaaatctgaaagtagaataattcatcaatttctacatcaattatttattatataaacaaatataatgatcttgtatataaatagaacaaaaaaaaaatacaatgaaaaaaaattacttgtaa

SEQ ID NO: 31604 - DNA, 445 bp, Glycine max
  unsure (1)..(445): unsure at all n locations
agcttagactaagttcagcctaccatcctcagactgatggtcaaactgaacggaccattcaatccctggaggaccttntgaggtcatgtgtcttagagcaaaaggggagagctttctttcattgatagagttcacttacaacaacagttttcactctaccattggcatggctccctatgaagctntgtatggtagaaggtgtaggacacctctatgttggctaaagccctgagaagacctcaccttangacttgaagtggtacaacaaaccaccgagaaggtcaagttgatccaagaaaggatgaggactgctcagagtangtagaaaagttatcaggataagaggaggaaagacttggaattcgaggttggtgatcatgtattcttgagagtcactctgtggactgnngttggtcgagcattgaaatcccaaaaactaacacct

SEQ ID NO: 31605 - DNA, 343 bp, Glycine max
tggaaggtagtcatacctcacaaaatatatatatatatatatatatatatatatgtatatgtatatatataccctggaaatgcttggtttgtacatataaatattatacaaaagatatatatgtatgtttatgtacctatatacctcggatatgcatgtatataacaaatatatctcacaaaacatatatacatatgttgaggttgcatgattcctgggacacacatgtatatagcataatacctcacaaaaatatacgtatgtttatgtggaaaaataccttatgaaaaaatagagagcgagcaataaaataattagaagaaaaaaaaatatctaaagaaaa

SEQ ID NO: 31606 - DNA, 290 bp, Glycine max
  unsure (1)..(290): unsure at all n locations
taccgataatactctactctctcattntgtcatctagagacggcaagtacgatgacacgcagcgaccaacatggtcatctgcaccctttgtcggagaccttagtgtctttcgactgagactactttagtctcaccctcgtcatcccgagacgacaactttgatgacacacggagacacctcacggttatctgcgccctctacatcacgagacgacaagtccgatgacacgcggagacacctcacgctgatccgcaccatgcgcatccagagacgacaagtccgatgacac

SEQ ID NO: 31607 - DNA, 325 bp, Glycine max
ctctccacaaaaccctcttgttttactaggcttaacataaacagcattattgtaacaacatattaagaaaaccaaaaccccaacaatccatccatggtaatgtggttattcagtcctgcttatatcaagttctaaggcaatagtacatttcctaatgctaaagtcacctaactatacacacaaatgggtgattagaccaagagcatgcagaaattaagcattgaacacataaaacacaattaattagatattaacggtaattacatgaactgttccttataaatcccgaacaagagtgtttagccaaccattaaagaaaaaccct

SEQ ID NO: 31608 - DNA, 323 bp, Glycine max
  unsure (1)..(323): unsure at all n locations
agcttctcctcaagtcaacttggagctntccattgctccaccctctcagcctcatgaagatgctgcttccgtgaaaccctgaataatggttgaaaccacaagagcaacaagaagtgcatgttttgtcaacaacaaatgggaatgttaattagtgaatcaatgtgtgtgtgcctgtggtgcaatgtangaatgcaaattaacccaacttgttgctgcaaagctaagggtttcgtactgctactatagttactccacctattagtaacaatgatgtgtgtccatttttgtaaggccaagaatatgaatatttgatgtttacaact

SEQ ID NO: 31609 - DNA, 327 bp, Glycine max
ttattaaaaatgattataaaaaattaaaactgttaaattttaaaaaataaaattaatatcaattcattctctttttttatcttttacaactattcatattcatcttattaaaaaaattatatctatttttttatgggaaaaaaatatttattgaatatattcaagtaaaaaatttacttgatgagagcacttgcctccaggccattatcttttgtgtagacccccccactgacatgaataaaaaattaaattcagaaaacaacatattatttacttacatttcgcttgccgtttaatcgacctagacgcgagctcacatttacaatg

SEQ ID NO: 31610 - DNA, 357 bp, Glycine max
  unsure (1)..(357): unsure at all n locations
catgcaagctngcctaattaacctgatattgagagaaaatgattattaaaaacacanaatggaagtactaagtatttattagctatacttaatagaaaatacttataacactacaaaataaccataaattggaagagtttgatacaatttacacatgttttatacacaaaagttagtcgtattcaccgactaacaactcccccaaatttatagttntgcttgtcctcaagcaaaaagagaacaacttacttgtcctcaagtgacaataacatgcaatgactatgtacaaaggtgtatgcaacaaaagttactgatntatgagaatgaagcaaaatgccctcatcacttgtctttcac

SEQ ID NO: 31611 - DNA, 328 bp, Glycine max
tcttgagatgcctttcgattatgtcattagacgctttggtggaatctactatctcattagagacatcggtattaaaataatcaatgaatctagaggctagcacaacatacggaaactcataatccactaaccgatggctcttcaacatgatgtcttcaatcagaagtacccaattcatttgaatacttgatttaaaaccatacacaatctgtaaatcgtcatcaatcacttgtccgtggttgctagaccttggtgtgaaaatgtaggttatgaggtacatgagctttctgtctttagcagttaaaccacctatacctaggcaattcct

SEQ ID NO: 31612 - DNA, 262 bp, Glycine max
  unsure (1)..(262): unsure at all n locations
agctntgcggtggtcggtggcggcaaacaaggtactcagatggcatttgtgcgtcgcggacgtacggatggcttccggatcaagttgatccgtaagctttttacggatcaactagatccgtaagcttgctacggattaacttgatccgtaacttccggatcaagttgatctcgtacattcttccggatcaaattgatccgtatgttccggatcaacttgatacggatgtgtatagttgtgagattagctgtgtatacatctg

SEQ ID NO: 31613 - DNA, 327 bp, Glycine max
tccaaaagtgtatagtaaaaatatgaagacatgcttatttgcagtgcagtatttttcttggtttaatttttatattcacgggataataacaagacacatatagaatgtttaaaataattttctgaacgtaaactgagctatgcagctctacacggctgattctctacttgctccctcgtcgaagcttctgaggagtgaaacaatattttgacatagtaatatgaatatgacatggttactttccaaagaaactgggccaccaggtacaatggttcagagaatatcacaagatcctgctatgttcatacaaattcatttcaatcatta

SEQ ID NO: 31614 - DNA, 373 bp, Glycine max
  unsure (1)..(373): unsure at all n locations
agctgcattcctctcttcccttanacttctnttatttattgctatttatctnttgctctaaagaagtctatattgaattgtcttatgagtaattcatgttaagggtgcattgttaatccgaaaagagagactgaaagcttaattgaggaatagtctttgtatcttaattcgacccctttttttcttaatgtaactgaggtcatttgtccaacatcctatttttgacaactcgcttctctaagaagacaaacattccggcatgataaaatgaggccacatgaacgtctgtatatttactcganaacacaatcaatcaaatgccctttttctttatgaacccctttttggtatttgatcttatgagattttttac

SEQ ID NO: 31615 - DNA, 329 bp, Glycine max
tattgagaatgaattaccctgttattttgattatggggtctcttttgaattggattgcacctgattgccaggatcgtgagaaaagtggtggacgttgtggatctgattgcaatcagttcctctgcaactgcaaggataagtcatacttaaaaagttgtggtagtggtaataatacatttggaaatattgtgatcatacttttgttgtttgtttagcaggctgatagggatagtattgtaggaagctaagggtctgcaagaagtataaggcccaaacataaggaaacaacctcagcccaatatggttagttatgacccatgcattcatca

SEQ ID NO: 31616 - DNA, 379 bp, Glycine max
  unsure (1)..(379): unsure at all n locations
atttagccctancttagancttgaatcatctgaccggatcttaagcactgagctgcagctttagcggagagaatattacgtaccttgaatatacaccttcggacttaaaaacggaaggcccttatcttgctctagggcattagtgagtcgcctaaacctccctgtgctctaagtccctttccctgatgtaagtgtgtgttccaagataaaattttgccccttcaaatgagaaactaccctcttcctttaaagacactcttgaactggttgttcgctctctaagcttgtaagcgaggaggaaggctacactgctctctctgctgtgctcatcatgttactcaaagctctcttactcaagaatataccaaattggagtcct

SEQ ID NO: 31617 - DNA, 328 bp, Glycine max
gaacactaagctcagcataatgacaatggctttttaaacttttaacccttatggacttacacgtatagctgtggattccactttatcgcgcgcgcccaatataaatgccagatttggccaatcatatctcattatcttgttcagggcggacataagaggttgaattcatcctaggaatgcatatacaacctgaggtcgcatgactttgaggccatgtattatatgtcaacagattcaatgacattggaaataaacgagctatatagtacgacattaaatttgcggtgatgccgcaactagaaatattgacctatatgtgagcactcct

SEQ ID NO: 31618 - DNA, 438 bp, Glycine max
  unsure (1)..(438): unsure at all n locations
gcactcatctacagttatgcacaagctatcgggccagcgatctaatgcgcctaacacactccatgatagttacgatcgagggcacatattctcactaatgctaactcatatcgttactccactatgattaggaggataaaaacactagagcattcaaggaaccagacgccactagcttatattatctaaacaatgacccattacgacatcctaacccagntatctaacaaagacatgcagtctcctgctgcacacatatcttcccattgtttttctaacccttcatgaatcttaaacctaatctgttattaaccaccgactttataacagaatcctcccccacacttaacacacattactcatgtcgctataagagaaaacactattctcatcaatcacacgtttgaactaaaggcaagaaaaaaaccctttctgggg

SEQ ID NO: 31619 - DNA, 162 bp, Glycine max
gtgatactagcggcctcataaaatcttgttatgagggatagattgtccaaaccattatatatgaagatgacctggctgcttacgcaagtatatgggtgacagcgtatattggtgattttattataactgaatcctggtgtgttactactaacttatttcaat

SEQ ID NO: 31620 - DNA, 337 bp, Glycine max
  unsure (1)..(337): unsure at all n locations
tctctcatntgcagatgtccggtggacgagaacgagttcgggagtctgactntgaatattatgaacgtgaatattataaagacttgaagagtgattactataagctcaaaatctccaagtcatcgtataagtgtcccttttgccaggacaagcgggaatactcattgaatgagcttttgaagcatgcagtaagattngaaagggactcacggagcatgaagacaaaggaattagctaagcactctgctcttcaattgtacattaaaaagtatcttgatgaaaatgataggccaggaagtgttgtccatgataaagcaggaagcgttgtccttgatag

SEQ ID NO: 31621 - DNA, 333 bp, Glycine max
tcttcttcttcaccgaaacatgtgaagggcctaataacagaacaaaattctctgcctccatgaacaacatatctttcgcacttccttcggtggcgattcttcagcaacatttctcagggaagggcaataacggtgtttacaccacggacttcccagctgttcctctgagagcctttaactacacggggactccaccgaagaacaccattgtgaaaagaggaaccaaagtggtggtgataccctttaacacgaggatgcagttggtgtcgcaggacactagcattttaagtgcagagagtcatccgttacatcttcatggtgggtcaaggtttt

SEQ ID NO: 31622 - DNA, 380 bp, Glycine max
  unsure (1)..(380): unsure at all n locations
gtcacctgacgcatgcaagcttaactacctgaaggtacccgcatccatccagtgttccactgttctatgcttaaaccctttcatcagccacccctacctgataataatccacccctctcattgccaccagttgtaatcgataatcaaccattggtgtgacctttagccattgtggacactaggcataactcanactccggcaagcccagactgcaagtccttgtgcaatgggatggtttacttcccgaagataccacataggaagaatgggagcaactacaagctgagtaccaccttgaggacactccagctagcagaccgatcaatcacaagaccatatggngtagtagaagatgtccttgtcaaagtctgccacttca

SEQ ID NO: 31623 - DNA, 334 bp, Glycine max
tgagcacctttgtggttctgacaaatcattttggatctataaaaaagagccagaaaggtttgaagggttttctctatgaaatatcagcggaagacaagtacattcttggggtgaaactccatgacatatgtgacattttcctctgcttttagttcaactgaatcttctggtgaagacactgaagtattaagtatcttatgcgaaagatttacgtggtgtctttcttttttggttatgctgtggtcaggaatgtcaaaacaaagaagagttgatgtttttatggtttaataatctgtttaacttcacgcatatagttagggatcaagtatccaaa

SEQ ID NO: 31624 - DNA, 431 bp, Glycine max
  unsure (1)..(431): unsure at all n locations
cctcaatcatttccaaatatgcatgtgaattatgaagcatcaacaagaatcaagccaaggctattgtgcaagcaatcaatggggcaaaacacaccaaatgattatgatgatggatggctcanattctcacaaaggtaaactcatcactttcaaaactatcatgacatgtagagaagaatcaaggatttcaagtcaccanatgtcaagaacttttattntcaaaacaattacccatttcttgaacatatcctataattcaaagaaaaacatgcaaagtcgtacatgcacacaaaattaacccanaatattaaactaacaattcaacgaaactaacaacattaacaaattaataaaaccaacanaactagcanaaccaaagaacactcccncccatacttaaacaacacattgtcctcaatgtagcgcaatta

SEQ ID NO: 31625 - DNA, 334 bp, Glycine max
tctatgctcaagctttcctggaatatgattaatgctccttgggcaagtcttattagggacagattttttagaaatggcaagactatttcctaccatgttcgctcattcatttgaccaggggtgagaccctagttagactcgattaatcaaaattcttgctgaaacatggtgatcgatagggtccataaatttctggactcatgtctggcttgaccaagccatcattgatcttgctcaaattcctgaagatgttagtttattactgaaagccaaagtttcggattttattaaagatgatgaatggtgcatccccactaactttcagctttattac

SEQ ID NO: 31626 - DNA, 391 bp, Glycine max
  unsure (1)..(391): unsure at all n locations
acataagttgttactgatgatgagccctggagtatntatagaactaggaaattaaggtaattaagcagcctcataatcacctaaacacacagtctaaggccaatttacataatgcattaaattcccttacaacagaaaattaaagtttctaaaatttcccgcgaaaggtttccgataagcggngcatttgcgctaagcgcaatttctcctcaagttggaattgtgctaagtgagacatttgcgctaagcacaatntctactcaggttggaattatgcttagccagctggtgtcgctaagcgagttgttcaacaatcttcacaatgcttcaattcagctccttgtgaatttctccttccttgtctttgatgagtagtccattctttatcatc

SEQ ID NO: 31627 - DNA, 337 bp, Glycine max
ttggaagaaagtgatgaggtacaagccctaaaggcagagcttgaaagagcccaagtagtcaaagagaagttcaagtccatagccatcaaagtctgaaaagagtatgatgaactaagggacgtcaatatggccacagctgaagccttggaacgagaaaccaagaaggcccgaaaggaagaacacgaccaaagcaaagttttgaggggctttatagggcagcaatagtgagctcaagctccgaagaggtgaaaggaatcatcacgggtcaaaggcatgatcttgaaggacgagctaaaggcttgccttaggtcgaaaagaaatttgtaccaacagttaa

SEQ ID NO: 31628 - DNA, 398 bp, Glycine max
  unsure (1)..(398): unsure at all n locations
gtcacctgcggcatgccaagctttctttgtgggttgatgggttctgtcgcgtataatggcatgatcactggctaacatattctcaattagctcagttgcttcttccggngtcttcagctnntattttccccttgaagaagaatctagcagttgcttggtttgtggtctcagcccaactatgaacatattcaattgaattggctcggaaaactcatgggtaggagttcttctcaatanacctctgaacctctccaatgctntactcagagattcattanggaactgatgaaatgaagagattgtagctntcctttctgcagtcttagactctgggaagtatttctttagaaacttttcaacaacttcttcccaggtttttagaatgttacccttaaatg

SEQ ID NO: 31629 - DNA, 342 bp, Glycine max
tatgttgcaaacatctacaatagacctcctctacctcagcagcaaaatcagccacaacagaacaattatgacctctccagcaacaggtacaatcccgggtggaggaatcatcccaaccttagatggtcaaatccttcacaacagcagcaacaacaacaacaaccttattttcaaaatgttgctggcccaagcagaccatacgttcctccaccaatccagcaacaacaacaacaacaacaaccccagaaacaacaaacagttgaggctcctccacaaccttcccttgaagaacttgtgaggcaaatgactatgcaaaacatgcagtttcaaaaagataccata

SEQ ID NO: 31630 - DNA, 399 bp, Glycine max
  unsure (1)..(399): unsure at all n locations
agcttgaacagatgtanaatttatcatatgaaactcacagcttcaagtgagattatacaaacttttgaagtctctgtcagctngaagtttcaaggactttaacacgtacctgctagttgtatttggctgtagtgttttaatacaggttctaatacatggtttacacatatacatgtatatataacaagtagtaacaatgtgctttacctggacttgatataatgaaacaacttgcacaagaacaccaatggacaaaccaacttcaactacaacaaagtaattcagcttcacctggagttcatataatgagtaatggcattagaagaactcanagtcaaaccaagttcaagtacaacaaactaattcaactttntctcaccaaactatgtaaactacttg

SEQ ID NO: 31631 - DNA, 323 bp, Glycine max
tgtaatcgactacacatatacttttatcgattaccaaaacacattttcagaaaatattctcaacagtcacatctttctatgggggacttgaatggctatcaaaggcctatatatatgtgacttgagacacgaatttgcgaagagtttttcagaacaaaaaggtcttatcctcttaaaaagcaaaatcgttttatcctcttacaaattccttggccaaattacttgtgattcaataaggaattatttgagtgctcaaattgttcaatctatctctttcaagagagattgcttcttctcttcttcttcattctgaaaagggatta

SEQ ID NO: 31632 - DNA, 85 bp, Glycine max
cttgctcgtcttgctgttattatcatgcacacttttctgatgatgaccgaggaacactctaggatctacttgtaacttatgtgct

SEQ ID NO: 31633 - DNA, 321 bp, Glycine max
tgggcattatcaaaatgaatgttcaacttgttaagattgagccaattatgctgaattcaatgagaaagaaaatgtgttgcttatggcacaagaatgctcgaaagaaaaggtgtatgatgagtcaaatgtggaaatgtggtttcttgactctgggtgcagtaaccatatggttggaagaaaagattggttattcaattttgatgatagtttcagagattttgtaaaattgggtgataactccaagatgcctgtcatgggaaagggaaatctgaagctgtatattggtggattagttcaggtggtaactgaggtttactacct

SEQ ID NO: 31634 - DNA, 363 bp, Glycine max
  unsure (1)..(363): unsure at all n locations
acattctgtgtntatcctattatagaaggtgtattatnntattatttttttggtaaaaacaactaggaatattaaagatttaatgtgaagaagacttttaaataggctaccacgcctggctaggcttttaaaaaggccaggccgagccaaagtaaaagtctttgataggctataggtcagactcaagcctcaaaaattaatcgtaggctaggctcaagccttttaaagcctggcctggcctgacctattcccacccctaattgttagctntaaacaaatcaataagaattgttggaagattgcacactaactaaatatgtgatcatcttacagacaaatatatctcaacacttttagtctttt

SEQ ID NO: 31635 - DNA, 329 bp, Glycine max
tttctctctcttctcttttctctcttccctttttctctcttctctctctagcacacaccgccggaagttgtttaccggcgcagtggctggccggccatgggtggcggcgccgccgcgtcggaaacagagtctcctccttttttaaaaaaactacatgttttgaattccttttttctcctagttctcaaatccaccgttattttttgaaaaccaacactgataaagcctagatctagccttgaatcttagaaaaaaaggtgaactacctttgtccttatgttatcgtttaagcttcagagtgaaaacggttacagcttgggttgtgggtg

SEQ ID NO: 31636 - DNA, 432 bp, Glycine max
  unsure (1)..(432): unsure at all n locations
atcctctgagtcacctgccgcatgcaagcttgcctctggctcgcctgagcctccaaatagcttaggggtgaagtaaccagctcgcctgngcgagcaaggttacttcangttgaagcaacggctcgcctgtgcgagctccagctcacctgngaaaataagtaaatattgaagtcatgtttttacatactcgataaaaggctgtcgttccttgtgacggatgcatggaatgctaataccttccccgtgcgtaaacaactcccgaacctttttctttgaaattcgcattcatcatacctcctgcgtaaacattccctactgcatatgtcatacctcctctatgataggatgttgaagcattgaacataccatatttcatttctagcaaacatggggtcgaaccaagtgccctcttttaaaaaaatgttctatcat

SEQ ID NO: 31637 - DNA, 296 bp, Glycine max
tctcgatatattatgcgcctgaatcagactttcgtttcaaaagttatgaccatatgaatttctccactgtattccgtgtgacaagttatgaccatttgaatttctcgggagcattctatggtcaatttcgagcgccttggtatattatgcccctagagccgacttgcgtgtgcaccagtcatgaccatgttgaattgggctagagcaggcggcgttagagagctagcgcttcgataaagtgagcggcagaatcacacgtcagtgggacgagctatgacgataagaatatggctaga

SEQ ID NO: 31638 - DNA, 323 bp, Glycine max
  unsure (1)..(323): unsure at all n locations
agcttctcgatatattatgctcctgaatcggacattcgtgtganaagttatgaccattggaatntctcgagagctttcgatgttctatttcgagcgtctcgatatattatacacctgaatcggacttccgtgtgacatgttatgaccattttagtttctcgtgagcttctgttcttcaatttaaggcttctcgatatattatgtggctgaatcggacttccgttgtaaagttggaccatctgaatgtctgagagcttcggtgtcattttgagcgtctcgtatattatgccctgatcggactcttgtgacagtatgacattgaa

SEQ ID NO: 31639 - DNA, 330 bp, Glycine max
tcttagtttcagatgacgtagattggtttatggctacctcatgcactcctctaatgactatggcatcatttctggcgctaaactgctgggagttggaagccatcttctcaattaaatttctggcttcaacaggagtcatgtctccaagggctccatcactggcagcatctatcatacttctctccatattactgagtccttcataaaaatattggacaagaagttgttctgaaatctgatggtgggggcaactgggacatagtttcttaaatctttgccaatactcatacaggctctcttcactgagttgtctaatacctgagatatcct

SEQ ID NO: 31640 - DNA, 292 bp, Glycine max
  unsure (1)..(292): unsure at all n locations
cgctgctctagtgctggatctaaatgaagatcagcctcaacatgagcacgatgtttaaatactgtctcgtgtaatttctgcanatcatgaacaatctacttattacgtttttagtttgctctatgcttccgtcatttagattctagttattatagtgctgattgcttgtacaacacacttgcttcaatagtgaaacggttgaattttatattcagaggtgtgttttgtttgaaatgaatgagaattgtgtgaatngagtggattgcaatgatagactctgtttgatcaatct

SEQ ID NO: 31641 - DNA, 313 bp, Glycine max
gcttaagttgcttggactttaacttgttttggttttaacaaagcatcttgtgatgaatgctccaataaactcttctggatatgaatctgaactctttcatgcaagattatgtggacactagcagccatatattgaattaagtccatggcttcttcaggtatcttcaacttaattgatcctattgcataagcgtcgagtaactgctttgactgtggccgtaacccatcaatgaagatgttcagatgcatatgctctgaaaaaccatgagtgggatttttccgcaacaagctacagaatctttctaatgcctcac

SEQ ID NO: 31642 - DNA, 467 bp, Glycine max
  unsure (1)..(467): unsure at all n locations
agcttgtctcaatagaacttattaatgtctcgtcttgagataactgagaaacacaatgatgtgtattgctagggactaccttgaacctgaacgccagcctttntcctaatacatgatcaagagttgtaagtatatctcttggatcaaaaactccttcctatgtaattgtaaatatgacaccattaacatagcactacaattatgtgtaccaaaggaatattctcacattatggtagatataatatgccttacctcatcaataattctctatctaatatcaattgcagtctcatttatcaaagcataacattcccaatcccaaagtataaaaatggcagattcacgtggctgagtcactctgacatctacacgaaacctatgacanaatttcttttattaacaactatacacagtgatgataacactcattctatgaaattattatctagacataatacacgttcaac

SEQ ID NO: 31643 - DNA, 319 bp, Glycine max
tttcgtgcaatatgtgttcctaatgttataccttttattggatttatataggatatacccgatgttgaaggagataaagaacatggcatcaattctttatcagtacgcctaggtcagaaacgggtatgtattccaaatccaacatatcaacataattggttgtgccctatagaatatccttagttgatcttaactaattcttatcaggtattttggatatgcgttttccttttagaaatggcttttggtgttggcctcttggcaggagcatcatcttattaccttcatactaaaagtgtcacagaagtatatatgttta

SEQ ID NO: 31644 - DNA, 365 bp, Glycine max
  unsure (1)..(365): unsure at all n locations
atctcttagtcacctgcggcatgcaagctngcaccagaacagcagccttgtagacaaacattccgaacatggctggcacaagctagggtgaacaagagacatatataaatgaatgaccaatgtatttaaggaaagttgaatagtaaggccatgattggataaacttctctccatgcgtacatatgggagaagaaattatgaagataaaatgaattgagtttctcctgtaagcctaagttaatatacatactttgactnttagagaanttaaatgagattgcttntatagaagtaaagtgcatgagtttgatttaactcataggagaagcttaatttaatttatcttcttatttcttcttctataa

SEQ ID NO: 31645 - DNA, 332 bp, Glycine max
ttcatacagctcttacctgataccaaatggaatttgcaagcactaataaaacaagtagaatgacttgccatgcaacttgggacattagcacaatgatactcaataactggataagtgcaaacactagtccagctaatctgtatggtatgtttgtgtcgtccaactaatctgtatggtatgtctgtgtctacagtactttgatccgttgatgactgtaatcatgaacaagagaatggttgaaatttgattaaagctgataataatcaaaagatagcaataatctatcaaataaagaaataatagtgaaactgaccctactcataattcggctt

SEQ ID NO: 31646 - DNA, 382 bp, Glycine max
  unsure (1)..(382): unsure at all n locations
tgagtcacctgccgcatgcaagctnttgctcatgagccanagatnggtttagctcttctttgtactgccttattatagctagcatgctctgctccgtggcttctaagtgctgggccaaactcctcttggatcttgagcaagcagctaactcctcttttaagaccatgctatgtacttgtgattggtctctctcttcccttcgaagcttgagctcattgttgttgccctacaaagctccacagaatttgttccggccatgctcttccttgcgagccctcttagtttctcgttcaagggctcttgcggtagctgcattttcttctcgtaactcggcacactctntccgaatgtgtgtagtgactaactagaatttatctttggc

SEQ ID NO: 31647 - DNA, 339 bp, Glycine max
tagcttcaccttttggtactcctcatagttgttgcatgagaaaacatgctctattttcatctcccactccaagtaggcctccggatcattctttcctttaaagggaggaatgtttagtttaataccatcaattcggttttgtctaggaacaccatcattccttcttctcctcctttcttcttcattatgatctttgttctccatttgatccaacctctcatggagcgcatcatctcgttgtttcattaacctctccaaatgttgcatcaaagcttgcatttggaattgtgaaagtccccctccatcattaggatttgttcctgccatctcaaacaaaca

SEQ ID NO: 31648 - DNA, 413 bp, Glycine max
  unsure (1)..(413): unsure at all n locations
agtcacctgccgcatgcaagctntcacggantttgttcctatagttaaagtccatagtcaatttcatttgtcccttccgagtagaagatgcttgggcccttgcatgatgactgactttgaaatnntctgttttccaaaatctttttaatctaagatgttaactatattggtaaacatttttcatgtgatgctggtggttaattaaatttccatgcattttaattcgctaacaaatatattactatcttaattattaaacatataaaggtatctggcgtgctttgcaactctgaaacatgcgtacttctgagtcatacccgttataaatactnttcggtgtaggtatacattagataagcctagctacttaatttttttcctcaaaaagtagttaaacaacttggatatgactc

SEQ ID NO: 31649 - DNA, 335 bp, Glycine max
tcatccaatgagagttggaggatggcgataatatgtgtgggtttgtaatggaagaagtagaaaagggctgactcgtgtcaaaattggccattttttgaaggtcatccagtttagcagacataatgttctaagtagtggtgaaggtaagttggttggaagtgacttttgcaattgcatcctcaagatggtccatgttggacttagaacatgtggaatcagccatagagctcaatgaaagcaccaagatgttaggctcatagaagcaaatccttaaaatttgaggctaaggaaacctccaaaaaataaggtgagaaaagaggaatggttttctttat

SEQ ID NO: 31650 - DNA, 395 bp, Glycine max
  unsure (1)..(395): unsure at all n locations
agcttgagatgaggaagtgttgaagggtgaaactttctgcttttattgttgaccacagagtggtacctggagatatgtcgcggnggtcaggagaccttgnggacgtcaggtggtgtgctattgcccanaaccaagcttgaccaatcccgacccaacccgggcatagtcggtcagtgagaacctgtgatgtacctaagcaggcgagctcctggcagtcaacagataaaagggaaacaagaccacaaagcaaggaggcttggtggtggctggccagctgtgaatttgtgtaatatgtgagatatggcctctggtaatcgantaccaagggtgggtaatcgattacaaggcttanaaatgaagacaggaggctaagatggtctctggtaatcgattac

SEQ ID NO: 31651 - DNA, 337 bp, Glycine max
tctatagaaggttcgttcctaatttctctacagttgcatcacctctcaatgacctagtgaagaagaatatggcatttacctggggtgaaaaacaagagcaagcctttgctttgctcaaagaaaagcttactaaggcacctgttctagcttttcctgacttttctaaaacttttgagctagaatgtgatgcctctgaagtgggagttggagctgtattgttacaaggtgggcaccctatttcttattttagtgaaaaacttcatagtgccacccttaactaccccacctatgataaagagctttatgccttaataagagccctccaaacttgggaact

SEQ ID NO: 31652 - DNA, 161 bp, Glycine max
cctataattggcttgagataatacgccccgcctgctgctctctaataagtagtatacataagcattctcgctctggaagcctccactacgacatggactagaacacactgtctctgtcctttcgcttggtatagatttgccttgtggaaggcgcgaggatt

SEQ ID NO: 31653 - DNA, 296 bp, Glycine max
  unsure (1)..(296): unsure at all n locations
atctttcttatatgcaatagcantttccccanattgtgaaccttataactagtattatatctgtataaaactcctttaagataagaaaatgtataacatgaaaaaacctagttaattagtttaagcatcttcagtaggagctggttatggagttcttaaacttaagaatcaattcttatgcagttttacttttaccattcaagcaatcgacgtggcaattcttatataagaaattaagaattgtgtgttgcttatttaagcaacgttcttaacagagtgtttaagaatcgagataa

SEQ ID NO: 31654 - DNA, 328 bp, Glycine max
tatgcatgcagagccaccaatgtttttggaatgactgcatttgccattaaacagatattcagaaagacagaatgtttaaatcagattcatgtacatcgacaaatgcatagttaatatgccatatataaataggcttaagaaagtgtatacaaacacagaacataagatgcaactaactagcacataacaattggaacattatacaactaagtaaactttgctactaaaaggggcatctcattctcactagtcacggataattataaatcttccaacaacatttttctgctggtcatcctaataactaaatggcaaaacttaattgaag

SEQ ID NO: 31655 - DNA, 492 bp, Glycine max
  unsure (1)..(492): unsure at all n locations
atccttacagtcacctgcggcatgcaagctngtcaaacctgatataagtntcanaacaaatatcaagcatagatggatgaggacttcaaggaattaggtgtcatcaattanccattcaacgcagatatctntctaattaacttctgacctcaatatagaaattgatttgtaagtntgcacaggtttcttgcaaaatggcataaagaacttggacgattaatcaaaattagaagagggtaaataaaatatgtctagaaaattacagaacgattaaaaatttgaatattctttgttaacaaaaatgaagaaaaaagattcacggatggttgtaaatatatctatctattcagaataatttaacacccagaaaagatcaagacaccaagaagcttattctatataatttcaagaatggatggacaaacataaatatttcattccctttctagattcttatggtaataaaatgtatattatttacaataagttaaa

SEQ ID NO: 31656 - DNA, 326 bp, Glycine max
ttgcatgccaccggacttgattgtctctggatggccttatgggggactaaagtactctcggccgatagacactgaatctttgacaaggggtgcagatgaccatatttgtttccgtgcgtcaatgggctcgcttaccttgagttagtggaggggagactaaatagtctcagtcgatagacattgagttttcgacaaagggagcaaatgaccatattggtctctacgcgtcatcggacttgctgtctctggatgaggaagggagactaaagtagtctcggtcgatagacatctagtcttcgacaaagggagcagatgaccatgttggg

SEQ ID NO: 31657 - DNA, 183 bp, Glycine max
gtcccgatatattacccgattcaatcgaacatccgagtaaaaaggtattgtcgctcgactttcctacgagctttcgttctcaatctgcagggtctcgatatattacatgactcaaccgcacattcgtggataaagttattgttcaatcaatattcccagagcttcagatctaaatctggagcg

SEQ ID NO: 31658 - DNA, 329 bp, Glycine max
tccattttcaatttggagcgtctttatgtattactggactcaatcagacatactttgataatgttattgccatttgaatttgttactagactgcccgttccaatttggagcaattatatatatttcgggacacaacctgacttcctgggaaaaaaacattgctctttgcaatttgctcagagctcctgttctacttatagcgcgtcgaattatattacgggactctatcggacatccaaatgaaaggctaatgtcatctgaaccttatgatagctcgcttttgaaatctgcagcgtttcgggttataacaggacaactggcgcacttta

SEQ ID NO: 31659 - DNA, 214 bp, Glycine max
  unsure (1)..(214): unsure at all n locations
agctngttntcttttcctgcgctgcgcaactgccatttttgttcgctttnttctgtntntgtggttntcgtgcggcattgtctcgggttcgttggtttgttgtgaacggttaggtgcggtgaaggtgaaagtgtgttgcggtggtcggcggcgacaaacgaggtaggtagaaggtggttgcgttgtcgcggacgtacgaatcaactngatccgt

SEQ ID NO: 31660 - DNA, 329 bp, Glycine max
tcaagcacaacacactttggtgcttgtccaataactacaacgaccaatataatgatatcaaggtcactttaacgctctaaatgttttttttgatgatgaaatttttttatcttctatcttaattttctatcagcataaaggaagatggattctgatactggcctttaaataaattccccaattatacctcaccagccctagtgcatcacatggtcctcatgtacgcttatttttcactttcacgggctaagtacatgttcctccacatgacaaattctgtgtaaataagaatgacttatataaatgttaaccattaaaagagacaatat

SEQ ID NO: 31661 - DNA, 382 bp, Glycine max
  unsure (1)..(382): unsure at all n locations
agctcgcactactctctgttgtngaagctngatggtacgctaagcctcacatcttatgctaagtgcatattgcanaaatattttgtgttgcagaaagtgctaagcacagcctgccgcgctaagccccagatgcttatgggatttacaacttcaagttgggcttagcacaaggttaggctaagcgctcagggtttaaacttaaacgtcacgttggctcgctaagcgcagttgtgcgctaagcgcgccatacgaatttcagttnttaaaaatcaaaggcagaggcactttgggtgttacctttgcacccaaacctttgcaccttcctaaccttgagcacttgtgtattttctgctggcgttggactggttctctacatcttcat

SEQ ID NO: 31662 - DNA, 305 bp, Glycine max
tcttagtcttagctgacgaacatgaattcgtggctacttcatgcattcctctaatgacaatagcatcatttctggcactaaattgcttggagtttgaagccatcttctcaatcaaatttctggcttcagcagcggtcatgtctccacgggctccaccactagcaccatctatcatacttctcttcatgttactaagtccttcattaaaatattggagaagaagctgctcaaaaatctggcggtgaaggccactggcacataattttttaaatctctcccagtattcgtataggctctactccatt

SEQ ID NO: 31663 - DNA, 265 bp, Glycine max
  unsure (1)..(265): unsure at all n locations
cttcaacttagtatccacgtaacatataacacctgcatcaccatcaccaacatattttattgtctttattaattgagtaaacacgtcctcttgggcctgacgaagatccagcaactcctgccaccgttntcgcaacaacacgcgagtgaccactccgggcaacaagtttagtacgccgaatctgctgagctccgacattaaacaacgttggacgtcgtctatgtcttcgattatcgtcttctgaacttcttcaccgagacacatg

SEQ ID NO: 31664 - DNA, 338 bp, Glycine max
  unsure (1)..(338): unsure at all n locations
acactaanaaactcagctgtgaaaagagcaatggttaaaacttatgtcatgcttcaagaatatatggattgggggaacaaaactggtagcacaatcatgggtgacgggtggacatataaaaaaaagaccctcaatttataattcttcggtgaacaatccaaaagggacactatatctttattcattggatacctcggagatctcaaaaatggatgacaaaacgatgaagatgtcggatgatgttctgaattttggtgaataggagaatgtaggccacgtgataactgataatgctgcaacttacaaaccatttggagaattgctgatgtacaaatgaa

SEQ ID NO: 31665 - DNA, 485 bp, Glycine max
  unsure (1)..(485): unsure at all n locations
agctgtatgatatacaacanaagaaccatgacaattgaggaatcaatacatgttactttngatgaaactaatattacctatccgagaaaggaatttcttgatgatattacagattctttagaagatacacacaatcaagaaagaaatctaaaaaggaagagagatgaagaanacaaggatgttcataatgacacagcccaagaaaatgataatcttcccaaagaaagcctaattgaatctagtaacattaaaaaggatanagtttttttttattagtaaaggttcactaataattaattcaaccccccccnccccttcttaattattctgaggccacttgatccaacataataaaacagtagagcatgtgaaacatataagacttaaagctgaatttatataaataacatcacttcagaagatcacacacattatttacacccattcgagttcacacactccagagaataatattaaaccacaat

SEQ ID NO: 31666 - DNA, 326 bp, Glycine max
ttgcggatctggtctttgccagtgaaaggatcgatgtgggtctgaaaaaaggcaaatttagtcatcctgcttggacgaatgagaaaactggggcaaatgaagagggtgaggatgaagtagaagcccatgctgtgactgccattccaatacagccaagtttcccaccaacccaacaatgtcattactcagccaataacaaaccttctccttacccaccgcccagttatccacaaaggccatccctaaaatcaaccacaaagtctgtctaccgcacttccaatgacgaacatcacctttagcacaatccaaaaacgccaaccaagaaa

SEQ ID NO: 31667 - DNA, 351 bp, Glycine max
  unsure (1)..(351): unsure at all n locations
agtcatcaagagattataaatatgtgaccatgacatgagtttcaattaattatcatcgtcaatcatctntgaatcatctatctttntcaacatcatctctcanacatctttcaatcaatctttcaatatctttctatagaattttctgattcatttctcttcatctttctaaaagttttttatcaacactntcttttccaagaaaagttctttgttcaaaaacttgtgctattcatctttttcattctcttctccctttgccaaaagaacgaaggactaaccgcctaaattcttttgtgtctctcttttcccttacaaaagattcaaaggactaaacgcctgagaattctt

SEQ ID NO: 31668 - DNA, 335 bp, Glycine max
tgtatctttgcctactttgatacaactttatttgccacccttttattcttaccattaaacatccctataagtttacaagatcattggtgattgctaaaatagcaatgccaatttaatgataacacggtcaaatggatacattaatgtttttctaaagcaatataggtttgcaagaagcagatgcaaatcatgggaagaatatgtaatttgtaaccctcaggtcaaaacagaaaaaaaatatagagttgcattaatgtatttctaaagcaatataggcttgcacttatgatatgagtacccggccaatgtggggtgtttggaagcaaaatatcact

SEQ ID NO: 31669 - DNA, 435 bp, Glycine max
  unsure (1)..(435): unsure at all n locations
gtcacctgccgcatgcaagcttccatcatgtatatacatatattgcctaattgttgtctctattttcatatgctntcaaatatgctactgttcacgttaaaaaaaaaccagaccaatgaaaaaaaataatgaagttgaataaatgaggtcttggtttgaagacttggattggtttgaggacttggttgattttgttttgggtttactttctatgcttaatttttaattntggttttggggtttactactttctcttagttcccacttattccccattgctcctctattcctttgggttttagctacttatcccatactttcctctaccttgtccttggccccattacaaccttaaaagaccttntgatcctcatatgcatgtgtgtgtggtatggttgtcaattntagagtcttgccaagtctatgtggtatttg

SEQ ID NO: 31670 - DNA, 334 bp, Glycine max
tatgctgcaaacatttataatagaccccctcagcagcaaatccaacaacagtagaataattatgatctttcaagcaacagatacaatccaggttggagaaatcatctaaatctgagatgggcaagtcccccacaacaacaacagcctgtccctcctttccagaatgctgctagtccaagcaagccatatgttcctcctccaatacagcagcagcaatagcagtagtcacaacaaagacaacaagcaactgaggctcctcctcaaccttccttataagagttagtgaggcaaatgaccatccagaatatgcaattttagcaagagacaagagcct

SEQ ID NO: 31671 - DNA, 341 bp, Glycine max
  unsure (1)..(341): unsure at all n locations
atttanaaaaaggacacattatccgcaagtntaattaacaggtcggtcttggagctgggaccatatatctagtcctaatttatatatacnttatttttaattgacatatattagccagttataacaaaaaanaattatatataaaatataatttttatcaattcgtcagttatattaccaaaactaatttaacagctaaatgaatattatatgtgattatggcgcatgattcctcggctattttaagatgttccgtagatactccctatatcatgagcacaatcggccatacctatgatatataaattccaaagggttttaatcaaaaaaatgataatttc

SEQ ID NO: 31672 - DNA, 335 bp, Glycine max
tggagtcaatttcattttgaatgtgttgatctgtgatattaaattgtttatttatcagttctttgcactttaaagattttaactttccaacctcaataggtgaaatgaatacatgaaatgatacaatacatttattgtcaactatgcaatgctttacactgaataaaatatttgaattttataaaagatatgcaaggtagagcgctgatttttttgtaactttaataggtatgtgtttattgtctataaaatatatttacactatttttatattgttattataacaataaatttattatacaaaatcaaaatgaatgttacaaataaaaaataaa

SEQ ID NO: 31673 - DNA, 380 bp, Glycine max
  unsure (1)..(380): unsure at all n locations
ttatgtatntatcacaatgtgcatatgagatgattgtgtctaactntntccataacatataggcctgatgttttattttagaagtttataatctgatcttcagaatttgaaattttttctttacattcttatcaaaggaacgtcgttttaatcaagtagagtacaattataaacatataaattacaaaaattaaatataacantttatggtttatgatgatgagtgagatgtggtaatgggagagcaataaggaaagcattttggatccacacaacaggacatgaagcttcttgcaagttttcaaataatcccttcacgatcggttttgggatcttgcannatttcttgtctcanaatcccaaacttcacgagttgacat

SEQ ID NO: 31674 - DNA, 316 bp, Glycine max
tgtagggaaacccgctgagttctttgttagctccgaacctctaggaggaggccaagaaactactgtgtaaaattttctttttttccttgttagggttcttgatttgtgaatctcacttaaattttgagcttaatatgtggcatgcattgtgaatcacatttttaatctttatcagctaagttgagttgtttatgtatgttgtagggcctttcaaggagaaacgaagcaatgagcttaaattctaatagctcaaaatcacatataattttcacatttgtcattgagtctttgtgtaaggtactgtcaaatttttgta

SEQ ID NO: 31675 - DNA, 355 bp, Glycine max
  unsure (1)..(355): unsure at all n locations
gattacattctcccnctttctcaagcatattcttaattcttcttgacatcatcaaaatcttcatgatttacaaatatatgagtataaataataacaattataagaaattgaattggttntgaagtaaacaattaccgtttcccagttatccttgaaacctcctaggattattcttgagatccaatacattacatagaacccgcactccctcatgttggatcaagnggnctcaaaataantaaaaagaggggttgaattaattatgaacgtgtcttgactaattaaaaaatttatccttcttaatgttactagatacaattaggctctactattaagttatgagaaagtaaagaac

SEQ ID NO: 31676 - DNA, 337 bp, Glycine max
  unsure (1)..(337): unsure at all n locations
ttggacaagctaaacatgcaaactagaaactaaaatcaaaaactaaaaactgaaacataaatataaacctaaattataaaatgtactaaaagcaaaataataataaaagtgttcaaaagataggaaaatagaagtcctgtcatgggtcctatggtgggtcctgtggtgcagaaggggaaaaatccatggttgtgacatcatcctcatcctcagagagctccagcacaggcgtgcctactggtgatgcctgtggggaagtcaactccagcacaggtgtggtcactggtgatggttgtggagtcgtgtcnggagtagccttcacaacgtcctcctgagt

SEQ ID NO: 31677 - DNA, 314 bp, Glycine max
  unsure (1)..(314): unsure at all n locations
ctatcattcaatcgaaagaacttgtgtctaagaagtctaanacctcaaatgaagctacctttgtttatgtcaggtgttgttgttgctcctactatcgtccaaccaccaccacctgccattgaaccacccctcttatcctttattcttgcctctattgaacccacacctctaccactatcttcaccaccacctatgtagcctcctccaccacctcaagtttaatagtgaccatgatgtcctatcatcatttctttctttgaacccttagcctttctgttataacaaaagaggagagaacggtaaaaaattgatct

SEQ ID NO: 31678 - DNA, 327 bp, Glycine max
tatacaatattgacttgaacctgtgaatttttcttgttaatttattataatgtttttatggattttgtgaagttttttccaaaaaaaaatctacaaattttgttacatttgaaaaaataggattatttccttaaatttgttgaaaaattcatggcttaattgcacttgttgcccacaaagtatatataaattttcagcttgcttaagtgcatggcatgtcacacctaagtgagcttaattatatgataaatattctaaatttctctggctcaacaattgtgtttaagcaagacaagttagtgtcttcttcaatagattttgtcttgg

SEQ ID NO: 31679 - DNA, 368 bp, Glycine max
  unsure (1)..(368): unsure at all n locations
agctagaatgggacctcggtgtngaaagttatgactcattgaatttctcgagagcttccgttattcaatttcgtacgtctctatatgtgatgctactgaatcggacatctgtgtgaaaagttatgaccatttgaatttctcgagagcttctgttgttcaatttcgagcgtctcgacatattatgctcccgaatcgggcatccgtatgaaaaattaagacccattgaatttctcgagcgcttccgatgtttaatatcgagcatctcgatatattataagcctgaatcggacctcagtgtgagaagttatgaccatttgaatttctcgagagcttccgctgttcaatttcgagcgtgtcgacatattatg

SEQ ID NO: 31680 - DNA, 324 bp, Glycine max
tatactatatcgagacgctcgaatttaaacatccgaatctcttgagaaattcaaatggtcgtaactttttacaccgatgtccgattcgggcgcataatatgtcgagaagctgcaaattaaacaacgaaagctcttgagaaattcaaatggtcataagttttgacacggatgtactatttaggcaaatcacatatcgagacgctcaaaattgaacaacggcagctcctgagaaattcaaatgctgataacatttaacgacccttaaaatggccgatgcaggcttatactataccgattctctcgaaatagcacgacacaagatcc

SEQ ID NO: 31681 - DNA, 416 bp, Glycine max
  unsure (1)..(416): unsure at all n locations
gatcttaagtcacctgcggcatgcaagctntcacatgctnggaattatanataagtggaatattaagcttatataagagatnttttagtagtgggacaataactatgtgtaaggcaaaaattctgtntatcaccaaaactcatctccatagtaaacataattagngacagggtatcaattaaaattagctactagtttagtagatgtgagtgggctaaaaacatattgaagttggaattaataaattattatagtttccttttcttaaactgtttgactgcttaagtatgaaatattgtgtatctctaaaacatagaatgttacactattgcaataccagcaatataatcctttcaatggaacaaatctaaaatatatagtatacacaataacttatatactgactgagtcttaat

SEQ ID NO: 31682 - DNA, 402 bp, Glycine max
atgacccgtcgacaccttgagatccttagagtactatagattactcgcgcttgactttgggaggtgagtatacttttaaattctcttgagatgttaagcaattcactgaataaagataattttcacgtccgcaacgattgttttgtggttatgtagaaccaccgacgtatagatatctttgagctttatatatgtaggcactagcaccgtgctttacacttgtataaaatatttggattttgttgaagagtttgctgggtgatagtcgcggctttttttggagactcgaagcgttggggttaattgcttatagctcatatttacattatttttatactgttgtcattgcgactatgcgataggtcctgtcaaaattgaatgttacacctaacaattccatcg

SEQ ID NO: 31683 - DNA, 461 bp, Glycine max
  unsure (1)..(461): unsure at all n locations
gcttcttgagcgatcacgtgtcccttctgaagtattcctcgcatcctaatttaagccagataacttcctagcttntatttattntaatgatgttttgttgggtgtagtatgccacaaatttgactggaggttcatttgatgaagctcgaatgcttcaaaatgtagaagcatgtgaatggttgaccagtgccttgcatggtcttggttttgcctaatctagatcctagttatgcaaacatgagagctntatgttcctttctttacttttctcttanaaatcatctggtaaaataaaccgatcatgaattggccatttataaaacanaattatcaatgagacatagagtgcttgtngtatttaatttagaaaaatatttaatggaaatcttttaaggtgatagatatgatttttcattcattagtttcngtcattttggatggttggagagaattgtgagtac

SEQ ID NO: 31684 - DNA, 222 bp, Glycine max
aaagacttgggttggggctgggaagggcattaatctaattttcttgtattgcaagctttgttgtagattgagggtataagacaaaagcttgaacctattttctgagaaaagctaatgtaccctttttgcaaggatgtgcaaaaattgctgtaggttaatgttatagtgctattgattgaactaactgacttttttttgttattgggattgcaggtttggggt

SEQ ID NO: 31685 - DNA, 114 bp, Glycine max
  unsure (1)..(114): unsure at all n locations
tctcacagtcanctgaggcatgcangcttgaccaatcncgacctcaacccgggcatagtcatgtcagtgagaacctgtgatgtacctatacaggcgagctcctggcagtcaaca

SEQ ID NO: 31686 - DNA, 332 bp, Glycine max
tgacaggttataaaaaaccacacaatctatgtttgacaaagtaaaacaacttaatagtaagtaaatgcacagaatccaggacaccgattagaaccagtgactgctttttctttttttttttttatttcaaaacttggtgaatctttctatacagaacagagatcctttccaacaattttatccaatcattctctgttgtttcttatattattttcccctcatacatgaatctgttttaaaaatgcatcaacgaaattaaacatttctaaagtttatcacaagcaaacccaactacttatcaaggacaagtgtcttgcgttgcatcttctgtg

SEQ ID NO: 31687 - DNA, 383 bp, Glycine max
  unsure (1)..(383): unsure at all n locations
agcttaacatagacagaagtagttgatggatggttattcctcagacagagacagaggtagctgagggatgatgaatntccggatttccttggaggaggcagagccatacgaccggaatcgccaaacttgtgatttatccttcattattgctttcagttattntgtttgtttccattgtgatctgacattatctgcttccaattnttatgtccattgtgattgaactgcacatacagttttccgttgcattgtgagtaatttatcgcttttggcatatggtcgtacttactctacgatgatatgtctganattcanaaatgtatgtgtgtctggtgtactttcattcacacgccttttttcaataaaatataatctcgggtatc

SEQ ID NO: 31688 - DNA, 338 bp, Glycine max
gacctatagaatctaagcttttcgcaaagatatctatgaaggactccgcttctgaagggaccagtgctgggcccgagttttacaaccatcatgtccggagcgctcaccaccaacaacatttcgaggccatcaaaggatggtcggtcctccgagagagacacgggtagctcatggatgatgagttcgtatattttcaggaataaatatcttgcacgcgttggacgttgctgggcacgcctcactgaagaaggcgtgcgggacatgctgtcatgggtatggggccagtggattcctgttgatgcagacgcccttagctagttcctgggagacccgcgagt

SEQ ID NO: 31689 - DNA, 330 bp, Glycine max
  unsure (1)..(330): unsure at all n locations
agcttgtctgtaacgctngcacctcatcactttcttccgaagctntaacctcattgtctctcacagtctntagaattgggagccaatccaatccttgtgtccggactctcagccacttatgatagccaccgatgatcccattactgcttcccctaagctctctgtcctttcttcatgccgcatcccatgccttgcgaactccttggagtacctttgcattgtggtcactgaaaccccgtgtaatgaaaggcgtgatgctttcgtctaatggcgctcctctcatggggtagccaagctgtcttatggcgaggacgggattataattaatac

SEQ ID NO: 31690 - DNA, 254 bp, Glycine max
ctataaaatcctcaagcttcactctgaaaacttactaaaataagctactttaacagcttttttttataagtttctctgtgaagcgtattgaaataacttacaaagagtttataggaaggtcataagactaaataagctcttccaaacaacccctaagtctcccaaagcttaagctgctagatgacagctcatgaatgattttatatctagcagacctaatcagagatttcttagactttgaacgcaactacaaa

SEQ ID NO: 31691 - DNA, 363 bp, Glycine max
gctcgcagtagtctatacacattctgatgcaatcctaccacccaagggcattggatagaatactccaagaagattgcgccagagaatgccctatggttctcatgagccttacggtagattgtgggcccatgggctaagtatgagcccacttatctttgtacatattatatgaaggttgtattatttgtgggccttatattgagcgctccataatgtatgcagggtaccctataaatgtaagatttctcagccctcgtattttacgacatctagactagtatttgtatgaaggtgagttgtgtaattccacatgcattacatgaatatttgatgtgtgagatgagaaataaacttaattgaatt

SEQ ID NO: 31692 - DNA, 334 bp, Glycine max
tatcttgttattgcataatactttcttcttgcttatcacgcttatcttgagttcttttggatccctagcttttacctttttttcaaacccccaacaagaaagaactacaacttaggaaccaacatgtgtcatcattcatctagtgttaatggcgagggtactagtcataaggaccctttatcttgaatcttagatgagttgagttccctcaagttatggaaagaaaaaatataaagaaaaaaaaggaaaagagagggtaaaaacaaatcaagatgagagggaacaaataagggaagaagaaagaaggaaaatactaaaagagttaagaaaagaa

SEQ ID NO: 31693 - DNA, 182 bp, Glycine max
  unsure (1)..(182): unsure at all n locations
ggcgttataaggcaccatttactgtcttaaataaatactcctctccctgccactcatcggagatctgttnaatttaatatgtattctgctcgcttgttatcttacaaacggctgatgatgatattttctagggaacataccttttccctctctattatatttctcatgtagaacctggcgat

SEQ ID NO: 31694 - DNA, 444 bp, Glycine max
  unsure (1)..(444): unsure at all n locations
ctgagagaggttgagccaagagcanagtctcactaaggaagagaagtctttccaacttgganaagaaccatcttagtgcaccaaactaggatgccagatgagtacaaaggtagaagaatccataggccaagtactgaccatgaatgttgacctccttgcatggttagcctcaaacatgccaagaatagatcccgagttctactatcactggctagctatntgtctgaaggctagaccaattatgcaaataaagaggaaagtcgaccctaaaaaaggaaggctctggatgaagaaacaaagaaactcctgaatgcatgattcatcaaagaggtaatacaccacatggttagctacacatacctaaacaaatcctaccctanatacttatacttgcttccgagtatagatcgcctagttgatggagcatctggattcccatcctcg

SEQ ID NO: 31695 - DNA, 343 bp, Glycine max
tcaagcttgcttctccaaaaaactctaagcaaattcctgttccaaatctcatataaatagacctttgatggccattaaaaaatcatttgaacagatgtgactctgggaaattattttctgaaattctcctctggtaatcgattacaagacttgtgtaatcgattacatgctttaaaatttgaattaaaacattcaataattgctagtaatcgattaccatccatgtgtaatcgattacatagtgtaaaatttaaattcaaacttctaatgactgtgataaatcattttggccactggtaatcgattacatcctctggtaattgattaccagagagtaaatatc

SEQ ID NO: 31696 - DNA, 419 bp, Glycine max
  unsure (1)..(419): unsure at all n locations
gcttctaaggaagctacctagtctataaatagaagcatgtgtaacacttgttgtaactntgatgaatgagagtcttgtgagacacaactcanaattcaacttctctccctttgtcttccttcaatttcgtgctcccccctctctctttctctccctctgtcttttcctccattgaagcatccttccaagcttcttatccagcgctcatcttggtggtgaagctcttttttccatggcttattccttaatggatggcgcctnctctcacctcttctcctttgtcttccgctgcatctccatggtgaaaaatcaccattgaaggacctcattgaagctcanagatccagcctccatagaagctccacaagcaagcttccatcaaaatggctcgaagcggcttcctacaccaatgtcacgag

SEQ ID NO: 31697 - DNA, 339 bp, Glycine max
tgtaggattatggggtacccatcacatgtggtactaggtggcggtcgggcgatggtgcacaacaagttttccacatccacaatgcgcgcataaacccaccatcccctgttgcccacctccaactgagctcacgcactcccacgtagcccatatcctcgtttatctcaacaccgggtccccatcaatcctcccaagcttccacaacatccaagtaaaacaacattcaaacagcacaagctatcacagcctagcaaaacagagcaaaggcagaaaactctgctcaacacatcaaccaaaatcacagcttttctcactcaaagaccacagtaacaattcctt

SEQ ID NO: 31698 - DNA, 459 bp, Glycine max
  unsure (1)..(459): unsure at all n locations
tgtatcttatcattagatacgaatgaatgaacttgattagtaatctctatccagctgcaacctgggactcttgcatcacacttgtttcccatcattctacgaactctttccacatcactccaatgtctatgggaagcataaatgttagacatgactgcatagtttacattcttctctggctctatggtgaagagctnctctgcggcccatttagccagtcctatatttgcatggagattgcaagatgcaacaaatgctcctaatgtatttgattcagcttccattggcattgacctcaagaattcaaaagcctcatttataagaccgtatcgtccaagaaagtcaacaaggcaggtatagtgacctgaatcatgaacaatcttatacacactggtcattaagttaaagtagtgaagtctcttagtcacaatgccacaatgagaacaggcagagagaaca

SEQ ID NO: 31699 - DNA, 349 bp, Glycine max
agaaactaagcttacgtcactttacaagacacggtcctccaatcatgtaagatgttccatcttctatacatttggtggactttatacttcaaggtattatcattttattttaccgggaaaggcattatcattatgtggtaagagtttatacaagtctaatttacttaatcagggcacaaatgatggattacccattctagcaagccacctactttgtaaaccattaccattaatacacatatgtgatcttcttaaaagtttcacataatcggttcatatcaattttgactatttatgaaaaggagcccttaccatttataatgacacaatagtcgctatgtatttatca

SEQ ID NO: 31700 - DNA, 98 bp, Glycine max
  unsure (1)..(98): unsure at all n locations
agctntgagctaattatactacaataatggtctgttcggatgactgatcgagacccataatacatcgagacgctcgaaattgaatgttgaagctctca

SEQ ID NO: 31701 - DNA, 325 bp, Glycine max
tcagaattcaatttcgagcgtttttatgtatttcgagactcaatcagacatccgagtaaaaagttatctgtcccttgaatctgcttagagcttcaacattcaatttcgagcgtctcgatgtattacgggacttaatcagacatccgagtaaaaagttattgtcgtttgaatttgctgagagcttcaacattcaatttcgagcgcctcgatgtattacgggactcaatcagacatccgagaaaatagttattgtcgcttgaatttgctctgaacttcacaattttatttccatcatctcgatattttacgggactcaatcatacat

SEQ ID NO: 31702 - DNA, 396 bp, Glycine max
  unsure (1)..(396): unsure at all n locations
atcctctgagtcacctgcggcatgaagctataacaagagtcttctcatataaccatcatgtagcatanaactaacaatactacccatcatatctgccaacaccccatacccacgagaatcataagagaaagaagtccacccggacctgaattgatgaagtcccactcgtagccacgcacttcacgacctcgaagatgctctcctttcacgatttggggcgacagatagcaccataggttgaagctttgtgtggagcttcaatggtgaatgagggaggaagataagcatcgtgagggagagggagagagagcttctgaatatgtggggctgagtgacgagagagaggcgttgctttcggtttaaatacaagggcttttttcttttttatattttatt

SEQ ID NO: 31703 - DNA, 318 bp, Glycine max
tggaggggttgatggggaccctttgctgatatgaacgaggataagggctacgtaggagtgtgtgagctcacttgaaaggtgggcaactggggatggtgtgtatatgtttgacttatggaagtgggagagttgatttgcgccatcgcccgatcgccacctagtaccacatatgacgggtaccccataatccactaagcttgatgtgagaaagcgtggaagaatcagtcttcctacttttgtttgttgaccacagagtggtacctggagatatgttccgggggtcaagacaccttggggacgttaggtggggtgctattg

SEQ ID NO: 31704 - DNA, 327 bp, Glycine max
  unsure (1)..(327): unsure at all n locations
agcttctcttgcantgattccncaatatcatgagcctctngcaagggcatatccgatggcatgacaatatcaacctcaacanagtagtgagatccatatgtgtatgcccgaaccgtatcaatgtgccttacagccttatggtggttccagcataggtatgtaagtntctgaagatactctggtgctgctgatcttcccaccagggagttaacatttttcaacactgtcattgaccatgtgcgaatggtgtacaaagccagctgctgtagatgaattacacataagctaaacaagttaaatttatacaagtgaccacgtataaaatga

SEQ ID NO: 31705 - DNA, 317 bp, Glycine max
tattaagagttataaacagaattaataaatctttttttacttatattgaacatatgagttattattatctgttttgggccccttatctaagaaattttttaaacaatatgcagttcactttctgagtttggtgctcttggaattgaattgggttactcaatggaaaatcccaattcattgataatttgggaggctcagttaggtgattttgctaatggtgctcatgtcatattagacaatttcttggcttctggggaggctaaatggctgcgtcagactggtcttgatgtgctactttctcatggttatgacggcca

SEQ ID NO: 31706 - DNA, 406 bp, Glycine max
  unsure (1)..(406): unsure at all n locations
agcnttgagccaatatcctgactcaccatanaccttgtacccaggtgagaatgtcaattcttaccctcggaagcaaaaaanaataaaggtggggagagggaaaattttcaatcaaagaggaagcaaaaaatgagagaatgaaaatttccaatcaaacgataagaagagaggaaagggagttcccaatcatagagtgggagacagcaaatagacaagatagataattcccaatcaaagaatgggagaaagataaggagaatgagaagaaggaaagacagcttctgatcaaggatcgaaagataacagataaaatgtgcatagaggtctctggaccatacaatatctgaacaaatacaatattgtaccatatgaacanaagaaagataaggaaccataacctaaaagt

SEQ ID NO: 31707 - DNA, 567 bp, Glycine max
  unsure (1)..(567): unsure at all n locations
tccacagtaccctacttcattattttattatcatcaatctttttcatcatactgaattatctatatcagcatcagtgagtattgaccccttgagacgtcgcactacgaaagcgacactatangaatacctcgaagcttgtggcatacgtatgactcacagagctgcctataaatggaacttattaattggggcgcaatctctaggacgaattgtgacatgaatgacacatacaagactaatggcgagcgcaaccttatactagtcctcggagaatccacccacttgacaactggccctctaaaactaatcatcgcagggatgacgnaaattaaaagcgggagtcatagaacttggtgaaaaaagtgattacaacaaggcctaaattagttaaaaactatattctggcttagtatactcggaacaaggcgatgtatcattcacgtccaatgacgatcaaaaactccatggttgctgtgagcattgcattggcttccccaacctaaagaccaccagaaacctgtcccgcactaatactaaatgagcgcgaaatgagaccaatatctacn

SEQ ID NO: 31708 - DNA, 368 bp, Glycine max
  unsure (1)..(368): unsure at all n locations
agcttgatgccattaaatcaaagttccatctttgtaagcanagctgatgctgagaggcaaatcagaaaagggaagatgtctaacaatttcttcccacgcagattggagtaaggaaagtgataatcccatagagctacacacacttcagtttgtctgctaaataattcacaccccaacatattttatagtcattntaaccatgaatttttctcttctgtctcttttgaaagatgggagacaaacaatgcatgtcttagtttctacatatgtgcaaattgtggatcaaacaagtataaagaaagagatatgaaagtccataagaatgaattaccgctcttgtatggtatggtatctgntgctgaatataa

SEQ ID NO: 31709 - DNA, 333 bp, Glycine max
gtgacttaagtcatcaagagattataaatatgtgaccatggcatgaatgtcatatcatctttttaaaacatctctttcaacaatcaagagatctatctttcaatcttctctctcaacatcattcaactttttctatagaattttctgattctttttctcttcatctttctaaaagtttttgtgcaaaaatttctcttctaagaaaagttctttgttcaaaaacttgtgctattcatctttttcagtctcttctccctttgccaaaagaatgaaggactaaccgcctgagaattcttttatggtacaagttgagggtacatctacttggggatt

SEQ ID NO: 31710 - DNA, 310 bp, Glycine max
  unsure (1)..(310): unsure at all n locations
gccccagctcttactccttgattatgcgctaaacttaactcaacccttgtccaagcttgttttgctncggccaccgctatcttcatctcttaaaccttattatatcgatgataactatgtgggacttgtaccacgttctgaccgcggtggtgccgctctacgtggcgatgatcctggcctacgggtccgtgaagaggcggaagaacttcacccctgaccaatgcttcggcatacaccgctgtgtggcactattangaaatacactcctatccttgcacttcatcttcaccaacataccttatgccatgaa

SEQ ID NO: 31711 - DNA, 378 bp, Glycine max
  unsure (1)..(378): unsure at all n locations
atgagccttgagttgaggcatngaaanccncccngagactacaattacctcggtctagatgatgaggacgcttttcacgtttgggttataaatggagctggctcttagccggccaaataattttacaagagaaactctgacttttgtgtgatattaactgacaaacgtaagcagagacatgctgatgtatccatcttaccttaattgcctcaggtgacattcgtttgttagcatgcaacctactattgatcacttgataatgtatggcaaactttgtcttggaacttgtataagtctgcgacaggttgcaacgaatacatgataaatggcgtcattgggtgttgacggatcaaatacggagggcgatcttataaaact

SEQ ID NO: 31712 - DNA, 316 bp, Glycine max
  unsure (1)..(316): unsure at all n locations
agctngagtgagtcaccgtagtagaatgagtcaatctcaagtaaagagtctctctgagagagaagataaatagctcgagaagtctctatcctcaagcttgagtaagcctctctgagagagaagataaatagcttgggaagtctctatccttaagcttgagtgagccaccatagagtgagtcaattttgttaacacatccttgtnaccctactatcattttgatagtggaagaatctccatattggagaattataatagtgtgctcgcattattatctttaattactaagtgtctatcttaacttcacgaagcggga

SEQ ID NO: 31713 - DNA, 323 bp, Glycine max
tgaggtcactgatgcttttggaggatacaatgatggtgaatatgaggagggaatggtgtacgatgaagcaggtgaggatcagtattatgaaggtgatgatcagagagatgcggactatgagtatgaacaaggtgaaggtgatgagggatactatgagtacgagcaaggtgaagagggtgaaaatcaagaggaagattacatggaagaagaagatggggatgattttgctaagaagattggtgtcgttcattcgtaattattatggaaactctgagaaacaaggggacgtgtcctactctactccttgtgatcaaatctcatat

SEQ ID NO: 31714 - DNA, 404 bp, Glycine max
  unsure (1)..(404): unsure at all n locations
tgcttaaccaccttntcccggtgaacgatccttcgacttctggcgaggcacctccccaagctgaggagggatgtgatgcttcaacttcaaccagcacaaagagtagtgatgatctgctgatgcctaaggagttagcagcagccaaccatcacattgagagcctttatatgaagagtaccatttcagctttgcatgttntgcagganattcgaaagggaagctcaacagttagcatgttntcattgccaccattgcagataagtggcttggaagaaacatggaacaaaatccctattctggaacaaacagccaagtaatgtgcttgatacattgnggattgaaaactagctagttntagtggcttgggagttcacctttatttattttttttacttttcaaatct

SEQ ID NO: 31715 - DNA, 334 bp, Glycine max
tctaatttctatttctagaccaaaatccaattattaacatctaggtcattaatgagttgactattatttgcccaaagaattttccctgagttatccttattctttctagattttaacttaaaaacttaagagttcgtgcttaggtatctatcataccctaatttcgtctggggaccattgtttgtcggcatgcgaccttcgcttgaccccttcaaaatgtttaatatccattgccatggaatttgtaaagttctgggacatttcagaaagaaaacaacaaaaaaaaaacaaaatggggtgaacttatcaaacacggggagtgcgcttaggaaac

SEQ ID NO: 31716 - DNA, 420 bp, Glycine max
  unsure (1)..(420): unsure at all n locations
atcttaagtcacctgcggcatgcagctaggaggatgaagttgagctgaatgctatcttggtgaaattgtgcaaaaagtagaagtcatgaagctagtccaatttacaatgcagtgaataaccctacagttaactatagattntgtagtacttccttgaaaatcacattggttgttttatttagtggttntccttctttatcatgaataagaaatttcaatccagctttgctctgaactcttgataatgccacataaagttgaccatgactaanaactggttgaggaagatataatccaacacattgaagagattagccttgagatntattgattgtcatggcatatgacacaataagtgggaattgtcttctagtcatcttgaaaggccaaggagtntgagattgtgataatgacattcgt

SEQ ID NO: 31717 - DNA, 334 bp, Glycine max
tgctcacatattagtcttgtgaaacattaattggataatgacaatttcattagtcttataaaatattaattcttgttgtaggataatgacaatgttgtattcaaaaataaaagagtagttgtgcatggcaatattgaaattggataatgataacatgaagctatagtcaattgaagcatcttgaattttaatagttatttttatttcttaattaatattcttagaatttttctttcaattttggtatttaaagtaaccagatctaatagtcaaacatttaattgcagaatgagatgcaaaccttcacaactttcataatgcacaagatgagaca

SEQ ID NO: 31718 - DNA, 483 bp, Glycine max
  unsure (1)..(483): unsure at all n locations
agcttagtgggcaagctntatatggttaatctatttataatagattaagatatgtagtagtttgtcatgtgaacaatcttttatactttaataaataaagtgaatgttccgttatttatgttataaaactcatcttangtttagttaaagtttttaagaatggtttttatggtttgcagaanataaaaaataaaaaattccatgtttaaagaaaaatttgtgattagttaattcgttaaaggatcgaaagtaaaatcgccaagattgtaacttgtgggatacgttgagctagcaatcttgagatcaaattctgtgatgtacattctatttacttaaattaggagagataaagtgagatnttttccaacatatacacgtaagaacacacgctctcatattccttttgaaccaatattntctttaataaatatatatattatatatatatatatatatatctatatatatatatnattatatata

SEQ ID NO: 31719 - DNA, 338 bp, Glycine max
taaggcaatgagcatagatttactccatgatttgtaaatagtaggattaagaataagtgaaactaaaggaatagttggattttcactaggatgaagagagtaaggattatgaacatttagggataaatctgattctaaactcatgatgaagagaacataagaaatcgaatcaaatgaaaatgagaaaagaagaaagaatcaagatgtcaaattgatatgagaaggagaatcagataaatgacttgcatagcaaaactcttcaattaaagagctttgataccatcatgaattgaggaagatgcatgaagaagatgagaaaaaaattgagaaaaaaaatt

SEQ ID NO: 31720 - DNA, 345 bp, Glycine max
  unsure (1)..(345): unsure at all n locations
catgcccaactcctttgagtgacatttatattggttgttatcttgattgatgcatcttagtacatttgatatttgctttgcatcgcgcttcatcatggtttgtgtgaagaaaaaattgagttagaaaaatttctttaaagacaaaaactctgtgttttaatcgattatagagttgtcgtaatcgattacaacaagttgtcttaaagagttaagtctcgtatcgatttaatcgattacggtagtatattaatcgattatactgttgttngagataatgattgatcttttcaagagtctctgctntaattgattaccatgtggattaatcgatcacttatctctcgt

SEQ ID NO: 31721 - DNA, 337 bp, Glycine max
tctcccctattttgctataaataggggggggtgtgaagaataaaagggttcagccttcttggcacttctctctctctcgaaattgctgaggaaaattatttccgtgaagaaaatccaagccgaggcgcttccgtaacgtttccgtgagtaattacgcgaagattctcgaccgttcttcaacgttcatcgttcgttcttcgttttcttcagtcttcaacgggtaagtacctcaaaccgagcttttcaattcattctatgtacccgtggtggcccacattttgattcatgtatttttattctcgatttcatttactttttatacccccttttgacgtgc

SEQ ID NO: 31722 - DNA, 418 bp, Glycine max
  unsure (1)..(418): unsure at all n locations
atttgatctccttttggtgctctanattgtgggaatgtgctcaaatatatggggcaattttggtttgtnttcttgcttgattaggttgaattaggggtttgtatgggatggccctaggcctataatgcactttggaacaatgggacatgccacattgtccccgttctcttgctattgacgcctaaacgcgcgcccaccaagtgttcggtgaaatgcctcaatggcattagcgtgtgacttttgtaaggaaacaacccatggcgcattttggtttgtacatattttctatntttggaatatgtattcattcccgaaaaaggctagagtaattgccccacatatatcctangcctanngaactaaaatttatgtcaaaagaacacaagtggaggtgcatattgggtataagtaccctttt

SEQ ID NO: 31723 - DNA, 338 bp, Glycine max
tgcttgtgaggcttctatggagactggatctttaagcttcaatgaggtcctttaatggtgattttccaccatggagatgcagcggaagacaaaggaggagaggtgagaggaggcgccatccactagggaataagccatggaagaaggagcttcaccaccaagatgagccttggataagaagcttgaaaggatgcttcaatggaggaaaagaaagagggagagaaagagagaggggggagcacaaaattgaaggaataaaagagggagagaagtggaactttgaagtatgtctcacaagactcttattcatcaaagttacaacaagtgttacacatgct

SEQ ID NO: 31724 - DNA, 471 bp, Glycine max
  unsure (1)..(471): unsure at all n locations
agctataggagcactcttctatngtgaccccaaggccaatactccgaagagtccattatggcctctccctcctgatatacgtccaacccagaaaacattatatcacacagacactatctatgaattatacaaaacacacgactcctcaattgttctcagaatagttataactcgtcgcccttaaagggtcttagcattaactcgtcgcccttaaagggtcttagcattaacccgtcgcccttagagggtcttatagtcctgtgattgacaatccatagttacaactcaatgacacaacatctcaagcacatatatattgcaagcacttatgctcaattatacatatattcggctcatcacaaggataatctaagtacatgtatacacctatgatatataccttaccttaacatgcattaccactactattgtttcaaacatttactatcggtccacatggacctacatcta

SEQ ID NO: 31725 - DNA, 323 bp, Glycine max
tggagttagttaaacatatcatttcagccctttatgagttgtatcagaagtagttagtttggttttctgatattttcaggtagaaggaccaatctgcaagttaactttgtattacaagagcaaagtggtccctatgttggctgtataaaagtgacaccaattggttttatgaatagcaatgatcttttttcagttttatgattagatctcttgtatcattctttttctctcttatctccatcatttaagacttaatttctttatttctgatttgagggtgcagtaagcatcaggtctgacagtatggaattgcacttgttaat

SEQ ID NO: 31726 - DNA, 331 bp, Glycine max
  unsure (1)..(331): unsure at all n locations
agcttctgtccctgagatactggttcccagaagacatcagggagtgaagattgctgataaccctagccttgcaacaagtcctagggaagtagacacggagatggacaagaaaatccgcagtattgtgagtagcattntgaaagacgcctctgttcctgatgctgagaaagatgttccaacatcctccaccccggatgttgctattcctgatgctgagaaagatgttccaacatcttccactccaaatgctgaagtcctcccttcacccagtgaagaggaatcatcagaggaagaggatcaagccacagaggagacccctgcaccacgggca

SEQ ID NO: 31727 - DNA, 325 bp, Glycine max
tatctcgaggttttgttagatatcgaagccttcaatctgaccttcgcggttttcttcgaggtaactgtgattctaagcttgttccttggtagtttaagcttatctttgcatcttttctgactttggaaccatcattggacatttttatgcttcctttgaaaaaccctacagaaagagatattacaaaagttatctttttatgaaatggatgttatttttgtgacctccactgaaccccggtcacattggtgtgatcagaatttcaaaatgatgttccttttgtagagacatgggtatttgactcaaagtattgtcgttaacttta

SEQ ID NO: 31728 - DNA, 345 bp, Glycine max
  unsure (1)..(345): unsure at all n locations
agcttgtgccgaaacactctatggtggngtgctatgtatgccatagtggctntagttcagtgatagaagcaatggtcaatgactgccaactggtgctgttgcctttcaagggtgaccacgttttcatggccaaagatttggaggcaggggtagaggtgaataggggtgatgaagatgggttctttcacaaagaggatatattggaggcattgaaaactatcattgtgaaggatagcanagaaccagggaagcacacaagagaaaaccacatgatatggtgcaaggttttgtcaaataaggaaattcagaacanattcatcacaggtcttgctgcccagttgaagt

SEQ ID NO: 31729 - DNA, 327 bp, Glycine max
tgttcaggaggagcagaactattataatcaatctgcaaaaacccaggtacacagattacatcaaatgtaatcaactaacaattacacatgtcaatgcagcaccagccgttagataagcgacagttttcaatttttatttagctcgtactctctttcctccttattttcttcatcatttagggtcttttggataatcttatccagaataagttctaggagaagaaaaaataaaatgaacttctccataagctcacattaacttatgcacaaattaatttataaaaaatctttcatattttagagaagctttattagagagcttctaca

SEQ ID NO: 31730 - DNA, 298 bp, Glycine max
  unsure (1)..(298): unsure at all n locations
tgacctctatcaacgatagaaaactctcccaactcctctattgctctaagacacacgccctcaaaaggtgcttcagcgactacatggtccattcaatttggccatcagtccgaggatggtatgctaaacttagtctaagcattggccccaacgctctgttcangctcccccaaaatctagaggtaaacctaggatctctatcagacactatgctagatggcacaccatgtaatctgacagtctcactaatatacaggganggcaactcttccaaagaaaatgtgatattaatgggaat

SEQ ID NO: 31731 - DNA, 325 bp, Glycine max
tatccaaacatatcctttatttaagttatgtcttcttattctcgtaggaccgtgaatggaggcaagctataactgctgctggatctggatgcgttgcagctttatcagttgagagatatcttgtgagcaatgatcttcttatagagttccatcaggtatttgacttctaagaactcctattttgttttcgcttatcgttctttaggtatctgacactgtaaattgagcgtacacatcacattaccaatttactgcatctctattatatgtcttaattcttgtacatttgcacagaatcagatgcaactttagcaagatttgcttg

SEQ ID NO: 31732 - DNA, 332 bp, Glycine max
tggaggattatggggtacccatcacatgtggtactaggtggcggtcgggcgatggtgcacaacaagtttttcacatccacaaagcgcgcataaacccaccatcccctgttgcccacctccaactgagctcacgtactcccacgtagcccatattctcttttctctcaacaccgggtccccatcaatcctcccaagctttcccaacatcagagcacaacaacattcgaacagcacaagctatcacagccaagcaaaacagagcaaaggcagaaaactttgccaaaacaccaaccaaaaccacagcttttctcactttaagaccccagttacaa

SEQ ID NO: 31733 - DNA, 451 bp, Glycine max
  unsure (1)..(451): unsure at all n locations
agctntcttaacctgatntatttgctaagcgagcagtatagtacagaaagacaacccacctacggtgaanatgcatcgagtgccttctgggtctgtagaagttcaattcaatctaattgattatatttactggactgatcctccctttnttcttcccagaactntttggttccttaaatgatattttagtttttaattgtaattcttgcaatgatagaaatcattagagataagatgtgtgttttaggacgctgagtgagcaaaaaaatcccacgcctctaatgaggggagaaacgagccctntagtggctgattcagattgcatcaattaaattagttcaacaaccacaaagcaatagctgctcacttcattcctatgtacattntaatggctntaagcaggctntcttacattggatccatntaataatccattggcattgagtacatg

SEQ ID NO: 31734 - DNA, 322 bp, Glycine max
taacattggacgagaaaggcaactttttgatttggggaccactatgcggtgagaatgagcatgtgttgcgcaacaagggtcaactatagagcaagggttttatgtcacccaacgagcttatatatgtacttgggtgaggtcaagggtctcttgaacttttacataattctccatgttttacggataaatcggggtgcaaagaatcatcacccaatgtagtcaattggcggagctcatgtttcttgcattgcttgaggagcttatgtcatgagcacactagcccaatttttcagttttacttttgatttttatagggtaagta

SEQ ID NO: 31735 - DNA, 489 bp, Glycine max
  unsure (1)..(489): unsure at all n locations
caagcttgtcagattggtcttcgccagagaaaggatctaagtgngtctganaagaggcaaatntaatcatcctgcttgggcgaatgagaaaaactgggcaattgaagaaggtgaggatgagggagaaacccatgctgtgactgccattcctatacgaccaagtttcccaccaaaccaacaatgtcattactcagccaatgacaaaccctcttcttacccaccacccagttatccacaaaggccatccctaaatcaaccacaaagcctgtctaccacacttccaataacgaataacacttttagcacagaccanaacaccaaccaagaaaatgaatttgcagcgaanaagcctgtangttcaccccanattccggtgtcatatgctaaacttgctcccatatctacttgatactgcaatggtagccataacccctactangtttcctcaacctccatttttccganggtacgactcgaacacaatgtgtg

SEQ ID NO: 31736 - DNA, 284 bp, Glycine max
gtgatgtatttaatctacgagagggcatggttctcaatagtcggtggtaatctggaagcagagactataaaaaaaaaagtaacatatagagatgaaaaataatttttttcaaaagaataaaacataaaagcaatcagtaaactaaaatatcctttaatttatatataataagtcataaaataaaataaataaaaaagagaagttgctgaccttgggaatggagccaatgttgcgtaactcctctgtttctcccaacctcagtctagagaatacctcatacatta

SEQ ID NO: 31737 - DNA, 363 bp, Glycine max
  unsure (1)..(363): unsure at all n locations
gcttctaaactntgtacaagaatgaagctctgatactcacttgttagacaagtggcctcagatatcttaagaagggggggttgaattaagatattccaaacttttctcctaattaaaaatctatcttactttntacttaagttatgaattcccttaatgacaatcttcttaaatattaattcaaatgaagcaacttgaattatgaatataaagcaataataaataaaggagattaagggaagagaaaatgcaaactcagttntatactggttcggccacacccttgtgcctacgtccagtccccaagcaacccgcttgagagttccactaacttgtaaattccttttacaagttctaaacaca

SEQ ID NO: 31738 - DNA, 336 bp, Glycine max
tccacaacatccaagcaaaacaacattcacacagcacaagctatcacagccaagcaaaacagagcaaaggcagaaaactctgccaaaacaccaaccaaaatcacagcttttctcacttaaagaccccagtaacaattccttcgatccaattcgttaaccgttggatcgactccaaaattttactggaagtctatagtgcataagcctacatttcgaccgttgggatctactggcaaacatccagaactcattctgcactagactttccacagccaaccacacacaagcattttctctgcacttgtgcaaaattctgctgcacaatttcacagcaaa

SEQ ID NO: 31739 - DNA, 397 bp, Glycine max
  unsure (1)..(397): unsure at all n locations
gcttacaggatgaggcggatcgaacatttccttactcacatcatgcanattttgttcacggattgaattgaaaactcaattgccgatatcggtcatgagatagccccaactgatatttttcagccgacattgcgcatattttttataaaaacgctcgctggcagataatgtttttttttacggctgaggaagatttcttgttctggtgttgcataaagaatttacaatgtaggtcggctatggttttctgtgcgagctcagccgacgttntgtttcggccaaaactggcatgttcccatttattcggtcaggaaaacattaacccaccttcgcanaaaaatatttgccaaccgacttcatgcttatttgatccagggattgaatagaaaactcaata

SEQ ID NO: 31740 - DNA, 333 bp, Glycine max
tcatgagagagtcatagatcaaattgagaggtataataatttctatgctaaacaagccatcaaagggagaaagaaggttgtcttcgaacccggagattgggtttgggtgcacatgagaaaagaaaggtttccggaacagaggaaatcaaagcttcaaccagggggagatggaccatttcaagtgcttgaaagaatcaatgacaatgcttacaaagttgagctgcccggtgagtataatgttagttccaccttcaatgtctctgatttatctctttttgatgcatatggagaatccgatttgaggacaaatccttctcaagagggagagaatga

SEQ ID NO: 31741 - DNA, 368 bp, Glycine max
  unsure (1)..(368): unsure at all n locations
atggagtggttntgaagagatatattaattcttctaaaataactntacatataagaagaaattacttttgaagacaaaattcccattgaaaaactatttatttgtttttttccttagtggtacttgaaatgggcatttgcttaacaataacaagagagacatgattntacacgtacaaacagagaaagaacacacactataatttcagtaaaagaaaagaagtagagacgtgtgtgatgggagcaattagctggaaggcactatttaagtatggtggtgaactgngcctcctgttnttcacacttgccactcacatccaaatccaaaccatctgtctcggtccatccaaatccatccactattagtat

SEQ ID NO: 31742 - DNA, 337 bp, Glycine max
tgtgactaaatatactgtatcttgtttttttttttttacacaaccacacattacaagggtcaaatgtcttggtgaatgactacattaaatatgcaacccattaatgctcatttttgtatatagagccataaaataatttaactatcatttaagtattagaacatctataacacatttagttatataagttgcttgaaaataaggcaagttactaaacaaaaactattgttagagcatttgagatagtttttcatatataactatataagagcactgtagtttaactattttcttattaatacaaaaggtatttcccaggacaataattataaaaaaa

SEQ ID NO: 31743 - DNA, 373 bp, Glycine max
  unsure (1)..(373): unsure at all n locations
gagaacaatgacaattgaagaatcaattcatgtttccttntatgagtctaatgctatttctctaataaaggatattttagatgatattacagaatctttagaacaaatgcacattcatggacaagattctaaaggaaaaggagaaggaaacaataaagatccttcagcagaagtcaaagcaaataatgatcttccaagagagtggaaagcttcaagagatcatccccttgacaacattcttggtggcatctcaaaaggggtaacaactagacattctcttaaagatntatgcaataatatggcttttgtgtctatggctgaacctacaaatataaatgaagccataatagatgatcattggatagttgctatg

SEQ ID NO: 31744 - DNA, 336 bp, Glycine max
tgaaggtaaactagacgccttggttaacctggtaacccaactggccatgaataagaaatctatacctgtcgcaagactctgtggtttatgctcctctgccgaccaccatacagacctttgcccttttgtgcagcaatctggagcaattgaacagcctgaagcatatgttgcaaacatctacaatagacctcctcaacctcagcagcgaaatcaaccacaatagaacaattatgacctctccaacaacaaatacaatcccagatggaggaatcaccctaatctcagatggtctagccctaaacaacaacaacagcaacctgctccttccttacaaaa

SEQ ID NO: 31745 - DNA, 435 bp, Glycine max
  unsure (1)..(435): unsure at all n locations
gctgcagatttggattgcanaggtagcctctttttagttatatgtctntctattgttntagtcaaacttttatttctgaacaatcttcaattcttgatctttccattttctaatattntattattcctattgtttttcaggcaaccaaattcaatgatgttaagtcctgcaagggaacagcattntggatggcccctgaggtttgccttcaatctcctcctctaaagaaagttattgaaaaatgggccaacatatgtattaattgagtagacatagtttgtaattaacagttaataattaagtntgttgttggatccatggttctaggttgagtttatgcttttcttcagccatggacctgacaggctgacacctaataaatgaaattaattngtcatacatctatcaaaagcattctggatataaaatcctact

SEQ ID NO: 31746 - DNA, 340 bp, Glycine max
tataccaattatgtatattttttttgcttcatcagatggtggatggaaatgccatcaaaatgccaaatgagtggtggcatggaaactaaaagctcattagttatttcttgcattgatggcctggattttggatgggggcacaagcatgttaatgctaatattacaataagcacaatttcttgcatatcctttcgatagaagggtagtggtattcgtgagtccaataaatgaggcagaaatgttagaccagagatgcacatgctatcaagataatagtcatagcaattggcagagataatcaattacaactcacatcacttgctacgactacaactattgc

SEQ ID NO: 31747 - DNA, 414 bp, Glycine max
  unsure (1)..(414): unsure at all n locations
tgataaggagttgtccacatcatgggtttaatcagcaaaggatgcatatattctatggaggataagagaatcatgaagagggcagtcaaccaggtggaggatcaagcaattacttttggacttggacaacaaattcaagctttatacaagcaaatcgagactctaataaaggcctaatctctatctcgggtttctaactccacaccttcataccttgtgataggtgtggatgtgtccatggttcacgagaataaataatggaaggcgagttggctcaagccatggatgagttcaaatatgtaggaggtaggtgttggatcaagcggcctcacaataactaagaaggangggatgaattaattatccctanacctctactaatttaaaatttactcttctaaggcttctactatg

SEQ ID NO: 31748 - DNA, 332 bp, Glycine max
tgatgaggaagctgccaaacattttggggagttaaagtataagctaaagtccgcatcatctaagggcacatgtgaaattctccagaaagcatctatacagggggattttatatgattcagaattttaacctttttgacgctagaacattttttatctgttgggctctaaaagcacatttttgatgtgaaaatctttatatgaataaaatgagatattctcttttatctattcagactttatctcaaagccctataatgcattctgatttgccatgtgtgcgtgtgtgtgagtattctcttcatttgataaaactgactaatgcttttatgta

SEQ ID NO: 31749 - DNA, 414 bp, Glycine max
  unsure (1)..(414): unsure at all n locations
tcacctgcggcatgcaagcttctccacaggacatatactnntgtgtttaccatccttgcaatgaggcatttgaggagttgaggaagaagtttaccacctctcctatcttgtagccactagattgggagcttccttttgtgctcatgtgcgatgcctctagccatgcacttggggatattttgtcattgagagttggtagcctctcccacatcatngcttatggttcatgcactntagatgcaacctaagttaactacaccaccactgagaaggagctnttagctattatatttgctttagataaattcatatcttattttctttgctcccatatgatngtctntactgaacatgcagctttgatatacttattgaagatgcctgatgctaaacctatattgatcaagtgaaagc

SEQ ID NO: 31750 - DNA, 326 bp, Glycine max
ttcatctaaggaaacctcagagagttgctactataagcataacatgggcatgaccaattatattttggacaaagacgatactgtggaagcatgtagattgtggaatgtggctaaacaagtgggagtgaatgttgtacgtgaaaaaaaagaaggttttgaaccatatggttaggttggagaaatgcgatcaagccaagagatgagtttgtttttgggtctgattgtggggtaagattttttgtctgtgatgattatcactataatgttagagtttttggtcacaaaatcaagtggagggctataaataagttgattactagagaagg

SEQ ID NO: 31751 - DNA, 365 bp, Glycine max
  unsure (1)..(365): unsure at all n locations
cgcattttcctatgtctttctttctatgacaacgacaccactgcattttccttctcctgattcaatgatgtatgtttttgttcctttattgtagagtctagaagctagctacattgaatattcaacttaagaagcttacacatgtatcccttgtccattcttttcctcatcatttttcttcacattatagaatatgtttatgatatnttagaatatgacttccaagagatcattctattgtggcaaaggaaagctagcaaccttcaagaatgaaaagtgtgtttaatatanaaaagaattctacttttatttgtattctgtaaaatatggaaaaatgatattaaacttgttctggttattggtta

SEQ ID NO: 31752 - DNA, 331 bp, Glycine max
tcgaatttcacaataatagtcccttataaaatcaaacacaatatacaacaaaagaaattcagtcaattcatgtcaagaatggttatgccaaggatttggaggaatcttattcatcaatatatgcatgggacgctatgaagcactgactctgacatggacatcggacacgacacggatacttcaacatagctaatgtctaaaatataagacacagggacaccacatacacacaaacaaagaaattctaattaaatgaagtatgagtaacagaataaaataaggtgacagcttaagtattcaagtcaataaaaaataattttggaatcagaca

SEQ ID NO: 31753 - DNA, 546 bp, Glycine max
  unsure (1)..(546): unsure at all n locations
cgcgtgttcactcagcccgcgatcntttgatacccttgacangccaccnnnntananannanntgcngcatgcaagctagtctatangcttcacagactatgaacagtattcgtttatacactctaccggttaataatgagactaacggtacgaatggtaatcataccttttgcttcttagggttactatcagaaatcaactctctaaaaagcgtaacttaacaattcctactgtgtcatctcatttgtacaatactattgcaacatgaatatatttgcatggtcaaagtgaataatgctcggcataatagacgtccaaatagtttattacagactatcatgatccctatcggaattttttaatagaaacctctctacttctctgttatgtggatatcccatcttttctgacagcttccggccatacagaacctagttcaccttcatttctggcttgccctgtaaccgatctttgagaatgcctttttcacctcactttttgctggccatgtacacaactcgagaatgccttttctccctctcttc

SEQ ID NO: 31754 - DNA, 327 bp, Glycine max
tgcttctacagatgtgttctacgtgaccttcttgccaccttgaaggcattggacccgttgtgctaatgacgttaaataaacggtttattgggaggcaactcgggatttcttaccctgtctcttttttagttaaatgcattgtctgttttttgatcttttaggatagctgtgttatttcttttctttaatatgattacttgcaattgaacttcagcaatgtaattccagtggtctaagtccaattattgaataaaaattgcatgatacatacacacaaaattagaaattggttgtgacttgatatggtgaattgatgcatgagatact

SEQ ID NO: 31755 - DNA, 383 bp, Glycine max
  unsure (1)..(383): unsure at all n locations
agcttagttattttattatngatctgtntctttaatttatgtaatataacatggtaatttctctttagcttaatttggtgtgtataccttaattntattaatgtgttttctaaaattaggcctcttatataattaataaattaaaatagggaaacgaatatacaaccacaccttgaacttttaacttttagcaaatagatacccttaacttatagggttggcctagtggtcatttctctttagcttaattntgtgtatatagcttagttttattaatgtgttttctaaaattaggccacttatacaattaaattaataaagaaaaaagaatatacaatcaccttgatcagtcaacttttagcagattgacacccttaacccat

SEQ ID NO: 31756 - DNA, 240 bp, Glycine max
gtggtggaaaaccacgtaatccatgattgattttgtccaccaggggacactgtgacatgttcatctacacaggacatcgattgaagaagagtcagccttaccttctatggtccacatcatccaaataggtgaatgttcatcgacagcctatatatccttgatgttgcgtgccaaacaaataccattcggtgattcatcagattattgacctcctatacatgaacaccctcaaaaacggca

SEQ ID NO: 31757 - DNA, 400 bp, Glycine max
  unsure (1)..(400): unsure at all n locations
ngctctcataacacttacttaaagtagctatgtnattatataagttcaaataagctggacatataaactcttccagtgcatattatcagcaaagactcacttgngggtaacatgcaacatgtaagagggtatgcatataaagcatactacctcagactagaccatcatataaacccatgcatgcataccttgcaatttctgctcgtcttctagcctcttcagccatctgattaagttctgtgtaacttgtacgttcattgaacatcttaggctctggtgggcgaaagccgtgaagcgtcctctgtgcatgtgcccatttaagttcacgttcttcctattcaaaatctatnttccttgtagaagcaatctgacacagaattcatattacagagtaagcaac

SEQ ID NO: 31758 - DNA, 264 bp, Glycine max
ttattttggtcaacgacgataccggggaaacctgtgcattgtataatggggctcgtcaagaggctgataacgttaggcgaggaaaacaaaaaggttttgaaccatatggttaggctggaaaaatgcgatcaagccaagagatgaatacgtttttgggtctgattgtggggcaagattttttgtctgagatgatgaccactataatgttagagggtttggtcacaaaatcaagtggagggctataactaacgtgattactagaga

SEQ ID NO: 31759 - DNA, 335 bp, Glycine max
  unsure (1)..(335): unsure at all n locations
agcttgtatgaatatggngtacccatcacatgtggtactaggtggcggtcgggcgatggtgcacaacangttntccacatccacaatgcgcgcataaacccaccatcccctggtgcccacctncaactgagctcacgtactcccacgtagcccatatcctcgtttctctcaacaccgggtccccatcaatccttccaagcttccncaacatcaaagtaatacaacattcacacagcacaagctatcacagccaagcaaaacagggcaaaggcagaaaactctgctcaaaacaccaaccaaaatcacagcttttctcacttaaagaccccagtaac

SEQ ID NO: 31760 - DNA, 326 bp, Glycine max
ttgaacaaattctaacgacaataactttttactcggatgtctgattgagtcttgtaatgatgaggacatgttcaagagcaagggcaaggatccacttgaaggacttggaggacctatgacaagggctagagcaaggaaagccaaggaagctcttcaacaagtgctgtccatactatttgaatacaagtccaagtttcaaggagaaaagtccaaggttgtgagttgtatcatggcccaaatggaggaggactaaatgacaccactttgtctcaattttagagtgtttagtttgtctaaataatggcccaatccttgtaaagttggct

SEQ ID NO: 31761 - DNA, 390 bp, Glycine max
  unsure (1)..(390): unsure at all n locations
ctcgccatgcaataccctcaatagatcctttctgcatggtaaactacacaaggaattatataaatcagaaaatgtanaagggaccaaaacatacaaatttccaaatgatttatttaaataacttgtaaaaaaaattcaatagaattgtaacttaaaatagatatatgtttgttttaaatgatatttcattgaacttcaaaagaataaacatattaattctagggttagtttggataaacttcatgataagcaattgtagaaaataattgaaaaataaagtatactaaggaaacaaattccatcaaaccttcttgcaaaagttaaatcgaccgaccttcgcacgtcaactnttttaaaactaacttcatctaacttggtgtcttcaatcat

SEQ ID NO: 31762 - DNA, 333 bp, Glycine max
ttagaagtttcagtcatttgtttgttttctcctgaaatgtatgagcttattgctattgacgatgtgctctcaagcatgactggcattgaagggcgttacatcttaatcaaagcagttcgtggaaagaatgatgatattgctttcctggttgacccatctatggatttggccctgcacgtgagatttttcataatgtttatgactatatttcgagctgcaattatgaaacagtatgactttagattatgaactatgtaatgacattgttttttttttttgataagcagtgaattttattaatagtgaacatgcttgctttgagtacaacgggtt

SEQ ID NO: 31763 - DNA, 464 bp, Glycine max
  unsure (1)..(464): unsure at all n locations
agcttaacaactntaacacgtacctgctagctgtatttgcctgtagagttttattacaggttntaatacatgggttagacatatacatgtatatataaaaagtagtaacaatgtgctgtacctgtacttgatataatgaaacagcttccacaagaacaccaatggacaaaccaacttcaactacaacaaagtaattcaccttcacctggagttcatataatgagtaatggcattagaagaagtcanagccaaaccaacttcaagtacaacaaactaattcagctgtttctcaaccaaactatgtcaaactatttgntgtctattaaaagtgttagttattcatgtgacagacatactattctagtttctattcatcattaagaatcacatagcacatatagtgttctcatagcaataccacacacagacaggggtgcagatagcaaccacaggcccacaatcag

SEQ ID NO: 31764 - DNA, 333 bp, Glycine max
tgaaggaaaactggatgcattggttaacttgttaacccatctggccttgaatcagaaatctatacctgttgcaaggtttgtggtttgtgctcctctgctgaccaccatacagacctttgcccttccatgcagcaacctggagcgattgagcagcctgaagcttatgctgcaaatatttacaatagacctcctcaacctcagcagcaaaatcaaccacagcagaaaaattatgacctctccagcaacagatacaaccctggatggaggaatcaccctaacctcagatggtccagccctcagcaacaacaacagcagcctgctccttccttccaa

SEQ ID NO: 31765 - DNA, 371 bp, Glycine max
  unsure (1)..(371): unsure at all n locations
agctntctcccaattcctaaatgacatttcaagctagtattaactcactntaacctccatttaccacagaattcagacttagccttcccactctcaaagcctcactctntttccactcataacaccacattctcactttccaaccctaggttaactctatatttcatctctaacagttttccttcagcaactttagcatacaaacatcacaaacatcatcacaaaaccctaaaacagaatgggtatgtctaactcacccaaacatggcaatttcaacaagctttcaacaaaagtcttcacaaataatcatcacccagcagaaacctagcaagactacccatcatatctcccanaaccccatacccacgaaa

SEQ ID NO: 31766 - DNA, 339 bp, Glycine max
tctagccaaatggacttaccttgaattaattctctttgatttcccctttaagcctatgttcccctttctttgttttgaagctcattacaagccttaagtgaaaaaccatgatatcaccttacccttaaggaattttggagcttcggaattgttttgggaataagctgggaataaatgtgggggggtatgtttcattggaagatataattttttgccatgcttgatgtatatatatatatatatatatatatatatatattgcctagttcttgctttaatcttcaaatttgtactgttaaaaagaaaaaaaagatgatgaaaaaaaaattcaattgctgc

SEQ ID NO: 31767 - DNA, 293 bp, Glycine max
  unsure (1)..(293): unsure at all n locations
catgacanaacttanactccagtccattaaaaagagaaatactagtcagtacagtgtggtttcaaagcaccttatagaatatctatttatcaatccttcaagccaagacattttaacaataataccataagcaaagagattggtagtacttactgtattccgctacagttagtgcaaacaaacgtacagaaatntgtgcacacatattgtggtccctaacaagagagatagaanaaagggattaatgcaacatactagtctcatacctcaacatcaaattcaaaaatttccta

SEQ ID NO: 31768 - DNA, 337 bp, Glycine max
tgcctaaattatttgaggggtcaaaaagcattatttaatatttatatatttaaaactatacatatatgacgaggtaaaaatgttgaaaccatatattttcgtcatcaagaaattttctcttaaaaaatgcatatattctattatgctggatcattctaccttctaaaaatgtcacttctaaactaatatacaaataattatataactcagaagacaaaatacgttgttaaaaatcatattatctacttataatcaccgatcagtaagataattgtgcatattcactgtgttgttaactcgttaaaaaaaatattccatatacttatcactaaaaaat

SEQ ID NO: 31769 - DNA, 386 bp, Glycine max
  unsure (1)..(386): unsure at all n locations
agcttatgctgcanacatctacaatagacctcctctacctcagcagcaaaatcagccacaacagaataactatgacctatccagcaacaggtacaatcccggatggaggaatcatcccaaccttggatggtcgaatccttaacaacagtagcaacaacaacaaccttattttcaaaatgttgttggcccaaccagaccatacgttccttcaccaatccaacaacaacaacaaccgcaacagccccagaaatagcaaacagttgagacccctccgcaacccttccttgaagaacttatgaggaaaatgactattgcaaacatgcagtttcaacaagagaccagagcctccattcagagcttaactaatcagatgggacagttggatg

SEQ ID NO: 31770 - DNA, 323 bp, Glycine max
tcttatccaaggctcatcttggtggtgaagctccttccatggcttattccttaatggatggcgcctcctctcacctcttctcctttgtcttccgctgcatctccatggtggaaaatcaccaataaaggaccccattgaagctcaaagatctagcctccatagaagccccacaagcaagcttccaccaagaagcttctggatcagggagctaacaaaaattttcatgcaggtggaccttcttctagtagctctgacttgcagcagcctcctatccctcttccatttccacatagagcaattcccaacaaaagaatggaagaagt

SEQ ID NO: 31771 - DNA, 328 bp, Glycine max
  unsure (1)..(328): unsure at all n locations
agctcgcccagagaaggagtccacggaggaaatgcttaccacctcataagactgganagcggtttctaatgactcctctgcggcttccacataaggcataaaggatgggcagctcaccaagatgtcttcttcgcctgatacgatgaccagatgcccttccactacgaatttcaacttttggtggagtgtagagggaacaacccccactgagtggatccacgggcgccccaacagacagctgtagggggggttaatatccattatttggaaggtgacttgactggtgtgaggggcctattgtactgggagatcgatctctcccctaacc

SEQ ID NO: 31772 - DNA, 329 bp, Glycine max
tctttgagaaaaattccttgagaagctagagcttagctacacacacccctctcataactaagctcacctccttgagaagcttccttaagaagattcctaaagaagctagagcttagctacacatacctctctaatagctaagctcacctccttgagatgagaagctagaactcagctacacaccccctataatagctaagctcacacccatgacaaaaaacatgaaaatacaaaaaaaaagtccttactacaaagactactcaaaatgcccgaaatacaagggtaaaaccctatactactagaatggccaaaatacaaggcccaaacga

SEQ ID NO: 31773 - DNA, 388 bp, Glycine max
  unsure (1)..(388): unsure at all n locations
gtcacctgcggcatgcaagctntacaacagaatttagtaatgacccactaactctataactaaataacttaatgccattaacctagggaattaaaaataacttaatggctgagtgtaactganattgtggcaaccaaaagtcacccncaatagccaacaagtcagccaccatttggtctcccaaaaggctgatgcctaggttgccaattgggcccttattacaacttgaactanacctaactaaagccctttagttgataaccanaacatattttggtagccaactttcaaggattggccatattttacagactaaacactctaaaattgaaacaaagggtgcatttagtctcctcatttggccatgaacaactcaaaccttggactt

SEQ ID NO: 31774 - DNA, 290 bp, Glycine max
tcggtattctattttgagcgttcttataaattatggtactcaataagacatcctagccaaatgttattgtcgtttgaaattcctcatagcttaggtctatcattacgagcttcttgatatactacgagactcaatcagacatccgactaaaaacttattcggtcattgaatacgcataaagcttcaaaacttaattattgagcgtttccacatattaaggacttgacctctccttcgacaaaaacgatattggatggaggatatactcaaaccttagatggtccattcct

SEQ ID NO: 31775 - DNA, 285 bp, Glycine max
gtcatatctagtcaaggtctgagagaccatacaagtttcctaacgatttctaattatgtgggccattaagtctatcatatgctgacaatagccgagaagcccatgaatctcttcgggggcggagtaggtgtctgccatcgccttggccttggctaacaatcggtgaagttcttgactctcgtcaagggaagagcaaaccgatccatccacatgattgcctcttggtgtaaagagtcgatcacccttcctctagcctctttttccgcgtatacttgggcatactca

SEQ ID NO: 31776 - DNA, 330 bp, Glycine max
ttataagcgcgggttcgggagtttaaggtctttcgttcgcgatatgcgaagatgatattcctagtactttggatttggtacgaccatgctctcctgatttccagctgggaaattggcgagtggaggaacgccccggcatttacgcaacaagcttaatgtaaacctttacggttttaaaagctctatagttgggcctacgctttagagttttcattttgctaaggctttgtgtcttttgtgtttgaatttataatacaaggatctttcttcatctgttcctggtctctacccattctcattcatttgcatgtttacttctttttctaaaac

SEQ ID NO: 31777 - DNA, 309 bp, Glycine max
ctgattgagctcttgtttctatgaacctgtagacagtgtctagctcctgaagcttctgatcaatccaagataagaacctgttgtttgagtttaaacattaacagatgaaattattaatcacctccatgtcctgagtttttgaagctagagcctacattgttgagaagtccatgtaggatcagcatgtgcccaacctagtggctcctacatgtactccatatcaatatatcataaatagttgcatcaagttgatctaacagggaaaaagctaaccacatctactaaattcctctaataatagacactata

SEQ ID NO: 31778 - DNA, 327 bp, Glycine max
  unsure (1)..(327): unsure at all n locations
tttgctttatggcttgtaccttatcaacttcttccgaggctttaacctcatcgtctctcacagtctttagattcgggagcgcatccaatccttgtgtacggactctcagccactgatgataaccgccgatgatcctattactgcttcccctaagctatatgtcctttcttcacgccgcattccatgccttgcgaaatacttggagtaccctcacgttgtgggcagtgtatccccatgctatgaaaggcgtgatgctttcttgtgatggcactactctcatggggtgngcaagctgccttatggcgaggaccggattgttattaatac

SEQ ID NO: 31779 - DNA, 392 bp, Glycine max
  unsure (1)..(392): unsure at all n locations
agcttatgcgcatatttccttacgaacgttcacttgcacaagacatcctatcaactaagaaaaatgcacccatatacaatcaaggtagcttcattacctagattatntacatgtacttccaaggtgtatttgttatttacatcacacacgcctccttggctgaatntacatacatacatactcaaagcattntgnggtaccaaaaactgcacatgcgctcatcttggtatttctaatacccatacatatacaaacttcacgatgaatcttgactacctacacaataaggtgctacatttcatgctttctttnttttttttttttttcaagtttttgctacctaaagccacatgcaaattcaagcatatttttctttgctgactaaaattgta

SEQ ID NO: 31780 - DNA, 276 bp, Glycine max
tgcaacatagcacctatgttcaccactaggtgtttcctcagatgggattatatctatccactctccctcatttgaactcacaagaagccctcctatcaaaactcgatgtaagaaagaaacacaacttattagagagtgcttccaaagtctctcaacgcgaccttctataagttgtggagcagaataatcgtttaccagaaaagaaccgtggcaataaacgagcgcagaacaatagtaccagttctcaatgccatcgcccatgcaaatcaagacaaa

SEQ ID NO: 31781 - DNA, 310 bp, Glycine max
  unsure (1)..(310): unsure at all n locations
gttctgatctcttattgtttatctattctttacagnacttcatgcacactgtgacctttcagattactttaatactaacgagctctcatactaaaatttccaagaagaagagtaatggttcgcaagggattgaagacaactgctagaactttcactatcactacaacacaaaacaggtgttatataacaaggtcccagcccactatcaataaacaatatacatgatagggctagaagtgctaatgttaataaaatcattatttattttatgctgttgaaccatgcggactgtcattaattagtatgccat

SEQ ID NO: 31782 - DNA, 320 bp, Glycine max
cttgatatgcaaagttctaatctgtttttttgttgaaaaccagatcctgtcaagagtttatgtgccagtcagatgtcctgaaacatggtaatggacttcgaacttccataggtttctttagtgaagaagacagtgattataaaagaataataactgttatgatgacgccccatatgtgtcgttacggtcttcatgtcttctagtattgatagcaattataacaggcgtatgaggataccggtgacatactttaaaattgcaaaatgtatgcccaatgctgaattaatcgagataacattatggaggttgatgatataaca

SEQ ID NO: 31783 - DNA, 381 bp, Glycine max
  unsure (1)..(381): unsure at all n locations
agcttgcttgagaagctcctatggaggttggatctttgagcttcaataaggtccttcaatggtgattntcagccatggagttgcagcgaaagataaaggagaagaggtgagaggaggcatcatctactagagaataagccatggaaggagaagcttcaccaccaagagagtgccttgataaaaagcttagagaggaagcttcaatgaaggaagataatgagagagagagatagagagagagtgtggcatggaaattgaaggagaatagggaaagaagttaaactttgaagtgtgtctcataagtttttcattcatcacagttgaactntgtgaatttcatttacatctcatgtgaatctaaaaggaatattccaagaatat

SEQ ID NO: 31784 - DNA, 305 bp, Glycine max
aaattaacttattctctctacttttatagaaacttcatttaaaatcttcaaaaactaaggggcttaatttgattttagaatataaaaaaagtcaatgcattttacctccttatattcttttcatacaagtatgttacaaaaatttatcccaacaaggccttattcatatattacttctcattcttttttgctgaattttcgaggcggtctttacaaaaactaaggatcttttaagagcatattgggataaagctatatttcttcattgggaatttaacatatatgaataagacaacttgttttga

SEQ ID NO: 31785 - DNA, 509 bp, Glycine max
  unsure (1)..(509): unsure at all n locations
aatgcacattagacctatgatctagctngngctgaaactatgacacaccaggtctagttagcccctctcctctctctctctctattntcattntagtttagctctctttcttctcttatttcatnttataatccaatcaactctagtttatcataaaattcgctctattgataatggaagtantctgcacgtgtttctctgaggatcacacagtctctttaggtctantatactgtaaatctgtcaaatttctctcactatacttgaattgtgtataatcatctgctaggctgataatgtcctgcctactatgtcatgctatgacattatgatatggtgtgggatgctatcactatgatgttatgtaattcctagtattattaggtaatagtgtgactgtaagatatctcactagaagactcttgatcaggacacaattatcgaatttatcattctccgtatacaacaaacccccccatatcattccattgtacatggtcagcatgaag

SEQ ID NO: 31786 - DNA, 686 bp, Glycine max
  unsure (1)..(686): unsure at all n locations
ctgttgtcagctngtcccgtgatctngacantcacatgcggcctgcnagcatatangatcancagtcgcctcaatcatgtccagatatgcgtgtgcattatgaagcatcnaccaagagtcaagccaatgctatggtgcacgccatcaatggtgcaaaacacaccanatgattatgatgatggatggctcanattctcacaaaggtanactcatcactttcaaaactatcatgacatgtagagaagaatcaacgatttcacgtcaccaaatgtcaagaactcttattttcaaaacaattacccatttcttgaacatanntctatattcaaagaanaacatgcagagtcgtacatgctcactaaattaaccccacatattaaactaacanttcaacgaaactaacaacattaacaaattaatanaaccaacanaactagcanaaccaatgaacactcccncccatacttanacaacacattgtcctcaatgtagcgcaattaanagaaataaaacaattaaatcatcanatagaatcggacangtgtagtgaaagccaagaagagatatganaagaaaacttcctagtcatgtggaggaagagttggtggagtanggaatctctttcacactacgtcactaagaagggtcgtgagatggctaatcatgtcgtgaccttgagctctgtg

SEQ ID NO: 31787 - DNA, 383 bp, Glycine max
tgtgcacatagtccttgaacttcatttaaatctaatctttgactgagaataatgatcttctcctagcttgcaagagaatagtccaatttatggaaaagatatatgctagtatgtactatgcacatataccttatgcaatactgcaagtcctatgggtatgcttaattacaaatatagtactacaaatgaaacctttacacttaactattaacgtaataggcactctgtgctactcgagatttgctaagaactcacgacatcctggctatcccgatttgcctgaatactacattatttttactttaaatctcttttcttaactaaatataacttatgtataattctcatacacattctgacatgattttaggccacatcgttgt

SEQ ID NO: 31788 - DNA, 522 bp, Glycine max
  unsure (1)..(522): unsure at all n locations
gaatcacttatgaatgcttatgtcttagtctctnaaaagntctcaangggatggtncgaagctatggagaatctactctctaaaagtcaattcttcctcanagaattggtagctttttatttgatcacttatgaatgcagatgangaaaaccttacttttcaatttattaattgccttaataacttctgttatagacttaccattntgtaanggttaatcctctatgacggtgttatattactggaatgaattattatgtagtttcaagtactttttctatgtanaaaacaaacaaaacttaagtctgtgttgagtgcataagcaantttgcagttgttatatcaacctttgaaccattttaaaaaggatgggataatangtacacggcattgaaatagtgacaattatcccacanagtttctattctttctttagctatatatatcaatatgagtaatgttgcatctttcaaaaaaanaatgtgacaacaacctgctctattgatcatatgttgaagatcn

SEQ ID NO: 31789 - DNA, 226 bp, Glycine max
  unsure (1)..(226): unsure at all n locations
attgtcgctatgcctttgtcatgagttcgccatgtgtcttgcactcactcgaatctttgatcatgaccgttactgacaacactatcaagtctcaaccacagtatttgttagactcattcaaccacgacttccgctatagaatattatgtccaatatttgacaagaagaagaaaanaaataggtgatatgtgaacatcagaaaaataaatagacatatgtgagaagt

SEQ ID NO: 31790 - DNA, 658 bp, Glycine max
  unsure (1)..(658): unsure at all n locations
tgtgcatctctaccgttgatcttgagtcacnctgnggcatgcangcttcgttggtgcactgggttnntgttaattnantgaaattgtgatatcanatcnnnacatgttcaattntgtggttntaatgtattatcttanatatatnntttatagttgtnttttctttttcttttttgtgctgaatgttcanattnggtactgttgaatccatggtccatgatgctagctagctacctcgagttttgaaatgcagtttgatattgtgatattattgtccacaaacgggagaagtagtggttcactttattgagctgaagtntcaagtgcttatggaagtggtgtanggtttatatgttctaacancagtgggactgggaatggagctgctaatcgcttcttgatagtgtgaataagtaataaagtagcgtntaatgtgttcataatcatttngtatttcattcacttnggagaaactgccttcccctctttaaagaanantgtactatgtgacgaatgtaacaagancaacacatgctctgatattctctttcgacancactcgcactcgcacttactatagtgagagttatgtngaccactatattggtctgctgtctacataattcatgaagaaaaagatgtgctgaagtgtgtgtat

SEQ ID NO: 31791 - DNA, 194 bp, Glycine max
  unsure (1)..(194): unsure at all n locations
gtattacctactattatatctccgcaacanatagcctctntacccggaagggaaatccatgatggtgtggttgttatcaacgagttggtggattgggaaaaacgacaatgtaagaagatgcttatctntaagggtgatttccagaaagcgtatgactcggtcaactgganggttctggaatacatgttacttca

SEQ ID NO: 31792 - DNA, 153 bp, Glycine max
  unsure (1)..(153): unsure at all n locations
atttggagcgtctgaatatattacgggactcaatcagaaaatctgacttgaacagtattgcgggtnntaatgctagtggcatctgttctaaacttcgagcatctcgatacattgtgggactcaatcggacatccatgtaaaaaagtattgtca

SEQ ID NO: 31793 - DNA, 701 bp, Glycine max
  unsure (1)..(701): unsure at all n locations
atgttgcagctattaagcaatctatgagtactcaagctngnnatganaacngtagtgcataaaaattcanatggcataactgttcactcggatgtacgactcangcacataatatatcaagacgcatganatngaacacgattgctctggaccaattcagccggccataactgttaacatggatgtacgactgaggcccatgatatattgtcacactcgacattgataagtggaagttctcaagacattcacatggtcataactattcactcggatgtccgattcaggcacataatntatcgagacgctcganattgaacacaatagctctggacgaattcgacgaccataactnttgacatgggtgtacgattgaggccgctgatatatcgagacgctcganattgaaaatagggagtgcttgagaaatcgaaatggtcataacattcactgngatgtccaattcacgcacataatatatcaagacgcatgaaatngaacacgattgctctgcccacttcagcangacgtatcctttacatgggtgtgcgaatganggccatatatnatcagacgcncgagaatgtataatggaacgtctgataaaatctnatggcattacacttcacttcgttgtccgattaaggcgtgattaacgagacactcaaatataaaatggacgcgtcgtctagtacaacgcg

SEQ ID NO: 31794 - DNA, 556 bp, Glycine max
  unsure (1)..(556): unsure at all n locations
ccgcaccatgatggttctttgcgctcanataatgtgannatacttgtgaacactttgtatgcatgtgaacatagaatgngtagttaagtggtttttcccaatttcatacnctaatttcgtccggggaaccatngttgatagcatgcaaccctcgcttgaccacttcgaggtacttaacacccatcgttaggcaatccgtgtgagttcatgacatgccagaagtcgaagggaagcatttgtgcacaatccgtanagtttcgcaacattccagaagtcaaagaaggggatggtgcgtagatcgtaatggttcgtaacattacgaaaagaaaacaagtatcattacgtaattcgcanagttccataaacgtacggaaaaagatcagcannaaagaaagggggtgttttagtaaatanggtgtcanatagcatcaggccacttggccttctagatgtcatagaagcgtgcttttgtgagcacccactgctgggcactggcgcacacctctcttcctatataggaagaggcaacaatgtcacctctgttcgnatcataaat

SEQ ID NO: 31795 - DNA, 637 bp, Glycine max
  unsure (1)..(637): unsure at all n locations
atgtgnatctgctcaccattgangtacactatgantactcaagctatggtaagatctggggacctaacctggcgganggtctnncatggngggccattgcctccctctcncaatattatgaccagccgtttganggtgcttcacctttggggaattncaattaacacccgtggtggaagagnttgaagagatcttgngatgcnctatgggacgaagganatcgtaacatcaagaagcaacaatgtggatggaccggttttctcttactttgaatgggagtcaagaaacttccccgatgctggcanaggccanagcaatggcagacacctacttccgccccgangagatccacgggcttctcagctattgccagcacatgatagacttgatgaccccatataatagngagccgtagggagttatattgcactcnatcttgctagtataacttctgataaatgagttatccatgatttactccaagaaatcatgcgatanatactccacattatcttacatacatattctatacgtctctacattggctttangaagagcatactaggcgccaggctctatgacaatcaattagcatgtgctaagagcagacatgaacactgcgttgagacatgtctan

SEQ ID NO: 31796 - DNA, 215 bp, Glycine max
  unsure (1)..(215): unsure at all n locations
tctgatggaaaagaccgtacaaatgcaatgagagacattttatattatntttgttatattatttgtctctttaaggttntgtaagtatttcaatggacaagatatgtttttgttctctcaacttttgatgaatattgttnnttagttttaaacaaaatattaatcgctntagttcttatgttttagtctttgcattagtatcatgtaaaaataat

SEQ ID NO: 31797 - DNA, 457 bp, Glycine max
  unsure (1)..(457): unsure at all n locations
atcttctctctaaagaggctctctctactctcagaagtggattcactctntgtcttggatcgaatcactctacgacggctcactcaagctngaggatagagacttcccaagctatntatcttctctctcagagaggcttacttatgctngaggatagagacttcccaagctatttatcttctctctcagagagactctctacttagattntntangaatgaaggatcctacccttatttatactactccacctncacaatgaatagtggagattacttgatcctangatggagactaattctctagaatactccacacattctangagtctctacacttcttctactatcttcatacgttttcataagggtccagaaaggtccacacatctctagaatatgtcagaaggttccacattcttccacaagcttctagaaagtctacatactatagagtc

SEQ ID NO: 31798 - DNA, 611 bp, Glycine max
  unsure (1)..(611): unsure at all n locations
tgtttttgttactcgtaccgngatctctgagtcacctgcngcatgcaagctngtgtgttaatgtgaaggcangtanatgatgaatgagcgagcgcatatcacaatggaattaagagganacgacgtagttggcagtgaggcaggaggagtntannggtttatcattttgtgtcttgagttgtgttgaatctggagagagagatgaataattgtatatcacagagacgtgagaatgcgaggagcagtatagaggaagatcaactgatagtgactccattatgcgctgganatgaagttgagtcttgttcgattgtggaatacacccggcttactctggcatggnttgctttgccctatttgacgagaatgaccctttcatagtcaatgttcttctcatcactcactttcacttggatcatgctgcttctttgcctatttctcgagaaaccaccttcgangcgtgtttcatgcctacccacaaggcattacagctctttgttgattgtaggtcgaaacatgttttacaacagactaccgtcatgataattgagacttatggctttattaataactcctatctatactaatatgtataaaaataacggacgcta

SEQ ID NO: 31799 - DNA, 580 bp, Glycine max
  unsure (1)..(580): unsure at all n locations
natgcgatcgccnctctgcactctcagctgcagctatctctctatgcctcgtcgtgtatctannagactcttanatagcatgtcgtcgtcaatgaaggcagcatgacctactcgtgctcgagtctgtaacaggcctactcatacgtccttgagaagcgacttgcggtcattttcatccctatgcacacaccatatattagtagaatgcagcagtatgcagatcatctctgttagcacattattgatgcgtatgcgcgatcgccagttgttactggtgaagtgcatgtatatgatatatatgtgtgttcctttacgtagatctatatggttcactaaattcatattagtacttatgcgttatcgccattgatccactatcgagttagtgtacttaataataagtggatcctaatatggtataaagataacatatatgcaatggcattatttcaatccgtgaactacaatatataatataacatttcatctatgctactaatcttacaccagaatccaaacctttgcgttcattgcactcgctcatgacgaacatcgtggcggcactctgcttatagatctg

SEQ ID NO: 31800 - DNA, 212 bp, Glycine max
tcacagtatattaagaaaactaagacttaatccgtagatcccctcattaagactaagtttcaatcctgcttctatcaagttctaaggcaacaatacatttgccaatgctaaagtcacctaactaaacatacaaatctgtgatcagaccaagagcatgcatgagataagcattgatagaagcatcgaacacacaatacacaatcaattagata

SEQ ID NO: 31801 - DNA, 648 bp, Glycine max
  unsure (1)..(648): unsure at all n locations
cttgcatcagtgtttccactatttatgggtgacagtgnngatagtgattggtgcaagttccacccattgnntcttgatccactacctcctcactaattcttcgaatagcttcttatagtgaagtaacggaanatgattgttagatcaaaaaggttcattntcctttgcgttgngtgcattctaagacctattgccttacaaccttngcttcttggggaggagcctctctctgaccagtggtcttagtgtgtgccatcttgaaattcataagaaaacaacatntgtgaacaagcaagttagaatcaanaagaaggaacatggagagctgtattcttggtggcctcacttaagctagagcaatgtctcgctcaagcaaggctatcantgatgaggcaatgtttgggttatgtctctctcactttaacacgctaaacaccacacttaagcgcgganggcagctcgttcanggtctcacctangtcagagggcatactacaggtggctcgctcaagcgccaaatgttgcgctgactangagtatctctcaaccccacatttgtatgttatagaaaaaacccattccctcacaagtggagctgtgtgtcacaacgcttatattatatataacaagtcgtcacttgttctcttt

SEQ ID NO: 31802 - DNA, 669 bp, Glycine max
  unsure (1)..(669): unsure at all n locations
aagtanttgttgactatctcgtacacgngatcctctgagtcacctgcggcatgcangctnngtgntgcaaggaccnttcanaangagaactatagcaccattatgagtatatatanggaannaacgccaagacccaacacagctaatttccaatactgccatntcatanaataagacatatcanatatgatgtagaagtttattacaacaacacaattggggttggcatgaatatgattttaatcactttggtgacanaggacagatccactaatganaaggattgccaacctattacagccncataacagagtcattagcttgtacttccttcaccccctaatatangacacttttcagaaatttatgtgtccttttnntatagatccntttctaanttctagatgcagntaatatttttntcatacatacnctntctttaatatttctctctcanacattaatgagaaacaattaagtggataaagagataagaaacgggtatttggatngatagtgcanataattgacatacttaatgtgataactaattaactacatttcgtaggggcgtgaataattgaacggtctatagtanggacggagagagtgactcgtacanagtcctgtagaataataggaatatgactatatgtatangtaatctgn

SEQ ID NO: 31803 - DNA, 650 bp, Glycine max
  unsure (1)..(650): unsure at all n locations
agatccactgacctccatgacgtgactgcactatgatactcagcttcatagcacagtccctttcccctgctgnatgnancaccatntncaattttatctttgagaccatgcgtttgtcgaaaatttctaaagagggtcaggtcataggtcatatgggtggtgcaactactgtctattaaccatgaaccactggaactatngcttgtggcanagcatgttgagacanagaagtgctcatcttctcgttcctccgcaaccacctttgctatctctgatttggactngcatattcactctacatgtcccatatngccacactntctgcacttgacatctggccgtcaccaacattntctctcagggatgattgtctttctgtaatgcngacancgaggaaaggtctcaccttgctgcttgtagagccttctggntntctgtcctacatatgtagtctttctgtctttgcacctctagaatntgtgctttcgatgaaaccacctgtaccactctcttgctatcatctctctgtcctggcctgagacattatgagtctccaggtgatggtgcaagcgttgactctccatgtgtatctcgatctactctcggatangacanngatttgctatcttctacgaatcatccagagctcg

SEQ ID NO: 31804 - DNA, 571 bp, Glycine max
  unsure (1)..(571): unsure at all n locations
acgtcttcttgatcactcgtcacgngatctctgagtcacctgcggcatgcacgctnatatacangacantactcggtgggaagctacttctacatcgcgtattcactacaggatggngcctacactctactcttcttctatggctgtcactgcatgtccatggtgacaactcaccattgaaggacctcattgaagctcacagatccatgctacatagaagctccacaggcaagcttccatcacatattntattgttaaagtaacaaaatattataattattgttaatgctattctattataacacaataacatacaanaggttagactagatgtgatgatatgatatactgactttaacgtgactactgataaaatctttacatactactcggttgacacatcgtgagggatgtcttcaagatgaccataatatcacttagtctatgatggtaacaacgaaaaattatgcacgcaataattaataattttaaaagaagaattgatcatcttagtaagtatacaaatacattatagtacgaatgtaatgacctaaatatatatgtaatatan

SEQ ID NO: 31805 - DNA, 491 bp, Glycine max
  unsure (1)..(491): unsure at all n locations
attaattactattacagtanaagggactgatacgttgtattcacacatgtgcctctcatagcagctcctcgacttgtcacaatctgtaccagntgatcttatttatctattgacggagatctcattctacaggtttggctagagtactgcagaatactggaagggtctctaattctactctgcgatcatctgttggctattgtgtccaatcttcaacatcatatgaccaatagatcatctctaatccccacacataatcaagtaacttttctccatttataactngcatctgccatatcacatctttcccagcgctataaccaggagagctgtatcattctactcgttctattaaccatctacgcatctaggttacgtcatagtcgagaactttatcttattcagtcatacttaccagcanaccacacaatgaacggtgctaagataccttgctctcttctctaataaataactttatgaaatttgtagcn

SEQ ID NO: 31806 - DNA, 637 bp, Glycine max
  unsure (1)..(637): unsure at all n locations
tctctctgcgcatcttacactcgctcacttacaagttgccctatttcttctgtacccctcatggtggtaggaacctgttcttcatggaagatctcagganatgagttntcagaccttacctttgcttaacatactanacaccactaatacatatgtttttattctntttacangtgtngangaanaaagcccagcgtntcaagaaccttcgtgattgaggtcaaatccttttaaggggganggaatgatgcaatcctacccccgcacggcattggatagaanacttccagtagatngtgccagagatgcaagacangccctanggntcttatgagccttannggtagattcgggcccatgggctaagtacgagcccacttatctnntgtaatattgggataanggtttcattatttntgngccattgtatttacggctccataatgtangtanggtactctatanatatangatttttcnccccttgtatttannggcactagactagtttttgtatanngggtagtttgtaattcacatacactaagtggatattngatgtgtgtgggtggaaatacattaattgatttgtagaagctnattcattanatntagaggggggtgacatttctactan

SEQ ID NO: 31807 - DNA, 536 bp, Glycine max
  unsure (1)..(536): unsure at all n locations
gtgcactggttcgctcattccagctaccgatcgatcgaatgagtggctagctatcctggccgctagcgacctataacctatatgcanggatngnggctaagcgctngagactctcagctancgcatgacaaagatgcgctagcgcgagctggncttagcgaaggactatnntcattaatgtgtngtagtattttcaggtccttctcacaaattgaacccttatatctacattcaagataggctgttactctatgtcatatatgcacaagttccacgatctatcatgacacaagatacaaaatatactggttgcctccagagcgctcttaacgcatagctgacgcttacctatggcgattatgtttggtctacttcgacctctgactcttcatacctgacaacatggtatgacagctgttcacaacaataatcattttatctcaactagtcagctcttccaatacttcagtgagacatatgctccaatcagagagattcaaaatctaccaagtgtggaatatgctccacaccattat

SEQ ID NO: 31808 - DNA, 663 bp, Glycine max
  unsure (1)..(663): unsure at all n locations
acgtgcatgccgtaccgtaccgctgaactcacctgcggcatgcagcttctgggtattataacttcttagcaagcagtcattatctctanatgtatcttcatttgtgtctaagctggcgtatgaaggtcgttcgttgtgcattanatgtatgtctatggtgatacatcactctacttatcttccttgagacacactccaactactagcttcagagatcaaatctactgtaaggcagagcangtctaaccatagtaggtacaactattatggctttggctctnnttggtcatcattgtagaggaaccatgcagtaactctattatgagttaccatttctaagaaatttaggtaactattaactcgaacangatccctatattagctgtagaagcaagcttcatggtgaatcanaggtgattcanagggtgtnntgatgataacatgatgataacaaaagaatgatgacaacgttgatgacaanagctcanagatcaatcanagaacaactcangtgaatcaaagataatcatagaacactcangtaatcaagaagaatcacactcangagaaagttatagtcagaatcacaatcanggtcangactcacgntcacatcaaaatcngactctgattcagaatagagacggtcatcagatagttgag

SEQ ID NO: 31809 - DNA, 488 bp, Glycine max
  unsure (1)..(488): unsure at all n locations
tttcctccacactagaccttcatctcacttctgctactgtagatcaaatgaacacccctacttgtgtctcctgaaaaggtaagccaatagtctgataacatttacaactcgactgaaaaccatgtaaaaatgcagttaggagtaaccctacacattagtcagtttaacacctcaacagagaaagttgtcttgacaccctgagctatgtaaatagatgaatgacacggtttgatttatatgaagctgtanggtgctaaggctgtagtcatggataanggtgtggcttatcttagtcactcaatntgactcatgaatgactctgcagcccatggaaccgatacataagncacaatggatgattcttcaatcttactaaatgtaagtgagtttgcaaatgtatctactttactaacataatattctaagctgtatgctattcttatctgactaggactcataatctccctactatctgcctatgcagattn

SEQ ID NO: 31810 - DNA, 579 bp, Glycine max
  unsure (1)..(579): unsure at all n locations
tgtatatttacngtgatcttgagtcacctgcngctgcagcttacagagatgcactgatcangtcgtactcnatcaataacattaaatatgcttatctangaagtgatccttggtcatcttccaacgagcaatggtcaaccaaacgttcaaagttgatcgaagccgtactcgaatcanataaacatttaaaatgcagtatctatgaagtgataaaacagtaactaaattggngggaagggggttgttnttttctntannanntcatntnatttattgattgatccctattctccntttganaatgaatacaccatttaaacggcattttgattaatatttgtttcatcttgtatctaccattgacatttgcaagacaattgtttactactcctatagtattagctttgagtttattaaataaatctcatcattttcttgttattttctggtaatcatatattgttattgtgctatccttatttgttattttattagcgaaagttctattatttgattatatactcttattgttgtttatactagaatcttatatgttggttaattttttaataactctat

SEQ ID NO: 31811 - DNA, 655 bp, Glycine max
  unsure (1)..(655): unsure at all n locations
gatcggtagcactttatctcagctgtcttgctagatcggcacgacgcttgatgnanagacggtgcggatactcttatgatctcgctgctaccagctcttgagtcatggcagacaaaggcggtgtggtcgacataagcgaggctctcgctcctacgtatccttccatgatgaattcagacctacgtacttctggataacttngagacttgnaaagtctcggtgtatctgcactaaaatgcanacatgctctagcatagagacagatattccgactgacttagagcagcacatgcctttttgagtgaagaacaatgcgtctaccggtgaacgagagtctgctgatgaaatctctcatcaccatnantgatactctggatggtaacatatgcgtgctgaatgatcatttacaggacnacactgcgtcgataaaaatagaacacactactcaaagtgtatcaatctctgacaggtaagtggttcatcctaagtccgaaccatagacatgtcatgactngactatgcatagtatttctatcatatancacatacaggcgtgatcatgatcgatatgactggcttgagaatggttctcttgggagtntcngctttggtgantcgctgacgatttctagcttatatttctgctttgtcaggn

SEQ ID NO: 31812 - DNA, 634 bp, Glycine max
  unsure (1)..(634): unsure at all n locations
actgttgtgtacctgatcttaacgcacctgcngcatgcagctnangantantggtctcatanacttntatntcctgaggggaattcaatagatatgtctcttatttcaatggagtgggtaccattactgganaactcatatgcaacttttatagacgaatagattaaatatctatgacgcaatagaagtagggtcctacattcctactttggtggctggaaatacaaccatataataacctatggaagaatggagtgaagacaaatagagatattacagtacaacttataggccaganagataattacatctgccatangaatagatgaatagtttagggtatcaattcgtacaagtcataggatatgtgggatactcctacnagtaacacatgaacgtacaacatatgtanaaagatctaggatgaatactttgactcatgaatattaattattacaatgaataaaaatgaaagcatcaagacatgcanaagaggcactcatatagtaatcatcttgatgttatgaaaacctttcaaatgagatctataatacagtgtggatgctaatatgaatggaaccatgtacaccatactgatacgacttaccattgttctgccttattgaagtaaaat

SEQ ID NO: 31813 - DNA, 315 bp, Glycine max
  unsure (1)..(315): unsure at all n locations
gatacaactcttgcagatgagaatgcttcagaaacattaagaaaactagcagatgggcctaanagaaatgttataacctggcaaggatacgacatatacaggtattcattntacacaagagcacaagatgacaaaagtacaatgcagaacaacggtgttaccctaagggctgaatctcaacactgtgcaagtgtcaatgacgccaatccctgtgtagcttccatcctttactttgnngtcattgatganattgngagctaattatgtgaaattacagtatgtgtttcaaatgtaatgggtgacacaacaccggtg

SEQ ID NO: 31814 - DNA, 176 bp, Glycine max
  unsure (1)..(176): unsure at all n locations
atcttcttcaccttgcttcacanatccttctagttgctctaaatatatttcttcttgtagttctccattttaaaaatctgagttgacatctagttggaatatatttcagccattttgtgcagccactgctagcaccaatctaattgtatctaatctggacacacgagcaaaagtgt

SEQ ID NO: 31815 - DNA, 143 bp, Glycine max
  unsure (1)..(143): unsure at all n locations
atgttangcttttactaagtatctatgagttgagagttgaatggatntaagtatgaattccttacactttaattgatattattagattgtattgattgaattggagactangaggacttgtgatcctcgggcanatggtgtgt

SEQ ID NO: 31816 - DNA, 672 bp, Glycine max
  unsure (1)..(672): unsure at all n locations
cgtgctctgtcctgtaccgngatctcacagcgactgcngcatgcagctcttggacctcancaagcactaactcctctntcataatcatgctatgtgctcgcgactggtccctctcttcccttcgcagctngagttcactatggctactccacagagctccatgannattattccggccatacctcttcttgcgagccctctnggtctcttgttcaagggctctnngcggtagtgcattctcttcccgtaacccggcacactccttccgaatgtgtgtagcggccaactngaacttctncttggcangtttcgcctnnntctaactcgctttgagaagctggacnttctcgttctcttccggtgcttcaaaactttcttcgctgacgactnttaactntgtgagccaatctanaccctcgtatatgaactttaaccattcatggtacccaccaatgatgccattacgaatgcccctaagttcttgatctttccttaacggnggttcccantgccttatggatctntgtatagcccttggaattttgtgcgccagaatacctcacannggaaggagacatgccttcttccgtcngtgctccctcatggngacnctantngtctatagnanccccgganntgtagtatacaccccctcgtctatcagcggatgtn

SEQ ID NO: 31817 - DNA, 663 bp, Glycine max
  unsure (1)..(663): unsure at all n locations
tttcacattgtgcccttagtaactatgatactaagctctgaactggnggaacaaccatctatggtgtgaccagtaagaatatggagttctatcgaaganagtataacaagagatggtagcatggtctccacgggtgtttctaatganacatttagtagttttaggcaacanatagatcatagtaatcatgaaatggttaatactttgacaaatcacatggccctcaatttaaatcctntattgagaactaccaatganagttatcaacatatgaatgagaccctaactcgaataggagatgctttggccattcctaanaaccagcttgnngatagacatataatntangagataccagttcaagagagaccaataatgataataatataatcatgaaaatgaagtaatgtcccacgagataatgaatgataggaacaaccaaaccttgtnntggtaataganatcanaatgtagatgaagttctattaatatgcagtgaaccagatctatgagggcaaatgcgcanatagaagttaggcccttgatgcatacaaatcttagataatcnatgataanncagcctgatancatggntcaaacatgaatgacaacacctatnntgtctgcttcctatatgttacatctgaatgcanggttataagg

SEQ ID NO: 31818 - DNA, 227 bp, Glycine max
  unsure (1)..(227): unsure at all n locations
caatanctgtcgttaaataatacgctccgccctgccctcatcgcggactgttgtacttcatagcatctgccacttgaagcatacaactgatgatatctgatcgcagcgcatacacctgttctctgctatatattgacctggtgaacggtgctacatgtgcctattgtcaccttagtcaactgtgaacatactccgttgttgcataaaccacttcattatctttgggg

SEQ ID NO: 31819 - DNA, 620 bp, Glycine max
  unsure (1)..(620): unsure at all n locations
aatgttgttactcgtaccgngatctctgagtcacctgcngcatgcaagctntgctataatgcgcgcgttactgatcacgtgtgtggtgactgttaantgatagcaatatacctgatacactctcatttagcatactgacatctcatagaaagatgcatacacgacaacacatatttccttactatcatccgtcgaggtgtgtatgtgatgctcacacttatgtgcttaactattataggcaatgcgtgacatcgtactattctgtgagagtacattgtgattcattgagtgagccatagttccccgtatgagattgaatacaacgattaatacggacagttnggaatacctatggcatcaatcattgaatgtccgattgacaattggggaagacaaaaagttatacttcatttgacgtatagttaagatgttgtgtatctaaactaatatcagcactcatctgctttgtctctggtgaaacatgaatgcggaagtgtgtactctatcatgtgcgtcttgagatacagcgaatgctgcaatttgtcaaatacatacgctttactgctgttgatgaagaaaatgatgtcgatgggatgcaacttttatgaaagagagtaatg

SEQ ID NO: 31820 - DNA, 109 bp, Glycine max
  unsure (1)..(109): unsure at all n locations
cctcttctgtagtgactctatcatggctactctatatgagtgcatcatagtaganataatagagactgatgatattgtcaatgaaacttgtcttaatagtgggtcaatc

SEQ ID NO: 31821 - DNA, 656 bp, Glycine max
  unsure (1)..(656): unsure at all n locations
aatgttgcctactcgtccgngactctctgagcacctgggctgcagctgtagctcnagtttctttctcnanagataggaagaataagggcanataatatatatgtgccataagtggtggtagaataataaatggagggctaaaaacanataagccttggttgaataagtagaagtttttctaggaaaaatgctatcttataaccctaatttttgaaatcccagaanaaccataatntctttcgttaagccaagccacattacangcacataaaagtccttagtgattcaccaagtgtaagcaggataactctaactgagatgaagtgcanaatggggaacantantngcaagtcatagaaaatntanacactantccaagacacttgtgcgtagacaaaaacactaaagccttgtagggaaaaactggngcaagccgatctgattgattctggtactggaccaatctatctcaatggttggttatgctttcattgcanggtcatgacaaatgcaagaaagttcagtngagggaatttgaaaacaacggctatggaaagtgtnggagcattcagagcctgcttttatttattttgctacgacagcaaactntcattggcgatntgatactgtaatatgaatgtaggaatgtgtntctn

SEQ ID NO: 31822 - DNA, 629 bp, Glycine max
  unsure (1)..(629): unsure at all n locations
antgggaatgtgagctatcttattttgntagggtagcacctggnttctagcaagtccacttctgttgaatctaataannaaatatatataccctagcaatgantaaaaacatgtccccttgggacatccgangaaatangaagcatagccnctatgcaagcatgacacgcttttatcaagagatggtccattntntttccccactntncttcttatcaatattttaggcatgggtctcgttaagattcanaggctcannatggaagccttanttgtctaacaacaattaaggatacacaataaatccttttctgcaacanaatgtagaatgtganaacatataatnttatactttgtataggcatacgagtaagcatgaaaagagggacatgcnctntanngctnggtttcatccctntgatagagtcgaagattttggtctcgtgaagatgntttgtgggaatntacctgcanaggtagccgagttatctntgtagtacgtgtaacttttgaaacatattattcattnatgtgctcttctttgtccattcattaaatagtagtagaaagaacaaaagaaaatctatcctcataantaacctttctatgctattatgttccacccattg

SEQ ID NO: 31823 - DNA, 70 bp, Glycine max
gcttgctctcttatatatcgatatgcgtgagactcactttttttgactatgcagccgagcgttattaatt

SEQ ID NO: 31824 - DNA, 604 bp, Glycine max
  unsure (1)..(604): unsure at all n locations
cttataagctagcttgcangttcttgggtggtgtcagaacatgcagcgtatcggcaaagtcgcctatgagcttcgccttcctctggagtcacggatccataacgtgtttcatgtctccctactttgtaacaccttaaattctttntncacaattgtgctacaaatactatntaaacaataaatattgcggaacacacgtcattaacttttaattcttatttctaagtnggcanaatatctcatcaatctttttctttttattaacaggcatacatanaatanagtacaatacatgggtngcttgagaacatttaagttttgcatcgcaattaactccatagatagaataacgtagaattataatacgaagcctttgacatanataaagacaatatatagtatcacggtagaagaaattnggatacaaccaaagtgtaatagtagtataacaatcgatatacatctgctacataaaagacnacattactagtgaagatcctantcntcagaatgcatcatataatcacacggatctaggatcagagaaaatactactcgactaatagtatttgactacaccctaaagatagacacgggaanggtt

SEQ ID NO: 31825 - DNA, 264 bp, Glycine max
gttcctatttttgtgtttacacgctagctctggagaaggactccagaacttctgtcagaaaagagactttttatctctactctcagaagatctactgtattgaattggtacactggcttatgaaggttaatgctgctgacactctctactaagtagtactgatctgctatgtacggaacccaagtgttaaaatttccccagaaaactctactgccactgtgtctgcaaacatgtggctgcttgactctgtactcagagggtgtt

SEQ ID NO: 31826 - DNA, 177 bp, Glycine max
  unsure (1)..(177): unsure at all n locations
tatagtaagtcttgtgaagtaattcgcccaacactctatgacatgctcttggaggtaaacaacgaatttatnttgttaattacccaatggtttctcttgatactaattgactttaanatataacacattataatcggtatacactgcacggttngattgaagaagcaacaatgaact

SEQ ID NO: 31827 - DNA, 590 bp, Glycine max
  unsure (1)..(590): unsure at all n locations
tctcaanataggttcacataagatggtatgcaatatgtgatgccactgcataatgtcactngtanatatagatatgctggctacattctcgcacctcttatgactataatnntatgtcatcatcaatatgaaatctttctcacgatctctggcactatcttctattctatactgtggtactagagcctgattcctaaactgctagcacaagtcatattccaaggaaccacttggtgattaagatgaccatcattagaaacgaatcacatgcttgttcttccattgtcatcatnntaagttcattcanatagaagcacttgacatctgagtattctagcttccattctctgtcacgagttagatatgcaaacttctatggtagatattagagcatggattggatctttgtagttacccagatatgtcatacttctgccagcaagattgatctctatgatgtacctacagtagttttgggatttctttaaacatgaatatagatcatgcttgtatcatgtagtaataatacagttataaatgaaaattcactgcatgcagctacataaatcagtctggatcatagcttgttn

SEQ ID NO: 31828 - DNA, 541 bp, Glycine max
  unsure (1)..(541): unsure at all n locations
tgtgtaccgtccggatcttaagcacctgcngctgcagcnntcgatgtaatgcaccatgttaagaagagaganggtgccacttttgtgaatggtntattacattntgtatttgaataaggccaactgtattagtgctgcattctcttgatngcacactatggctgtttagttaagaaataagtaatanggaaacttagatgtgctgccttggctgacaacgagttgcacaatttcatatgttatgtgcttaattctagtttaaatanggataatgacaccatcaaatntngtatcaatctagtntaatacgttaatgacaccataaatgtgtatagtgacattcacttggaaccaactgtgtcatctattatngctgacatttctataaaaacaaccttgattgagtttaatacctttaagtggaagtaatgtctagtactgatgatcaagaatggtatanagacacacttggtgtacacaatcgagatgatctcacccctctatttctctattttaacttatttattacttaacatgatat

SEQ ID NO: 31829 - DNA, 179 bp, Glycine max
tctctatagccctctcaatactctgatgtatgctccggtgtctgattcaagtcaaccgttgttctttcggatcttgggaaaagatcgttttatccgctaagtagacactttctttgctattcttgaggaggtggcgtattgtgtagtctacctcttcctctgtgtgcctctctgattgc

SEQ ID NO: 31830 - DNA, 615 bp, Glycine max
  unsure (1)..(615): unsure at all n locations
tgtctgccgtccggatcttaagcacctgcggctgcangctttgagtagaacatggaccaactcattntatntcanaananatgttgtatctagtcaaggtctgagagaccatacaagtntcctagcgatntctaattatgtgggccattaagtctatcatatngtgacaatagccgagaagcccatgaatctcttcgggggcggagtangtgtccgccatcgccttggccttggtaacaagcggngaagttcttgactcccgttcaaggtaagagcaaaccgatccatccacnatggtgcctctttggtgtaagagtcgatcaccttctctagcctcttntcccgcgatacttgngcatactcgtccgcgatctatgctcgtgagccgtggtagacctaactcttcttgtactnggnatgatactagcatggtggctccgctccataacgctgaacagctctttggacctgacaggcactactctcttaagacatgtatgggtccgactgtcctctcttcttcgcactgagtactgtgctcccacgagctcgcgaattgtacggcatactctctgcagcctctggttctgtcaggctctgcgagtacatctttca

SEQ ID NO: 31831 - DNA, 553 bp, Glycine max
  unsure (1)..(553): unsure at all n locations
nttgcacatgagtctcttgagtctcagctctcgctatgctnggacgcctctagtcacacncgtgcagcctaaggacncactcatagggaagcnntcccaagtccaactccgaacgcgactcgaccggccggtatttcaacacgacanggaactcccctcgangccattgccgantcacccgctccaatgacgtacaagatcttctacatccttcatcgcatcatttgccgtggtactcccgaaaggtctcaaccccctttccgagtgtatgaccctacgcaactgcagtacatggggtgtccgngcattcgtcaaaatgctggccttaatacaggtcacattaatgatgccgatgctgacttcagagatcgcccatggagaccaaccgtccaatatgaggggagcgtatgcgtgagtcatagcgatagctaacttatgatggcaccctagagtatttgagctcaaaagagggatcctatgggtaggatctgtgtcctcgcaatctactgaactttgataagatatcacgtaaacatgcatgatcactgagaat

SEQ ID NO: 31832 - DNA, 163 bp, Glycine max
  unsure (1)..(163): unsure at all n locations
ctctcacgtttggtttttttagngaaaacaccataactaaacgcgccacaaggcatccctatcgcaccagatccanatctagaacgatgagtgatcaagacgagacacaggaacagatganagccaacatgtcggctctgaaagaacatatggcttncatgat

SEQ ID NO: 31833 - DNA, 604 bp, Glycine max
  unsure (1)..(604): unsure at all n locations
tgtgttgcctaccgtatcntcagagtcgacctgaggcatgcangctngacagagctcgcgtngtcgaagagaagttcaagtccatagccatcatagtctgataagagtatgatgaactaacggatgtcaatatggccaccgctgaagccttggaacgagagaccaagaacgcccaccaggaagaacacgaacaacgcagagtgttgaggcgctatatatggcaccaatagtgagctcaagctccgacgaggtgaaaggaactatcatggntcatacgcatgatcttgatagacatgattctgcatgcttaggtcgcaaagaatgagtcctccaggacagttgacgccttaataactgcaatcatctctaacaatctctgtcgctatccatatcgcagtgtgatggcagcttaccacatatctcctcgctgacacatacacatggccctcttctacaatactctgttcgtgactttaatgaccactctctgatggatcacgcgccctaccgagctgttgtggttaatcctatatgatgtactgtcggtangcattttctgggaacaaactcctacttcgcatcctcatgccactctatactattg

SEQ ID NO: 31834 - DNA, 646 bp, Glycine max
  unsure (1)..(646): unsure at all n locations
tgtgcttgcttacagtgactcagagtcacctgcngcatgcngctttggacactttctatgngaactnngtgcactctgtcaattcctcgtccagaatgacatacgcccacagacataagtggcagcaagagatttgtgctatcagttgcatggagtcctgatgtgaaacgacttgcttgtggttcaatggatggcaccatctcagtttttgatgtgccccgcgccannattctgcatcaccttgaaggtcacttcatgcctgtgcgatctcttgttaattctcttatgatccaaggctgctcgttacagcttcggatgatggaaacgtccacatgtatgatgcttacggaaaagcttaaattggaccatgtaggtcatgctatatggtactgcgtgccacgtgagcccagatgggcagccatcgctacacgttaagcgatgatctcgatgctatggatcttaactgatgcatctgccatacacgactatctatccaccaccttgtggagttctattcacacacatcgactgatctatgtctatactctcacactgtgctgtctcataaccgcctaacctgcatatagtacgtcgcgttctattattcatcctacgcgacttcatgtgctctatcttattctgtcta

SEQ ID NO: 31835 - DNA, 569 bp, Glycine max
  unsure (1)..(569): unsure at all n locations
tatgctgccttgccgtacngcgaactctacagcgctgcngctgcagctctatatgcaggatcttgagcttatgagttctctctgtggtgattattcaccatggagatgcaatggaagatanaggagaagacgtgaggagaggcaccatccactacggaataagtcatataacgacgagtataccaccaagagagtgccttggataagaagtttagagaggagatttcaatgaacgataagaatgagagagaggatgagcatggaatcgaacgaganaatgacggagagaagtgaactttaagtgttctacaagttctactcatcnagttgtgcaagtgttgacatgtattattatacctacgcactaccttgtaatatcattcattcatggaatcacgggatgtcctggattgtcgcgctcttactattaaacagcagattgttcgactctactatctttaatgctacatgacgtgacttacgactatttcatgccaccatcttgactcctcgacttgcattgccccgtctttctctacctttatctctttgttccggcccatttcact

SEQ ID NO: 31836 - DNA, 184 bp, Glycine max
  unsure (1)..(184): unsure at all n locations
ttcccgcgatgcttctnttcatgtctgcctgagtgggcttatagcctanaccatacttcccacgaataccttgngtatntatcagtctagttnatgccgccgtnngttttcctaaacccatcccgggctcataaccgttccccaacataactcgggccatcattaccgctgcatcggacagact

SEQ ID NO: 31837 - DNA, 58 bp, Glycine max
ccccctcctctacattcatatggcttcgaaccaactaacccaatctctccacccgtca

SEQ ID NO: 31838 - DNA, 658 bp, Glycine max
  unsure (1)..(658): unsure at all n locations
tctgttcttgatcactctactcgngatctctnagtcgactgcngcatgcaagctnttattttgatgttctactanggatctcacgcgttatatagaacgataacggagtganactccattccactgccctcgtgcgagggacatcgctctcatcananatattatatcatangatccaatgatgggaagttgcgcanatgtgctgcgaacctggtaacacacttttcagacgatccagcgggtgacgagtctcgcattataggtatactangataacgtttgatgtatgcatgacacatgaacagctacgggcgagggacattgctctcactagagacattagttataacaatccaatgctaggtatgtgtgaacatatgctaccaatctggtattanatttcacgacaatccaatgaatacagagtgtgaaactgtcgtatactgagacagcgttgccgtatgcgagacaaatagactgtatcgtgcaatgaatacggtatgatgctatgtgatctgacagaacgcgtngtgatgcatactctcgtacaactgcactacattctacataatggccggagatgctggctatattactctagttacaagtatttaacataatatacacactgctttccccctctatatcatatccctct

SEQ ID NO: 31839 - DNA, 238 bp, Glycine max
  unsure (1)..(238): unsure at all n locations
gagcgtctcgtatattactgtactcaatcttacatccgagtaanaagttattgtcgttnggatngtgtaagagaatcaacattcaattncgagcgtctcgatatatgacgggactcaatcagacatccgagtaaaaagttattgtcgttnggaatggctcttagcttcaacattcaatntcgagcgtctcgatatattacgggactcaatcagacatccgagtaaaaagttattgtcg

SEQ ID NO: 31840 - DNA, 642 bp, Glycine max
  unsure (1)..(642): unsure at all n locations
cattcnatgcgcacccattgangtgacactatgantactcaagcctggctttggtnttagacatgttgataccatgatngngactcgtaggaattgatttgtgctatattggatgaagnngaagtgtggtntcganatctgcattntgtgcagaattttgctgtgaaactgtgcagcaggaatttgcacaagtgcagataaatactangcatttgctggttgtggaaagagcagtgcagaatgagttctggatgttcgctagtggatcccaacggtcaaaatgtatgcttatgtactagagacttccagtataaatttggagtcgatccaacggttaatcgaattggaacgaatgaattgtactggngtctntaagtgagaaagctgtgatnntggtggtgtcttgcagagtttcttgctttgtctgtttcttgctgtgaagttgtgctgttgaatgtgtatactctgatgtgggaacttgnacgacgatgggacctgtgtcagagaacgatgtatggctacgtggcgacgtgactcaatggagcgtcacatgnatggtggttatgcaccttgtgttactagaactatcgatctatctcttatccactctaagcattgtatgtactacatctctatgctctt

SEQ ID NO: 31841 - DNA, 501 bp, Glycine max
  unsure (1)..(501): unsure at all n locations
atagtcgtccggacttaagcacctgngctgcagctgcaccagctgccaaggagccagctattgccacactgttactataacacgcactgctcttatggtgttctantccgtatgtacaaacttacgaattcgtacgatcttgtttcttctgtatgtacagaccttacgacacatatcatcctttttgctttggatgtangacttacgatgccactacacttcttgactttgcatgtacgaacttacgggtggcacaagcttcttgacttcgatgtacagactcacgaatactaacatgtgccagtactcgagatcaacgagtcgatccaacacgatgtcccgacaaataggatactgccgacccgataataacataaagcgattagagtatctagcattcatgagcagcaacaacctatacttaaataatatacaatgggggggtgtgtattctcaggaacaactatcataaacanactaactgcgtccttatacaattct

SEQ ID NO: 31842 - DNA, 191 bp, Glycine max
  unsure (1)..(191): unsure at all n locations
cgttacctagattatttacacgtacttncaaggtgtatnntgtacttacatcacacacatcgccttgggctaaattacatacatgcatactcaaagcattttgnggtaccananattgcacatgtgcacatncttgtatttctaatacctatacatacacaaacttcatgatgaatcttgactatctacac

SEQ ID NO: 31843 - DNA, 614 bp, Glycine max
  unsure (1)..(614): unsure at all n locations
tatggttgccgtaccggatctctcagtcacctgcngcatgccaagctctagtttcagatgantgcagatgggttgtagctacctcatgcacttctctantgacntatggcatcattctggcgcctaaactgctggagtggaggccatctnttcaattannattctagcttcaacanngagtcatgtctcaanggctccaccactggcagcatctatcatacttctcttcatattactgagtccttcataanaatattggagaagaagtctgtatgaaatctgatggtggnggcaactggcacatagtttcttaaatctctcccagtactcatataggctctctccactgagtngtctaatacctgagatatccttctgatggctgggtcctgaaganggaaatttttctaagatactctcttaggtcatccactcgtgatggacctgggagcaggaatacaaccagtccttgcactcctctatgaagangaaaccttagaatatgtgatctcggacattggggttcatgtgacaaaatgtaatattcaatgtgtgcgcttactcangcatgaacttgacaatgatatcagttagacttggcatctctcggatgg

SEQ ID NO: 31844 - DNA, 77 bp, Glycine max
  unsure (1)..(77): unsure at all n locations
gagaagttgaactttgagttgtgtctcacaagactctattcatcanagtacaacaagtgtacacatgttctattata

SEQ ID NO: 31845 - DNA, 442 bp, Glycine max
atgtcttcttacggaccacgcgctgcgctgaccctggcctatctgcctgagattgtgcggcttaggggatccaccacttgcagtcttcaactcttggaagaatgacttcttgtcatggagccaaaataatacttcacaactcattaatcaactgcttgtgacagatgcaacattattgcatactcaaccaagcaaacaatatcggcacatcagttcacgtctgctgacaaaaagctgcaagcctcttttatcctagtgaaaggacgtgtacctcatacagcctgggctgtcgtcctagaacctcttagctgttactgactggagagtgacacaatccttgctgtcaatcgctatcatacgttcatcaaaccctctccatcttggcagctgattagagccctcacagacattgtgctagcacacgggcaagtataagtcacct

SEQ ID NO: 31846 - DNA, 163 bp, Glycine max
  unsure (1)..(163): unsure at all n locations
tcagacatggagttgcagcggatgataaaggagaagacgagagaggagacgccatccactagagaataagccatggaatgagaagcttcaccagcaagagagtgccttggataanaagcttagagaggaagcttcaatgtgggaagagaatgacagagagaga

SEQ ID NO: 31847 - DNA, 178 bp, Glycine max
  unsure (1)..(178): unsure at all n locations
actctattcacttatgatagccaccgatgctcccatgactgcttccactaagctctctgtcctntcttcacaccgcatcacatgccttgtgaactccttatagtaccctcgcattggggtcactgaaaccccgtgcgatgaaaggcgtgatgctntcgtctgatggcactcctctcat

SEQ ID NO: 31848 - DNA, 185 bp, Glycine max
  unsure (1)..(185): unsure at all n locations
gagctagctacactccccctataatagctaagctcatccncatgacananaacatganaatacanaanatatccctactataaagactactcanaatgcctcgaaatacaaggctaanaccctatactactagaatggccaaaatacaaggcctanatgaaggaaaaacctattctaatatttac

SEQ ID NO: 31849 - DNA, 147 bp, Glycine max
  unsure (1)..(147): unsure at all n locations
ctcagtgatcgactggcatttagtccctaatagtgtcaatgatgtcagaaataacacttaatttntctcgctcactagttaacaacacaattctttntcttagcgatcaaatcaatcttagttggctatttacccaaaataaatttc

SEQ ID NO: 31850 - DNA, 204 bp, Glycine max
aaaaaatacgccgcgcgctgccatattggatacagtggacttataagatactgccactggagcatactacggctgagaaccgatcgcagtgcgtagccctcgtcctgtttaaattagcaagggaacagtggagaggtgtctatcgtcgttaagcatatgtgaaccacacggatgctgtacaaactatgtataaccttgggagtg

SEQ ID NO: 31851 - DNA, 166 bp, Glycine max
  unsure (1)..(166): unsure at all n locations
cacaatgaactcactanacgagcatgcggtgctaagcaagttcatcaatactcattgtgtataagcattatctgaagaactcgctaagtgcgcttaccgcgctaagcgagttcatcctttgaggatgaacactcatcctctggctgaactacctatggctaagcga

SEQ ID NO: 31852 - DNA, 588 bp, Glycine max
  unsure (1)..(588): unsure at all n locations
nctgcacttgcgcgactaaggactatagatctangcctctccctatnntgctataatggggaagaagtgaagaagaaangggtcatgcccttatgcacttttctctctcanataactgaggaanatatntccgtgaagaaaatccaagccgaggcgcttncgtaacgttntcgtaacgtttccatgagtaattacgtgaagattctcgaccgttcttcaagatccatcattcgntcttcattttcttcagtctacaatgggtaagtacctcanaccaagctnttcaattcgttctatgtacccgtggtggccacattntgtgcatgtatnttattcatgtttcgctacttttatagcccctatgacgtgctttagccattattagtcattctcgctaactaaaataaataatttcaccgacgttgaatgatcatcgtaatttggtaaatgatccgaccgtcgcggccgaccacgtgaataaaaagagaaatatattatatcaaatccttagtaagaacgaaatcacgacatttctggatctatctatgatgctatactaggaacagtaatcaccctgcactgccaaat

SEQ ID NO: 31853 - DNA, 613 bp, Glycine max
  unsure (1)..(613): unsure at all n locations
tgtgttgcttgccgtaccgngatctctgagtcacctgcaggcntgcaagcntctagaatatcanantntctctacantaataaggacactgtactagtttatgaatgacatnngttgtaagtaaaacttaacanaatgaaatacanatgggtaattaagtgaacataccanaatgtcatcccatattaggtcctttagagattcggggacaactttccanatagaatgaacaattggactctnttcttgagcgaccacccttccaaatagctgtggaactcttctgtatatgggccagattctctcccaatggtagaaatgacattaactgtaggccttggctgatccangggtctacagtcaagcttctcagctgagcggatggctactctcctagacgtacctctgaggacatctgatacatangggacctangggtgtgcatactctggcanataaaaactaataatgacataatacaacctatgatttgctatactgtcatactatgactgtaccttatcgatgataagaactcagtctgtgaacgactctttcaattgtactgcacacattgatgctgccagctacaatacatcatgtaaatggccct

SEQ ID NO: 31854 - DNA, 666 bp, Glycine max
  unsure (1)..(666): unsure at all n locations
ttagtcatacgagtacgtgcactctaactctgcgcctcatatcgcgtgtcgtagatgtaaatgcgngtgcgangctaagcgctcgctctctaggcactatgatcaccaacgctgctcacagtactgctcttactaaagcttctgaacgaagctacctaccctatacatagaagcatgtgctacactttgtataactgtgatgaatgaaagtcttgtgagacacaactcannagtcaacttctctccctatgtcttccttcaatatcgtgctcccacctctctctntctctcgctctgtcttttcctacattgaagcatcatctccaagctntgtatccaaggctcatnctggtggtgaagctccttcttccatggcttattccctagtggatggcgccnntctctcacctcttctctttgtctaccgctgcatctccatggtgganaatcaccattaaaggacctcattgaagctcanagatccaatctcccatagaagcccacaagcaagcttgcatcaagtggtaatcagagcacaagagcttcaaganggtgttcttcattnttntctcatgtatctcctacatgtctgtgataatggtttacatgatcttagagttcacccgataactgctagaagctagattgatttatggtanattcttg

SEQ ID NO: 31855 - DNA, 174 bp, Glycine max
tagtaagtagtaacaccatcaaaagttctgaaattctcaccttgtctcgtggcttctctcacaagatacgcgtggacctcgtatggtgtggcactcgcgactgtcaagcttctctcgagctcatcgaggacacaagcaacaaggtgtcaagcttctattgagctcctcatgttc

SEQ ID NO: 31856 - DNA, 369 bp, Glycine max
  unsure (1)..(369): unsure at all n locations
tgtgcacnncctgatacaatggcgtgtggaatcacgttctattgtatcatacagagggtgcatgcgcttgctcaaagtctcttgtccaagatcacggattatntcctctatacgctctccgctgtcttcgtgaacccactgagactgagaaacagttggaatgtcagccgattccccatgccatatcgcatttgtgtaattcggaatgatgtcgtaacatatcagatgtgatcagaattcatcaactgactgtcgtctaccattaagaacattaacacatgggcaanaataatggcccttcaaactnntcagcattaagtgcgtanactgtagaaatngtccacnccattctcatactcatcactgatg

SEQ ID NO: 31857 - DNA, 611 bp, Glycine max
  unsure (1)..(611): unsure at all n locations
ccgttcttgattactngtctcgngatctcagagtcgacctgcggcatgcanngcttatgagagagtcatagatcanantngagaggaataataatatctatgctttatnagccaacanacggagaaataanggtgtcttctaacctggagaatgngtttgngtgcacatgagaaaagaaaggtttccggaacataggaaatcacagcttcaaccaaggggagatggaccatatcaagtgctcganagaatcaatgacaatgcttacacnagtgagctgcccggtgagtataatggtagttccaccttcaatgtctctgatgtatctctntttaatgcagatggagaatccgattgaggacaaatcttttcaagaggagagaatgatgggacatgaccagaacaagggcaggatcacttgaggacttgacgactatgacanggctgacaacgaaagcactgagctcttaacagtgtgtcatatattgaatacagccacgttaggagaaagtcacgtgtagtgttatggcaatggagagataataccccttgctcattaaggttagtgtaaatgccatctgtagtgtgaanattgttggtatactaaactttt

SEQ ID NO: 31858 - DNA, 108 bp, Glycine max
  unsure (1)..(108): unsure at all n locations
gatatctatgggtggaatggatgaatgcatgaaggaatgcatataacacagatgcaatctangaatgcggggatccggngaattcatccacttcttatacacaacgtc

SEQ ID NO: 31859 - DNA, 590 bp, Glycine max
  unsure (1)..(590): unsure at all n locations
cagtcatctgatantcatctcgtgtgataaanactgcacgtatacgatataagtgtgtgtngctatgtaagataaggaatagctacgtgcggataggcatgtaataaagctggaataataagacaacagctgatctatggatgaatgctctcctacaacctaagctcttgcatgctataaanaccatgaatngatagcagtccagcctcgttacaagcatgagtaagtcctttggattcacatcgcgtgttcttgactcgatgatatgagatgaagtgcaaagaatgagacttaatgtggtgatcgatgatggataacctanacactcgtgcttgagataaacaagtagttgagaggctgtggtcaatgatcctgtcatgatatctgtggatcttattagcgtatntcacatgtgttctgtatntcatgtcacatgattgaaagctgtgtgtcttgtgagaactgcgatcgagcattgtatgccattcattcatgtgatcgaatagtccgaacaaacacatngtgagtaccactgtgattagtcacttaggacaagtgagtngtccttcttagctgatgacaagcaaatn

SEQ ID NO: 31860 - DNA, 499 bp, Glycine max
  unsure (1)..(499): unsure at all n locations
ctaattctcttgcatctctaatctcatgattacattctccccctatttgatgatgacaaccacctgtatggtatgagcaacaatatagaananatatctattcgcatatangttactcccnctntggtatgcaatgattgcttatatgagacagttgaagattcatatgtccatatgtaacaaactgctcataacaatagataatttcttactatttatcttatcttctctctcctttgtaacatcaaaacaatcatgaatgagagggaaagatgtaccacttgtgcaatgtattagatcaagtgatccanaagacattaaacaatcatcaacttaatcagagaaataagtcatacactcatcaaccatcaagacatcatctcaatattcaatcaataataaatatatcactactatctatattctatcagaatcaattcaatcaattacattaattaagttaacttaattaattaattaattaattaatcactcactc

SEQ ID NO: 31861 - DNA, 492 bp, Glycine max
  unsure (1)..(492): unsure at all n locations
tttcacttacggcctcaagcacctgngctgcagctgtaactctgaattcttaaactgtccttaaagtatgactttgaagatcttaaacagtactgaagatgtgactttgaatgtttttcgaatcgtcactgtatcaatacattaggtgtagcgataccatcacaatgtactctcatttgatttaaatctacgttaaacactgtatcatacgcttgtaatagttgaaaacaagctgtactgaatcatactactttgtatcatacagaaganactcttgtaaagattgtaaactctgtctactatgtttgaagctttagactatctgatgatatctctgatatgatctgatctgatctgacttgattttatctgatctagactgatctgatctgaactgaactgattttgatttgtgaacttgtaacttgatcttgatataaaacctgagactgctccatcnactctaggatagttaagattcaaacaatcccg

SEQ ID NO: 31862 - DNA, 133 bp, Glycine max
  unsure (1)..(133): unsure at all n locations
gtcgctttgngtatatattatgacatgcgtgaaacggggcgagaagatgtcatatnggcacgtttaaatanaactcgcgacactacctcacgatggctgagagaaaaccactatcctaacgcttatgagaact

SEQ ID NO: 31863 - DNA, 446 bp, Glycine max
  unsure (1)..(446): unsure at all n locations
tgtgacatggcatcagacactctgtgctcctgcngtcactctaagacccggtccagctcaatcgcctatatgatctattaatcatgccgcgttacacgtcngatggaaacctgcgtacctactatcgctgcaccatcccttcgcactgggaatacaagagccgcacgatcccttccacagtgccagctgatgcaatggcccgagcgatttctcttccattggcgattacaccgtatgggccttagacattgttgagcgtagtaacagcccacccgcacccgtgaccaccttgggcatgattacttttatgagctcaatatacgaactgctcatgcattaggcaacaaaagaaccatgctaacccttaccccaaaaattttatcttaattccaggtaataaccgtctcccgatatcttacaaccatctccaatttgtataaccaacg

SEQ ID NO: 31864 - DNA, 172 bp, Glycine max
  unsure (1)..(172): unsure at all n locations
ccatgctgtgactgccattcctatatagccaagtntcccaccaacccaacaatgtcattactcagccaataacaaacacttctcttacccaccgtccagttatccacanaggccatccctaaatcaaccacaaagtctgtctatcgcaacttcaatgacgaacatcaccttt

SEQ ID NO: 31865 - DNA, 197 bp, Glycine max
  unsure (1)..(197): unsure at all n locations
tgtcacacacaatggagggnaatntgaatctcaattcannattcacttgaatctganattgaatttgtggagccaacacttggagccaanatttcactaattatgattagtggaatttagttatggttcagcccactaatccaagatcaattccaagattctccactaagtgtgcttaggtgtcatgagtaggggtg

SEQ ID NO: 31866 - DNA, 547 bp, Glycine max
  unsure (1)..(547): unsure at all n locations
agtggttgactgtaccgtgatcgtgancgtcgacctgcangcntgcaagctngatgatttgcctctactctgtgagcaaacttatgtaccacaacatatatgactctaatgtgtgcgaatctgcttaatcaatctttcttgtngagtaatgtagccatacctctttactgcagcgcacagaattggaanattgctgcanagcagcttctgacacggtatncanaagatactattgtacattgtaagtacgcacaaacacagctctggttgcttctatgcgttgttggtctttgacattaagcagatcatcgtataatgtgtgtacatcattaaacagcgctcgttgagagagattctgttttaatagagttgattcatgacattgaccacatgcaacaataaatcggttcgcaataattacctgcaaattatcacaactgggaacaatagcgctttgcacaataaacatatggattctaagttttatagacccttattgaacagtgcctagtattgagcggaatgttacttgacctggcggactacg

SEQ ID NO: 31867 - DNA, 270 bp, Glycine max
  unsure (1)..(270): unsure at all n locations
ctccagcactcactgagagttngcagctcagagaccgtttctccaatntgtgcatgtacatatcagatattggtaagaacccacccttcttgttgcagagccagccatgagcagctctcaatgcagctccaagtgaagctgaatcttcaccagattaaagaattctaatacttaattagttagcttatcacttaacaaggagaagaacanactntcaccactttacagataaaataagtatctgcaatagacatatagatatacatgatg

SEQ ID NO: 31868 - DNA, 174 bp, Glycine max
ctgcagctctggactggagccgatctgtgttcaacgtctttctaatggtattgattaattgtgtcggtgagttgtttgttggcaaaaaacataacaattaagaagtacatgcaaagcagaggacaacaggctatttgcttctcttattcagagagaataaagggcactgctcct

SEQ ID NO: 31869 - DNA, 215 bp, Glycine max
  unsure (1)..(215): unsure at all n locations
ctaccaactacagaccctaagaaaactatattatctacacagaaagtacacttctctatatttgcatagagggtgttcttcctaaggactganagaacttgcctgagatgtcctaagtgatcatctacgctcctactgtacactaaaatatcatcaaaatatacaactactaatctacctatgaaatccctcaagacatgatgcataagcctcat

SEQ ID NO: 31870 - DNA, 211 bp, Glycine max
  unsure (1)..(211): unsure at all n locations
cgatggcctcaataacatctattctccacatggaanaaggccaaggagcggacataacgttcagaggatgtggcggaacatcgacattgtccgcgtatgctngacanttatgacacttccttacatgagcgcagcaatcgctttccatggtgagccaataataaccggccctaanggattntctggtcatagcatgcccattggcatatgt

SEQ ID NO: 31871 - DNA, 595 bp, Glycine max
  unsure (1)..(595): unsure at all n locations
aagtgcagctgtaaccatccnnggacnctctnantactcaagctntgcttctacantntcctttctgatccctttngantagtataatgtccattattccttttgtgaatncaatagatctgcatcatctattgattgtaccctagagcaaccaatctagccttgttctaacaacttctctttcttcactgagctttgtattgaacacctacttggttccagtctgtaactaattcttatgaagggggacaagatccagacctgttttagtgactaataattctcttcatagcaattctaaaaacttcctcatgcttatcntattttaggctaatggtgagagaaagccatactcctattctctatctgagaggctcttgtnttgactcaaagatgttctccatgatagattagaggattaagaaaagacttatcttgacatataactattntgtgtatgacttttcttctactctctnttgacctttgactcctagaaattctttctttcttgctttgacanggtaatctagatgctctatctttgttcttctctctaatacatcttctccagtgatcattctaaccactctat

SEQ ID NO: 31872 - DNA, 211 bp, Glycine max
ttaaaaaaatacgctccgccctgcactcatcgcatactgttgtaatcataaacattctgccgactggagccatcccacggatgataacctaatcgtcatggatagcaccttgcgcttgctatatatttgcatgggaaacggggcagaattgtctactgcacgttaataaactgtgactaccaggtggtgaacatacattccataaccctgg

SEQ ID NO: 31873 - DNA, 268 bp, Glycine max
  unsure (1)..(268): unsure at all n locations
ctctctattctacnttatatgaaatccattattattttggaacaaaaatagccatgactgtatactcgttgagttctaatttctttaatcaacattntagagatcaaatagattatagtatagataatcttttttctctgttgtttggatagcataatcaaactatagatcacatttattgtctaatcagatatagataaaagaaatcaatcaagatattctggacactaagataaaatatttgtaattatgatacntttaaatttca

SEQ ID NO: 31874 - DNA, 534 bp, Glycine max
  unsure (1)..(534): unsure at all n locations
tgtatgtcgatacatcagtacncttganactangctcacgganatagagcgataagtaagccatgctgatctataatatactatagtacattgcatatacataacaattcatgctatgaaaatggatacaacttccatanataaaatataccagtccanaacaaattcaatttgactttgaacctgttgatacctctcattgtccaactgaaggcatatanatngacaataacataganaactcagatctaatacaagagacatgcccaaattattgttaacaacaaatataatacagcaagtagcacacacacgggatcaaaaaatgatcaagcattgtgtagtgatatctaaacatcttcatacatctttacacattntgtatctaaaatatgacatataaatttgaggttactatgttagggctactatattgtatctatgattatcatataaatgggtaaaggtatgttcatgactgtattatgaatagcgagctaaattttattttatatataaaaataggctgtttgc

SEQ ID NO: 31875 - DNA, 155 bp, Glycine max
tcacgtacaaactcaccatcctctgttgcccaccttctactgagctcacgtgctctcacgtagaccttatactcgtacctctcaacgctgagtccgcatcaatcctcccaagcttacacaacatccaggtaataccgcatgcaatcattgtggac

SEQ ID NO: 31876 - DNA, 313 bp, Glycine max
  unsure (1)..(313): unsure at all n locations
ggttcgtagctacctcatgcactcctctaatgactatggcatcatntctggagctaaactgctgggagttggangccatcttctcaattaaatntctggcttcagcaggagtcatgtctccaagggctccaccactggcagcatctatcatacttctctctatattactgagtccttcatacaaatattggagaagaagctgnntctgaaatctgatggtggggcaactggcacatagtttcttaaatctctcccagtactcatacaggctctctccactgagttgtctaatacctgagatatccttcctgat

SEQ ID NO: 31877 - DNA, 118 bp, Glycine max
  unsure (1)..(118): unsure at all n locations
angcatcaccacttgcgcgtgcgttagtaatgcacgcgaaacggggcaaaaatgcttatggacactaggtaaatgggactaccacgatggtgacaaaactatttataaccttgggaag

SEQ ID NO: 31878 - DNA, 585 bp, Glycine max
  unsure (1)..(585): unsure at all n locations
gagaatatcggtcatgtgtctactatcatcggtatcatttctttctgcgtcatagagggaaccactcgtgctgacagatccctacacctttgtgcgtattctgtgaaagatccgtgctcaccactctcggcacatgtgtttgtagttgcatcctatccggagccatatcagaattgtattgacaccgtctaacgaatgcaatcattaggtccttacaagaatggactcgtgaagggtatcaagttagtgtactatgtaacnagctacctcaataagactntatgggaangaaaatgtatagcagttcctcatctntcgtgtatgccctcatcttccgacaatacatctttagatgggtcttgctgcaagtagtcaccttgtacttgtaaagtccgacacctcgtactcgcgacatgatcatgtatgggtctaggaacaactcatatacgctagcaaggcataatctgtgtctctttcatggacanagcctattcttatatgatcaactatacatatctcgcatacatgaggggtatacccagtgtggatgcacgggtgtgttgtggtgatctanggccctcacat

SEQ ID NO: 31879 - DNA, 301 bp, Glycine max
  unsure (1)..(301): unsure at all n locations
atatagtgttcttatatanggtaaatccccgagtaatataactgtgtgcatattaagtgaaaaacagtaagatggaaactntggaacccagctaccccatgtatgctntatgactcttaatgggtatgaaaaaatacagcanannaactggctcagttactcaagtgaggtaggcttggtgaactagaaatacatatctcanatagccgtcacagcagttcaaccttgatgtangcaaggcanagcattctcagaatgtgaacataccaacattaacatacatgatcaacannatcccttt

SEQ ID NO: 31880 - DNA, 180 bp, Glycine max
  unsure (1)..(180): unsure at all n locations
actagttttntaatgaaataataaagaaatttaatatattgcagtttttgattagtagaagataaaagaagtagatttcatgtgctttggaggaaaatcgatgctgaaattggaagaaaaagccttgaagaaaaaatggaagaattggatcgctcgtttagcgcgcactctcactaagcg

SEQ ID NO: 31881 - DNA, 606 bp, Glycine max
  unsure (1)..(606): unsure at all n locations
tnggttntctccttntagcnccatgtaagccactagatcccgagtatggtgccggtcctgagtatacactgtatccattgcaaccattcaccacttgngcagcctctgactttgcatcatatgaagggcttggttgctctttatgcatagctcctgctactnttccttttgtaacatatgccctaccatcattngtaccangaatttgagaaacattctgcatttccttcacanagaagagagacaagtgaataaaagtagttatttttttctagtagtgtggcattgagcaatgaaagcaagagcacctctttcanagctggttggnntgaaattgatatggtcatgggaaactntgtggacttgtctttgnncttttgatgtcacagcctctctcactttacctnncattctntgtctgagcatannatatgacttcagcacagagatggggaataataaacanagttccataaaaacatgattaaatntgatatttgatagtangatctcaggtcgacccagatatggggtaatgatatcaacattggagattganttagatanacangatattattctctgtataatacactctcactcaag

SEQ ID NO: 31882 - DNA, 661 bp, Glycine max
  unsure (1)..(661): unsure at all n locations
acttgtacttgaccgcgatctctgagtcacctgcangcntgcangctnntcnnttgtggtngatgngttctatcgcgtaaangncatgaccactgtctgacatattctcaatcaattcagttgcttcttccggngtcttcgactnntattttcccccaacagaagccatctagcagtgcttggttngtggtctcatnccatctatgaacaaattcanatgaatnggctcggaanacccatgggtgggagtctntctcaataatcctctgaacctntctaatgcttcactcanagaatcatcacggaatngatgaaatgaagagaatgtagctttccctttatgcaatctggactctgngannatattcttagaaaaatttcaataacttcttcccaggacttaagaactgtacccttaaacgagtgaagccacctcttggcctctcttgccaatgagaatgagaatangctgagtcttatagcttcatctggcacaccagcaatcttaacagtgttgcatattntcgatgaacgtgccaaatgtgcgtnggggtttcattacgtaatctttggatannatccatgtatanatgaacanatatgnggtagtgatgtgtgactgcactangattgcatgctataatatgtgactgactgctgt

SEQ ID NO: 31883 - DNA, 157 bp, Glycine max
ttacaatctgtgagcccgaatacgtaatcaccctgtaacagcttgtggccgcatgacaaggccaaagacacgtagtcttgctctctagctgtcgctacaacacaaaagtatccgatacactcggttttcgccgtagctgctcgaactatatacaatc

SEQ ID NO: 31884 - DNA, 665 bp, Glycine max
  unsure (1)..(665): unsure at all n locations
agtgctacgnanataagtgttgccgtaccgtatctcacactcacctgcngcatgccaagctgctacgcaagcatccatcangtggtatcagagcacacgagctncatgtatgtgctctntanacctnncgtacatttcagctataccttctcctncatngttgtntctgcattgtntctctccatctatatcctcacatgtcttgtgttgaatggtgntaacatgattctttagaattntcaccgattaaacttgctatagaagctagaattgattgtctatggntcanatatcttgttctcgttctggaaccatgaatngtgtagagtatgcgtcctttcgagtttgtcttgctctttttgngggctaaacctaaaccatanaantcttatcaaaaaaatatagtataagaaaacctcatanatctagagtaacatgctcactcattgtagatntgtcatagaagtcatgtctagtcatgaaactnnatacataagaattcttatgtcgagctgaatatatattctggttctttgctaactcattngtcatgagtgatgaaanttctctagcctatattttgagtgagtacatcttcatgtaatagtcttacatgtcatgatactctaagagcttgatgtgaccttcttgacttagttctatan

SEQ ID NO: 31885 - DNA, 264 bp, Glycine max
  unsure (1)..(264): unsure at all n locations
ctgacaaccctcgaacatgaactcaataagtaaactttgaatcagttgcctgtatcatatcgaactgtatcatacagagtacacctgtactaaaatttagaaacttntgaaacaaactgtgttgtgttttgaaatattcatatcctgcaagctctgatttttttgactgatcactctctgatctgatcactcttgatctgattttgattcttataactgaacaactgatctactctactatttaacatcttggctttgctctct

SEQ ID NO: 31886 - DNA, 190 bp, Glycine max
gtatcaaacctctcaccaacaaaggtgtgaagaccatcaaacctttccaaaatcttctaaagaagagatgaatcttctccttcatgtccttcttcaccaatatttctagcacccttctttacccatgatccatcatgcctcttaatataaccaaaggatgctatgactgaagcgcctataagaaatgatc

SEQ ID NO: 31887 - DNA, 273 bp, Glycine max
  unsure (1)..(273): unsure at all n locations
tcgattacatcctctggtaatcgattatcagagagtaaatgtcttcgtaaagaatttntaacttaatcttcttggccaaaccttntgctacttcaattggaatttccttcctatttaatataccctntctaagactctatagactgtcttgatcatccatcttgaatatctntaatngcttggtcttgaataaaactntgagacgcatgtgatctttggcatcatanaacatcggcttgtcctttgctacagaactgacttgagaatgacaat

SEQ ID NO: 31888 - DNA, 174 bp, Glycine max
  unsure (1)..(174): unsure at all n locations
atgatctttcaagcaacagatacaatccatgttggagaaatcatccaaatctgagatgggcaagtcctccacaacaacaatagcctgtccctcctttctagaatgctgctggtccaagcaagccatatgttcctccaatacaaaagtagtcacaacanagacaacaagcaactg

SEQ ID NO: 31889 - DNA, 677 bp, Glycine max
  unsure (1)..(677): unsure at all n locations
tgtgccctcgagcgtcttgatactcagcttcancngagtcttacanatatcccatcatgaagcagaaactaacanaactacccatcattatctccattaccncatacncacganaatcaaaggagagnagaagtccacccaaacctgaatttcgaagtcccactcgtagccacgcacttcacgaccnncgaaatgccctnctttngcgannttgggcagaaatgatggccanagggtgaagctntgctnggagcttcaatggagaatgaagaataagagaatggcaacgtgagggagagagagagctgtctganataatgtggggctgagtgaagagagagagagtngctttttgattntaanaangggtncttcctcatttcttatttatttattatagactatgccacatgtctccatttgagtggagcangaaggcccactntctcnttngatagtgacctatactcagccacannagtgagaaaaatctgacctttgaagtgctaaaatcctgcctcggnnttgcgtgtcgttctcttggtctagnnntctcgcgttctctgggtccgcggggccagtttcgaaagatgcatataatatcaaacgctcgagtanaccccgacatgttcagagggtggttcgtaanttttagtgccgcanacgatgatttaacg

SEQ ID NO: 31890 - DNA, 311 bp, Glycine max
  unsure (1)..(311): unsure at all n locations
catgtatctctactcgtagaggggctactgtcaacccagcagttatgagttgctatgttttcttctattcgtctacacaaacttgcactcgcttatatctctattgtacctcattgtntggctgcacccgcaccaccactggaccactttatgttctgggcatatattgcgcgaaagttgcttctatatataagatgatcctgaaatgtcgcatggactatattatgctaacatgaattttcttctatccatctatatcattctctgactcctatgtgttttgtgaggtgcttttaccactcacagaaaaa

SEQ ID NO: 31891 - DNA, 230 bp, Glycine max
  unsure (1)..(230): unsure at all n locations
gctctaccgtaagaacaacgcacaaacctatatatctggcgagagaacttcatccacattccattatgatcccgtacaacattggcacaagtaagataagtaccatccttcatagatccatccacattgaatntataccactccataatcggcatatgtcactcaatacaagaacaatgatgatctatctttctattatgcatactgacctgattcgaaccatgaatatc

SEQ ID NO: 31892 - DNA, 152 bp, Glycine max
tatgctccaccaatcatataaatcaaagtccatcctataatgctctgtaagcatgaattgttgttgctatcattgctccaatgggagcgatagcaatgacaatgacatgcatgttggtggccatgtgcaatgatcacaacggcaatcttgat

SEQ ID NO: 31893 - DNA, 313 bp, Glycine max
  unsure (1)..(313): unsure at all n locations
atcgctatgaatactatattgttgacatgatactacgtaagngaacttcatgtcagctaatgaatggcattgtgtccacagtgaccgctcaccagttgtactctccatgctctctagttctgcagccttgtaacctctcattaattctgtgaagtganatgacaatattaagctcagccaataatagataagggaatgatctctctntctctctntcaatgagatttccgcaatataccttcatcctttgccatatcaagaaaagcctgtagctccaatgcttgtcggatatacatcattcctcggacttcac

SEQ ID NO: 31894 - DNA, 114 bp, Glycine max
  unsure (1)..(114): unsure at all n locations
gtatgacagtcaccgctttangagtgctgtacatcagcagcgcttcgaagccatcaagggatggtcatttctccgggagcgacgtcgtcagctcatggacgacgagtatactga

SEQ ID NO: 31895 - DNA, 592 bp, Glycine max
  unsure (1)..(592): unsure at all n locations
ntgnatgctctacattcagtgancttgacactaagcctaatgtacatcagtgtggaaagatanttagatcatcaatagctctgctggttgtgttatatgcatacataagaaatcatgctaccaatgttngaacaganacataccttannntagtatcntgtatttatctntcttacattaagacttatctaaattagtggaaattggaaactanaattgcttattacaatcatattntccaggaacaacagcaagaaacttcaatgtggcatagatggtntccgtgtcacttacagaanagacaacgagcatattggatggtccatccactcagctgaattttcaatcaatanaccacaactcactaaatcagcttatgctgtcatagccccaaaaagtaggctacccggtgattaccntcgaaaatctagtntatagttctgattcaaatactttatttagtganatggtctagtaaagatataaaatactaaatgatgctttctaagcaggctatagaggtctaagttacactaattcatcatgaactgggacacactatagtatcttactgctacanacttgatattta

SEQ ID NO: 31896 - DNA, 668 bp, Glycine max
  unsure (1)..(668): unsure at all n locations
tctgttgcntactctaccgngatctcagagtcacctgcnggcatgcaagctctangganagtntctcaagaaagcttctcatggaagctacctagtctatatatagaagcatgtgtnacactnngtgtaactntgatgaatgagagtcttgtgagacacaactcacagttcaacttctctctctttgtcttccttcaatatcgtgctgccgcctctctctatctctccctctttctnttcctccattgaagcatcctctacaagcttctaatccaaggctcatcttgatggcgaagctccttcttccatggcttattccttaatggatgacgcctcctctcacctctcttacttaggcgttcgctgcatctccatgggggaaaatcaccatagaggactccattgaagctcaatgatccatgcctcatagaagctccacaagaatgcttccatcaagtggtatcagagcacaagagcttcaagtaggtgcttcttanaccaccattaattntntntctataccttctcttncatggttgttcttcattctcgccatgatctcctacatgtctcgtctaaaatgtgtaacatgaatctntacagtttcacctgataaacgtctatagaactagatttangtttatggtcagattctcgtcttgtctcag

SEQ ID NO: 31897 - DNA, 307 bp, Glycine max
  unsure (1)..(307): unsure at all n locations
ataaggaagacatgaggatngcagagaatcaatntatgttaggaaggttacaacgtaagtcatttatctntaatgagaatttgatggaaaggtacctaattaaaaaagagacttacacaagtgtcaagagaagttntgtgaaagactntgngtaanaaaagtgtctaaatggttgaatgtaacattgactatntacatgtcaatataatcataattcatactatntggataatcaatatatgtatatataatcataattcatactaatcaatcaatactatntatctatctatatgtcaacatgtca

SEQ ID NO: 31898 - DNA, 59 bp, Glycine max
actaagcgctgcgctcgctggattttatctgcatttgactgttgtgttttttcctctgt

SEQ ID NO: 31899 - DNA, 152 bp, Glycine max
  unsure (1)..(152): unsure at all n locations
tgatggagatagatggtaagccaatgcctaaagtagttgtgcttgaatgttactacctcactctacaatngaggtanaaagagctgagcttgatgaacttangaggatatagtctacaacagagcatggacctacacttatgtctctgtatg

SEQ ID NO: 31900 - DNA, 677 bp, Glycine max
  unsure (1)..(677): unsure at all n locations
acgttgacatcccgtgcccgtgccntgtgacgctatacagtcganctgcnngcntgcangctnngagaggatgcttcaatgganggaaaganagacggagatatagagagatgtgggagcacgatnatgannggaagaaaagggagagaagttgaactntgagtngtgtctcacaagactctcattcatcanagttacaacaagtgttacacatgcttctatntatagactangtagcttccttgagaagctntcttaagaanacttccttgagaagcttctttgagannaacttctttagaagctacagctntgctacacacacccatctaanaactaagctcacctncttgagaagctagagcttagctacacacacccctctaataactaagctcacctcgttgagaagagaactagagcttagctacacacccctataatagctaagctcacccccatgacaaanatacatgangatacanaanattgcctaatacanagactactcagaatgcctctgaatacaaggctaanaccctatactactagaatggcananatacanggccanacaagganaaccctatctatattacaagatagcggctctactagccatggctcaaactacctanggtctgagacctnggctttctngatcttgaccattattg

SEQ ID NO: 31901 - DNA, 643 bp, Glycine max
  unsure (1)..(643): unsure at all n locations
aatggcaccttttacagcaactgaagnanactatacantactcaagcgtggatatatatcgacantaancgtgagtgatgagagctgngagtgctctaatgttgtcttcatagagtgctcttagagaaccacacgtttctctctctccatatagaattctccaaggtctagtacagaagaatacgagtgatcatcacgagcataggaatagataatagctatgctttgtcgggaacaaataaacgacggagaactatactcgactaacgacaaatgttcttgtgatcttatactaacgtgatatggtgctagtataagatataatggtgctatgattcttgactctatgaagacaagagagtcatgtgcttgattataacgaaagagtaagtatcttacttcgtccagtagangacagtacatacatgtgagatacatgtgatactataatatgtcgacttagtggaatatgatgncctancacatacctcagacataggatcccttagcgttatcaaactcgacgaccttgctcctaaagttgtcggtgaacatcttctccttatcttgctttaagatacaggcaacactttccgttgtgcgtatgattgtgccaacctctttatagatctgcttgcgcccg

SEQ ID NO: 31902 - DNA, 305 bp, Glycine max
  unsure (1)..(305): unsure at all n locations
gtgtgtgtagatatatataaaccttgngaatatgatctganatngctgtactgctgatgagtagagaagctacaaagagaaaatgaatgaattgctgaacgcactccatngaagagaatgagaaannatattgttactgaagagagctgttcatgcaatcatccatntatagggtangtgtgagaaattgcttaattaaagaaagcttcaagcatgaagcatgtgagagaatcttngtaactattnttgctcacttatgcgaatgctagtgtataatattgctatatatactntcttcattctct

SEQ ID NO: 31903 - DNA, 618 bp, Glycine max
  unsure (1)..(618): unsure at all n locations
ntgcccttatgatcaccattgaggacctaagatctcagctgctactgactggttggatacacatgatggttgaatgcctttaaggcttgtgagtggaganacggctgtgtttctggaaacgcgatgaactgctaagcgncatgctgnctaagcgagtcatcaatactcattgtatgtaagcatatctgaagaaatcgctaagctcgcttaccgcactaagcaagctcatctnttgaggaagaacactaatcctcttggtgaactacctgtggctaagcgaggtagaatcgctaagcccaggtaacttaaccactttttttgtgatagccgcgcgctaagccaagcattcntgagccaagcgcatttggttgcggcatncgctgagctaagcgagcttcacttcgctagctcccaacactttagtgaaattttgtcattttgtgccgctagcgcnacttcatgagctagcgcanatcttgcggacatgtcnagtagcggcactnttcgctagcattctgagatctaaaaattgcaactcgtagcggtccatgtgtagcatgtgtcttatgaagctgtagcaagtggctcgtagcggcatgcgttcatttattttagttn

SEQ ID NO: 31904 - DNA, 214 bp, Glycine max
  unsure (1)..(214): unsure at all n locations
agtacgtgagctcagttgaggtgngcaacaggngatggtggggttatacgtgattgtggatgtggagaatngttntgcaccatcgcccgaccgccacctagtaccacatgtgatggatatcccataatcctacaagcttggaatgaggaagtgtgaaagggtgagacttctctactttattcgttgaccacagagtggtacctggagatatgtc

SEQ ID NO: 31905 - DNA, 233 bp, Glycine max
  unsure (1)..(233): unsure at all n locations
acttgtctcagcgtntatgcgagacagagaccaacatgttagccatcgtcagcaagtaccaagaagaactaaatctagccacgacccacgagcataaagtggcggatgagtatgcctaagtgtacgcggaaaatgattctagaggaagagtgatcgactcgttacatcaagaggcaacaatgtggatggaccgattngctcttaccttgaacgggagtcaataacttcctcga

SEQ ID NO: 31906 - DNA, 655 bp, Glycine max
  unsure (1)..(655): unsure at all n locations
tgtggtaccttgacnagcactgacacgngcatctgtgagcctgcctgcatgcgtgacggatctgcanaggccanantgtcttganaccagattattgctggtatntctccaggcctanatagttcgattgaacacctgtacgacaggacaggatctgtggattcatatanaatgacccatattcgttcacttcttcttcattgtccggatcgacagcatganaatcgtcagtgaaccatgccgtgccgacctctcgactaatgaatggagcatgttgtggaagaaaacttgcganactcatgaatatcttcatgtatttgacgaacagcttttgtcgattctggtcgaacgtctttggtggtaatacgacagactctctggccttcgatcgaccgattggtcacttcttcagcataatcttgtgggagtatatatccatatcttgttcataagtggcgttaagccacactggagaaccacatatgcccagatactaagaggaagacctcatcttcgattcttcggtcatacatacctctcgagtggtcatatncactgctacagaggcggcagatccaagtctgacctatgaattgatggcatagcatgaatctttgctcttcatgatatggcaaagactatggaagcataggtt

SEQ ID NO: 31907 - DNA, 399 bp, Glycine max
atacagtattccattataagtactcttatgcaaaccatacagttaatatcttgtatatatattgatacaacataagtgaatgaatgacaatttaaattaataatacatattaaacaataaacgccatatatatatattcacgtaattgtgtaaataattgattacattatatctgtaaaaattttagaaatcatttaacgtgaaggagtatatataaatatacaatatatgtgtatgatatgtacaataaaatgcaaagagattgtgtacttacataatataaagatgatttaaatcctaaaatttttaaatttatatatcagaataaagttctatcactctcttatttaatgtattgaaatcttaaatttatgaatgattattaaaaagttccttatt

SEQ ID NO: 31908 - DNA, 561 bp, Glycine max
  unsure (1)..(561): unsure at all n locations
cgtgcagcatcangcactctatgantactcaagcctngtgtcttgtttttattntagatggngatgntattntatnttntaatacgaataacatatatattgcactaattcaaacatannatcattccaatcataaataatatacattaactatagagagtggaaagagnataaatagcatcaatacgacattaagccatgctaatgtgcgacangacatagacatatatcttcatttcgttacatgctactaaagcagctaaattctatggctcgaaattttcagtagtagaatgcactaacaccttaacacgtatcatgatttcaatcaataattcaattgatatttatctaaactcataggactggtgcganaacaacgcttacgttgtgttacaatacatannggaatcatgagcacactcttacaatctcattatcatgtcatcgaagatataacttttggatttctgtacagtacacaactattgcgcatgtcattcatgattacggatatataggatatgtcagtgtataacttggttacaagctaactatgcg

SEQ ID NO: 31909 - DNA, 539 bp, Glycine max
  unsure (1)..(539): unsure at all n locations
agtggttgccgtcacgtgatatctagagtctagctgaggcatgcacgnctanngctcttcantngcacanggctctttaatattgaagagtatccttgtggaaccttcactcaacgaagacactgacanatacttatcttcttcttcttggacaaagtatggcanggctggggcaagtaaatattctttccattagtccttggatgcaactgtgaatgtgtantcatatcagctagatcttgatgggtattcaagacatacttcatcttgccttgaatgtaaggagcgtccaatacactgcacaacattttctcacatgcatacatcaatcatgctacgtaaatacaccatcgaaacaagaaatggactttttcattcacctgcttatcttcttgggttccaaacaagtcaggtgaccatgttactgtacatcacaatcggcatttgtatattctaaactttatcttgtagtatgggtaaacgagcttgcacgtttctgtagtgtgatgttttacatggtgtgaactacctgcctatca

SEQ ID NO: 31910 - DNA, 228 bp, Glycine max
  unsure (1)..(228): unsure at all n locations
gaacaacatgcctgngcttagcgcatgctgtcaggcctaatgcgagtggtctagcttagcactcaccttcagcatgaatntacgagagctagatgtaaataggccttattagaggcttagttatcctcttaagcctagttctataaatactcagaaactcttaattgtagacaccttcgacataattgaaattaagcttgtgcttagagaaagcttactctcttctat

SEQ ID NO: 31911 - DNA, 395 bp, Glycine max
  unsure (1)..(395): unsure at all n locations
gtgtctgannttgacatgcttgacttgcanatcacattctcaattagcttacttttttaatannnaaaatacatgctactaanatcactaatcaaaattaccagttgacttggtctacagttaattaanaacagattcatcatgttaataataagtttttgtaaataattcatttgaaaaanatgtgtgcaaaagtgactcatatgagtcaatcagcccatatataccacacatantaagagtttgtaatataaaacctctaggacccaaactaaaccatgactggctgtaacactttagataaactttntttcctgaacatgtangataaaaaaagaataaataaattttctaaatttttataaaatcatttcttattgaatccttctcaaatt

SEQ ID NO: 31912 - DNA, 210 bp, Glycine max
tatctaagctgtgtattgctgttgaggactgaaggcatgccgtttatttatgacgtggctgtgaggtgatgctgcaaactcgtgtatataccggacttaaatatgtaagaaacttggtttaatcaggtaaaatatcgatcttgagatatgtgggcttatgataataatacctgcaacagactaagttatcaaatacatttgaatattaat

SEQ ID NO: 31913 - DNA, 424 bp, Glycine max
  unsure (1)..(424): unsure at all n locations
tgtatataattcttgtaagcttcatacatggttaatcttcttcaatcaaccctttattctacttacactctnttagctntacacaaatcanattcttaattaaacaactacatcacacttgcacgcctaatgacaaaaaagaatagcaatgagaaaagggctaatcacatgtntaatgataaaatgtgatcaaacccaaggatgcctcgaataattcttttgtgacaccccaaatcancaaacantgatgaatctctatgtcctatacantacactgaaaaccatgtgtggaacgccccatctgatcactgtgtatagaaatttataatattcactataacgatcttatatggcctaatgatatcttatgtggatggagagcaaacacaaccttactattccatattatgcaaatgtgccttct

SEQ ID NO: 31914 - DNA, 272 bp, Glycine max
  unsure (1)..(272): unsure at all n locations
gagtattctatatgaaatatatctcgatacaagtcctcgaactatagagtatcaacattgctaagaacaagaaatcacgaacaaccatactatctatgcaattaaggcanaacaccatactactaacatacccaganatataaggttcttataataagtatacaacgtacatataagaagtaagaaattaatagttaatagggatgtattaaagaatcacaaacttcaactactacattcacgacacaaaatanagtgagtaactagtcatg

SEQ ID NO: 31915 - DNA, 204 bp, Glycine max
  unsure (1)..(204): unsure at all n locations
gtatgctaatatatgaatngctacagtgtacttctgcnacggtaaagactctttntactatatgcatcagatctcatttggaaatatgananagggttactgagagcatctactaattgaaggaacaactgtctttgcatntagaacctccactganattgactctgtgtatatgcatttttcanagtagtcattcatcaagtg

SEQ ID NO: 31916 - DNA, 247 bp, Glycine max
  unsure (1)..(247): unsure at all n locations
cacatgaccatggtagccatgacatatcagacattccatgagtgttcggaagaaacaattatagatatcttagttgcaagaatttctggccaataaaaggatggtgggataattatctcactaatgaagaaaaataaaaaatatacaatgttgttaacacggatctcaatnggaaattcatttacaatgatgataatggaaagatccctgatgttgttaatacccttattttacaatagcccaacac

SEQ ID NO: 31917 - DNA, 162 bp, Glycine max
  unsure (1)..(162): unsure at all n locations
ataagttatctctttatttatgagaggatctctaatctgaggatcagacacctgctgtatcaaggacttcacaccttgtgtgtgccctcctgaaagagtgattcntccttctatcatctcaccctgtcttcnaccatattcagaaatcaccttgccaaatat

SEQ ID NO: 31918 - DNA, 185 bp, Glycine max
  unsure (1)..(185): unsure at all n locations
tagatactaagctcttcaaacactttgtataccttgagaganaggactaatagtgattagtgtgcannacttcaacacatcttgttgatttgcttagagccaacaatgacttggtatgacaaagaatatntggtttaagtcaagctttgagtggagcttacatgtgtaagagccagaaatgacaa

SEQ ID NO: 31919 - DNA, 605 bp, Glycine max
  unsure (1)..(605): unsure at all n locations
tatgcactatcagcatangtacctatganactcaagcttggggtgcgcagncaccatctntcatagtagagtaccgatantgtgtctaccatcactattatcgtctccctttccattatnnggggtaccacctgngccgtcagatcccttccacctttgngcgtgttctttgaatgatccgtccncacttttgcacatgttctgtagttgcatcctatccggaaccatatcannaatgtactgatactgcctaacanaggcaaccattatgtccttccaagaatgtaccangtaacagctaccccagtanaactttcttgaaggaatgtatagcaattctcatctctgcgtattccccatcttctgaaatacatcttagatggtcttgagacagtagccccttgacttgtaaagtcacaccttgacttggatgaccatgttggatatgaacactntctagtagcnagcataatttactgctcatggcgtgagcttncttaatgatcgctttcctttcgcatacagagggctctcacgaaatgcatgtgtgtgggcaaactaggctcaaagttaaggaacacaacgttgctcatgaatcagcaggt

SEQ ID NO: 31920 - DNA, 653 bp, Glycine max
  unsure (1)..(653): unsure at all n locations
agtgtttgttgaccgtaccgngatctctcagtcacctgcggcatgcaagctcgcactcagctcgctcaggcgagcaggggtgcttactctataatcatcagtcttctggaggaatcttctagacggaccaagtgggcctggttgcttattgcactcacatatatactaagtacacgcctgccttattatggagattcttttctcgtagagttacggaaacttacgaatatcgtaacgatacttgttttcttttcgtaatgttacagaacctngcgaattacataaccatcctctnttggacttacggaatgttacagaacctcactaatagtgcaacgatgcttncatttggattacngctgtgtcacggaaccttatgcgatgcgcatcaatatcttcttttgttctccagcatgtccacggaatatcacannattgcctaatgatgggtgccaagcacctcacatggaccatacataagtcctatgtcatcaacanaggtcctggacgaaatagggtatgacagtgcactattacttgctttattgagatacaggaagtaagatagacataatatcttctctcgttgacaagttgggtgacatanattcccatgcaatactgtcgtctcacgaactaagtgatagacattn

SEQ ID NO: 31921 - DNA, 654 bp, Glycine max
  unsure (1)..(654): unsure at all n locations
tatgccccgtcgacactcagtgacctatgatctcagctagangancantntggangagggccatagaagtagtctgagtatccactctgtagcgactaatatgtaccangaccttaggcagatgntttggtggccgggtctgaagaaataagtcaatgagtgtgtccttgcatgcctagtgtgtcagaaagctaagatagaacaccagaagccttcaggtgaagtgcaacctttagagatacctgagtggaagtgggatagcatctccatggatatcgtagtgggggtacctangacccncaaagggttagaatccatttgggttattgtagacaggttgaccaaatcttctcacttcattccaatagacatcagatattctttagagagggtgactagcttgtacgtcagtgagatattagactacacggtgttcgtctagcatatatctgatagagatccagattacctctagacttgggagagtcttcatcaagcctgggaccaagctanggtgagtctgctacaccacatactgctgtcanacggacgcacatccaatctttatgacctctatagcctggtgtaaacagagggtagttggaanttttaccttgataaatactacacatagntgactcgatagttgcgccg

SEQ ID NO: 31922 - DNA, 497 bp, Glycine max
  unsure (1)..(497): unsure at all n locations
ctgcagctatgctctgagaacaaactgaatattacttcanattagtttaagcaatgtacttgtcaagaaattggagctactatgacgtatgagttaaccgtcgtcaaatggactcgagtgatctttgtgatggtgaatggtgctcgaataagtgtgtgagtgagtagtatatgagtganaaggtgagttaattaaagtgaatagaattttgtaaaccaatatggtatctagtaaaaaaaaaaattgtgtcgtagaaggatgcattaagttaatgaagtgatnntgtctctgngtatgggtttgtcttgctggatactacttcagggatggaaatgatctaacttgaaggctanggcanntattgctatcatgcgttcctttattctctctctcttacgaatctatctattactggtatnttatgaaataatataaatatgtctcaattcaatttttagatactacatttggtatatattttaataatannttatact

SEQ ID NO: 31923 - DNA, 570 bp, Glycine max
  unsure (1)..(570): unsure at all n locations
attcncccttgtattgcnctaccattgacgtgacactatgantactcaagcctctatatangctgaacctntntatcaatagacacaagtngagtcttattcagattaatatatgttatctctnctatcttagtgagagagactctgctagattctngagtgattcaagagtaagcttgctgtatanaaggactctcacaacctctgtgtgctgccctcgctggacagagtgatactctacttcctttgatcttcactcttgttctctcacaccacaattacagagaatctacctctgcccgaattatctcgcggcataactccatataccactcnatacgtgatcttgacctaattgaattacaacgagacattacctatttgaacacctcttggagcctgtacttagtatgcatttattctgcacccactactagttacatcatatcattatgcagaccactatagacccgaatacactattctcttctatcatcgattcatagtatctacactatacctggcagagttatcatgactaccggagcgggtgcaaagctaaaaggtctn

SEQ ID NO: 31924 - DNA, 648 bp, Glycine max
  unsure (1)..(648): unsure at all n locations
tcttagcacttgaccagcatcntctcagtcatcctgtagagntgcactgctggcntgcaggctngacatgangaagtgtngaggggtgacacgttctgcgttttatngtgaccacacagtggtacctgtagatatgtcgccggggtcatgagaccttgaggacgtcacgtggtgtgctattgtccaacaccaagcttgaccaatcccgacccaaccctggcatagtcggtcagtgagaacatgtgacgtacctaatcatgcgagctcctggcatgcaacagatataaggagaacaagaccacagagcaaggaggcttgtggtggctggccagctcgtgaatatgtgtaatatgtggaatgtgcgctctggcactctattaccaanggtggggtaatcgactacaanggctatcaatcgaagacagggggctaatatggtctctggtcatcgtataccaaggggtgtaatcgattccacgcttgaaacgangtcacgaactacggaacctctggaatcgataccaggcgtgcatcgatacangcttatacggaatggagatgtgagcctttgcatcattccncttggtattctaccaangatggtcatggataagtacaagcttgtattactccgccgatatgatattn

SEQ ID NO: 31925 - DNA, 167 bp, Glycine max
  unsure (1)..(167): unsure at all n locations
tctgcactttatgcagaatttgatgtgaaatgtgtgcagaatttgagtgtgtttggcagagtatctgccttgccctgtttgctttgatttgtagtccatgatgatcggatgtggaattacttggatgttgtggaagcttgtgaggattgatggngactcggcgttga

SEQ ID NO: 31926 - DNA, 153 bp, Glycine max
  unsure (1)..(153): unsure at all n locations
acctcacaatcactcacaagatcatctcaagctctcaggacggcttcctcttcaagctttggtctctgtggatcttcacagaacanaatctctcanactctctgaaacttggacctttctctctctagaactctctagacatgcagaagcttc

SEQ ID NO: 31927 - DNA, 596 bp, Glycine max
  unsure (1)..(596): unsure at all n locations
cctgcacttgaccgcatctctcagtcacctgcangcatgccgctggatagcggcctacatgatgcatgtangggtgtgaatcgttcagcgataatagggatgccncacattatntccatgacacanatgcaaagatgatgatatggaaattatatgcagaactggtcatgcatgcacctatgtggacgctcaagtgtcaaatttntatggtcatgtgatgctanggctcaggattcattccctctattgtaaccaacccaatgttccaaaatatgttctttaatcaattgtgcatcatctagtcatttcgggcgtccggggaaattcacagcatcaccttcangtgagacacattttcaaaattggtatgatcaatgaattttttcaagaaagtgggaatcattctttcanaacatgtcggtttagctaacaactatttctcttttcaccttttctactgcttactttctattgcctctttcttactgtctcttcttcctttgtctcttccattcatnnttcttctatntactttatatgaatttgtggttacaattatttgacatgtctaacgagacttacacgtcaaattaact

SEQ ID NO: 31928 - DNA, 623 bp, Glycine max
  unsure (1)..(623): unsure at all n locations
tttcacatagagcttgatctagctgccttcatatatatcttattntatgtggtgatggcagctctactctgctacatntaggtaatagatattcttattgatataacttcatagattanggtggtggaggatgatcttcatgcaactctggcangcanaagacatagagaatggcactagcattgcacgtgaatanacccagagatgaagcatacatagtgcttntgtgatgaanttgtatctantatctagatatacaacgctttgtcatcanaaagaagctatatatattggataaagtgtggcnttatttgatatatagtgtgtgttatatgagtggttgacatcagtttcatatatataacacttntnttgctagtgctatatttagatatatatncgctacaacaataaccgctcaaaagcactatctatgtgagaaaaaatgttgtnataagcanagttgcatagtacttgtagtgactntacatgtccctantctatgtacttatggtcacatattgcatgggatatcaactctctctcttctaatnttagaactcatctagtcatatagtgtnttctttggtacactatgtagagaactctatactcctagagat

SEQ ID NO: 31929 - DNA, 181 bp, Glycine max
  unsure (1)..(181): unsure at all n locations
tctgatcatcatgcatnngataatgcaaaaaaactggggcaactgaagagggtgagaatgacggagaaacccatgatgtgatngccattcctatacaaccaagtttcccaccaacccaacaatgtcattactcagccaataacanaccttcttcttacccaccacccagttatccacaaca

SEQ ID NO: 31930 - DNA, 647 bp, Glycine max
  unsure (1)..(647): unsure at all n locations
tatgatgatangcatctatgantactcagctattagggtatgagaatntacggaagcttacgagtgtccagatgcaccggagccatntttatcttaacgggaaggggggtgccacctaactcgccangtgagctatgtttgcttcaccttaagcatgaaattgcccagaaacctctagaaggaacccacatntgagaattattattntgcaccctcattgtactanatacacccctctttttacttaccttgtatcggacatagcaggatagtaaagatnagacactgacttcgtccgccttagccttgtccgtagataatctatgatacaattcaaaggtcatcctntgctcatcatggggatntaatngatcttaatcacantagtctcatcctagagcgattgaaataattgactcccgtctntgcttcttcattctctgctcaacacagaacacaacacacaaganataaattcgttacacgtctcacatgtttggtgaagaccaatcgtgaaatacataatcgattttccctaccgatgctccgcttgatacaagatcatgacacnctaggcatcagtatgggctcgatagattgatgtgtgatgccacacacttgcatcaatgtgggctcgatcatgtcgn

SEQ ID NO: 31931 - DNA, 605 bp, Glycine max
  unsure (1)..(605): unsure at all n locations
tgtaattctngtaccggacctcagagtcacctgcggcatgcacgcttgaagcntgccgngctgaagaatatgatgcataagcaatcacagtggatatccacgtnttgttngacacggtcacagcaagagcatggagggtggttgtccattcatatagtcacacatggaattagctcctgcgcgcacgcggtgctgatgtctcgatgcgcctccgtcaaactcctcatcaacaccagagtcaacaccaacgataccaaacacttgcacccaccacccatgatcattgacattgctgttcccactacaaccagactaagtgatttaagtgaccactttgcatctcatccaaacgatgttgtagatgtcaaccacaatatcttatattatacacgaacaatgtagagatatttattgataggatgacaaataaagacatcatanaaagacttggcgtattctatatatttagtcactgaactaatgtagaagtcgtaacgtcatcatagagactatcaatatacgtaacaacatctaatgtaacatcaaacttgtgagatgaactctaaacataatacctttattgaagaacataagatcattataag

SEQ ID NO: 31932 - DNA, 373 bp, Glycine max
  unsure (1)..(373): unsure at all n locations
aatgagtcccganatatatcgagacactcgannataaatggtgaacctctgagccaattcanacgacaataactntntacttcggatgtctgatgagtcccgtaatatatcgagacgctcgannatgaatgttcaagctcagagacaattcatacgacaataactntttactcggatgtctgattgagtcctgtaatataacgagacactcganataaatgttgacctctgagccaatcaaacacaatatcttttactcgatgtcgatcggtacgaataatcggacctcaaatgatgtgaacttgaccatcaacacataactttatcgagatgatgatccgataaacaacctgaatgatgtgagcttacaatc

SEQ ID NO: 31933 - DNA, 111 bp, Glycine max
cgagcgtctcgatatattacgggactatatcagacatccgagtaaaaagttgttgtcgttggaatatgcttagagattcaacattcatcttcgagtgtctcgttatattac

SEQ ID NO: 31934 - DNA, 226 bp, Glycine max
  unsure (1)..(226): unsure at all n locations
gtcacctgcggctgcaagctggaactatcactgactgatttgttctatataagaatagtacttaggctggtaaaatatatgcttagaacaccatgctnttctaaattcacctatttgtcattgatcttctccccttctcattttgcaacaaaaagtgaatcattgattaatgtaatgaagtttagcttttaaactgcaaaattcgatttcatattgatgcatctac

SEQ ID NO: 31935 - DNA, 657 bp, Glycine max
  unsure (1)..(657): unsure at all n locations
agttggcccccttngtgangcagntattgacgtacactatgantactcaagcctggatttccttttagtgggganntctatccttctaagatggagcctacncagtcactctcataaagaactagcctctttcttcctctattgcctnntagtgaatacacctatgttcggttctctattttggtcttaaccctctcatgcaacttctttacanactctgacccagattccctttctttatgtataanagaagtgtccagcgggaagggaatgaggtctaacggtgttaggngattaaacccatagacaacctcanaaggggactgcttggtggtctatngaaccccctagtgtangcanattctacatgangaagaatactcatccaagacttatggttttctttcanaagagcccttannagagtggatanagacctattcactaccnttgntngcccatcaatncgtggatgacaagtggtagagaaagaagttagttctatctagccatanggttctgaagtgctaggaactacatcttactgactatggtctngcaaccatgagctatacttcctgaaagagttgaatgtgaagctatcacttgggctgtttaatggtatctgtaacattcacaccaagagagctcactttg

SEQ ID NO: 31936 - DNA, 581 bp, Glycine max
  unsure (1)..(581): unsure at all n locations
attttcttacctgacgaactacagcgctgcngctgcagctgatanttacgtgaagtgacttggtgtctctagttngagattgataatgactctagacttgcatatacgcaaagcactgtgtgcgaatgtaggaatgtatatggcttctcttacacttttatatgttattntggcaaatgctagatattagtatgtgagttctctcacttcatttcttcctttaatcaccaaaccaaccttataacttcttttggttctcttagttattaacaagagaatcaattattgatattcgaacatgttcatgagtttgtatgcatatacacatnaacatatgagctctctgattttttaataatgactggataactgaattactccttcagtgaatgctcactacaaggactacacttgttgattgagcttangctatcactgctttaattacttctgtataacatcatgtggaatcgcacttcactgttgttgagccaccacgtatttgttgtctgtaagatacatcatgattgtgtgaagggcaactaatatgatccttacaggactaaatcactgacggtatt

SEQ ID NO: 31937 - DNA, 272 bp, Glycine max
  unsure (1)..(272): unsure at all n locations
ctctcacacttaatntctgtcgtttagtgtaagtagttcatgagacagagtacaatngaaatctgcaacactatatatctcttattatggtntttatatgtctatatatatgtaagatatatcatggtcgactcgtatcctacgttttgatacaacgttccatgtctctaactctctattcatntaattaattagtcttaatctgcttattattgtctgcgctaccttaattaagatcatcagatcttgtatgaccctttgatgcaatgatc

SEQ ID NO: 31938 - DNA, 173 bp, Glycine max
cactcaacaacaacaccactcaccacactcctctccatcttcctttcctctacagtcactgccaccagccgcaccaatactaaccacaccgctgcctacactgttgactacgtcgctacctacgtcgatcaagccgaccccgtcacccacgtgcacaacacccacgtccatgc

SEQ ID NO: 31939 - DNA, 643 bp, Glycine max
  unsure (1)..(643): unsure at all n locations
attgcatcctatgcatgacgtacacttagactactaagcctgtacatctcgacagcctaatatcacacatacagtnnatgggaagaaagactactagtggtcttgtattaatgaanatcataggaggtctcgtgctagagtcattgtgttcttctatataatggtgagttcaccgccacttggtgtatttagcagatggtgaatggaatcctcgtcttcactctcatctgaatccgagaggccatcagattccactccttcatcgtctgcaatagacatatgtttagaaccttaccctcgtgggttgattaaccaaactgctctataatgtcaaatgatttgtctagatatggtatcgacanaagaataggccacttcaactttntctggtttcatgaatcacataagagtgcactatttgactttcattttgtgtataaagaatagaatgctctacatatacaaagatagggatatgtatatgctatgtgccaccgtcatagatattaccactaataaattatctanagacccataagtgaaacacgctatactgtgtctctatctaccgaaggcagagtcggagagttacacacacctgnggctctgcgagacatgcaaatactgaatctatggagtgctn

SEQ ID NO: 31940 - DNA, 680 bp, Glycine max
  unsure (1)..(680): unsure at all n locations
tcatcagactctcacntctccatcncacttcctcctaccttctttttaacttattctctctntanacaacnactagactcaaaaaagtgttgcctgcngtgacagtgaactcacagcagctgcngctgcaacttgtaaatgattctatctatacgtaggcgataatgttataatctgtcgtaattctanatctcttctaatatacagaagcttctttacgcggggcttggaaacatatctccaatcgattctttgtccaacaaagtctagtgcacaatcaccctttagaacatgatctctaagaaatggatgcctcaattcaatatgctgtgaactagagcgcagaacacgagatgtggatatgttgactgcaccgtattgtcacatcggatatgaatatgatcaagcatgtaaccataatacgagagtggtgtttcatcctaagacttgtcacgacactttcacagaacatatccgctatgtagatgtatgcacactatttgcttttgtaaccaagaactatgttaaccataagtgcaacgtcctagcattatctgttacacactaagtggatctcggatggctgtatcagccaatgcacactagctacattggctactgtatagtacaagaattgactcctattatttttttatgtgacacttcttatcaaacagacg

SEQ ID NO: 31941 - DNA, 652 bp, Glycine max
  unsure (1)..(652): unsure at all n locations
nttacccctcacacatcagtacctatgatactaagctcgtatttgctcctcgataagactatatcatccgcagagagcatgctatatgggataatcttntgtatgtcctngataagtacatccaagactacgtganacaagtnaggacttatagctgagccttgatgtcatccaatcaccaattggaaagtccttatctcacctcaaggagttctcacattactagtcaccccatcatacatgtcttgtatagctcggatataagccatgtgtacgtctnttttcttcagagtcttccacaacgtatctctcgtgacacgatcactagctntttccaagtcaagagagaccatgcgttacgatatatgtagaacggagagtcantcagcatagtagactattaatacagtagctactacagttaggatattgatangctgttaagtggtagctactagatggaggcgttgtgcatataatacggaagacgatcgagaatggagatctatcattgttgattgacatagctcttgtgaaggataagtattgtgaaggacacccttgacagcagttgctgtatactatttttctactagcataaatcgtgatatctctcatcaatatgggtctgacatggtcgactgcgaccagn

SEQ ID NO: 31942 - DNA, 681 bp, Glycine max
  unsure (1)..(681): unsure at all n locations
agttggttggttacngtgncngngncgtcaccagacgcctgcnggctgcaagcgtacgcattgcacatacacagctgcanactctcgagacgtatgtaactcgtctngtgttangtanggccatatccaanaggtcacatgcataatatggataatactatgtggataagacaaatcacatgactgattcttacaggttagagtcatacctctagtctactatgagtactgaaccgagttcatgtatcatctgattatgctggcacacaacaagtggatgcatactcggatgtggcgcctgcaacattgangcatccagatcctatcttcatcttagacaaacattctgtcgaaccatttcactaacatcattcctaaatgatgtccataattcctcacttagtgggtagcttctcgaatgcactcattgtatatctaacctcgctcaaccctcatagaacattcgtatgctatngcatgtataggcctcctgccataaatctctctctgcatcaacatctttcgattctntntcacacacacagcatatatactatatatatgaagagtgtcttcctacaccntggtggtaacacattgtgcatatatgtncatatctatgcacatataaactgtgantattctctgagcatataggctgccactacgagccatcactgn

SEQ ID NO: 31943 - DNA, 195 bp, Glycine max
  unsure (1)..(195): unsure at all n locations
tgggcaacacgggatggtggcgttatgctcgcattatggatgtgganagacttgttgtgcaccatcgcccgaccgccacctagtaccacatgtgatgggtaccccataatcctacaagctngagatgaggaagtgttgaagggtgaaacttcctgtctttattgttgaccacagagtggtacctggagatatgtc

SEQ ID NO: 31944 - DNA, 196 bp, Glycine max
  unsure (1)..(196): unsure at all n locations
acgtgtncactatgggtaacagatagagtgtgagagagagcaataccaactctacgctggtggattatgtaaccaactaatagtggttctatagggggagaatgggtaatgagacgtatgaacgtgtgaacatttctgtctcttcttactcttttctctgcgactattgcactcagtccatctaattatacacact

SEQ ID NO: 31945 - DNA, 118 bp, Glycine max
acctcgtacgaatgtatacagctacaaagatcccactcatgactcttgtaacccccaattcctacttcatgtgctaggcttaagcatactgttgactacaacgatctactacactgct

SEQ ID NO: 31946 - DNA, 308 bp, Glycine max
agcttgctagctttatcaccaatttgtgaaaaaggtgccttagctaacttttgagtaagatagaaacggggggatgatatgattcattatttgaattcatacatttaagctctccatagacagaagtttagacaacattataggatgtaggatatacctgcctaattttatgttattcttttgttgttttgttataggatttacaatacaatcataaattatcttttcaatcagatcgattgcatcaaattgatcacagaacagtgcatatggtgtgcaggtttgtatgttttcatataatttttttt

SEQ ID NO: 31947 - DNA, 270 bp, Glycine max
actcctccatcggtgagcttcctgttagccgactgaaggctgctctgagtgccatggatctggagatggagatggaactgctcggcctataaagccctgcccgccaccaccaccaccaccaacaacaacaacaacaacaactgattgaagagattgctaggatctcttccccttctttccggagcaaggaattcaataggattggtgatttgaatcctactaaccttgatgacctgttattagcatctgccgacccttctgtattatctc

SEQ ID NO: 31948 - DNA, 292 bp, Glycine max
agctttgatccaacattgatttctgtattttaacagcaatcgtgggtttatgatcgttgcaccattctatgaatcaatctgaattctgaaatactatttatctaatgcttaatgattgtcgtatgtatgatggaataactaatcttcctttgttttacgcggaacgatctcttatagtgacaggcttcgggtatgatcatgacgatgcatgggctacgaacatatacttattcagacaattttctgatgtcaacagggcattagtctgatatcaattatattgcacctcatt

SEQ ID NO: 31949 - DNA, 286 bp, Glycine max
  unsure (1)..(286): unsure at all n locations
tctccctctnttctcctataatagggggaggagggaagaacatatatgttcaaccctcctggtatctgagaatcacttataattactgagaataattgattccatgaagaaaatgctatccgaggcgcttacgaaacgcattcgagacgtttccgtgggtgattccgcgaggattttccaccgttcttcacccttcttcgttggttcttcgcctgtgttccgtttcgaccggcaagcttccgaaatcgaactttacaattgattccatatacccttaatggttccc

SEQ ID NO: 31950 - DNA, 302 bp, Glycine max
agcttatactattgaagttgctatagatatttttgtagggtttttatccaaaactcaaattgtacatgtttgtttaaagagttaaatgatatgattcaactcattgaaaattgacagacaaagttttatttataaatttttatttctaatagttgaattatgtgtacaataatatttgtgtaatttttttgtgatcgcattaaccgatattttgaaattcaaaaaaattatgctcttgagcgccttgaagttccacgtcgacaatcatatttaaaaaattagttcgaaattgaactagtttt

SEQ ID NO: 31951 - DNA, 416 bp, Glycine max
  unsure (1)..(416): unsure at all n locations
acttccgattggtttgttctggttacagacatatcaaaatagcatatgttcatactgggaggaactntntttgtgtgggtgtgtgtgtacgcgcttaaattgcaaaatgatgatgatattgttgttacatgttagtatcatcattattgctccatagagaagatattattataaacagctcacaagaaaccacttaaaattttttgtgcacgcttaattagcttgctatatttgaggttctttgctttgaagcattattgattagatggtggacctcctcgcttacaatagttttgggctttaaggtagaaaaaaacaacaaagtagtacgagtataaaatctataagaaaattaagggccacttaagtaaatgaaatgattggcttaatcttttgtgcttgtcatcaatatgggg

SEQ ID NO: 31952 - DNA, 308 bp, Glycine max
agcttggtcaaacttaagcctgattcaatccacacttaagcttggttttccccacgcttaagccttaaaaccagtaacccatttccccttgcaagccatctcgcttgagcacgaactactccttgctaaagcaccacaacattatagagcttcaaaaagtgagttttccacttccaatggctttcaatcaacccaaatctaatcctaatcatattaaacatttccacaacattaaacacccaaaatgaaaacaatttacaagttagaaaaaccttatcatgaaatctaaaggaaaaggacctaaagtg

SEQ ID NO: 31953 - DNA, 453 bp, Glycine max
  unsure (1)..(453): unsure at all n locations
aatgattactaaacacacaaaatgtatatctaagtatttattacctatacttaacagaaaatacttttaacattacaaaataaccataaattgggagagtttgatacaatttatacaagttttatacacaaaagttagtcattntcaccgactaacacttatggtgtattgctagtactcaaaacttgggaagaatcataagaatgtgttaaggaggtgttcatgatgagttaccaacttttaattaaaaattgaaattttaactaatctattaagtttttttgctttaatcatatatgttgttatcttttttcttttggtcattctatcaatcttaaaaccattagagattgtaatttaattttttaaatcaatactgacaatnttaaaaactatcatagatcatttctaananagttcacatgtcacctcgacacttaatagaataaacct

SEQ ID NO: 31954 - DNA, 191 bp, Glycine max
  unsure (1)..(191): unsure at all n locations
cccatattctcnatgacattgaagatccacggggggatgatcagacctattcaggtgatgcaaaaagcaactctgtttgatgagtaaaatgataaattccatttatgcataaagcatatacctgcctaagaagatgcacatggtgggcagtgtctgaacattgctgcaatacatttatggattatgtttta

SEQ ID NO: 31955 - DNA, 234 bp, Glycine max
taagcatagagcagtctgacctgtcataaggacttggataaacattaaagggaaaggaaaactaatagagatcagtttctgcttaattcattcattacacctctttacatacttatactaattgattctaacaagatgcaatctattataataaaattcgctaataactagtggaataacaacttactggaattgcttctaactgttcaaggctatggctcattcttctaatga

SEQ ID NO: 31956 - DNA, 308 bp, Glycine max
agcttgatcaaaacatattttatacattctagcccactcaattcatacaactctcattcaagtcattcacaaacactcattttatatcaaacaaaccactgaaacatgattcaatcatttcattgttcaaacaagctttttgtacaagcagtaaaaactaaaataattggaatttgaatgactgaaatttaaataactgaaacataaagcataaactaaataaactgatcaaaatatattgttcaaaatgcaagacaagaagataaagatcctgccaatcctactgcgggtgatcctctgcatgctca

SEQ ID NO: 31957 - DNA, 136 bp, Glycine max
atcgacgcctgctcttgtcaagaagttctactccaacctatattacctgtaggacagggccccaaattactgtatggtgcgaggacatgtgatccaattcgacgccgagaccattaatgacttactcgacacccct

SEQ ID NO: 31958 - DNA, 294 bp, Glycine max
agcttttggaggatgttttgattttggggaagaagggggtgaaaatggcttcacccctcccctttttatgttttaacggcaggcctgctcgcccaggtgagctatatatatatcttttttttttgcaaaaaatcctttacaaagtaggggtcttcattggtatattttctctcttaaaatcccataatggcctataaacttaggaaaattcaagatatagttcaagaaaatgaacacgtatgaaacatgaaattaaagagcaaagttagaaatactaggctaccttctgtgagc

SEQ ID NO: 31959 - DNA, 401 bp, Glycine max
  unsure (1)..(401): unsure at all n locations
tcaatcaatagacctctaatctttaatggagaggtgtaccactactggaaaacccgaatgcaaatttttattgaggcaatagacttacatttgggaaggcatagaaatatggccttatatacccaccacagtagaaagaaccacaatagatggaagcacaacaagtggaagcaccacaatagagaaacctatagatagatggtctgaagaggatagaagatgagtacgatataatttaaaagccaaaaacataattacatctgccctgngaatggatgaatattttanggtttcaaattgtaagagtgctaaggaaatgtgggacactctacaagtaacacatgaaggcacaacagatgttaaaagatctaggataaagacattaactcatgaatatgaac

SEQ ID NO: 31960 - DNA, 174 bp, Glycine max
agcttgagatgatgaaatgttcattggcgaaacttcctgcttttattgctgaccacagagtggctcctggagatatgtcgcggggggcatgagaccttggggacgtcaagtggcgtgctattgcccaaaaccattcttggccactaccgacccttcctcgggcatagtgggtca

SEQ ID NO: 31961 - DNA, 287 bp, Glycine max
ggacctagagaccattctttgttcctaaccactcctaaatatgtgggccattaagactatcatatgccgacaatagccgagaagcccatgaatctcttcaggggcggagtatgtgtctgccatcaccttggccttggctatcaatcggcgaacttcttgactcccgttcatggtaagagcaaaccgatccatccacatggatgcctcttggtgccaagagtcgatcacccttcctctagcctttatgtccgcgtatacttgggcatattcggacgctatcctatgct

SEQ ID NO: 31962 - DNA, 303 bp, Glycine max
agcttatatttgccttcgtgtaccattgagaaaccaacctttgcattacatctttctagtgatttttctagccttgatggttaatccaccttgttctttaaatactttgaaaccttcttttgagcaaacaaaattcatttgatggacgcatgctaaattcaacaccgtgtgaatatgctgtgtaaaaaatttcaccatcttcatgtatcatataattgccccacatttggctttaatttttcatcactatatgacacccattcatctacctataagaaacaaacaacgtaaggtattaaaatg

SEQ ID NO: 31963 - DNA, 414 bp, Glycine max
  unsure (1)..(414): unsure at all n locations
gcatgttccacagaagtacttgcccatacaaacactatattttatacagttntgctgaacctggaagcagataaaattatgacaagaaactttatctcctaacatgcaatgcagattgcnaatcatgaactttcagctggcctaatggatgttttgttgaataaaataagagaagtattttcaagtagtcttttgtctagtgcttcatcaatatctttagatgaaactcacagaaatactgtgttcacaaaacatctggcagaaccttcagatagtaataaactntatatttcccttatcaaatgcaccatgttgtttcctttatgcctgtgaatgcacatatgcattcacatgcaatgagattttcttgttatttgacaatattaaagatttgctacaaaagcatagagatca

SEQ ID NO: 31964 - DNA, 207 bp, Glycine max
aaacactaactgcacgcatgcaaacgtgagcactattaaaattttcaaactctgtcgaggcgctttcaaagcccggaatcaaagccggctggaacaccggctccgctgtcctaactggacaggaagcggaagccgaggcatttatcctctatggttatccagaattttaacaagatctcccagatggaagccattggatcttttaag

SEQ ID NO: 31965 - DNA, 296 bp, Glycine max
agctttactaataaaacatttttcatgatttgatgttttatctaaaattatcatgtatacgttatttgttctatagcctatatgttttatatttttatcatgtttattttcaataacacaattatgagagtcaaatgatactacaaagcctttatcacataattgactaacacttagtagactatgcttaagaccatcaacaagtagaacattttcaatggaagtagatggattcgtacctatttttctgactccaagaattctacctttggtgttgacgccataagtcacatgtt

SEQ ID NO: 31966 - DNA, 243 bp, Glycine max
  unsure (1)..(243): unsure at all n locations
tgatggcgacccggtgttgagaggaacgaggattacnggctacgtaagagtacgtgagctcagttgaaggtgggcaattgtggatggtgggttcatgcttgatttatggatgtgcgagagttgatttgcaccatctcccgatcgccacctagtaccacatatgactgataccccataatccaacaagcttgatgtgagagagcgtggaagagtcagtcttcctactttagtttgatgaccaca

SEQ ID NO: 31967 - DNA, 305 bp, Glycine max
agcttgcggactataccttttaccaaacacggtcgtgtttctttctaggcccggattcaaggcgggctgcagcaccggctccgcttccctaactgtactggaagcggttgccggggctttatcctctatggttttctggagttttaacatgatctccgagatggaagccatttgatcttttaagaccgatagatcggccttcatctgttcctgcacaccctcttcattatccatttttctggatcgagtgttataggggtgccttggtgttttcttagttatgatgaaattcctaaagaaataaa

SEQ ID NO: 31968 - DNA, 508 bp, Glycine max
  unsure (1)..(508): unsure at all n locations
tgtctcagcgtntatgcgagacagagaccaacatgctagctatcatcgccaagtaccaagaagagttaggtctagccgcggcccacaagcataggattgcggacgaatatgcccaagtatacgcggaaaaagaggctagaggaagggtgatcgactctttacaccaagaggcaaccatgtggatggaccggtttgctcttaccttgaacgggagtcaagaacttccccgcttattagccaaggccaaggcgatggcagacacctactccacccccgaagagattcatgggcttctcggctattgcagcatatgatagacttgatggcccacataattagaaatcgttaggaaacttgtatggtctctcagaccttgactagatatgacttcttttttngaaataaaatgagttggtcccatgtntctactncaaanagcttgtgcaaatcaaatcactcctacatttaatctctagcatgcattttcttttcttacccactcctcacg

SEQ ID NO: 31969 - DNA, 310 bp, Glycine max
agcttgtatcttttttgttgtttagtgtttaaaaatacttcaaaaacactatctgtagttgcatcaataataccaacggatttaatgaggacacccttaccattctatgaagcataaaaagaattgtcaaagcagtttcaaaggcagaaaaataaaggcaacaaaagtaagcattcatatagttgttatgtgatatagtcaagttttctacttttataatttttgttggaataacatacatgaatttaatcataattattttttaagatatatgatgagaattagttcacccatgagtcccaaagtctta

SEQ ID NO: 31970 - DNA, 348 bp, Glycine max
tgtgcaaataaatcactcccgcatgttatctctagcatgcattgtatgtgggtctcgtcctttgtcacgggaagccggaaggtccatatcaccttcttaattgtacacatggagcactgcgcccccaaatgcgcaagtaagaagagataattttccgggctctcgtgtgcgtcaaatgcattcatatcatgcatcgcataagcatctcttcataacatcatgatggacatatcctgcatttgtccattatcatattccggcctcacattttgcatgagtcatggcatcatcatgcatatgcgttcaacatactttttgatctgcaaaaatgcataccatttgcttcat

SEQ ID NO: 31971 - DNA, 305 bp, Glycine max
agcttccactctggactgattgatgtgtgctgtatcaagagcaaattgttaggaatcaaggaagtacatataaaatataaattatgaataagttgcgaatgtaattgccatgcttgaaacaagaaaattagtttaagacaatcaaacaatacaagaaacttgaacaataaagaaactagtcaaattcaatccctttttgctttacttgattatgctacctttccttctaatcaagatatggaattcagaacctggattcttctggtatttttcaaattttcatgcaaatccttaatttctcattt

SEQ ID NO: 31972 - DNA, 468 bp, Glycine max
  unsure (1)..(468): unsure at all n locations
ctaagctatagaagattaacaaacgttntcaacaccttgaaagagatcttgaggatctcaacaaagctcatcaagttcatttagttgattntgtcctggaaaccactttgcttagtaatgtgcaagatgcctctgtttgtgaagaagttaaggcactactagatgaaaaggtatccagtggatgcaaaaatcattctaagggatttcaagacttagaagaaagggtgaaatccttaaccatagctcttgaagattcagaaaaagagagcaaggaaatgcttaaacaaaaactcttacttaaaaaagaatgcacccttgctaatgatgaacttgataagctgaanaagaagaactcaaatctctgaacaaaatgtcaacattacanaaagatgtcttttgatttgaattatacgcttaagggacatgaggtcttgaatgaactacctcatgagaatgtaacactccatg

SEQ ID NO: 31973 - DNA, 303 bp, Glycine max
agcttaagctttatcaagcataaccttattgggttttaacaaattataaataagttttagtgctttatcactaaacagatcataactttaatttataagcagaaaacagcttataaaaaaataacaacaaaacctgtcttgtgtggggaaaaaaatgcatacttttacctttaaaattaaaaataatttaacgatgatgcattaacattttatattattatttaattaatcataaaaagataatatttgattgaatgatactgaaaaattattttacacttgcattgtcttttttctcaaatt

SEQ ID NO: 31974 - DNA, 315 bp, Glycine max
  unsure (1)..(315): unsure at all n locations
tcttcnggattataattgatgttatctcgcaacctttcttctatgaaactcacaatccaatcaacagaagcctgatggtgcccattgtttgcatttctcccacatgtatgtgtaccatcaatactgctaataaaaaatgctggggcattatggagcttgacagcacgaatccgccatggacagccatctgaggcacacttagcaaagtagcgaatcaggtcactcttaatagtacgaagctcaaaatgctgtgcaaaggcagcttctttaattgcattccgaaatgccttcacatcatggaactcttgaccgaca

SEQ ID NO: 31975 - DNA, 264 bp, Glycine max
agctcgtgcacaaaaaaaaaagcttttgatttttcggcatttcaatttcgtcacttattgaaaagggatcaatttttaacgtccaacgccttaaaattgatcaccttttaaagtaaaaaaaaatcacttgattagaaaaaactacgtaggttctgatatcctcatcgcaattggggattcgtaggagcaaaagccccgcttttgtcaaccacccccaaagatcgttaatggtccaatgccttaacgtttttctcctttcaaaaa

SEQ ID NO: 31976 - DNA, 391 bp, Glycine max
  unsure (1)..(391): unsure at all n locations
agagtgttgatgataacttagatgatgacgaanatctcaaaagtcaagagcacttcatgataacaaagatgatgatctcaagaatcaaagaatgagttcaagattgaatcaagaacacttcaaggttcaaaaggaaatttgatttcaagaatcaagaatcaagtttcaagattcaagttccgagaatcaagatcaagattcaagacaaaagattcaagaatcaagagaagactcaatcaagataagtattaaaaaaaatttcaaaaactgagtagcacatgaatttttctcataaaccttctaccaaagagtttntactctctagtaatcgattaccagattgttgtaatcgattaccagtagcaaaatgtgtttcaaaaagccttcaact

SEQ ID NO: 31977 - DNA, 252 bp, Glycine max
  unsure (1)..(252): unsure at all n locations
gaataaaattttaatgacctgnggcgacttccaagcccatatgggtccccgattaccataattgccgggcctcttgcagcaaatgattagtaggcagaaggctacttttgaatctgccttgtgcttcgaaatgattgagggttctactttgatgatgaataacaggtgtgatggccatatttatgactctttctagcccccgagacacccctgccacgggtacaagctggggggcaatggaaagagacactc

SEQ ID NO: 31978 - DNA, 287 bp, Glycine max
atatgtcgatgatattaccatgacaaggtcatgcatagttgctcttacaaaagaacctaccagaatagatagcgtctctgcccttaaacaagcaaccaatttggatgcctgtgccgcgcttgaacgtaaacatattcaataatggttctctgttgttatctcaggctacgtacattcaacatgcccttgaaaaggctaagatagatcatgccaaacctattctcgctcccatgccctctaatcttaacttcactaaacatggcacagcaaagattgtttactctctg

SEQ ID NO: 31979 - DNA, 223 bp, Glycine max
tataaaagcgcaaaggggctttgtgtatgagtatgaccaattcgccctgattgggtgacgactcccataccactctgtgaagcgtaagacgatgtgttcagacaagtcctcacgctgaaaaataaacgccttttgggtaagccttcacttggtggctgtgagatataataaacgtgctactttacaatttttggtggcatacctacatggatctaatcataat

SEQ ID NO: 31980 - DNA, 210 bp, Glycine max
ccttcttaattggtcacatggggcactgcgccctcaaatgcgcacagtagaacagataattttcctggctctcgtgttcgcacataagcattcatatcatgcatcgcataaacatctcttcataacatcataatggacatattctgcatttgtccattattatatatcgggcatacattttgcatgagtcatggcgtcatcatgcatatg

SEQ ID NO: 31981 - DNA, 300 bp, Glycine max
agcttgactttgcgttttgattttagccttggttccactttggttattagtcaattcgattaagaaagagaaatccctaagagaaacgtccgattgatttttttgctttattttattaaaagatatttttttattattatattattattttacctctttttggtttccaacatggttatggcatgaccgaacggtcggatttcattttaacagaaattaacggatattacaattcaaattattggtggaaatttattttattttttgattaggcgagaaaatgacttaagtaaatgacta

SEQ ID NO: 31982 - DNA, 359 bp, Glycine max
  unsure (1)..(359): unsure at all n locations
tgcttgtggggcttctatggaggctggatctttgagtcttaatgaggtcctttaatggggattntccaccatggagatgcagcggaagacaaaggagaagaggtgagaggaggcgccatggaagaagaagcttcaccaccaagatgagccttggataagaagcgtggagaggatgcttcaatggaggaaaagaaagatggagagaaagagagaggggggagcacgaaattgaagggataaaagaggtagagaagtagaactttgaagtatgtctcacaagactctcattcatcaaagttaccacaagtgttacacatgcttctatttatagactaggtagctttcttgagaagctttct

SEQ ID NO: 31983 - DNA, 298 bp, Glycine max
agcttgtaggattatggggtatccatcacatgtggtactaggtggcggtcgggcgatggtgcacaacaagttttccacatccacaatgcgcgcataaacccaccatcccctattgcccacctccaactgagctcacgtacttccacgtagcccatatcctcgtttctctcaacaccgggtccccatcaatcctcccaagcttccacaacatccaagctaaacaatattcaaacagtgcaagctatcacaaccaagcaaaacagagcaaaagcataaaactctgccaaaacaccaacca

SEQ ID NO: 31984 - DNA, 490 bp, Glycine max
  unsure (1)..(490): unsure at all n locations
acactatgaaactaagcttgactcaggagagacttagaatggctgtatagtatatgtaaaaanaactatgaanaaaaagactcaacanacctctagctttggcccttgtttttcacactaattttcaatttaaatttaggaactaagattggtataaaataggaaccaattatagaataaattttgagccaaaacaacaagcacacttccctttcactttttttttcatggatactgatttttctgctaaattgtgtgatttttagtattttttccttttattcaaatcacttggttcttttattatgactttgtttcggatgtctagaaaattcagtaaaactttcagctccaaattcaaagtaaccaattctcagtaatttttacaagtttgtatgtcccagttgccagcacgagtgaattttttttaagcatggtatattgattgccttgggcttactttcaaccttcctatgtatgttgaactcac

SEQ ID NO: 31985 - DNA, 300 bp, Glycine max
agcttattggaaatctcaataaccgtgggttgcttggggactgtatgtaggcataggttgtgaccgaactagtataaatcttgtgtttgctttcttcttccttacaatctttatttttacgctgtacatttttttatttctgctttacttttggttaagttattgcttctgttctttactttcttataacttagtagtaaagcctaattgaatctagtaacattaagaaggataaaattttaattagtcaagacacgttcataattaattccacccccctcttcttaattattctgaggc

SEQ ID NO: 31986 - DNA, 431 bp, Glycine max
  unsure (1)..(431): unsure at all n locations
gacaggaacacttagtaagttgccaactcatttacaagtgactcaaccttcacattcagtagttntgtatgttggaggttgcagcatatctggaggagcttatgaatctggttgctatatacctcttgatgaagttgcacaagaagtgaattatatggggaatcaacacagaccaggatttaatgcaggtggatttgcaggttttcagcaaggttccaattttaatcaaaatcaagggcagtggaggtctcatcctgtaaaccagttcaataaagaccaaggaggatcatcctacaagcctcaaaatcaatggcctggtctntatgagagaacaaccaagctggaagagactctggctcagttcatgcaagttactatgtctaatcacaagagcacagagtccgccataaagaaccttgagattcaagtgg

SEQ ID NO: 31987 - DNA, 299 bp, Glycine max
agctttgcggttttggtctttgtcagtgaaaggatcaatgtgggtctgaaaaaagggaaatttagtcatcctgcttggacgaatgagaaaactggggcaaatgaagagggtgaggatgaaggagaagcctgtgctgtgactgccattccaatacagccaagtttcccaccaacccaacaatgtcattactcagccaataacaaaccttcttcttacccaccgcccaattatccacaaaggccatccctaaaatcaaccacaaagcctacctaccgcactttcaatgacaaataccacct

SEQ ID NO: 31988 - DNA, 267 bp, Glycine max
agatcaacaatcaaagtatcagatgatcttagatcattacctaatctatattttcaaccaatcatatgatatgaatcaaatattattaattgttttaaattaaaaaatttagatacatgtcacataaattagacgagaccataaaaatggtaatatttatatggtagaggattacttaataattcttcacaacataacatggagaaggcatattaattggagccttgtaatttgttggaagcttgaaaaggagaggaacagcaacgt

SEQ ID NO: 31989 - DNA, 295 bp, Glycine max
agctttttcccttcttcttcaagtcatgtttatcttaattattaaggttatagtaataattgctctatataaaaaataaaaaaataaaaagcaactaactttcacacacctcatttgcacatccaaaactttctcatatgtgtttttgtttttattttattttatttttattttttgggtagcaatacagaggaagaagcaggattgatctaatttgcacttctaatattgtgggactttgaatcattcacaaatttatagatctaacttggacaaatctttaaaagtagaatat

SEQ ID NO: 31990 - DNA, 323 bp, Glycine max
  unsure (1)..(323): unsure at all n locations
tanggatggaacacttacttgttggtgatgtacaaaagcactatacggaatcaaaaaatgcganaaatgatgaccctagggctgcaaactcgtcaatcccgtgggtatggcttttgaaaggcgggaaaagaagtttttgaatgcaaaaacgtcccccctttcttcattcttataatttggtgcacgggtggctcgcccactcgagctaacctgcagtttttttttttttgagaggaacattaaccattgtccctccttccttatgagttagcgtcttgcttaacttgaacttacttaagttagagttaggcattgattactta

SEQ ID NO: 31991 - DNA, 423 bp, Glycine max
  unsure (1)..(423): unsure at all n locations
gagaacaaacncatcccaaccgcacactgcataattgtcgtattatancgcaacaacaaagaanttgaccgttgatacgtcgcgggaccccagacgccacctgcaggcatgcgagcgcgaacaatacaacggtttttgttgctgaaccaggaagggaaaacaagaaagggaaatggagctgaggtgtggtgaaaaaacacaacgggatgggtacaagtctccaaggggtgcacgaagcccttggatggatggcgactgaatagaacacaagcacaaaagagaaatgcaagtgcaaacgccaaaggggaagcgccctaacagcgaagagtggacccttaatctttttagacataactggcgactactaaaaaaataaaggaagacggtgaaaaggagaacaacttttccattatacgaagagag

SEQ ID NO: 31992 - DNA, 547 bp, Glycine max
  unsure (1)..(547): unsure at all n locations
ccggcatgttgcatgattngcgaccttanatactaagcttaaccgattaacaagagggacgcgaagattaaactatatgttacctattgatgacacacanacnggagtcgatcaatttagtccaatgaaatattactcacattctagtcgcacttatgcagcagtcatattgataattatttgacgacatttctcgcctgctgtatcacgtggaccctctcgtctacactcacatatgaaacaagacagatcaataaatgcgccatactctattcattttcagacactaacaatggaattctatctctacggaatctatatgtccgtcgttggtatattcaaagattgagcttgttatctactctaaatatagagaacactcaccgtatcaatgatgaacagaggaatcacattcaaattgtcgcccgtcctcgccgtctactagttcatngcgcatatcgtagatagagttcgagatatctccatacatgtgatatcaacgtgcatgttggcccttcagactaactcgaattatcancgcccttcg

SEQ ID NO: 31993 - DNA, 273 bp, Glycine max
  unsure (1)..(273): unsure at all n locations
agcttcaagaaaaaggccattctctcttttccaaaatttgattttaggcttaaataggtggctttgttcgngcttgagcgcttagcgcaactctgaaccgcttagcacgaattagtgaatttcggcttaacgcgtgcttttctcgctcagcggatggactaaagcggtgcgcttagcgagatgaccctttgctcaatgaacatgcacagcttattcttcttctagatattttctcgcgctcagcggataactcgtctatccaggagattggct

SEQ ID NO: 31994 - DNA, 269 bp, Glycine max
agcttgttgttctccattgcactaatggccgtgacaggttgctttttgttgtccatccccaacttacctaggcacatttcgtctacctatgtttgttggttcgagtggcctcagaataattaagaaggggggttaaatttattattcctcaacctttactaattaaaaatgaagcttctaaggcttttactaaattgtggagagaatgaggagttcatgagaaacttaacataaagtggaagcggatattaaatgcacaacggaaagta

SEQ ID NO: 31995 - DNA, 432 bp, Glycine max
  unsure (1)..(432): unsure at all n locations
tcttcattcatcttagtcattcggatcggngataggaagctnctgaattttcttcatttatctcaatctgtaggagatcaaaagcaaagctctggtttaaattcttttcttcattcaacttcattcatttgtgggtatcatatttttgagtcctttcatatttttaacagcttaaccaaatgtatcatcattgtctcttttgtacttgcaggaagctttggattagactctatgttatcgttcatctcaatccatcagatagaaaaaggaaaactttggattaaactctctccttcagtcaaattaaatgcatgcatttgtgtgtatcctattgcctatcatcatcatcattcttttataacttgccgatttgttataaacatctgacagctttctatttcaatcgatggtattgaatgggatttctctctc

SEQ ID NO: 31996 - DNA, 294 bp, Glycine max
agcttgagatgaggaagtgtttactgtttaaacgacctactcttcttcggtgaccacatagtggttcctagaaatttgtactgggggtcaagacaccttggggatgtcaagtggggtgctatcgcccacaaccatgctagatcagtcctgaccctacccgggcgttttcattctgtgagaacccgtgatgttcctacacaagcgagctcctggcattcatacagataggactgcctgaaaccacataacatggaggctggtgtggtggctggccagctttgaatcgtgagtgat

SEQ ID NO: 31997 - DNA, 536 bp, Glycine max
  unsure (1)..(536): unsure at all n locations
ctgttattgcatcattacggaccttagaatctcagcttctacatgtctagggtgttctagagagataaaggtccaagttccaaataatgttagagatattactgtgtgaagaactgcagagaatgcaacttgaagacgaaacccgtctgagaactttagaataatttatgaatgattgggaagatctataaggggaggagacattcccaccacttggatttcttcaatccttcatctttgtcttctctttgttggaaagagagcttcctagttatggagagcttaatactctgatgggacttccttgtaaggactcgatgtgaataccagtatatctattgaaagagaggttgagtgtgcactatgctatcagaacttcattctaccatgctcttgcttgatcaccatatgcatgtgtnttatgagcatttatactgaagctgctttgattttataactcgatggacggtgctacttatcgtatttcactacggatcagcggcagcatctacttgtcgatggtgtcttatgcgtcg

SEQ ID NO: 31998 - DNA, 300 bp, Glycine max
agcttgcttctacaaaaggttgttatcccttccaagtcacatttttcgctagcgaacaatgtgaatctaactcctcatctgaggattctgaggtcatttcccctactttgatgtctcatcgattagtgttgcctaggtcttaggtaccacacaagatagacgtggtggatctcatgttggagtataagggaaaggagttggaaggggacacgtcttttgaaaaagattcatcgatggatgaagaggaccccaatataaagctatagtttatagaggaggattcttcgtaagattcctcta

SEQ ID NO: 31999 - DNA, 343 bp, Glycine max
taagactgtggagatcttcgatggattggtgtaccttgcacaaacttggacaatttttgagaatgagcttttcaagacttgtcagtttagaaaagtcaggggtttctgtcaagttcttggagtgactaagattgaggaattttagccacggcaaaacctacaacaaatagtttttgataaaagaatattagaagaaaataacaagggaaatagtggtaagtggaaactaatactactttaaataacctatgagttttaaatgaacatggcatgtaacatatacctgcggtgttttccagagtagtctaagtttactgtatttaaaatcaatcgcaattacacc

SEQ ID NO: 32000 - DNA, 293 bp, Glycine max
agctttaaaatgattatggattgattggcagatagtcaagtcaataatatcatatcgaaattgatagctgctcatgaaaaagatggtcatgtatacaatatcccaaatgttcctgaagttgctgcacttattgttgatgattttgatccaagctcaaaaagagatattattgttgaaactcaaaatggagaactacaaagaatccatgaattgcactctagctatctaagcctacagtaccctctactcttcccttatggtgaaaatggatataaagctgacatactttaccg

SEQ ID NO: 32001 - DNA, 305 bp, Glycine max
atgaagcttacgaagtgtctattcgtaagctatataaaactcatagagtatttattggtgaatatgatataactcacgaactatcgatccataagtattacgcgagagacaaattaaatgctcaacttacctccgtcggttatggctaaaccaaccaccgttacaaacaccacttgccgacgaaccaccgcaaacaatgcacctcgaccaaagaggacacaagaacgaacgataaactctcacagaacacctctcacgagatcgacggtgaaggatgaataaaaacatgcgcatgtgaacaaaat

SEQ ID NO: 32002 - DNA, 282 bp, Glycine max
  unsure (1)..(282): unsure at all n locations
ccgggatgatctacactcgacctgtgcgcacgcaagcattaacgcattttactttttctcaanccgtaaatatagggaatcctgccgtcaatgattatcgataaacgttcccttaacgaaaaatgtttcttactcttgaaaaaggatagaatacaatcatcttttcttacttatcgatcaatatatttttaacaccaaaaataatatcattgttgatcttaaactatactgaaaaaatcttccgctgctcttttttaacattttacttttctttcatccccc

SEQ ID NO: 32003 - DNA, 535 bp, Glycine max
  unsure (1)..(535): unsure at all n locations
agggtttgattgatttcatttacgtacggacaccccnacnnactaagctttntcgctatatacaggttattagtaatgagcatatgcgttctgtatatagcatagaatccgtggctccggagtggatgatcattagacattgcgccatctttggttacgcaacaatagacagatgttcatgctgaactcgtttcaaatacatttctgataagcgcatgctgctatataacacttatgcatcggtgtaactatccgggccatattgtggatgagacaaaattcacatttcatattgcgtacactcattatagaagactttcccatgtgtctaccttactgtgagtggaaacaaacactatatattgcatattaagctctgtttatcctctgatcaataaatgaccattgcgccaaccataagttttatgggtactgcttgactcggcccttacctaaatagcacactctacctaacgagtgtgcatttatctcttcgattgccgagactataactcatcactacatgttcttcccg

SEQ ID NO: 32004 - DNA, 298 bp, Glycine max
agcttattgcttaacgaacttcttatttttagatagcgttgcttatctttttatttttatcattggagatgatctacatgtcatattaaattatttaaaattagttctgattgcttatataagtaatagttacttatgagtaaaaaaaatattttcttattatttgaggatcatttaagagaatgatttaaaagttatttaaaattatatcattgaatcaaaatatatgaattgtttaattataacgtgatattataaagacatattaatataaggtaaaaaaaaatcaaaatgaatg

SEQ ID NO: 32005 - DNA, 417 bp, Glycine max
  unsure (1)..(417): unsure at all n locations
tatgttgtcttatgagaggtaattattagcttgcacatcttgttatttaatataaatacatacatacttacacacacataacactnttaggttgtcttatgggatgtgtccttataatttattaatgttaaactgacgcgtttctactctgactggtcatttacctaattttatccttgattctttgcatcctataggctagacagggtgctcttctccttaatattctttcaaaatactgtgatggcacttagtcatcccttatatatggctgcttatctcttcaacttttacatctgttatttaatttcattgctttcatatgcatttatcggtatgtcttatataactaccttccatatttgatcatggtattataactattacgattttcatattcattttcatcatattcat

SEQ ID NO: 32006 - DNA, 287 bp, Glycine max
agcttgtgaatgtatatctttcatttccaacttgcaagtaaggtcttgaagttgctccgtgggaagtccttggtaagggatgtattcggtggctataagaccactgtctaatttttccttaataaaatgtcgattaatctctatgtgctttgttcgatcatgttgaactggattgtgtgcaatgctgatggcaaacttattatcacaaaccagtcccataggaacttcatattttattttgaggtcatcaagtatgatattcatccataacaacttacaaacacctt

SEQ ID NO: 32007 - DNA, 353 bp, Glycine max
  unsure (1)..(353): unsure at all n locations
tgttcatcttgagataataggtggtcatcctcatttgaagttgatggtgcaacatatttctttggcctaacaggaactccaatattcttacagattctaatgttatgattggtttggccacaccttccacatgtaaactcagccaatatcctctttagcttatgtcctgtgacattgtcctcatctacagatctccttctattnttctttggtcttcctctttggacccttttatgtggtggaacaaggtgtgtatactgggcccaatattgtggtccttggactggttcaataaaatgatgatatgtcttattataagcttctattgatagccactcatgacacatgtcctc

SEQ ID NO: 32008 - DNA, 141 bp, Glycine max
ttattaccatttctttttatggacatgcaagctggagggctcttacaaaacttgccggcactactatatttattgtgttttagcgtctagaatctcataattaaatattttctcatcttatgccacatatattactaatgg

SEQ ID NO: 32009 - DNA, 177 bp, Glycine max
ctggaagatgcactacattggtggaaatatgagagcatcgatctgcacaaatcacagttcaactacgtctgccattgttgaaacataacacatgctagctaccagctaggagtgctcaactactttggatttattaccaacttgaggactacgacatctatgaaagtaatattccca

SEQ ID NO: 32010 - DNA, 91 bp, Glycine max
agcttgtaacgtcatttttctttaacgggaacggttatgcctctcgtcgatacattcttttctgaaaggggagaggatatagacactccct

SEQ ID NO: 32011 - DNA, 420 bp, Glycine max
  unsure (1)..(420): unsure at all n locations
aagaattaaaaagtacatcgtctacaaattcgagattgacaaggaatattggggattttaaaaaataggagaaagaaaattacatcttagtcaaataaactaatgaggttatgctctatattcattnttcataattatcgtaattagattctttaactttctaatgagacttcgagatatttccacaaacttcaattttttaggtcaattatgagactaaatgatctatatattaatattataaataatcttttacatttttatctaataaaaaattaacaagtataataaatatatcaatctttataataatcatttttatgacattctaaaataatactttaaaaaacatgtaaactattgattcttattnggagatntatgtaaaattaactatgtacagaanatanactctttaca

SEQ ID NO: 32012 - DNA, 309 bp, Glycine max
agcttctaaactttgtacatgaatgaagctctgataccacttgttagacaagtggcctcagatatcttaagaaggggggttgaattaagatattccaaactgtttcccctaattaaaaatctatttcactttttactcaagttatgaattcccttaatgacaatcttcttaaatattaattcaaacgaagcaacttgaatatgaatataaagcaataataaataaaggagattaagggaagagaaaatgcaaactcagttttatactggttcggccacacccttgtgcctacgtccagtccccaagcaa

SEQ ID NO: 32013 - DNA, 391 bp, Glycine max
  unsure (1)..(391): unsure at all n locations
gtgagaggtgaaagggatttatgttcatccctcctggtaattcgagaatcacttgaaattagtgaaaaaaattgtttccgtgaagaatatccaagccgaggcgcttccgtaacgtttccgtgggtgatctcgcgaagatgttcaaccgttcttcgacgttcttcgttcgttcttcatcgttcttcggtcttcaaccggtaagttcctgaaatcgaacttttcaattcattctatgtacccttagtggtcctcatttgtttcacgtgcttttattttcatttcatttactttccgtacctccttttgacgtgctntagtcanttctttgcctaatcaaaaaataaaataaatttccagcgatcatttgaattgtaatatctcgtaatttctg

SEQ ID NO: 32014 - DNA, 305 bp, Glycine max
  unsure (1)..(305): unsure at all n locations
agctttgatggtgtcgagattaaattacatgtttgncatcgtaaaaaaggggtagaatgtgaatgtatgtatacatgattttgttagtgcttagctttactgagctttaaaagattggctaaaattttgttaaaacataagcacttatacaatgaaggaaagctggagttgctgcacatgatgtccaacgttatgtcaaggaatcagatcgggctgcacaatgcacaaggcaagatataatgtcaaatgaagaattgaagctgcaggatccacgatgtcggatacaatgtccaggacatcctgcc

SEQ ID NO: 32015 - DNA, 372 bp, Glycine max
gagaatgagcatgtgactggaagtatgactgactatgttagtcagttcgccaaattgattgtgaaggaatgcattgatcgtatcctggtgagtgtgtaatctttaaattttgagagaaacaactatcatttagtattgatttttgcatgaatctctgaagtatggactgaatgcatgaaattaaggatgatgaaggccatgtttgattgtgatagccacttagccaaaaagctgaccacgtgcttaaatgaattatcccttgcacccagtttgagctgaatgaattattgactgattgaaccctaagcctatacagtgttatctcctgctaccttgtcttaggttgtaggagagatcatccacaggaagcgt

SEQ ID NO: 32016 - DNA, 300 bp, Glycine max
agcttttataatttataacataagaactattattattgaagaatctatccatgttgcttttgatgagactaaccctataaggctaagaaaggaaacacttgatgatattatagattcattagaagacatgcacattgatgagaaagagcacaaaggcaaaggaaatggaaattaagaagactttcaaattgatgaaaataaaacaaatatagatcttccaagaaagtggagaacttcgtgatatcatcatcttgataatatcatcagtgacatctcaaaaggggtaacaacttgacactc

SEQ ID NO: 32017 - DNA, 414 bp, Glycine max
  unsure (1)..(414): unsure at all n locations
tcttagtttcagatgatgcagatgggtntgtagctacctcatgcactcctctaatgactatggcatcatttctggcgctaaactgctgggagttggaggccatcttctcaattaaatttctgacttcagcaagagtcatgtctccaagggctccaccactggcagcatctatcatacttctctccatattactgagtccttcataaaaatattggagaagaagctgttctgaaatctgatggtgggggcaactggcacatagtttcttaaatctctcccagtactcatacaggctctctccactgagttgtctaatacctgagatatccttcctgatggctgtggtcctggaagcagggaaaaatttctctaagaatactctcttaaggtcatcccagcttgtgatggaccttg

SEQ ID NO: 32018 - DNA, 305 bp, Glycine max
agctttacattgtgtcaccatagtctgtgaatactgactatcaaagtgtagatcccttgagccttgaggaggtatactaagctcttggatcaattgtttgtttctcctaaaaaattgtaagtatcaaaacctcactgatcaaaatcttaaaatcataagctgagaaatatgtgcatcttagggcccgtttacttcaattttcgtttcctattttcatcttcttattgcactttttaattacaaatttttcaccttgtattcaatctatttttcattttcaaagatttatacgtgagacaatgaac

SEQ ID NO: 32019 - DNA, 422 bp, Glycine max
  unsure (1)..(422): unsure at all n locations
atacaagtggattcaaactntctaacttgtgtttcttgttttaaaatataaacaggtcccttaagaacaaagtttaaccaagttttcaagttatacttctattgtatctattaagcacataaaatgaatgaccaagaaagtcaaattacttgtttttgcatctgcaaccatcgcggtccataataatcatattgttgtccatagcccgtatgtgctcaaggcaattacagaacacaacattgataattcaaccaacatttctgtacaaaagcaatttgaattggtacaaaagcaaggcaatatctaaacctacctctctgggcacaatattaacaaaatcaattcaccactataatattcatcaacatcaacataaaggtaacaaaatacaanagaataagcacatgcacaattataatgac

SEQ ID NO: 32020 - DNA, 208 bp, Glycine max
agcttgcaacataatctgattgttgattatcttggagtcttggtggttaggccatgaaaacctatttagagagacttccttggagaaaggcattgttgaaatccaattgatgcatttgccaacatttgttcaaagccagtgtgagtataaattttatagtttgcggtcttacaactagtgtaaaggtctatttgaaatctacactaaa

SEQ ID NO: 32021 - DNA, 549 bp, Glycine max
  unsure (1)..(549): unsure at all n locations
atgttaaacccttgtatatcctgtcactatagcatacgcaagctntaacagggagtgcccgctngcagagagactgtgcacacagctggtatacattttagttctacacgggacactatgaacatctatagactatcctatggtgagactagtttgaactacacccatttgttcccttctgtttatgcttatgtgaatctgcccaagacgtgaactacatgtatgacattctatatcttctgtccaccatgctcgggcgttgcttcttgatttacgatgagactgaaccttttgttattagttcagacactgatggccttagagaacttgaagacacggcacgagtgctcctctgtatcatgatccgcgcctagataataaacattctgactgcgattgctgcattgttctgtgctttacttatggagaaccactgcgaattgttcggtgtactatgatgaaatggatacagaaatccntatacgcctctgggaagcacagaccctgctttaagacccntcttgagcaaaattgtcctctgactgttgg

SEQ ID NO: 32022 - DNA, 304 bp, Glycine max
agcttagcaaatggttctatgtgtggcccgacttcttaatatcggggcgaatagttaacgcctgtatcctatataataattttcacattcttatctgatcgccataataatgcattgtagtaaatttctaacgcatccattgcctaaaaaatctcaagcagtaagtagacataaccggaacgtgaataatcatcaataatggtgataaaatatcattcctttccgaaagaactaacattaaaaggttcacaaatatcagtatgcataatttcaagaagctgagtgcttcttgtagctcctttct

SEQ ID NO: 32023 - DNA, 378 bp, Glycine max
ccagtccctgagaaactggttcccagaagacaacgtgtagtattgattgctcgaaaccctagccttgcagcaagtgctagggaagtacacacggtgatggacgagaaaatccgcggtattgtgagtagcattttgaaagacgcttctgtgcctgatgctgataaagatgtttcaacatctttcaccccaaatgttgctgtgcctgatgttgataaagatgtttcaacatcttccgctccaaatgctgaagcccttccttgacccagtgaagaggaatcaacagaagaagatgatctagcctcagatgagacccctgcaccactggcaccagaacctgctccacgtgatctcattgacttagaagaagtctaatctgat

SEQ ID NO: 32024 - DNA, 218 bp, Glycine max
agcttagaaaaggatattatttatgtgaagcttaatgaacaaaaccgactatatcaatttgaaatttggcctaaagaagaagcccatattcaacctcaaactgatgatgatgatggggaataaggtgaggagggttatttgttggctcgaaataaaactagaaggccagttaaacacctcacaagtatggctatgcagatttgatgacattctctctt

SEQ ID NO: 32025 - DNA, 365 bp, Glycine max
  unsure (1)..(365): unsure at all n locations
gccaatactaccgcttgcctatatattagagctaaaaccaatgccttataagcaacgagaaacaaacgagataccataggtataacttttatcatctattaagcaactaaccatcaagttagaaaatggcttgtataacaatcgaagtagatcaaattagatgccaatgctagcaataaatttataatacaatatcataagctttacatcagagtgtagcatcacagagcacaattcaaactaaaatatcctaccactgataaaactggccatcaatgtataaaaactctgggcttttcttactactntatgcaagatactaatataacctagggtaccaatggaattcataaatttccaccacg

SEQ ID NO: 32026 - DNA, 263 bp, Glycine max
agctttttgacccctgattctttggatcttgcttaactcttgattcttcggcatcatcaagataatcttggaagtcattgcttacacagttgtggggtaagctataatgatgaagttattcttttgatagtgagctatatttctttagtttaaggggatgtagataataataaaaggtcctctaatcttgattaagatcagacaatcgtattactcaaatggcggatggatacacctttacttttccactgtaaaacactgac

SEQ ID NO: 32027 - DNA, 344 bp, Glycine max
  unsure (1)..(344): unsure at all n locations
tcattcgagaatcgcanatntacctcacgagggtgtattagtatttagcaccattatcaatttcagagaacacattttcagacagaaagcaaaggcgttgctcatatatggctaacttgcggaagaagtcgcgagggaacaaaccacgaaaccacatatgacttctttngtgcaaggtattgagaagacgaaacaacgatggcgttgcagcaaagcgcgggttgaggaggtgatgacgtcgcagtaaaacgcgggtgaggtggtgacggcatcgcagcagaatgcgggagatggcagaatgttagagtcgtgacggagatgaccgtctccaggccgaacgggtc

SEQ ID NO: 32028 - DNA, 297 bp, Glycine max
agcttgagatgaggaagtgttgaatggtgaaacttcctgcttttattgttgaccacacagtggtacctgtagatatgtcgcgggggtcaggagaccttggggacgtcaggtggggtgctattgcccaaaaccaagcttgaccaatcccgacccaacccgggcatagtcggtcagtgagaacctgtgatgtacctaagcaggcgagctcctggcagtcaacagattatttgaaaacaagaccacaaaccaaggaggcttgtggtggctggccagctgagaattttgtgtaatatgtgg

SEQ ID NO: 32029 - DNA, 451 bp, Glycine max
  unsure (1)..(451): unsure at all n locations
gagcttctatggaggctggatctttgagcttcaatggagtcctttaatggngattttccaccatggagatgcagcggaagacaaaggaaaataggtgagaggaggcgccatccattaaggaataagccatggaagaaggagcttcaccaccaagatgagccttggataagaagcttggagaagatgcttcaatggaggaaaagaaagagggagagaaagagagaggggggagcacgaaattgaaggaataaaagaggtatagaagtggaactttgaagtatgtctcacaagactctcattcatcaaagttacaacaagtgttacacatgcttctatntatagactangtagcttccttgagaagctttcttgagaaaacttccttgagaagcttctttgagaaatacttcttgagaagctagagcttagctacacacacccctctcataac

SEQ ID NO: 32030 - DNA, 588 bp, Glycine max
  unsure (1)..(588): unsure at all n locations
cctctacttactaatagatttctangtatttaattaattttctnactctccctaaggcnncagagtgttgttgcttcgatncntancaacacggnaacacanaacctcagctatcagaagaagacaccgacaggggggttttctattcatgctctccanacttctgttcatgcgactattatgggcggcgatattatgaagaaatatatcgcaactatatgaacccaatgcagtcatgacatgttgctaattgcctggctgcaatctaatagcaagattgatacttagcctcaccaacatggttcactaccaccttcatgatctatactaccatatatttaatagccttatttgtagccaatagctatgaggtagatattgctgcgcaaccgaaaggtagatacctgagaccaaatactctcaatgagtcatctgtactattaaacgacactgcgacccagtatatccataactgcaaggggtatcggtttttcatcagtaaattatggcaaacctctagttttcgtactgggacttccctgcatagtcgctagtaactactgcagcggagggatcaccaaacatccc

SEQ ID NO: 32031 - DNA, 299 bp, Glycine max
agctttctagcttttcattggtgtattttgatctccttttggtgctctaaattgtgggagtgtgctcaaatatatggggcaattttgatttgttttcttgcttgattaagttggattaggggtttgtgtgggatggccctaggcctataatgcattttgaaacaatgggacatgccacattgtccccgttctcttgttattgacgcctaaacacgcgcccaccaagtgtttggtgaaatgcctcaatggcattagcgtgtgacttttgttaggagacaacccatggggtattttggttt

SEQ ID NO: 32032 - DNA, 499 bp, Glycine max
  unsure (1)..(499): unsure at all n locations
ngacaaanaccaaatattctntgttctaccaagccattgntggctctaaacaaatcaaaggatttgttgtttaagggtgctcactaactaagctattaacgtctcacatacaaatatataatcagctctnttagtcttttctctcaatatgttcaaagtgttttgagagtttttcaactctacaacaataaacataaagctttttatagaaagaaagaatgaatgaatgcttgtatgattcttgtcttcttcttcaaagcttctagtatatatagccttttatcttcaagtttatgttntctctcaatagtttgattcttcacttgatcttcatatgatgaanacggtcgntaagagcatgtttaatgcttgcattanatgcacgtnctttcttcatgagatagtccactcttatgggttgtcatgttgagtacttcaacagaaagtcacttcacattcatcggaacaagtctacataacagaatgcatgtcttttgat

SEQ ID NO: 32033 - DNA, 288 bp, Glycine max
agcttgatgactgttatctttattaccttaaaagtcattccaaggatgatttctgatggattgacatatagtggtaaaagtttcacaatgatagtgcatgacaattaaacctgtttttgaattccacactacaaaattgatgatttattttttgttggccttgaatgatttgagataatctaataattaataatctcttgaacatgatggttgaacaaccttgtctaggtggagactctaagacactaatgtttgtgaacatttcacctgattcttctttaattggcg

SEQ ID NO: 32034 - DNA, 208 bp, Glycine max
gcgtgagacaccattctcacgtacgtgactgtcacaccttatacaatacacctgtgtgccttaatggcaacgtcctcagcaccaatatggttatcactccttcattcacatctctttacgcttagggatgagagagacatccttatcatcagaaccgtaggcgctaccctatgcggtggcacttgatggggaacaactgctaacaaca

SEQ ID NO: 32035 - DNA, 301 bp, Glycine max
agcttgttaagatccaatttctcttttttcaatttctgctgagcatcaccaaactaatctttgttcccttcatgtagtcttagggcatactccccccccccccccccaactaattacaaacttctccaaccagaacctgtgcttcctccaacattaggtccagccctacctcactcccgtctgaggatatttcttcaaaggactctacatagctccctatgttacaattgcatctaaaatagttgtaacacaactcttcttccatcataaccacataatctaccccattaatggacgcggt

SEQ ID NO: 32036 - DNA, 464 bp, Glycine max
  unsure (1)..(464): unsure at all n locations
ctatgctcttgtgtggtggatctagctacaaaaggagagagcaagaaatgaagagccaatggttgatacatggacagagatgaaaaagatcatgaggaagcgatatgtgccggctagttactcaagggacttgaaattcaagctccaaaaactaacccaaggcaacaagggggttgaggagtatttcaaggaaatggatgtggtcatgattcaagcaaagattgaagaagatgaggaggtaactatggctcgatttcttaatggcttgactaatgatatccgngatattgttgagctacaggagtttattgaaatggatgatttgcttcacaaagcaatccaagtagagcaacaattaanaaggaaaggagtggctaagaggagttntaccaactttgcgttcttctagtggaaagacaaaggtaagaaagatggggctgctacttctagtagttcctcaccta

SEQ ID NO: 32037 - DNA, 304 bp, Glycine max
agctttgatggtgtcgagattaaatcacatgtttgtcatcatcaaaaagggggagaatgtgaatgtatgtatacatgattttgatgatgccaaagaaaaatcaaacaaggttgcttcaaatgataagcatttgcttcaagaataattcaagagtgcttcaacaaacaaagccttgtttcaagattcactaaagaccaagccttgccttaaaacaaagtgctttcaagacatgcaaggctctggtaatcaattaccaggaagtgtaatcgattaccagaagacagggttgagaaatagctgttga

SEQ ID NO: 32038 - DNA, 427 bp, Glycine max
ggtggtacaagagaaccttatggtttctatattatgtgggccatcaaatctatcatgtgttgacagtaattgattagcccatgaatcttctcgggggccgtacacactatggcgatggcttatgctttggctaatagacgcgggaggtcttgacttccattcaaggtcaaggcgaacctatccatccacatagtcgcttcttgatgcaatgcatcaatcaacctccctcttgcttctttttcggcatacacttgtgcaaaatcctacactagcctgtgttcatgggccacagactggttcaactctgtcttgtattgccctatgatagctagcatgctttgctccgtggcctccaagtgttgagccaaacttctcttggaccttgcacaagcagctaactcttattttaagatcatgccatgcaccc

SEQ ID NO: 32039 - DNA, 299 bp, Glycine max
  unsure (1)..(299): unsure at all n locations
agcttgaaggtaaactanatgccttggttaaccaggtaacccaactggccatgaataaaaaatctgcacctgtcgccagtctctatggtttatgctcctctgtcgaccaccacacagacctttgcccttttgtgcaacaatctgaagcaattgaacagcctgaagcttatgctgcaaacatctacaacagacctcctcaacctcaacagcaaaatcagccacaacagaataattatgacctctccagcaacaggtacaatctcggatggaggaatcattccaaccttagatggtccaat

SEQ ID NO: 32040 - DNA, 480 bp, Glycine max
  unsure (1)..(480): unsure at all n locations
atgccttggttaacctggtaacccaactgaccatgaataaaanatctacacctgtcgccatactctgtggtttatgctcatctgtcgaccaccacacagacctttgcccttctgtgcaacaatctgaagcaattgaacaacctgaagcttatgctgcaaacatctacaatagacctcctcgacctcagcagcaaaatcagccacaacagaacaattatgacctctccagcaacaggtacaatcctaggtagaggaatcatcccaaccttagatggtcgaatccttcacaacaggagcaacaacaacaacagccttatnttcagaatgttgctggcccaagcaaaccatacgttcctccaccaatccagcagcaacaacagcaacagccccagaaacaacaaacagtacagggctctccacaaccttcccttgaagaacttgtgaggcanatgactatgcanaacatgcagtntcaacaag

SEQ ID NO: 32041 - DNA, 306 bp, Glycine max
agcttgtaatttaaaagtcttttttttaatatgaaataaataatttattattatcatcaattttatcctctaattttttcgaaacatctaatcattttacaaaataacttttattaattttcctttgaagcatgtccgaagtttctcaccaataaaatgatgaaaaagcaaggtaaaaatacaaataatgtgtggtcaatataacgggcagactatttcgggtaaaaaaaaataagggaaaaaaggccagctaagtactgtattaattgagtttcatgtatctaatattggtgaatacattgtgtt

SEQ ID NO: 32042 - DNA, 323 bp, Glycine max
  unsure (1)..(323): unsure at all n locations
actcgtcaacgagaaaggtaacgtaggtgtggtattatttccacacataaacgcactctggccttagatagagattctgttgggaattcctctgaaagtaaggccttcctcactggtaggaagaagcacagtataaggcatctgaaccggtccattacagattctaaggcttgaatctntgttcctcgaattgattttggcctcaatttccttcagcttggttccaaacttttcaaaggcttgaattgccttttggtcatcactccaatcgtcactgtccctctttccaacgtagatatcatcacaagcatgtcttgacaata

SEQ ID NO: 32043 - DNA, 538 bp, Glycine max
  unsure (1)..(538): unsure at all n locations
gcgcgttgttcttcactgcgaccccacacnacaagctcgacccacgactcccaacttgctctgtagtgggatcttctttaaangagaggagccgaagggaagaaccaactggttgatcatggacagagatgatacagatcatgaggagacgatatgtgccggctaatcactcaaaggactcgacattctggctccacaaactaacccatagctacaagggggttgccgagtattgcaaggtaatggatgttgtcttcattcaagcgatcgatgaataacaggatgaggacactatcgctcgcttccttaaaggttagactaacgatatccgtgatattgacgatctacaagactatatcgaaatggatgaattgcttcacaaagccatccaccttgagctaccattagaactgataggagaggcttcgaggaagtttacaacttgggtcttctttttgagatacaatatgtcaaaaacagggctgctactttgaataaacctcaactatccatcgaagcgtcctcaagtcccgatatg

SEQ ID NO: 32044 - DNA, 302 bp, Glycine max
agcttgacaaacctttttgtttatttaataataataataataataactattatctataccatttttatgacattatgaatgacttcatgaattgagataaagtgcttaaagaattcacttgcatgtgaaaaattttcaaaaagaaaaagactcaagttaaaaggataatgcaaccagattaatactttcaaagaaaaaaatgttttgtaaagacattttcagacaatttaaatatttttatttgactatattagtataaatcatctctaatccatgtattttttaatattatactctctttt

SEQ ID NO: 32045 - DNA, 445 bp, Glycine max
  unsure (1)..(445): unsure at all n locations
tactcagctcagcaactctttctttntgtttagtcaagacctctaatgctcttaatctctcctcatctaaatcaaccaactcatctaacatcattgtccaataatggtcgattggaatgtccattagtttttgtaccctggctgattgcaaatgtatttcgaccggaagtacagcatcatgcccataactcagtcgaaatggagtagtattagttgattccttatgagaatttctacatgcccatagaacttgatctaacgttntattccaatttcttggctattgggcaatgtgttttttaatcaagttaattacaatcttattggctgcttcgacctgaccaattgcttgcgcgtaatatggtgttgaggttcataatcgaaagccaatattgtgggcaaatactttcatttttcgtgcagctaatactgaacctagatcagt

SEQ ID NO: 32046 - DNA, 238 bp, Glycine max
agctgagacaaaaatcaaatgacaatacctttttaatcggatgtctggaagagaccacgtttatctggaaacgctccaaatggaatgtggaaccttggagcacattcataccacaattaccttttactccgacgtctgaatgaatcccgtcatatatcgacacactccaaattgaatgtcaaaccacttacccaattcaatggacaaaaaccgtctactaagatgactaattgactct

SEQ ID NO: 32047 - DNA, 207 bp, Glycine max
tttcgagcgtctcgatatatgacactatctcttcatacatccgagtaaaaagttattgtcgtgtgaattgactatatgctgaacactctatttcgagcgtgtggctatctgacaggactcaatgagacatcctagtaaaaaatgatcgtgaggtgaatagtttcattagatgaacattgaatttctagcatctctcatatattacgg

SEQ ID NO: 32048 - DNA, 153 bp, Glycine max
agctagttcaaaaggatcgttttatgggtcacaatatcaaaagataccggatcagagtttatcccattatttaatagtgatgggaccccatttctgcctgctgtgtactgaacacatgtgtaagcgattcctgggctgatcaactttaacatt

SEQ ID NO: 32049 - DNA, 155 bp, Glycine max
ttatatctatcatcagacgaactaccaataatattggacttgccatggaagtatacccttactagtgatgactcaggatgttcttccttagatgcatcacctgcaacaaacatggccagcttcgatttatatacttacttcgcctagaccttact

SEQ ID NO: 32050 - DNA, 272 bp, Glycine max
agctttatttattttacctttccccctatttcttctcctataagggcttgtagaatgtacaaagtttatataaattggactattactttgcttattcaataagtgtagattttatataactgctacatagtctattaaaaagtaatatttcgcgatgttttaaattattgagcttaatctcgtagcattttatatctagagctttctgatcctttttcatggcttccgaataatctggtgcaacaccactgaccctatgcctgcaaacaact

SEQ ID NO: 32051 - DNA, 551 bp, Glycine max
  unsure (1)..(551): unsure at all n locations
cacggtttgtttgcctttgattnccattgcgattacgcgacactatagaaatctgaaacttgcttgcatgcatgctaagacgcatagcctatatgcttatatgtgcganatgacatgatcattaatatgtgttgattctatggtgcacacaccaccaatactctatctagatgagactgtgacatcagagtgctcagttgactaatgtatataatcacacgggcataagcgggatcttgtccatatactgagtcccgatactaagtcaccttaatactaatctaggagttgagattccacgactgtctaaaccccatatactgcttagggctgcgtttacatatgggttacgaactacatgaggctatgagtaataaattgtacnttcaacactacgctacaagctatgttttctattaacgcgtgtcctcaattatcatatctccatattcgcttgtatgctgccacattagtaaagacatgagaacacaaccataggcatgtgcatattgcgagcgtcacacacttgtaaatgcggtttctggtccacg

SEQ ID NO: 32052 - DNA, 298 bp, Glycine max
agcttgttaatatccaatttcgcttttttcaatttctgctgagcatcaccaaactaatctttgttcccttcatgtagtcttagggcatactccccccccccccccccaactaattacaaacttctccaaccagaacctgtgcttcctccaacattaggtccagccctacctcactcccgtctgaggatatttcttcaaaggactctacatagctccctatgttacaattgcatctaagatagttgtaacacaactcttctacaatcataaccacattaatctaccccattaatggacg

SEQ ID NO: 32053 - DNA, 338 bp, Glycine max
  unsure (1)..(338): unsure at all n locations
cgccaccacggagttntccaactatgctcttgtgtgtgtggaacaagctacaaaaggagagagcaagaaatgaagagccaatggttgatacatggacagagatgaagaagatcatgaggaagcgatatgtgccggctagttactcaagggacttgaaattcaagctccaaaaactaacccaaggcaacaagggggttgaggagtatttcaaggaaatggatgtggtcatgattcaagcaaagattgaagaagatgacgaggtaactatggctcgattcttaatggttcactaatgatatccgcgatattgttgactacacgagtgtattgaaatggat

SEQ ID NO: 32054 - DNA, 307 bp, Glycine max
agcttacataatgagcatctgtccctcaaacaaactctgcaacttagaatctaaagtagaagatgaagggatgtcagctgctggtgcaaaagaaaaaggaacaccagctgctgtggacctggttttccttgcccctagaaaattaactatttggtcattcacattccaacatttccttttaatataggccaagttgatgaccggcctcaggctcctataagaagtaagagcatcagatccaactctccttgtcctgcacaaggctatgattaaagctgggaagcctaggcgagaagagttggaatga

SEQ ID NO: 32055 - DNA, 472 bp, Glycine max
  unsure (1)..(472): unsure at all n locations
tatgctgcanacatntataatagacctcctcagcagcaaaactctcntcagantaataattatgacctttcaagcaatagatacaatctaggttggaggaatcatccaaatctgagatggacaagtccttcacaacaacaacagcttatccttcctttctagaatgctgctggtccaagcaagccatatgttcctcctccaatacagcaacaacagtcacaaaatagacaacaagcaattgaggctcctcctcaaccttccttagaagagttagtgaggcaaatgaccatccagaatatgcaatttcagcaagagacaagagcctccattcagagtctaacaaatcagatggggcagatggctactcagatgaaccaagctcaatccaaattctgacaaatggccttcataaactgtgaaanatccaaanaaatgtgagtgtcatcaccttgaggtctggcaccaaattcaa

SEQ ID NO: 32056 - DNA, 305 bp, Glycine max
agcttgaagtaaggaagtggggaagggtgatacttcctacttttattcgttgaccacagagtggtacctggagatatgtcgcgggggtcaggagaccttggggacgtcaggtgggatgctattgcccaaaaccaagcttgaccaatcccgacccaacccgggcatattcagtcagtgagaacctgtgacgtacctaaacaggcgagctcctggcagtcaaccgataaaagaacaaggaccacaaagcaaggaggcttgtgtggtggctggcacgctatggatcttgagtgatatttgcgatatgg

SEQ ID NO: 32057 - DNA, 201 bp, Glycine max
gtggtacctggagatatgctgctgtggtcatagagaccttgaggacgtctagaggagtgctattgccctaaatcaagcttgaccaattccgacccatcccgggcatagtcggtctgtgagaacctgtgatgtacctaagcaggcgagctcctggcagtcaacatagtaaaggaaaacaagaccacaaagcaaggaggcttg

SEQ ID NO: 32058 - DNA, 133 bp, Glycine max
acctgcagcatgcggctgcagcattcttgaattttaccgacttatcgttcttcatctccagatgacagtacttacagctgatgtgatccaagcactttttcggagcgcttgttggccatcgctcattgaatta

SEQ ID NO: 32059 - DNA, 262 bp, Glycine max
acttacccaaaagttacagtaaatgctagtcaaataaggcggatattgcttaaacatgcaatattaggttatttacctgcatatcaacggcagtggatgataatgctaagccattcccaatgacaacagcagcggtaccagctatgccgcagatataatgagccatcaagccgactgctacattagttgccaacacctgcatttgatcatacttgttaatacatgacctcaatagtatatcttgaggtgaacaataataaca

SEQ ID NO: 32060 - DNA, 249 bp, Glycine max
agcttctagccaaatggacttaccttgacttaattcctttgatagcccttttgagccttgtttccctttccttgttttgaagctcactacaagccttaagtgaaaaaccatgaaatcaccatatccttaaggaattatggagctttggaatttttttgggaataaatgtgggggtttttgtttcattggataacatgttttgttggccatgcttcatgatatattttgaaccatacttgatgtacattg

SEQ ID NO: 32061 - DNA, 445 bp, Glycine max
tgactaactcgtaggagtccttaaggctcaccagcttttcttgtcattgaagagcagcaacactcgccgccaaggtgagacaggacttatatttcataatttcatccctcaccaaattatagccagcgactgcaagggtggacgacggtgacccaatgctatggctacatcgcatgtagggagacaccttaacatctccactgccacgacctatcctcacacccccaaaagaaaaaggggggaggatcacagtaaccgggacaggctccccgatagcatcggaaggctatgccatcccacgagggcaagaagtgcccctaccagtctagcacaaagcccttaccttctccaaagaggaggaatcgctgtcagaagcactacagagagtatcttctttgtcacccatgctgatggcagaatcagacaagaatgaagacattctgga

SEQ ID NO: 32062 - DNA, 308 bp, Glycine max
agcttgtatcaaactaaaataaacattaacttcttaaagttgtgaacacagtccaaccacaacttcacctatttagtatttatcgtggtaaccaatgtttactttttaagatcttacatagcatttaaggatgcaacttatagacaacagtagagagttgaatccttggcccatgataggcaaccatcgatgatttaacacaaaggaccaaataaacttcacagaaaataattcctgatcattacaatttctaaaggtacaattataattaataagttgtaccattcccagtccccaccatgagcgaa

SEQ ID NO: 32063 - DNA, 419 bp, Glycine max
  unsure (1)..(419): unsure at all n locations
agtatgtgttanaaacactcggttcatgttacgcatcatgggagtactgaatagataggtttcagatcagagagattactcaagaaatccaagggctagtacctgcatgaagacagacattgtcattttcggcctaacgttcctgcaaaaaattataagataattgactaattaaacaaagttgtaaaagcataggtaacaattatatatgacagatataaaatatatatgcgctgaaaattaacaacacttgttaatttgtaaagagcatgcatatatgtaagcattagttagcaatatttaaaggtataaaaattaaaataagttgcacctttcaaagatgatagcanaaggagcaagcataatcgcagcaatggcattttgataaacagttaacacanaacgactcattccatgat

SEQ ID NO: 32064 - DNA, 168 bp, Glycine max
aacttgaataaggaaatggttaatttttacacaccctccttcttttcattgaccacagatggggacccggcgacaagtcccggggggcacgagaccttgaggacccctggtgggaatcttttgtccctaacccacctagaactaatccttgcccacccaggcataaaa

SEQ ID NO: 32065 - DNA, 499 bp, Glycine max
  unsure (1)..(499): unsure at all n locations
cggcttgttgaatgcttgnacgacgcanaactaaactaagctgagacanatatggtggacctcctccgagggtacttctcatcttatcctgccatcacgcctgaggcaagggatacggctacgccgaggtctcagtccgagactgatatggacaaattcttcacatacaacaacgagcgtagccatactatctagaatggagcaggagcaagcaagccatatgtacctcttccaattcagcgtcagcagaacaaacaagacaacaagccgctgaagctcctactcgaccgtccgtaaacgagttgcgatgcaatgacgatcagagtatcgattttgtaaagaaacaccgtcattatagcgtactaatctatgggtgatggtcataaagaacgctctctttcaattcacaatagcttctaactgtgaaaatcaaaaatggagatatcacttgagtagggccacatcaggccacacactgacattggctgactgcagcttg

SEQ ID NO: 32066 - DNA, 285 bp, Glycine max
agcttgacatccttgtgagggtgcttcttcaacaataaactgactgttgttgatgttatctccatcaaaatcttttcctctagacacagacaggtgcttaacccttggtggctaagctttgataccaaattgtaaaggcaaatatcacaagaaaagggttgaattatgattttaagaattcttctacacctttttctaaaacaaaaaattattgtttgaaaataaccttgaaaatacataacagttgtcgcaaataaagactctgacgatataaacatatttgtg

SEQ ID NO: 32067 - DNA, 413 bp, Glycine max
  unsure (1)..(413): unsure at all n locations
tccttgagaaacttccttgagaagctctcttgagaagatttctatagaagctagagcttagttacacacacctctctaatagctaagttcacctccttgagatgagaagctagagcttagctacacccccctataatagctaagctcatccccatgccaaaaatacatgaaaatacaaaaaaaaaaaagtccctactacaaagactactcaaaatgccttgaaatacaaggctaaaaccctatactactagaatggcgaaaatacaaggcccaaaagaagaaaaaacctattctaatatctacaaagataaacgggcttatacttagcccatggacccaaaatctatcctaaggctcctgagaaccctanggccttcccttggatctctagcccaatctacttggagtttcta

SEQ ID NO: 32068 - DNA, 301 bp, Glycine max
tcaagcttgagatgaggttatgttgtatggtgaaacttcctgcttttattcgttgaccacagagtggtacctggagatatgtcgcgggggtcatgagaccttggggacttcaggtggggttgctattgcccaaaaccaagcttgaccaattcctacccaacccgggcataggcgggaagtgagaacctgtgatgtacctaaacaggcgagctcctgggagttcacagataaaatgaacaaagaaccacaagcatgggggcttgtggtggctggccaactgtgaaacttgattgatatgtga

SEQ ID NO: 32069 - DNA, 419 bp, Glycine max
  unsure (1)..(419): unsure at all n locations
tgccacccaactcttgcaggcgagctatgttgcatctctttcatagcaccgccttctggaggaacttcctggaaggcccaagtgggcctgaatgctattttcaccccctatttactaaatacacctcctgccctttgtgctgattttttttcccgtaacattacagaactttacgaattctgtaatgatacttgttttctttccgtaatgttacggaaccttacggattacgtaatcattccttttttggctttcagaatgttattgaacctcatggattgtgcaagaatccttccttttgattntcgacatgtcacagaacttcacggattgtgcaacaatgctctcttttgacttctggcatgtcacggaacttcacggattgcctaacgatgggtgccaagtaccttgaaacggtc

SEQ ID NO: 32070 - DNA, 300 bp, Glycine max
agcttgcttttactatactttgcctatgggcccaaaatctaccctaaggctcatgagaaccctagggctttctcttgcatctatggcccaatcttcttggagtcttctatccaatgcccttggggggtaagattgcatcaatcttttggttttaaagtgaaaataagggccaatttaatcaattactatgtaatttgaattgtttactagcgcatttgttgcgtgtaatccgttacatttcttcatctttacctcatcaaaacctcctttactccaacatttactcctttcacctaccat

SEQ ID NO: 32071 - DNA, 314 bp, Glycine max
tgcgtagcccaccattttccatagtagaattctggttatgtgtctactatcattctcatcattattttgtgtcattgaggtgccactttgagctgccacgttctccacctttgagcgtattctttgaaagatgtgagccccctttttgcacatgttctgtagttgcatcctatctgaagacattatactgacactgcctaacgaaggcaaccactaagtccttccaagaatggactcgggaaggttccaagttagcgtaccacgtaacagctacccagtaagactttcttggaaggaatgtatcagtaattcct

SEQ ID NO: 32072 - DNA, 299 bp, Glycine max
agcgttcatgttgtttccttttattacaggaaaagagaccctgattcccattaacttcttaaatagtttatttccaaagattgaactactctcgacccagagaacattcaaatctttttactatgtggcatggaaaaggcacctcattttgactttgaatgaagtcagtggacctgtacgttctcaagtcttaaagaatttactgattggtgggcttgatttacaaccatgcacccccccctcatttattggctttatgggcggcagaatttgcctggacataaaatacttcaatcttc

SEQ ID NO: 32073 - DNA, 524 bp, Glycine max
  unsure (1)..(524): unsure at all n locations
cggtgttcattcatgcgtacggccatcaaactcaggctgggacagngngctaggannnggagagacgcaccatttctcttatctttgnncncgncccaccaaaacctactgtgcgattcttagtcttttccaaatccttacatttttcatatcggcgcggcatcaatctcagctttccatagaataatgcttaaacanttttcttttttcaaatacgttaccttattgctttacttcttggacaattgtttgttttggtcctagctactcccaaaattggatattccattatattgttagtctacacccacatgtgaccttttatattaactcccacagccaaggtcacttttggtttcaaaatgtcaaaaaggccctctattttacaccagtcaacctgtcaaatctcatttattttgcgccacccacatctcactcttaattggtcacacatgtgggggcctatctattagaacgacaaatatgggctggaaaaaagattctttctctctttagaataatcn

SEQ ID NO: 32074 - DNA, 339 bp, Glycine max
tgtagacttgagtctcgtatcggtttaatcgattacaactatctcataatcgattacattggtgcttgagagaatgactgatttattcacgactctcggctttaattgattaccaagtggattaatcgattacttctctctcattaagtgtttagaggtgaacaagaacactctaatcgattacttagggcatctaatcgactgcattgttcttgagttatatacagatgctgggattaactctttaatcgattacttagataatctaatcgattacttcattgaattaatcgattatgctatagatttaatcgattacacgcagttataattgttttc

SEQ ID NO: 32075 - DNA, 296 bp, Glycine max
agcttgtgcttatcaaatctctcctacattatatctctagcatgcattgaatgtaggtctcgtcctttgtcacgggaagccggaaagttcatatcaccttcttaattgtacacatggggcactgcgcccccaaatgcgcgagtaagaagaaataattttccgggctctcgtgtccgtaaaaagcattcatatcatgcatcgcataagcatatcttcataacatcataatggacatattctgcatttgtccgttatcatattccaacctcacattttgcatgagtcatggcatcatc

SEQ ID NO: 32076 - DNA, 388 bp, Glycine max
  unsure (1)..(388): unsure at all n locations
tgtctcagcgcttatgcgagacagagaccatcatgttagctatcatcgccgagtaccaagaagagttaggtctagccacggcccacgagcatagaatcgcggatgagtatgcccaagtatacgcggaaaaagaggctagaggaagggtgatcgactctttacaccaagaggcaaccatgtggatggatcggttggctcttaccttgaacgggagtcaagaacttccccgattgttagccaaggccaaggcgatggcagacacctactccgcccccgaagagatacatgggcttctcngctattgtcagcatatgatagacttaatggcccacataattagaaatcgttaggaaactctgatggtctctcagaccttgactagatatga

SEQ ID NO: 32077 - DNA, 302 bp, Glycine max
agcttgtaaatcatcagtaaaacaggccacgaactatggttgctgcttaagttaccataaggattcattccatcagaagcaagagcaacccttaggttccttggctcgtccctaaactctggatacaaacaatcaattgtcttccattatggagaatcggtaggatgtcgtagtaagccatcactttttctgtccactgaatgccatgaaaggttttttgaatcatgtctattagcaagcaatcgcttaaaccttggtatgattggaagataccagccaacctttgcaggacgacaattttt

SEQ ID NO: 32078 - DNA, 491 bp, Glycine max
  unsure (1)..(491): unsure at all n locations
cttgctgatnntagttttgccgatgaaaggatcgaagtgggtctgataagaggcaaatntaatcatattgctnggacgaatgagaaaactggggcaaatgaaaagggtgagaatgaatgagaaacccatgctgcgactgccgttcctacatggaaactcccccaccagctcaacaacatcattactcagccaatatcagcccttctcattacccaccacccagtcatccacaaagaccattcctaaatcaaccacaaagcctgtctaccacactttcaatcacgatcaccacctttagcacgaaccataacaccaacgaaggaaggaattntgaagcgaataagcctatagaattcatcctaattccagtgtcctatgatgacttgctcccatatccactcgataattcaatggtagccataaccccaaccaagggtcctcaanncatctttttctgaggatatgactcgaacgccacatgtgcatatgat

SEQ ID NO: 32079 - DNA, 244 bp, Glycine max
agcttgtggggtagtttgttttttactgttctattgccagcttgtttagctattaaacttacctattttttcacttttttttgctgactatacattattataatattagaaaataactctagaattttgtcgatttgtatatttgagttattatggatatttagaccttgtattcgtaactttcgcgttttcatcactcacttaagtttttatacactggttgcacacgttttttaaaagaatc

SEQ ID NO: 32080 - DNA, 263 bp, Glycine max
aactggatactggaagatgccgcggtatataatccgcgcgtctttaattggagacggtgttaaagaagataatcgtattcttatttgttctggagagcttatactcagcctacgaattgagaactcttattacagtgagaaatacacattaggcttaacgatatatatttagtctttatcctttgcttatcaggtgggtcttctaattcttaaaaatcgcattttgattctctatttatttaagttaattctcgttgaccatt

SEQ ID NO: 32081 - DNA, 306 bp, Glycine max
agctttaaaaactttcattttaccctctgatcgcttaacatgcttaatgctttctctaattttgtttacaacaggaccgactactttcaacccctcttgaacaataaggtttaaaatgtgagcacaacatcggatatgaaaaaattcaccgccacttactaaaccattagtatgcaaaagtttttccttcaaatagtcttgcattttatcattggaagaagcatcatctagagttaatgaaaatattttctgctcaatccttcattcttccaaaaaaccatatataactttagccatcccatgccc

SEQ ID NO: 32082 - DNA, 433 bp, Glycine max
  unsure (1)..(433): unsure at all n locations
tagatgctatagattgtagcattngatagtctacatgcttaagtctagcatgccacagggtaggactatcaacttggctggttcttttgacatacacctctcctgcagataaaacaaacaaagaattcttcctttnttcttccaatatgatatcagcatcaatatttctcacatcattcacgattttgacgctattggggccaaaaagaagatgcttgcctgagctagtcatttgtgagacataaatgacatttttctttaagccaggaacatgatagacgtcactcagctgaacttcattgttgccagcattgatctttacagttccctccttcacaacaagatgtgttgtgttgtgttgccagcagtgactatgactctgtctccattgtgatgatgcatttcagaggaaacttgattgttccctgttact

SEQ ID NO: 32083 - DNA, 304 bp, Glycine max
agcttgtcaagcatccagtgttttgttagcattgagcctcttcaagtgtttcttcaaccctctcgcctgaaatacacgagaaaagctacaaattagaatttgaggtcacaacttaagataccatatattcctaacaaatacaccacacaacgaatcattgtaagccagtgttttaaaaactagactgaactggccagtctgacaaattcaaccattaatcatagcattagccaacctagtcagtggtcaggtcatataaactgttaaatccaaaaaatcctagagattgacaatgcagcagccg

SEQ ID NO: 32084 - DNA, 441 bp, Glycine max
  unsure (1)..(441): unsure at all n locations
agtatcttcctcctttgcactgtaggagatacttttcaactntctttagttcgtgattatggatgtgctgattgttgaacctaattagtagtaggtggtcatggttgaacaatgttgtaaccaccccagcattgtcactaccactaccactaccaatggtgattagtagtagtaatatctgtctttgattttttccgctagctatcgtgacaacttgttttgtttggtaaatgatgaagatttgggagttaaagagattgattaatgattgtttgtatagatatattgatgtacttcctttgatatatttctttgatatatggcctctctttgtccttcctcaacatgtttcttatgtaagacaattatcttctactanttgacaattntttggtacctgtatcattgagctttgaagctttctacttctaaatgttcaat

SEQ ID NO: 32085 - DNA, 306 bp, Glycine max
  unsure (1)..(306): unsure at all n locations
agcttgaaggtaaactanattccttttttaacctggtaacccagctggccttgaatcaaaaatctgcacctgtcgccagactctgtggtttatgctcctctgccgaccaccacacagaccttttcccttttgtgcaacaatctgaagcaattgaacagcctgaagcttatgctgcanacatctacaatagaccttctcaacctcagcagccaaatcagccacaatagaacaactatgacccccccagcaatagggaaaatcccgggtggaagaatcatcccaaccttaaatgggccaatccttcac

SEQ ID NO: 32086 - DNA, 493 bp, Glycine max
  unsure (1)..(493): unsure at all n locations
cactgcggctgcagcattcaatgctgacctcttttaactctccgtcacccttgttgcccaaattcctttgatctctaagtacatcagccaatacacgttccatttccaaattccatgtaaaataacttcttgtttcctcattattttttcctaaaacttttcttttgtccgtcattttttcattagatgactccattgaagttaatgtcacttattcaacctgcatataacaaatattagatataacctactttattcatttgactagtccactgcacaattatagaaaatatttcaagcaaagtttntatgcaatagcaaagtacataaaagtctatcttcaatcgagaagtacaatagtaacaaagcacacaaagttngtctgcaatagcaaattacatttaaaanaattgtccctaagcaaatttctcctaacttgatggttagcacacatattcatagctaatgtatctcgaaatcttgccattcctcg

SEQ ID NO: 32087 - DNA, 297 bp, Glycine max
agctttcttgagagtgcttctttgagaagttaacgctttaactaccaatacacttctaataactaaactcacctccttgaaaataaaacatggataaaataacacaacaaatataattaaacatcaaatataattactaataatatttcagggtgcaacacccttctctacctctatctccactcatcttctcctacctttaagctcttatccatggcttcctatggtgttgaaaatgttcttggctaatcttcttcttgaagaggcgtcttccaacaccttttctacttcttcaat

SEQ ID NO: 32088 - DNA, 442 bp, Glycine max
  unsure (1)..(442): unsure at all n locations
tcctcggggccatttcctgcgaaggcagaacattggttagttagttctaccaaggaatgctactcttaagacaaaaatggcatacaacctcctccacaaacatcaatgtaaatttagagcaaactcatgcacatacttctttacgaacattcactcgcacaagacattcttctaactaagaaaaatgcacccatgcacaatcaaggcaccttcgttacctagattatttatatgtacttccaaggtgtatttgctaaccacatcacatgcacnttcttggctaaatttacatacatgcatgctcaaagcctcttggctaccaaaagttgcacacatgcaaactntatgatgaatctnggctatctacacaataaggtgctacatttcatgctttattcaagtgtttgtgctacctaaagctgcatgcagattcaagtatatt

SEQ ID NO: 32089 - DNA, 300 bp, Glycine max
agcttgccacccagctcgcctaggcgagcagggttgcttcctccagaagcaacaaccttctggaggaatcttctagagggcccaagtgggcctggttgctatttgtacccccatttttactaaatacaccccctacctttttttggtgattcttttttcgtaaagttacggaaacttacgaatttcgtaacgatacttgttttctttccgtaatgttacggaaccttgcggatcacataatcatcccctttttgacttacggaatgttacggaaccatgtcagtctctgcatgctatcaa

SEQ ID NO: 32090 - DNA, 499 bp, Glycine max
  unsure (1)..(499): unsure at all n locations
gagtctaacttgttggcnanaaggttgtctagtattgatggtggtaaccttgacaagtttaagagttgcacgtttgccaagctttccagcctggacaaacgttgttcgcattgtatcccctaaattctctagggtgagcgtgctcttcatccctgcaattaaagttaggtgttccataagaggtccctgtatttgataattctaccctttctgatagttaaagtgcacattgaagagagatgtttcatttttcttcacggtgggcgcatgttatgcacgcacgtcgcttttagacatgtgtcactcggtgagagggcacgtcttanagatgtgttactagtttagtggggatcttttcatggcgccgggttttaagggtttggttcaactcccactagttactanatgatcgcatccatatttaaatggnggtgtatgctanggtttggtcactggcacacttagagactccctcatttccatctgattattactctac

SEQ ID NO: 32091 - DNA, 293 bp, Glycine max
agcttgcccctctttactttatcatttccacaaaccaaacaatttccaaaatattccaatggaattgaacattcgggacgattacgacaatctgccataaaggccattatgtaggactcatcattattgggaagtattgtaccaacttcagcctcttcagatttcaccttacaaacccaaatcaaagaacatgttaccacaaatgttgttaagtgatggtatttctagaccatggcttttgcatttaatagtaacccatttcttgagtatctcaacatggtcatggctcaaga

SEQ ID NO: 32092 - DNA, 355 bp, Glycine max
  unsure (1)..(355): unsure at all n locations
gataatatgtgcaatcttttagaaaaacattatcccattaatttcaatgaaaaatagaagattaatttgcaatgtgaacttcaacattctattatatatacatactcattaaaaatctaaaagataataaacctcgaagaatttatcaattatctaaaattgtgtactggtttggtaactaaaagaaagtcacaaaatttagtacttgaattacaacctactgtattttatcatgactcttctaatttctcctactacaattgaaatatcttaatttcttagtaaaggacatatcanaggttgaaaaacaagatcaaagctttgtttataaaaaaaataacatgatagtctatat

SEQ ID NO: 32093 - DNA, 298 bp, Glycine max
agcttgagctcactgttgcttccccacaaagctccacgaaatttgtcacggccatgctcttccttgcgagccttcttggtttcttgttcatgggctcttgcgatagctgcattttcttctcgtaacccggcacactctttctggacgtttgtagcgaccaacttgaatttttctttagcaagtcttgcttttcctagttctgtttttagagctcggacttcttcatcctcttccagagcttcgaagttttcttcgttgataatctttaacttggagagccaatctaaccctcatgtac

SEQ ID NO: 32094 - DNA, 420 bp, Glycine max
agtgttggaaactatgtctaagtaattaatgtctcttatatttcaatagacattcacatttacagtgacttaccactgtcctaaggagttaaagtttcttattattgtcattacatgtattccatcacaattaattataaataagaggttctgctgactgcttaatcactcaagtcagaccaatcttcaactatagtaaagcttaaaaactccttttaacagacaaaatctaataaaaagtagggacattatcctataataactcagcattttcctatccatgcattactttgtgttacattagcttatatattcataaaatgttgctccagtatctttcatttttcaactgaacagtagtcacacaagagcaaaatataatctacagaaagataagccagtttaccccagattctgtat

SEQ ID NO: 32095 - DNA, 299 bp, Glycine max
agcttgagatgaggatgtgtttaagggtgaaacttcctgcttttattgttgaccacagagtggtacctggagatatgtcgcgggggtcaggagaccttggggacgtcaggtggggtgctattgcccaaaaccaagcttgaccaatcccgacccaacccgggcatagtcggtcagtgagaacctgtgatgtacctaagcaggcgagctcctgacagtcaacagataaaaggaataaagaccacaaagcaaggaggcttgtggtggctggccacctgtgaattttgtgtgatatgtggatt

SEQ ID NO: 32096 - DNA, 406 bp, Glycine max
  unsure (1)..(406): unsure at all n locations
ctagagatagatgactcttaacatggtcactttctatccttgctctccaaagcttcaattcatgccctctttatggctgtcaatattatgaaaaaatatatggcaataatatgaaccaaatgcaattatgaaattntgctaattgcatggttgcaatttaattgaaaatttgataattagcctaaccaaaatggttcactaccacttccatgatctatactagcatatattaaatagctattgtgtaaccaagatctatgaagatagatattgttgcgcaaccgaagggtaaataccacagagatttacaccaatgagtcatatgttactatataacgaacttgacacaacactataactcaaaactctaggggtntatggggttttccttcacttatatgatgtt

SEQ ID NO: 32097 - DNA, 290 bp, Glycine max
agcttcacatggagctacattacgtggtatcaagagcatcttcatctaggtgatattcttttgcttcctctatctttttgttcggccaattcactttaattccttgttcttcatcttattctccatgtatattctccattttcttgtggtttggtgtcgcttatattaaattcaaaaaaataaaccgattaaatcttagatctatacttgttcttgcattcctatggttcaaattttgtagatctactcttgaatcatgtttttgtgttgattataggttctatcatttt

SEQ ID NO: 32098 - DNA, 365 bp, Glycine max
  unsure (1)..(365): unsure at all n locations
tgaagatgttcgtgataagagtttcanatcacaagagaatcatctgagacaaaatgaacaaagtgttgtaaccctatcagntttgttggatgaaagacatttgagtgaattgagtgaatcttagctctactaagttagtaagtttcactatattcgagcttattctataaacactctttgaatgattaaaatacattatctatcaaacatttatcatttgtgaaagtcaggagtggcttagtgacaaagaatacacaggtcttaatcttaatgggagattaanggtagtgccagtagtggcctagagagtactcgtagtagccaggagtggcatatagaatacttgggtgcaatcaaagatttga

SEQ ID NO: 32099 - DNA, 299 bp, Glycine max
agctttgctgatttatttttcgccgatgaaaggatcgaagcgagtatggaaagaggcaaatttaatcatcttgcttggacgaatgagaaaactggggcaaatgtagagggtgaggattagggaaaaacccatgctgtgattgccattcctatatggccaagtttcccaccaacccaacaatgtcattacttaaccagtaacaacccttctccttacctaccacccaattatccacaaaggccatccttaaatcaaccacaaaacccaccttccacacaaccaatgctaaacaccacctt

SEQ ID NO: 32100 - DNA, 356 bp, Glycine max
  unsure (1)..(356): unsure at all n locations
gtacacacataaatcatngaccctaaatntatcattganaatatgaatgctatntataacgttaaaaaactaaaaacacacaaattttagtcttgagaacaactaanagaagcatggacaacactcaaatccctggtcttggtagagataaagctgctgtaaaacaggcaagaaatcccgggatatagtccgatgtaactcctacaaatgatttgatcgacatgccattcaacatgttgagaagcaattgtaacactaaaagattgagcatgcatcttccaagcactccaatngaagcttcccagaagatggtctttcagttttgagcaataaaatcttcgttcattttcttaaag

SEQ ID NO: 32101 - DNA, 303 bp, Glycine max
agcttatgctgcaaacatctacaatagacctcctcaacctcagcagcaaaatcagccacaatagaacaattatgacctctccagcaacaggtacaatcccgggttgaggaatcatcccaaccttagatggtcgaatccttcacaacagcagcaacaacaacaacagccttattttcaaaatgttgctggcccaagcagaccatatgttcctacaccaatccaacagcaacagccctagaaacagcaaatagttgaggctcctccacaaccttcccttgaagaacttgtgtggcaaatgactat

SEQ ID NO: 32102 - DNA, 468 bp, Glycine max
  unsure (1)..(468): unsure at all n locations
ctaagctattagagattcctttgccacatgattaaccatggaagttatatgtttaatatttagtttaatgttgacggacataaaaagatgtctatatntatgtcataacttcactgataatgaaagggttgaggtatggatgatgaaaaaatataaattacaatcatgttggactaagttcttgattgaataagcttctatatatgtaagaccatggatacttatacatgttgtttagtgtctttatctttgtcataccctaatttcgtccggngaccattgttagatgacatgtaacctttgctcgacctctctgaggtacttggcacccattgttgcacaatacgtaaagttccatatcatgcaagaagtcataatatagcattgttacacgatccgtgaagttcataacattgcgaacgcaaaatagggatgattatgtaatccgtaggttccataacattactg

SEQ ID NO: 32103 - DNA, 305 bp, Glycine max
agcttgagtgagccaccgtttagtgagtcgatccaagacaagagtgaatccacttcttagagtaagaaagctagaaagttagagagcctctctgagagagaagatgaatagcttgggaagtctctatcctcaagcttgagtaagcctctctaagagagaagataaatagcttaagaagtctctatcctcaagcttgagtgagccaccgtagagtgagtcgatctcaagacaagagtgaattcactccttggagtgaggaagctagaaagttagagagcctctttgagagagaagattaatatttt

SEQ ID NO: 32104 - DNA, 419 bp, Glycine max
  unsure (1)..(419): unsure at all n locations
actcagcttcactaaagaagttctncaggatgtggatcaagttattacaactatttcgaaagtgcaaattaggttatgagagccttcttttacggttctcaaagcgtattagaggcttcttttcaatggctactagatgtagttaagtctttacagaactgagtgaatgaactgacaatattagaaaattacaggacacaagaaatacctccattattatcagttaatggtacaagagtcttcaagtgcacatgcagtgcatacaataatcaaaatcaagacaagcacaaaacatgcaaaaagtgcacaaacatatgcaatgaaaaaaaaaacattaaaaaacccaaaaacagcctgtacagtgaacagctgttctcgctctccagacctccaaacagcgattcaagcaagcaattgat

SEQ ID NO: 32105 - DNA, 281 bp, Glycine max
agctcgggtacactaggatttctctttctatcctgaaacctcaagactccatcagttcccactctaaaactactctctctccctgcgactatggactctaactgggctgacaagaatggggcaaacttttgaccctcacggatctcgctcaagagttcgctggcgactctcaacatacccaacttaatgcctctagaggtgaactcacatgccatactcatgtctctaaactgctctaagaggtccaactctttaaccatcatagcagacatttgaaggga

SEQ ID NO: 32106 - DNA, 409 bp, Glycine max
  unsure (1)..(409): unsure at all n locations
agctctgcggattcggtcttcgctggcganatgatcgaagtgggtttatttatatgcanatccgatcatcatgcttcgataaatacaaaaaaaactggcgcatgcgaagagggtgagaatgagggagaaacccatgctgtgactgccatttctatatagccaagtttgccaccaacccaacaatgtcattactcatccgatgactaaccttcttcttccccaccacccaattattcacataggccatgcccaaatcaaccacatagcctgtctaccacacaaccaatgcttgacaccacctttatcacacaccacaacaccaaccaaaaaggaattgtgctcgataagcctgtatgattcaccccaaattacggtgtcatatgctaaactcgctcacatatctaccgat

SEQ ID NO: 32107 - DNA, 293 bp, Glycine max
agcttctttgttagatttttcttgagaagctcctttgagaaaacttccttgagaagctagagcttatcttcgcacatacacggtgataactaagctcaccttcttgagaagcttccgtgagaagattcctaaagaggctagagcttatttacacacacctctctaatagctaagctcagctccatgagatgagaagctagagcttatctacacctcccctttaaaaagcaaacctcccccctaggtaagctcacccccatgccaaaatacgtgaaaatacaaaaaaagttcct

SEQ ID NO: 32108 - DNA, 504 bp, Glycine max
cgtgccattattacatcatacggcctataactcacttggattcagagcaccgctcttttttaccatcttctctggcccaattactatgggcttctttgtgtcacatcctagatgtccccacttgatgacgctttccaggttctgtatccacgatttgacgagacggcactcattcttgctgatacagtctatcataaggtggttccatcaccaatccgaggcctgctcactggtcctccttatttctacatgttcattagaatgtgtctgcctacagctcactacgtgatttcgaaagactgctctgagacctcttcgaattatgatccacgggacagcaatcctatcttatgtactacatctcctttcaaacatgcatattatgtgcgtccggctgaccgtataaacaatatatacaaaatagaatagcaacccgcttcgtgctaccgaccttactctggttgtacccagctagtgaggaattcactcttcataccttatgtt

SEQ ID NO: 32109 - DNA, 294 bp, Glycine max
agcttactaaggcacctgttttatcttttcctgacttttctaaaacttttgagctacaatgtgatgcctctggagtgggagttgcagctgtattgttacaaggtgggcaccctattgcttattttagtgaaaaacttcatagtgccaccctcaactaccccatctatgataaatagctttatgccttaataagagccctccaaacttgggaacattaccttgtttccaaggaatttgtcattcatagtgatcatcaatcacttaagtacattagagggcaaagcaagttaaaca

SEQ ID NO: 32110 - DNA, 248 bp, Glycine max
atctacatatattatgcacctgaatcgggcatctgagtgaacagttatggcatatgacttagccgacagcttcgttgttcgatttcgagcatctgggaatattattggcctgaatgcgacattcgagtcacaaattatgggagtacaaaatctccatgcgctgccgtgtgtaatgtctagcctcttgatatattatgcacctgagtcggacgtgtcactggaagttatccatatgagaggctgagagc

SEQ ID NO: 32111 - DNA, 298 bp, Glycine max
agctttattcaagacaaggcttttaaagatattcaagatggatgatcaagactgtctatagagtcttagaaagggtatattaaataggaagggaattccagttgaagtagcaaaaggtttggccaagaattttaagttaaaaattctttttcaagaaatttactctctggtaatcgattaccagaggatgtaatcgattaccagtggccaaaactgatttacaaacagctattaaaatttgaattcaaaatttgccctgtgtaatcgattaccagcagtttctgaacattttcattca

SEQ ID NO: 32112 - DNA, 459 bp, Glycine max
tgtaggattatggcgtacccatcacatgtggtactaggtggtggtcgggcgatggtgcacaacaagttttccacatccacaatgcgcgcataaacccaccatcccctgttgcccacctccaactgagctcacgtacttccacgtagcccatatcctcgtttctctcaacaccgggtccccatcaatcctcccaagcttccacaacatccaagcaaaacaacattcaaacagcacaagctatcgcggccaagcaaaacagagcaaaggcagaaaactctgccaaaacaccaaccaaatcacaacttttctcacttaaagaccccaataacaattccttcgatccaattcgttaaccggtggatcgactccaaaattttactggaagtctatagtacatgaacctacattgtgaaccgtgggatctactagcaaacatccagaactcattctgtactactc

SEQ ID NO: 32113 - DNA, 275 bp, Glycine max
tcagcttgaaggagttttgttttagggaacaatttcactttaaaagtgggttccaattggctccctattttttagcttacctatttggatgtgggatcatggcagttagggtcgcaactttccatcgcggattcagtcgctccaataactttaatatttaggcattgtctaacacagggatttttgattctattcctacacagatgtgggaagcacaatctcagggattggatttaaaccactctcattatcatatccctggtgagcttgtgact

SEQ ID NO: 32114 - DNA, 529 bp, Glycine max
  unsure (1)..(529): unsure at all n locations
cgtgtgtattcctgacgacggaccatcaaactaagcttctaacgagagacgcggtgtgatagccatctttanttgctatatcgnagnggcgaagagaatctgaagacgattggatttgacgtctcgacacatgactcaataccagtggcaacagctggtattatgaggattccctatcagacctattgaaggatctttcatatattcttattcttgacagtggatctcgctctcttgttatgcacacactgtctctgagtggtaagctgcacatgcagtgctggccatagtcaacaatattactagtgcaggacgtgcttatgatctccaacattctctatgaaacaagagtctttgttggctctgcatacagactcgtcagcgatcatttgttatactgctgccacctctgaacatggattactttaattattgtatagctttgtagattagcccatttcttaatgattggatcttcttttatacactggcgtatgaaatttgaatgaagtatctttctcctgatctn

SEQ ID NO: 32115 - DNA, 165 bp, Glycine max
agcttcaccaagatatgatttttttaatcgagccgcggcactgtgtgagtgtcgaatgttctctttcataccttgttatcacatattctgctggagaaagaagctgaaacctagtgatgaggattataaagcttcgcttctggatcccctgctaatagagcataa

SEQ ID NO: 32116 - DNA, 358 bp, Glycine max
tatctccgaaatagccgtataatcaaaatagttcatgagtgaaacggtttgattcagaagaaagaaaaaaatactagttgagtgatcttttaatagttcagatcagtttttcagtatcaaactagttaattgaactgttgtttgttaaaaatgtttccgttcaatacataacttaagatggtcagttcaattttaaaaaattagtttatagttcatttcacatttcactgcacaattgatttgtgaacaccccgtctagttcatcttatcatttctattggatttaaaatagatattgaaaatcaaatcattattatttctattgcccttggaaacatgctactaattctttttacta

SEQ ID NO: 32117 - DNA, 301 bp, Glycine max
agcttatcataagcaatgtactgcacacatgtgcagtataatgtgacagaaaaaaaaccttattaataaaaagcaataaagcattcaattttcctgatttgtattgatcaaacttgagtgcaaatgcatacctgttcacctttaagattggcacaagcctcaagttgacctcgcatactaagagttagccttgaaatatctgactcagtctttcactcgtttccttttctgctcattaccttctgtaacacaagtactgtcagctacacaaggtatataaaaattgacatcccaaaggaaa

SEQ ID NO: 32118 - DNA, 236 bp, Glycine max
aacggaagaaaaagaccgatttgaacgaaatatagatgaaagccaacaaaacaagatatgaattgaaagtctcggattctaaaacttattggttgaagaacgaagatcgaacgaagaacggatgaagaacggcgtaaaaccttcacggatttgctcacgaaaacgtctcggaagcgttacggaagcaatatttttcacccaaaacagccaagatgcatagcatatgggtgagggac

SEQ ID NO: 32119 - DNA, 296 bp, Glycine max
agcttgcctcaaagaggtccaggaaggacaaggcagccgaaggaactagttccgctccggagtatgatagtcaccgctttaggagtgctgtacaccagcagcgcttcgaggccatcaagggatggtcgtttctccgggagcgacgcgtccagctcagggacgacgagtatactgatttccaggaggaaatagggcgccggcggtgggcatcactggttactcccatggccaagtttgatccagaaatagtccttgagttttatgccaatgcttggccaacaaaagaaggcgtgcgt

SEQ ID NO: 32120 - DNA, 322 bp, Glycine max
  unsure (1)..(322): unsure at all n locations
tcccaccaacccaacaatgtcattactcagccaataaacaaatctcctccttacccaccacccagttatccacaaaggccatccctaaatcaaccacatagtctgtctaccgcacttccaatgacgaagaccacctttagcacaaaccactngaaaaatattaattgcttaaatatcaagtgctcctacaaaaaggaattttgcagcaaaaagcctgtagggttcaccccaaattccgttgtcatatgctaaacttgatcccatatctacttgataattcaaatggtagccataaccctagccaaggttcatcaacctccat

SEQ ID NO: 32121 - DNA, 280 bp, Glycine max
  unsure (1)..(280): unsure at all n locations
agcttcatccttagattcctcttngcgggctgggctcaatttaaacaaccctcctatgtttagactaacatcaaactaagcttcatcctcaaatccctcttgttggactagacttaggtttaatagcttacaaaattttagcctaatttagcctaagctttgtccttagatccctcttgttagtttagacttggcccaaacaacattattgttacaacatactttaaacacaaacttagtccgcatatccctcttgaaagactaagcttcaaatctgctt

SEQ ID NO: 32122 - DNA, 344 bp, Glycine max
ccatgaactattaatacaaaagtagttggaaatacaactaacaaactcccccaaatatacagttttgcttgtgctcaagcaaagaaataacagtttacttgtcctcaagtgacagaattcacagtggttactcaaaaaatgtgtttgttccaaagcatccaatcacatgacataagtggcaagcaatacttcaaccaacaacttttcataaagatatgcagaatttcatagatctgaacatgatcattatgcaacacaaatgatatatgctagtatgcaagacatgtatcaaggaaagttcattaagcctaatgctgtcactatctcactcataagtacaagta

SEQ ID NO: 32123 - DNA, 348 bp, Glycine max
agctttttatttgcatgaagtgcatcatgttgaaataaaccaagatacttttgtcaaattgaatctatagcttagcatgaagccatcgataataaatataaaaaaaaattcatattaaaataagaaatttggagaagtgagctggaaccctatttccttaccaatgactacatgatagtaagataaaaaacaataagactacttttaccgagcaaaggcatgaacttcacagtagtcaaaggagactttctaatacatactaatacttatactaatagtaagagaacatttgtctaaacatacatcatcatcagattttaatctaaggtaaatctatagtaagacaaa

SEQ ID NO: 32124 - DNA, 310 bp, Glycine max
tcagcttctgtgtcctatgaccataaggctatcattatcaatggacagagaaggatacttctttctggctccattcactaccccagaagcacccctgaggtattacactcaaatgtatttcaggtttctttccattttggcctttttttttttttatcaaatgggcaccttaaagtatcttccttttttcagatgtggccagatcttattcataaggcaaaggaaggaggtttggatgtcattcaaacttatgttttctggaatggacataaaccttcacctggcaaagaaatgaataatgtttgcttgc

SEQ ID NO: 32125 - DNA, 345 bp, Glycine max
agcttcaacattcaatttcgagcgtctctatatgtgacgagagtcaatcagacatccaagtaaaaagttattgtcgtttgaattggctcagagcttcaacattcaatttcgagcgtcttgatatattacgagactcaatcagacatccgagtaaaaagttattgtcctttgaatttgctcacagcttcaacattcaattttgagcgtctcgatatatgacgggactcaatcagacatccgagtataaagttattgtcgtttgaattagctcagagcttcaacattcaatttcgagcgtctcgatatgtgacgagactcaatcagacatccgagtaaaaagttatt

SEQ ID NO: 32126 - DNA, 372 bp, Glycine max
ctaagctttgagccattcaaacaacaataactttttactcgttgtttgatatagtcccgtgatataacgatacgctcgaaattgactgttgaagctctgacctgatcctaactatcatatgcaatgactcggatgtctgattgaggcccgttatatatcgagacgctcgaaattgaatgtggaagctctgagccaattcaaacgacaataactttttacacggatgtctgattgagtcccgtcatatatcgagacgctcgaaattgaatgttgaatctctgagccaattcaaacgacaataactttttactcggatgtctgattgaggcccgtcgtatatcgagacgctcgaaattgaatgttgaagctctg

SEQ ID NO: 32127 - DNA, 281 bp, Glycine max
agctctgtcttctttggatgcttacttgtggcaatatttcattaataatgagatggattctttagaatctaacaaaacccggcatttagtagacttgcctcctggctgcaaaccaattatatgtgaaatcattgttgagaaacaactttgatatgaaagaccttagagaagcatgtgtaatccttggtattaagattactaggtcaaaagaggaaatttatatgaatcaatctcactacattgagaagatcttaaagaaatagattactttgaactgtaaa

SEQ ID NO: 32128 - DNA, 339 bp, Glycine max
tgagagttgagatattgctcgtgtgaaaaagttaattttaaaacactggagtaacaaaagaaacagagcaaataaaaattatgtataaatgcatggccaattttttttttttccaaataacacaaaatgaagatttttctgaatgcaatatcctaatttctaattgtgtaccagctcttgccctgtagctcggcaaacatgaatcccaagtgcgtgcagtgctagcgagtagtatccagtagcatccaacaggtataagagttggtaagcaaattgcaagcctgcattgtaaatatgatactttagacctttaaagatattcaaactccaaagaaataa

SEQ ID NO: 32129 - DNA, 337 bp, Glycine max
agcttgtaatcgattacacaagtatgggattttcagaaaataatttccaagagtcacatctattcaaatggtttatgaatggccatcaaaggtgacttggaaacacgaattaaaagaaaattttcattgcccaaaaagttttatcctctcaaaagaaaaatttttctgaactgaaatgtcttatcctctcaaaaagattccttggtcaaccacttgtatattcaataaggaattttgattgatcttcattgtacaatctatctcttttaagagagatttcttcttttcttcttcttatttctgaaaagggattaagagaccgtgggtctcttgttgt

SEQ ID NO: 32130 - DNA, 339 bp, Glycine max
tcaggctgctcaattgctccaggttgttgcatggattgtcaaaggtctgtatggtggtcagcagaggagcacaaaccacaaacccttgcaacaggtacagatttctgattcaaggctagctgggttaccaagttaaccaatgcatccagtttgccttcaagcttcttagtttcagatgatgcagatgggtttgtagctacctcatgcactcctctaatgactatggcatcatttctggcgctaaactgctgggagttggaagccatcttctcaattaaatttctggcttcagcataagtcatgtctccaagggctccaccactggcagcatctatcata

SEQ ID NO: 32131 - DNA, 335 bp, Glycine max
agcttgatggtacgctaagcctcacattttaagctaatcgcatattgtagaaaattttgtgttgtagaaagcgctaagcgcagcctgttgcgctaagccccagatgctcattggactttacaacttcaagttgggcttaacgcaaggttaggctaagcgcttgggttttaaactcaaacctcatgtgcgcatgctaagcgcagttgtgcgctaagtgcgccatacgaattttagtttttaaaaaactaaaggctaaggcacttgggtgttaccccaaaatacctttagcttctgcctttgtgaacctcgagaaagtgtgtatttctactgcatgt

SEQ ID NO: 32132 - DNA, 369 bp, Glycine max
ttgatacttggtcaaattgaagattgcacataccacgatttcagtcttcccttgtaactatatctagcatgagctcatgttgtccattcaatggtccaatgccaaaaccaccaactttaacaggcttgcaaagcttatcccatgatattgttaccaatttcttctgagtaatgtccccattccatataaaattatgaattcctctctccaaagattgaagcaaatttatcggccatgagtaaatgtgaaaggaatataataacattacttgaataacagattgcacaagttgaactcaaaccattatggagaaaaatgcacctttccacgaaaccaagtttggcataattttatccactattggacgta

SEQ ID NO: 32133 - DNA, 340 bp, Glycine max
agcttcttatccaatacactcttggtggtgaagcttattcttccatggcttattccctagtggatggcgcctactctcacctcttctcctttattttttgctgcaactccatggatgaaaatcaccattgaaggacctcattgaagctcaaagatctagcctccatagaagcttctcaagcaagcttccatcataaagggtcattttttaagaatttcagagtgccactcacccaagttactgagattacttcatcttgaaggaaccaactcgcttgggcaagtatcacttgcctgggcgagttggttagacacctcttggaccatttcatttaaaagcc

SEQ ID NO: 32134 - DNA, 371 bp, Glycine max
tgcaccaacattcattagtccaatacacactttatcaaatagtcatcatccatccataattccgatcattcatgctcaatatgatgcatgcacctgacctcaactctcatatgcaatgtggtaccatccccaaggaaatagcctaagcgtgtccacacgacactcacacttaggaaaactaggcagtaagtgtcgaggtcaccctgtcgtgcataggcaactcccctcccctacggtgatcagcctgagtctcaagggagttccaaactgagtgacatgtcccctaatacaagtattcctcctcatgagaaactacaagtacttactgacaaattttatactatttccatgtcatataaagtatgaaacat

SEQ ID NO: 32135 - DNA, 342 bp, Glycine max
agctttgtttaggtagtctcattcatatctcaccacaataattgttaatttaaaacaatatattacatgacatcaatcgacgttttcaaattgttcataattaatcagttcaattacaattgaaccaaagttaaaagttaaattggtaaattactaatggaatttattaatatatacttgcttttttagaagtattttagtaaattataaaaaatacatgcaaagtgttatttgctgaaattttttgaaaaaaagaagtgagtgtaacctttaagcattttttttaatgtatacttattttttaggataaaatatattcgtcattcttaatgtatatttgaa

SEQ ID NO: 32136 - DNA, 366 bp, Glycine max
ttacgaagttatcgcatttatataattgttattatatttattttaatcatctgtttttaaataaatataagcattaacaatgtaaaataaactctaaaacctcaatcgttcacacgtgatatattccacttctcagatgacttttaacccaattaatgtggaccgcattataactaagattggattaaaacaattatttatgttttcaatatagtgctacttaattaattgtcaggttgggagggaagaattttcctaaaattgatcaatcagattctcaaattgaaattaattattaacaaatgaactcaacaaatactcgattcatgataatttcaattatcatcaacaaactcatccacgata

SEQ ID NO: 32137 - DNA, 331 bp, Glycine max
agcttgaatttgaactacagaagctcttgagaaattcaaatggtcataacttatcacacggaagtccgattcaggtgcataatatatcgagaccctcgaaattgcacaacggaagccctcaagaaagtcaaatggtgataacttttcaaacggaagtccgattcaggtgcataatatatcgagaaacttgaaattgaacaatggaagctctcgagaaattcaaatggtcataacttatgacacagaagtccgattcaggcgcataatatatcgagacgctcgaaattgaacaacgaaagctctcgagaaattcaagtggtcataacttttc

SEQ ID NO: 32138 - DNA, 337 bp, Glycine max
tgaaattgaacaacagaagctcacgagaaactacatatggtcataacatgtcacacgaaagtccgattcaggtgcataatatatcgagacgctcgaaatagaacatcggaagctctcgagaaattccaatggtcataacttttcacacggaagtcctattcaggcgcataatatatcgagaagctggaaattgaacaacgaaagctctcgagaaactcaaatggtcataacttgtcacacggacatccgattcaggcgcataatatatcgagacgctcgaaattgaacaacgtatggtgtcgagaaattcaaatggtcataacttgtcacacggaag

SEQ ID NO: 32139 - DNA, 268 bp, Glycine max
agcttgttgccgttgttgggaatatataactgctgacaaaagagagcactttatgcttttagtaataaaaatattgtgacaattatataaaaactaattatgtattaattgagataagtttttatattttgttactgatattattagtattagtaactaaattataaatcatcactataaatttactaaaaatgacatatatatatatatatatatttatattaaatattaataagaaatcatttatcaccagtaatatgaaaatatt

SEQ ID NO: 32140 - DNA, 336 bp, Glycine max
tgaacctacggtgcgagtctgcgagagactgttttaatttcaatttttttatgaaatttgaatttttatcatttaagttagtcaaatatttgagaggatattggattttattttattttttctaaatatattatcccaaccacttgaattactggtagcttttactttttagaacccacggaaaaaatataattttatgtttattactattataatttaaatcatttaacttttaaaataattaagttatttttaaaactagaaaacaaaaacacacacacatatatatatatatatatatatatatatatatatatatatatatatatatatatt

SEQ ID NO: 32141 - DNA, 337 bp, Glycine max
agcttgacaactccaagaccctgttggacttcttcgggtccactgggtgtcttgcaggcgcgatccatgcaaacaatagatgaaatcagaaatcagttgagcgatgtgcatacttacctatgtcatgatgacgtgaccttgtcggggggaacaggcaccctgtaagactacaaaggcctgtaaccaaagctggaaaccccagggcccagttggacttctccgggtccactgggtgtctttgtgggtgagattcctgcaaacaatagatgacatcaaaaatcaattgagtcacgtgcatacttacctatgtcacgatggcatgacctcgttgggggga

SEQ ID NO: 32142 - DNA, 366 bp, Glycine max
ttactatgcaaagaataaccaaggaaaattctttcatctgacttagcatcaaactttcctaagctttcttttccattgtttaatacaaaacacttgcaaccaaaaacatgaagatgcgagatgtttggtttcctaccattgaatagttcatatggagttttctttaaaattggtattattaaagccctattcatgatatagcatgcagtattagcggcttcagcccaaaaatattttggaagaggagtatcatttaataaggatctagcaatttcttctaaagacctatttttcctttcaacaactccattttgttgaggggttctaagtgcagaaaagttatgttcaatgtcatgcttatcacaa

SEQ ID NO: 32143 - DNA, 333 bp, Glycine max
agctttttatcatctgaagcatctcatgacacaagcccctgtgatagccacacctaatttttctcttcctttcacggtggaaataggcacttcaggcacaaccttgggtgttgttcttcttcaaaattcgcaccccattgcatattatagcaaggtcttttgtcctcaccttcaaaaagcttacacttacgttcatgaactccacgccatcacctctacagtccacaaatgacaccattatctactaggccacccactcgtgatcctcacagcactactaaaaaaatacagtttagcgactgaaactactcaatcgctgtcagtgaccgaaat

SEQ ID NO: 32144 - DNA, 349 bp, Glycine max
tcacacttaatcttattacagatgattataatttgtaagatgtcaaatgttacaaatgaaatgacacaaacgttccttcacaaataaatatatatagatcaagaaatgaatccaaaataagaaacaaggagggaatagtaagggtaaaagattaataagggcagtcatgtaatatacataatataaaataagtcatgtgaatatatatatcgatttttgtctgggtctctcaatagtgttttgaaatgacttaacgatactcaacaaagtaaatccaagtctattgctaggtggattgttgttaaagtaagtaatttaaacaatatgcttatacttatattttaatact

SEQ ID NO: 32145 - DNA, 304 bp, Glycine max
agcttgtataactcttaaagataaagagtccaagttgtgtcttgagattgagacaagtgctagggaaagagatactcttctcaagaactttcaggatttggcaaagaaactgaaagatctttaaaaggatttgaagaagctgaatgaacttcatgattataaaaaagaagaaagatatgatctatagagtgtagaagcaagcttcatgatgagtcaagattgattcaaagagttttgatgataacaaagatgatgacaaaaagctcataagtcaagaacacttcatgataacaaagatgatgat

SEQ ID NO: 32146 - DNA, 313 bp, Glycine max
tgcatttgtaattgcgaaagccccactccattattaggattagtacctgacatctcaaacaaacaaatcaaacgtaacaagacaattatagttgctgtttgaatacctcacccactcaagtgtatcacacaattatggcttttctctaatgaaacactcttgccttttaccactctaattccccttgagttcttaggcaattcaagagattatggccacaacaaagaacaattcaccaatatgtgtaaggtaaggctagacaaggaaaaggttaaccaagaaaaaggctaacaatgtttttaggcacaaatga

SEQ ID NO: 32147 - DNA, 348 bp, Glycine max
agctttcaatagcaacagtcctttttcccttgactgagatgaaatcaccatttccaatttttactttggaaacaatggttttgtcaagttctttaaagaggttcaggtcattggtcatatggtttgtgcagccgctgtctattaaccatgaatcactggaactattgcttgtggcaaagcatgttgcgacaaagagttgctcatcttctcgttcctctgcaaccacctttgcttcctctgatttggacttacatatttgctctacatgtcccatattgtcataatttttgcacttgacatttggcctccaccaacattttctttcaggatgatttgtctttttgcaat

SEQ ID NO: 32148 - DNA, 374 bp, Glycine max
tcgagaacactccagaaatcttcttaaagattctcaattgtcagatcgtggacaagtgtcttgtgaagccgcagaccaaatttcgagaagatccaacggttaacgaaggctgggagatgttgttatcgaggcagcttcatgtagcttcctcaagaagcttcattaagaggcttcctcaagaagcttccccgtggcttctttgaaaggctttctcaagaggcttctttgagaagctagatccttatctacccacacccttctattaactaaattaacctccttgaaaataattacggataaaaaataacataacaaataatcaaacatcaaacataattactaatatatatatatatatatatatatatatatat

SEQ ID NO: 32149 - DNA, 347 bp, Glycine max
agcttctcccccaattttctatttatagggggagaagtgaagtagaaaagggttcagccctcctggtaattcaaaatcacttaaaattagtgagaaaaattggttccgtgaagaaaatccaagccgaggcgtttcggtgggtgatttcgcgaaggttttcgaccgttcttcgacgttcttcattcgtttttcgtcgttcttcggtcttcaaccggtaagttccctagatcgaactttccaattcattctatgcaccgttagtggtcctcatttgtttttacgtgctttcatttactttccgtacccccttttgacgtgctttagtcatttgcttaagttattttctc

SEQ ID NO: 32150 - DNA, 365 bp, Glycine max
ttgtgactcctgattctttggaacttgcttatctcttgatcctttggcatcatcaaaataattttggaagtcattgcttccacaagtgattgatttaagcatttcatgttatttagttcatatggttgaattcctttatgaatcagacaccattttcttttgattgaccactgtctttgtcacttgaggacaagtttctttgcttgaggataagcaaaattgtaaatttgggggagtttgttagtcgtcttatatgactaacttttgtatagaaatcattttccaaaacttgtatagttccccaatttatggttattttgtagtgatttttgtaaataattttttttatggataaagctgtctct

SEQ ID NO: 32151 - DNA, 294 bp, Glycine max
agcttgaatgaatgtaagacacatcttcttcaacctttgtgattcttgactccatttcattgaagcacatatccacttgtaattccaaagtgtcaaacctttcaccaacaaaggtttgaagaccatcaaacctgtccattatctttgaaaggagagatgaatcctctccatcatgtccttcttcaccaacatgtcgagcacctttcttcacccaagagccatcatgctcctcttgataaccaaaagatgctatgactgaagcgcctataaggaaagatctcttgattggaacat

SEQ ID NO: 32152 - DNA, 338 bp, Glycine max
tcccgcatccgcacttggaaggatctgattaccaccttccttaggcagtatcagtacaactctgatatggctcccgaccgaactcagctgtagaacatggctaaaagggaaagtgagtcctttaaggagtacgctcagtgttggagggacctggcagcgcaagtagcccctcccatggtcgaaagggaaatggttaccatgatggtagataccttgcctatgttttactatgagaaattagtgggctacatgccctccagcttcgcagacttggtattcgccggggaaaggatcgaggtgggcttgaagagagggaagttcgattacgtctcctccac

SEQ ID NO: 32153 - DNA, 335 bp, Glycine max
agctttataagtgcgggtctggtagacgaaggtcaagtgttcgcgatatgtgaagatgatgttccaagtactttggatttggtccgaccatgccctcctgatttccagctgggaaattggcgagtggaggaacgccccggcatttacgcaacaagcataatgtaaacctttacggttttaaaagctctatagttgggcctaggctttagagttttcattttgttaaggctttgtgtcttttgtttttgaatttataatacaaggatctttcttcatctgttcctggtctctacccattctcattcatttgcatgtttacttctttttctaaaacg

SEQ ID NO: 32154 - DNA, 335 bp, Glycine max
tctcaaggaggtgagtttagttattataggggtgtgtgtagctaagctctagcttctttaggaatcttctcaaggaagcttctcaaggaggtgagcttagttattagaggggtgcgtgtagctaagctctagcttctcaaggaagttttttcaagaaagcttcttaaggaagctacctagtttataaacagaagcatgtgtaacacttgttgtaactttgataaatgaaagtcttatgagacacacttcaaagttccacttctctccctcttttattcctttaatttagtgcttcccccttctctctttcttttcctccattaaagcatcctctt

SEQ ID NO: 32155 - DNA, 339 bp, Glycine max
agctttaacagaagaaattgctgcactgttttattagtgcaccattctaaattgagccttaaagtgtatgatattcagggcatccttggttttgaaattgattctgaatttgaaattatttttagatatatttttacatgtttggttaaaagataattcaaaattgatcttgaatttataaatgattttaagttgaagtaactttaaattttttttattagattcaaagttttggattgaaacttactcttaattttataataaaacatccaaatataaatcatattacttcaaaatcaattttatttaaaatctatttcattcaaaatcaattttatc

SEQ ID NO: 32156 - DNA, 374 bp, Glycine max
cttgcgtgcacgactttcttatcttcaaagttattttattagctcatattataaaatgacatacaaacatatgagtccagctagctatcttaaacaatatgaaacttaattttttgtgatagccttcaaactacaacaatgattattatcttcttttttaacaaatctatatttttttattacaacgtagctaatgtggtttatgttgaattcaaatttctaatatcaatttttaggatgttttagattttaaagatactatccaatctttttaagatgtttattttagaaattaatgtgttttttatgttaagtttatgatttgttataaaatagaggttttataaaaaaaattatcaagcatggaatagata

SEQ ID NO: 32157 - DNA, 344 bp, Glycine max
agcttgtaggattattgtgtacccatcacatgtggtactaggtggcggtcgggcgatggtgcacaacaagttttccacatccacaaagcgtgcataaacccaccatcccctgttgcccacctccaactgagctcacgtactcccacgtagcccatatctttgtttctctcaacaccgggtccccatcaatcctcccaagcttccccaacatcaaagtaatacaacattcaaacaacacaagctatcacagccaagcaaaacagggcaaaggcagaaaactctgcccaaaacaccaaccaaaatcacagcttttcacatacaaataccccagaaacattttcttc

SEQ ID NO: 32158 - DNA, 369 bp, Glycine max
ttgatggtgttgagaagaaatcacttgtttgttatcatcaaaaagggggagaatgtgaatgtatgtatacatgattttgatgatgtcaaagaagaatctaacaaggctgcttcaaatgataagcatttgcttcaagaataattcaagattgcttcaacaaacaaagccttgtttcaagattcactaaagaccaagccttgccttaaaacaaagtgctttcaagacatgcaagactctggtaatcgattaccaggaagtgtaatcgattaccaaaagacagggttgagatataactgttgaaaagggttttgaatttgaattttgaacatgtaatcgattaccagcaacggaactttggaaattcaaatt

SEQ ID NO: 32159 - DNA, 341 bp, Glycine max
agcttgggggaagaatctgcttttgaaatttaagcatcacattaaattaatctggtgatattggtcaaccaatgatattggattactttcctaatgtgtgactgaaaaaagatctcgatctcaatgtcttttggaattctctaatcttaacactgcatctttaatttattgattggctttgttgtggtggtgtttgtttatctctaaggttatatagagacttttgagatgtttttagagcattagctgcagtactgttttgtactatcttcatgatgtagctcttgattgctattcctgttagaatgccccagaatacctgttgtactgtttcaactttt

SEQ ID NO: 32160 - DNA, 349 bp, Glycine max
ttcaccatatcatataagataaatgcattcgttcaatttgtagatatatcctctcaaattctctgcctatatattcaacctttccatcactggcacgtggagtgaatcttcctccatggtgcaatattaaagttatattgtcatttattctacacaatcagaaaccacaaacattgtcatatattaggaaataaaaaacctaactcaaactcaaatataggcacatcacacaacaacatgcaatgccatctataaaaaaagagcatcataaacgaaaataataaaggaccataaacctacctaatttttcaattcaggccttgccacatgggattgttgacttggactc

SEQ ID NO: 32161 - DNA, 330 bp, Glycine max
agcttgagatgaggaattgtataagggtgaacttcctgcttttattcgttgaccacagagtggtacctggagatatgtcgcgggggtcaggagaccttggggacgtcaggtggggtgctattgcccaaaaccaagcttgaccaatcccgacccaacccgggcatagtcggtcagtgagaacctgtgatgtacctaaacaggcgagctcctggcagtcaacagataaaaggaacaaagaccacaaagcaaggaggcttgtggtggctggccagttgtgaatttttgtgtgatatatgggttgtggcctctggtaatcgattaccaagggtg

SEQ ID NO: 32162 - DNA, 333 bp, Glycine max
tccatcacatagtctgatatcgcataagacactatttttaacctttgtatttatttgcatttaatcaaaattttaaggctcctgattcatcttaagacataaatgtcttttgacttaacatgcatgctagtatttttagctttccaagccattattctcatttatgaaactctatcagttaaaactaagtattctcaacttgccaggtgataatactatcttgcatagactttgagaatttttaactaggttactaaattatttgtcatacttaaatatgcccctaaaccatttttttaattggatcttgaagttgcatgtgttttttaaatt

SEQ ID NO: 32163 - DNA, 329 bp, Glycine max
agctttgctgatttagttttctccgatgaaaggatcgaagcgagtctgaagagatgcaaatttaatcatcctacttggacgaatgagaaaactggggcaaatgaagagggtgagaatgaaggagaaacccatgctgcgattgccgttcctacatggaaacttcccatttgccaaacaatgtcattactcagccaataaaaacccttctccttacccaccacccgtttatccataaaggccatccttaaatcaaccacaaaacccaccttccacacaaccaatgccaaacaccaccttgagcacaaaccaaaacaccaaccagaaaggga

SEQ ID NO: 32164 - DNA, 334 bp, Glycine max
tttatgtgaaaggttgtgactcttcacctttttattcaaatttcaacattcaaaggcactggtaatcgattaccaaaacattgtaatcgattacagctttttgaaattatttggaacgttgcaaattcaatttgaaagctttttcaaaaaaaacattttgctactggtaatcgattacaacgatctggtaatcgattaccagagagtaaaaactctttggtaaacatgttttgagaaaaaccatgtgctattcaatttttgagaaaacctttttcatacttatcttgattaagccttctcttgattcttgaatcttgagtcttgaatcttgatc

SEQ ID NO: 32165 - DNA, 340 bp, Glycine max
agcttgtgtaccttaggttctttcaaacatgaaacttggcaacggagaggctcaccaagggtagactttgggtttaatgaacttgggccaaggacgtgtttgtcctaggttttcgtgaggcttcttagtcgatgaatacgactaatttttgtgtataaaacttgtgtatattgtatcaaagttctctaatttatagctgttttgtaatattataagtactttctattaaatacaggtaatagataatttatacttttgttttgtgtgtttaataatcaatttctctcaatttcaggttaattaagcaaattggcaaaaattttgttttcaccttctcgct

SEQ ID NO: 32166 - DNA, 371 bp, Glycine max
ttggaaagtgttgtttttcaccttctttctttccaatctgctggcttagcgagcgttcgctaagcgcaacactcatgggctaagcgcgaggaagactctggaagaaaatgagttgtacaggtttgctaagcacaccacttcatctcactaagcgcaccacttcagttcatccgctaagcgagaaaggcacgcgctaagccaaaattcactaatgtgcgctaagcggtccataagtgtgctaagcgcacgagtatgaacaaggccacctatttaagtatgaaatcagattttagaaggggagtttggagtgggattcagagctttgcatgtctagggtttctagagagagaaaggtctaagttccagagagg

SEQ ID NO: 32167 - DNA, 333 bp, Glycine max
agcttatctcatataaaccttttacctctttttatgttctttcagcaacaactggtatatgaagataattaataattactgcctgtttgtgaggtttgctcataatgtgccttaccttaccatgatgtatttatgttactcttgcatgtaccccactacactcagactaatacacccttagcttagggtacaataaagtgaagaataaaatttcacatagtctacacttaaggtgtagtacttttcaaaaaaaataatcaatcaacaaagacctcataagcattcacaccacatacagggaacatcacaacccagcatagccaagttgcaaaa

SEQ ID NO: 32168 - DNA, 347 bp, Glycine max
ttgacttacatgtagctataaaatgtttagatatttgtattgtttgcccctttgtttatcgaacctcgtacagtgtttttatcaatgttttaaagagtggagcagggcactattatagatcttactgcataggatctacactctagcactattatgtagttccttagctttgccaaaagacaatggtgtattaatgtttcattttatgcactccatatcaaagagaacattgagaacacaccctacaatgtggcagaggtgaacttaaaatgccatttacaacaaaacaaactttgaatttttcactcctttgcttatttgatctcacggtcttttcgtcgatgtat

SEQ ID NO: 32169 - DNA, 313 bp, Glycine max
agcttttatccatgaaaatcacctgaatccgttcaaaagtcgaatgccttaacggtctcttttacttttatcagttaaaatgaacctttcagaaagtttaaaatcaaccctacgcgtaactttctcacttttaaagaactacgtaggtctgagctcttcatcgcacttgaggatacgtaggagcaaaagccacactcttgttgaccccaaaaggtaaaaatcataaaaaggggaaaaataaataaatattgaagtcatgattttgcacacttgattaaaggttgtcgtcccttgtaagggacacgtggggtgc

SEQ ID NO: 32170 - DNA, 319 bp, Glycine max
tgcatgatttacatctccctctttctcaattttattcttcttgatatcatcaaaatcttcatgatttacaagggctaagcgatggaggtattggtggctggcagtaacatggtctatatggaagctcagaaacaaaattttgtttgcaaatgcagaatttgatactaatcggcattttgaagatgctatctttataatttggacttggcttagacaatttgagaaggacttcacagtccactataatcagtggtcaagtaatattagacaaggctttttgtttttgtagagggagtgcacatagtttcagaaatacttg

SEQ ID NO: 32171 - DNA, 347 bp, Glycine max
agcttggagatgatgcttcaatggaggaaaagaaagagagaaggggggagcacgaaattgaaggaataaaagagggagagaagtggaactttgaagtgtgtctcataagactttcattcatcaaagttacaacaagtgttacacatgcttttatttatagactaggtagcttccttgagaagctttcttgagaaaacttccttgagaagcttctttgagaaaacttccttgagaagctagagcttagctacacacacccctctcataactaagctcacctccttgcgaagcttccttaagaagattcctaaagaagctagagcttagctacacatacctctctaata

SEQ ID NO: 32172 - DNA, 357 bp, Glycine max
tttatgtgaaaggaggtgactcttcacatttttatttgaatttcaatggtcaaaggcactggtaatcgattaccaaaacattgtaatcgattacagctttttgaaattaattgcaacagtgctaatccaatttgaaaactttttcaaaacaattttgctactggtaatcgattaccacagagtaaaaactctttggtaaacatgttttgagaaaaatcatgtgctactcaattgttgagaaaaacttttcatacttatcttgattaagccttctcttgattcttgaatcttgagtctatgatcttgatcttgattcttgagatcttgaaccttgaatcttgattcttgactgtaaac

SEQ ID NO: 32173 - DNA, 345 bp, Glycine max
agctttcttgtagcatgcatggtttcgacgtattcttttgcttgaattcgactagatcccttcccgcctagtagttctcactggtaggctaccggggaaactcggtggagccgctggtggttctttgtctctttggcccttagttggcgccctagtcgacctcttcttctctttatccattccacattccactttctgtaaaccccttactctgtgtctcgcgcttttcagcctgaattccattcccgtaattcttctatgatatgaaactacatacatcaattaagaaaatagtatagtaatcgaagataagatagagtcttactagtggccctttcggggact

SEQ ID NO: 32174 - DNA, 362 bp, Glycine max
tgtatttccgtctggtccaatagatgtaactttcacctttcaggtcgagtctgaagccatctctaatgccggacgcttcctcttttttttgtgctattcctcatcttgaaatccaagcctcacctgtcccatgttggggatcctattctgcttgtggatatctaatgctagaaggctccttaatagccatagagtggcttacccttaaagacatccatgcaaacccctgaaagtctgtcttcttttaatgaatgccctaggccttcttcacttgcacaaccctccctaacagcctatgaatgtgtagtggaatcccgcaatgcgtcaccgaatttgatggcaggcacaattctggctagttc

SEQ ID NO: 32175 - DNA, 331 bp, Glycine max
agcttagacaattacatatccttcttctttgatacaactaattcaaaataatctatttcatggtctacccaatgaagacccttatgctcacttggccatctatatagagatatgcaatattatcaggttggtgggtgtgcctgcggatgcaatcaggttgagtctgttctcattttctttatctggagaagctaagagatggcttcattcttttaaaggaaacaatctgaagtcatgggatgaagtagtagaaaagttcttaaagaagtacttccttgaatcgaagactacagaaggcaaagctgccatatcttttttccaccagttacca

SEQ ID NO: 32176 - DNA, 365 bp, Glycine max
gctatcaggacctatagacatctaagctctttggagtagaaacatgggaccaactcattttatttcaaaaagttgtatctagtctaggtctgagagaccatacaagtttcctagcgatttctaattatgtgggccattaagtctatcatatgctgacaatagccgagaagcccatgaatttcttcgggggcggagtaggtgtccgccatcgccttggccttggctaacaatcggggaagttcctgactcccgttcaaggtaagagcaaaccgatccatccacatggttgcctctagcctctttttccgcgtatacttgggcatactcgtccgcgatcctatgcccgtgggccgtggctagaccta

SEQ ID NO: 32177 - DNA, 334 bp, Glycine max
agcttatactcaacaagtgaattctcctgtgcatatcctagtattacaaatgcgttttcacttttcatacaagccttagcctggtgctttatgctccacaataatattgtattatagaataaatcttcaatttcattattaaagtattactatttctcttaaatagtctttaaagtttggtaaaaaaaatagtctttaaagtaaaaaaaaagtattggtaatttttgaagtattagaaattgttctaagtagtcttccaattatagaaaactcttcaatttggtctattgacattagtaaaatataccaatttaaagattaaattgatgaatat

SEQ ID NO: 32178 - DNA, 337 bp, Glycine max
tgaggaatcttagggaaccactacagatgccgctatcactactggactacacacgtgagcccgcttaaaggtaagggatgagtttatcacaattgggattacaatgaacatgtgtagggatccttagaggatcaaatttgagtttattttgggatatttcttgtattgtaattctttatttatgattataattaggagattgttgtgtttgatggaccaattgatgcctgaatgtgaattggtagataaaattaagtgctcttggaattttcgtgttttgacctatgattttgattcctttgattttgatatgattatgtgtgtcgcaacctaccct

SEQ ID NO: 32179 - DNA, 357 bp, Glycine max
aagtcacctgcaagcatgcaagcttcccatggtgaatgaactttattgtcatgtctacataatctgctacatgtggacccaaggttgccaacctagtcatgcgtataatcaaatttgtcccagcaactggaagaagatacactggtatagttagtttgtgcccttgtatcatcactggtaactcagtaatgaccccttcagctgtcagatactggccattgcccactaaaactttaaaacctggtgctggatgttctagtaacttcatgaattttgcaattctaggttgaatgaacatattataacttcttccatcaactaaaacctgcacagaaatttttccaatttgaccttgaa

SEQ ID NO: 32180 - DNA, 340 bp, Glycine max
tttatattgatgaaatatgtatgtttctttttgtttgatgaagtcatgattacgggtggagcaacatcacctgttttctacaatttgaggcaaagacaccgccacccttgatttgcttgtgattgactatgacttggctcttcttttccaagcaatgttgatgcttgaaagatacaagttgatatttttttataaaaaaatatgataaatcataaaaggttaaacataagataaatcactgggtttattgggcttcttttcgttgtctggatcatgatacttgcattagagattgggatagttggtatcctatgagttgttctacttacacattgagttt

SEQ ID NO: 32181 - DNA, 338 bp, Glycine max
agcttcaagaataattgtctatacaaacttcttattcccagaatgaaattcaataaataggcctcctatttttaatggagagggttaccattactggaaaacccaaatgcaaattttcattgaagcaatagacttaaacatttgggaagccataaaagttggaccttatgtacccaccatggtggctggaaatacaacaatagagaaacctagagaagagtggtttgaagaagaaagaagattagtgcagtacaatttaaaggctaaaaacattattacttctgccctaggaatggatgaatatttcagggtttcaaattgtaacggtgctaatgata

SEQ ID NO: 32182 - DNA, 340 bp, Glycine max
ttacaaatcgatgcacactttataatatttttttttattgtgtccaaaatacatggttgacgccttttaaggaaaaatttgtacaagtgtgggttgtgatcatgtgatgcatcttggaaacacaacaacaaataggttcaccaattatttgacatcggggcgatgattaaggctttgtttcataaaagcataaatgtggttgagcacaagtttatgcctaccctgtaaagaagtactcatctttgaatcagagaagcataagacatcattttccatgagttgcatcgggttgactccttaggtgctgataggattgcttgtgactgtacacatagactta

SEQ ID NO: 32183 - DNA, 303 bp, Glycine max
agcttggatctcgttttatttcacaaaactccgtcgtcattgatattcacgaattgtaaaagtcgtttgactttctttttttttatctcaatcaagtgtcctgcgtccaaaatcctattacattcaatacaacaaagtaaacaagaacagtgaaacgattcagagtgcgaataacaggatacgtttcatgaatcatcaatctaatccatacgcgcaagtcggaaactagatagggaaaaaaagtgtagaaagtgagaaacggaaacatgagcagattcaactaacaacggagaaaagaagaag

SEQ ID NO: 32184 - DNA, 349 bp, Glycine max
actcaagcttcaccatgtaagcagagcataaaatattatgtttctgtaagagaaaaatatatacagaagaatttcttgaactcttaccaatcagtttttcatcactttatgaagaaaatcataactgtacagcaaaaaaaattctattatccctctatcaatcccttgccttctatattctttttattagagattctattgatgcttggattctacttccttctgtttgcctcactgcctgagatgcctcatgcagatgctgaatcccacgacctaaactagcaatggagggggctgcagggagagactcaacagcacactcaatcccatcaccatacaaaagcagctt

SEQ ID NO: 32185 - DNA, 334 bp, Glycine max
tttacaatcaaatttgttatttgctgctattatatttgttgaaacaaatgaaaaaaatatgattcattaatattataaacatggtagaaaaaataaatatgaaaataagataaaataaatatgaaaatgaggtaaaacaaatactaatgtacttcaaagtaatacgttaataagaagttttaacacttagagttccaatatcaatcatatttaaagcaaaaacaaacaactctataaaatttaattgattttgaccgatttaattcgattttgattcaaatacttaaatgattcgacccaaactgttttgattgatttccatcaatttggattc

SEQ ID NO: 32186 - DNA, 327 bp, Glycine max
agcttagcgcgcatgaggtagcttggaaggccacatagcaagcatctagaggctgttaggagaatatttgaagtttggtgcgtgcttagctaattatttcttgtgccactagtttgggttgagcatgcatcccgggcttagcgtacaaccacttaaacaagtactatttttttgtgtgcttagctcagatactaggctaagcgcccaagcctttatgagacagctttttggagcaaaaagtttaaaagaaggagcatttattagggttagagcttagaggtttaacaaggacacttttggatgctcttgtgcttccttgttctccat

SEQ ID NO: 32187 - DNA, 335 bp, Glycine max
tgttaaaaacggaagaaaaaaaaaaccgaaagtgaacgaaataaagatgaaagccaacaaaacaagaaatgaattgaaagtctcggattcgaaaacttattggttgaagaacgaagatcgaacgaagaacggatgaagaacggcgtaaaaccttcacggatttgctcacgaaaacgtctcggaagcgttacggaagcaatttttttcacccaaaacagccaaaatgcatagcataggggttagggaccctttggaacaatctcccttcgcctatttataagaaaagagggaggaggttgcctcccagctcacccaggcgatctgggttgcttctt

SEQ ID NO: 32188 - DNA, 337 bp, Glycine max
agcttaaaaagggaattggattattgtggaggcctctggtaatcgattaccagtctgtgtaatcgattacacagaggaatgggtcactggtaatcgattaccaggtatgtgtaatcgattacacagtgcctttttcatgttttcatgtcctgaagctgtgtgattcgagtttagcctctggtaatcgattaccaaggttgtgtaatctattaccagagatgaaaagccttgagatacccattttaattgcatgtagtggttatgagacgcattgtgttgctaccgcagttagatctctcgtgaaagagactaccccttgctattctttctagtagat

SEQ ID NO: 32189 - DNA, 363 bp, Glycine max
aaggggaaggagtcatcatttttttggcatgatcttgaaggacgagcttaaggcttgccttaggtctatgagaaatataacgcaacggttaaacgaggctgtagggaatgtgtgggccatcatcgatgagtgcatatagaagctaaatctagcggcgactcaccagcaaaggctagaggatgagtacgccaagatatcagcataaagggaagcgagggaaagggttattgagacattgcaccaagaggcagcaatgaggatggaccaatttgctcttactttgaacaggagtctaaaactgccggaaaagagatcgaaagaaaaggcaatggcggacacctactccgcccccgaggagatcac

SEQ ID NO: 32190 - DNA, 319 bp, Glycine max
agcttatttattcaatttcgagcgtctcgatatattacgagtctcaatcaaacatccgagaaaaaagttattgtcgtttgaatttgctcagaggttcaacattcaatttcgagcgtctcgttatattacaggactcaatcagacatccgagtaaaaagttagtgtcgtttgaattggctcagagcttcaacattcaatttcgagcgtctcgatgtatgacaggactcaatcagacgtccgagtaaaaagttattgtcgtttgaattatctcacaggttctacattcaatttcgagcgtctcgatatatttcaggactca

SEQ ID NO: 32191 - DNA, 323 bp, Glycine max
agcttcacgatgaatcaagattgattcaaagagttttgatgataacaaagatgatgacaaaaagctcaaaagtcaagaacacttcatgataacaaagatgatgatctcaagaatcaaagaatgagttcaagattgaatcaagaacacttcaaggttcaagaggaaatttgatttcaagaatctagaatctagtttcaagattcaagttccaagaatcaagatcaagattcaagaatcaagagaagactcaatcaagataagtattaaaaagttttttcaaaaactgagtagcacatgaatttttctcaaaaaaccttttacca

SEQ ID NO: 32192 - DNA, 313 bp, Glycine max
tctcccttatttttctataaatagggggagatgtgacgtgaaagagagctcatccccttacgctcttgtgtatctctcgaaatagctgatgaaaatcacttccgagaataaaattcgagccgaggcgcttccctaacattggcgttacgttgccgagagagattacgcgaggagggtcgaccggccatcatacattgttcgctatgatcaatctttaacgggtaactacctcataccgaagctatcaattcattctatgtacccgcggtggaccacatctcgtcacatgtatttatattctgcgtgttcattt

SEQ ID NO: 32193 - DNA, 345 bp, Glycine max
agctttttgactttgtatatttttgttgttggtctctgtcataccctaatttcgtccggggattattacttgatgacatgcaataaatgaagtccagagacatctcagaaatctaaaggaagcaggcttgcgcaatccatgaaattccgtaatgtggcggaagtcgaaaagaggtgtttttgcgcaatccataagtttccgtgacttcttcgaaaggtaaaaaaggagtaaatacataatccgtaaggattcgtaaccttacgaaaggaaaataagtatctttacgaaattcgtaaagtttcgtaacgttacggaaaaagaattacaaaaaaatagaaaaggggg

SEQ ID NO: 32194 - DNA, 367 bp, Glycine max
tttgtcactccacccatacctagccttcacattatacttgacttaacaccgcagacaacagggttaaggaatttttgcaccccatatacaaaggcttctttgaatcactctgcaatccttcatacacaggggcgtgtgcttcctgaaaagactcttgtccaaggtcacgaatcatgtcctccaagcgatctcccatttctacatcaaacggttctgattgggacccactctgcatgtcagtcacttcaccatgccatatccacgtcgtgtaattcttcttgaccccatcacacaatagaaggtctcgtatgtcgtccagtagttgttgtcttccgttcaaacaattgatgcaaggacaataatattt

SEQ ID NO: 32195 - DNA, 336 bp, Glycine max
agcttgtgcaaatcaaatcacttctacatttcatctctagcatgcatcttctttctttacccactcctcacttttggttttttagggaaaaacaccataactaaacgcgccgtgagggatccctatcgcaccagatccaaatctagaacgatgggtgatcaagaggagacgcaggaacagatgaaagccgacatgtcggctctgaaagaacaaatggcctccatgatggaggccatgttaagtatgaagcaactcatagagaagaacgcggccaccgccgccgctgccagttcggctgccgaagcagacccgactctcttggcaactacgcaccat

SEQ ID NO: 32196 - DNA, 347 bp, Glycine max
tgttaaaaacggaagaaaaagaaactgatattgaattttataaagatgagaaccaaaaaacaagaaatgaattaaaagtcttggatttggaaacttacccgttgaagaatgaagagcggacgaagaacggaggaaaacctccaaggatttgcttacggaaacctctcggaagcgttacggaagcacctcgccttggattttcttcacggaaacaatttttttcacccaaaacagctgaaatgcatagccaagggaatcagagacccttagaacaacccccttttgcctttttataggaaaaaaggggaggaggttgccgcccagctcacccaggcgagctgggatgc

SEQ ID NO: 32197 - DNA, 336 bp, Glycine max
agctttgatggtgtcgagaagaaatcacatgtttgtcatcatcaaaaagggggagaatgtgaatgtatgtatacatgattttgatgatgtcaaagaagaatctaacaaggctgcttcaaatgataagcatttgcttcaagaataattcaagattgcttcaacaaacaaagccttgtttcaagattcactaaagaccaagccttgccttaaaacaaagtgctttcaagacatgcaaggctctggtaatcgattaccaggaagtgtaatcgattaccagaagacagggttgagaaatagctgttgaaaaaggttctgaatttgaattttcaacatgta

SEQ ID NO: 32198 - DNA, 340 bp, Glycine max
tcgaagccattgaacccacccaaaagggagcgttgtcgtagaagactcaatcgggtttggaagattcgagaaaacgtttcagcggttcttggagaacgtcgtaggcttctttgaggtgttcaaagacgtcgtaggggatgtcagtgttggcttctgcgttttctggaaggttttggactttaggcagtggaaggttcacgaaattgatatcaagtgtgtttagtgacggttttggaagacgctctatgtttcttgggtggatacgaaactcacgtggtgacccttttgagcaatgagtttggccagctcaaggtttgggatcatgtgaccaaaggctagc

SEQ ID NO: 32199 - DNA, 336 bp, Glycine max
agcttattcaccactttaaatttctcactcaaatttcatttgaaaaaaaagaaaagaaaacctttaatagcttcatgtgatacaattgaatgaaacagaacaatatgagcatctaaggagagccaaagccagaacataaaatgttgaaacttgaaagcgtgtaacgaagaacattgtatgaaataaaaaagaaaataagagtgaatgcattttacctgtctgaggaattagtagcaacaatgtgtatcagaaagagtgaaagaagaaagggagaataagaagcgattgtatagaggttagtgtagtgactaatgactaaactaactaattacgtgt

SEQ ID NO: 32200 - DNA, 340 bp, Glycine max
tctcagtcaggtatttcatatccttctaattttatatatatatagagagaatatatttgaatgctatgtgttgtattatggtacaatagaatcacattagggtataacaaatcaataataaatacataagaataattaaatccctgatttttagtaatagatattataatatttaacatatattaaatgtgcttatctaactcccctcaagctgaagctgttgtataagccaagcttgttatatatgcagtcaacacaagagcctttgagggatttaatgaacatgtcaactaattggtcactagagttgacaaagtcagttgtaatttcccctaaaagc

SEQ ID NO: 32201 - DNA, 257 bp, Glycine max
agcttgtgcaaatcaaatcactcctacatttcatctctagcatgcattttctttctttacccactcctcacgtttggttttttaggaaaaaacaccataactaaacgcgccgcaagggatccctatcgcaccagatccaaatctagaacgatgggtgatcaagaggagacgcaggaacagatgaaagccgacatgtcggctctgaaagaacaaatggcctccatgatggaggccatgttaagtatgaagcagctcat

SEQ ID NO: 32202 - DNA, 379 bp, Glycine max
ccgagcgcagatcactcttgtaagactaggcttaacttaaacagcattatcgtaacaacatattcagaaaaccaaaaccctaacaatccatccctggtaatgtggttattcaatcctgcttctatcaagttctaaggcaacaatacatttcccaatgctaaagtcacctaactatacacacaaatgggtgatcagaccaagagcatgcagaaattaagcattgaaagaagcattgaacacataaaacacaattaattagatattaaagtaattacatcagttgttccttagaaatccccaacaagggtgtttagccagccattacagaaaaaccctaacacaaatgagattgagagtacaaaataattgttccttacac

SEQ ID NO: 32203 - DNA, 337 bp, Glycine max
agcttcaacttacagttagtagttctggcttagcgcaacaggcgcactaagcgcacatccaagaattcaaaaatcgcaagagattggtgcttaacgcctcctggcctgataagcccagcttaaaaactcaagttacagaatgaatctagggcttagtgcaagataatgtgcttagcgctgctacaataaaaattttcctaagaagaagtggtgcttagcgcatcatccacgctaagcctactggttaaagttcaattattgcaaagatgtggggcttagcacagtgatgtgcgcttagctaaactattcagccaaccaatcaggggtctatgtgctt

SEQ ID NO: 32204 - DNA, 332 bp, Glycine max
tctagaaaaagctgatgcataaactatttttatgtttatggaagaactttatttcatctaaagagaccctagtgaagccagctatttatgactaaagtactattttgttcttgaatttgtaacgctctaatcggttagtccttcaaattaggtaaatttgaaaagaaaaaagaagttctaaaaacttgttcccgcgactgggaatacatcgatacatgtaaaaggacacaggcactgcatgtcagtcaaaggggccaagacgtcaagttttggactagctttgttgatggaaaaccaaattaagagtttttttttttttttttttggatttt

SEQ ID NO: 32205 - DNA, 333 bp, Glycine max
agcttgaaggcaaactggatgcattggttaacttggtaacccaactggccttgaatcagaaatctgtacctgtcgcaagggtttgtggtttgtgctcctctgctgaccaccatacagacctttgcccttccatgcagcaacctggagcaattgagcagcctgaagcttatgctgcaaatatttacaatagacctcctcaacctcagcagcaaaatcaaccacagcagaacaattatgacctctccagcaacagatacaaccctggatggaggaatcaccctaatctcagatggtccagccctcaacaacaacaacaacagcatgctccttcct

SEQ ID NO: 32206 - DNA, 409 bp, Glycine max
cgcctgatgcattcgtccactatcaggtgtcactacataatactcaagctttagatgatacatgtcttgatagtttgtttgttcagttacaacttacaaatcacatttatgctgataaaagcatatttgaaataactaatgacgcgaacgctacctagccactaacattggtaccaaatggttggctagttgtcatatatttacctactcaacacgtttacctaacaatgcatcgttaaaagcggatattgaaatagcaataaacacattaaaagggagggagattgaatagtgtgtatattaaaaatataaacttttgtaatataaaagcggatataaataatatatatatatatatatatatatatatatatatatatatatatatatatatatatatatggggccg

SEQ ID NO: 32207 - DNA, 331 bp, Glycine max
agcttattttagatatttatactacaagcatatggatacagtcaatgaagcaaacctagagaagcctctgccaaactaatagagaactccccatatcccagataaagttcttgagatagattcagagacataataggatttccatatacaataaaaacctaaagatagagtccaatatattgacaacagagttctatcaaagacagccaagccagtttccctcagcaaggatggcagatttttttttttgatcagcaaacataatatatatattaataaataaattgagtaccagaggtactaaagtacagctatataattgcccttactt

SEQ ID NO: 32208 - DNA, 335 bp, Glycine max
ttgggttccatctatgagccctggctttctcatctgaagtggtacgggttttgaaatgttcatttgagtggtattgcttgtcttctgaaggcaattggagggaagttattttaggtacttctcttttagttgagtttgaattgtgtttcaggatactcaaatattattatttgagcatacactttgcatgtttcatcaaagtacccttatgtaacatagttattaccttcatctaccttttgttctgattgtagcatacacacccatatcaaagaacatatcactacaaagggtgatatatgttaagtccctaaactatacatttcacagagacc

SEQ ID NO: 32209 - DNA, 331 bp, Glycine max
agcttatgttgcaatcatttgtaatagactccatcagcagcaaaaccaacaacaacaaaataattatgacctttcaagaaatagatacaatccaggttggaggaatcatccaaatctgagatggacaagtcctccacaacaacaacagcctgtccctccttttcagaatgctgctggtccaagcaagccatatgttcctcctccaatgcagcaacagcagcaacaatcacaacaaagacaacaagcaactgaggctcctcctcaaccttccttagaagagttagtgaggcaaatgaccatccagaatatgcaatttcaacaagagacaaga

SEQ ID NO: 32210 - DNA, 335 bp, Glycine max
tgcctcaaagaggtccaggaaggacaaggctttcgaaggaactagttccgctccggagtatgatagtcaccgctttaggagtgctgtacaccagcagcgcttcgaggccatcaagggatggtcgtttctccgggagcgacgcgtccagctcagggacgacgagtatactgatttccaggaggaaataggacgccggcggtgggcatcactggtcactcccatggccaagtttgatccagaagtagtccttgagttttatgccaatgcttggccaacagaggagggcgtgcgtgacatgagatcctgggtaaggggtcagtggatcccgtttgatg

SEQ ID NO: 32211 - DNA, 367 bp, Glycine max
tttagtattgagttggtctttgacatgatatttaaggctccatttagtggttacaaatttgatccttgttgtccttttttgtcttggtgagatttaatttcagtactaggcatgattcttatgtaatttgtgaatgcttcaacttgaaaggagtctcacataatgaaacatcaaacatgttaaggatataagtcactcttaagtctccaccttgtagattaaacttgtactttaaaattgatgcacaataattgtttatatatctaacattttccattcagcttctattggtactttgtattttaaactttttttctctccttatatatggttctgatcatatcctaatctaagtgtattagggaac

SEQ ID NO: 32212 - DNA, 331 bp, Glycine max
agcttgctcaagctggattaatatttgggttttgactggggataaaatggagactactatcaatattgtgtataatacaatgattgtgtcgttttaacattggcttaagcatgataaatacttctcaagatgtctgacatcaatatacaatagtaggtttgcttatagtttactaagaaaaggaatgaagaaaattatcattcattttggaaactctaaatattacagcattggagaaggttggcaacaagggtgctattgacaaggtaaaataaatttctatattttgtttttatctaagatgatgtagtttgcactttgcatactacgt

SEQ ID NO: 32213 - DNA, 338 bp, Glycine max
tctccattattatatggttataaaaccatatttaaattttttttttcttatttctattttaaattaatgattcattttttccctttttctatcactcatatttatctcattatggaaagtgacgctactattgaaacaattgcgaatacaacaatgattcatttcaaccccaaccaagatgaatggccttcaataagatacgagtaattcaaatcacttctattccataaaacttacatgttattacaaacaattataatcttaaatttttttgaaacaatttatctagatctgtgcttctcgacagacctaatatcatatatgtacattttcaagtg

SEQ ID NO: 32214 - DNA, 321 bp, Glycine max
agcttaatagagctcattatggtctcaagcaggcccccaggcaatggtttgaaaggcttcagactaccttacttcagtttgggtttgtggcaagtaaatgtgatctctctctgttcatttacaagaccaagtctcacactgtatatctccttgtgtatgttgatgatattataattactggaagttctattcctttaattcaacatcttacctctcagttgaactcaaaattctctctcaaacagcttggtttgttaagattattttcttggaatagaggtgaagactctggccgacaaatcaatactgcttactcaaagc

SEQ ID NO: 32215 - DNA, 342 bp, Glycine max
agcttctacattcaatttcgagtcttttcgatatattacgggactcaatcggacatccgagtaaaaagttattgtagtttgaatttgctcagggcttcggtattccatttcgagcgtctcgatatattacgggactcaatcggacatcagagtaaaaagttattgttgtttgaatttgctcagagcttcggtattccatttcgagcatctcgatatattacgggactcaatcagacatccgagtaaaaagttattgtagtttgaatttgctcagggcttcggtattccatttcgagcgtctcgatgtattacgggactcaatcagacatccgagtaaaaagt

SEQ ID NO: 32216 - DNA, 366 bp, Glycine max
tctaagctttgagcaaattcaaacgacaataactttttactcggatgtctgattgagtcccgttatatatcgagacgctcgaaatggaataccgaagctctgagcaaattcaaacgacaataactttttactcggatgtcagattgagtcccgtaatatatcgagacgctcgaaatggaataccgaagctctgagcaaattcaaacgacaataactttttactcggatgtctgattgagtcccgtaatatatcgagacgctcgaaattgaataccgaagccctgagcaaattcaaacgacaataactttttactcggatgtctgattgagtcccgtaatatatcgagacgctcgaaattgaatacc

SEQ ID NO: 32217 - DNA, 335 bp, Glycine max
agcttcatgatgaatcaagatttattcatagaagttttgatgataacaaaggtgatgacaaaaagctcaaaagtcaagaacacttcatgataacaaagatgatgatttcaagaatcaaagtatgagttcaagattgaatcaagaacacttcaaggttcaagaggaaatttgatttcaagaatcaagaatcaagtttcaagattcaagcttccaagaatcaagatcaagattcaagaatcaagagaagacttaatcaagataagtattaaaaagttttttcaaaaactgagtagcacatggatttttctcaaaaccttttaccaaagagtttttac

SEQ ID NO: 32218 - DNA, 327 bp, Glycine max
tcaactttcaaagagtagtttaggcttagcacaacatgcgcgctaagcgcacttccaagaattcaaaacccgtaagagattggtgcttagtgcttcctggccctctaagcccagtttaaaaactcaagttacagaatgaatctggggcttagtgcatgatagcgcgcttagcactgctacaatgaaatttttcccgagaagaagtggcgcttagcgcatcatccacgctaagcccactggttaagttcaattacagtgaagatgtggggcttaacgcagtgatgtgtgcttagctgaactattcagccaaccaatcaggggtctcta

SEQ ID NO: 32219 - DNA, 324 bp, Glycine max
  unsure (1)..(324): unsure at all n locations
agcttatgcgcatatttcctttttaacgctcacttgcacaagacatcctattaactaagaaaaatgcacccatatacaatcaaggtagcttcattacctagattatttacatgtacttccaaggtgtatttgttatttacatcacacacgcctccttggctgaatttacacacatgcatactcaaagcattttggggtaccaaaaattgcacatgcgctcatcttggtatttctaatacctatacatatacaaacttcacgatgaatcttgactacctacacaataaggtgcttacatttcatgcttttttnaagtttttgcta

SEQ ID NO: 32220 - DNA, 254 bp, Glycine max
atgaaaagataaaatgatacaagggcaatattgtattccttgaaaatgttgaatatgttgcctttgtgcaattttttaaagctcgccccaggcatttgtttaaacatgagcttgaagtgctcaaacacaagtttgggcgcacgactctcgatggccatgccatacaaacattctatagattgcagtagtattgctttggcttggaacctaaaaagaagccacctatgggttctatatcatcataaaatagagtg

SEQ ID NO: 32221 - DNA, 333 bp, Glycine max
agctttagccttccatggcaagttatcatctttcagctacaataggggtttttggaagcaaaattcagattacacagtggtggggatgtctcctccacctctaggaacctagaaatcactctaaaacctagaatcctattgaaagatgagattttttgtgttcccttgccctgttattcctttttacgtctctctattgcataggctctccagacttccatcttttcttgccaactttagcttttaagggctttctgtcctcgaaggctcgctgatgtgccatcattttcttctattttctaaaccctttttgcaccattttaattattgatt

SEQ ID NO: 32222 - DNA, 345 bp, Glycine max
tactcagcacaatggtggcctctagggaatgaagcgtctatttctctttctaatgacgcatggacacttatccctgacccaactacaattcgtacgaaaggtcggccataatcaataaggataaggaatgagatggattggctcgaaccatctgagcaccgacaaaaatgtagtagatgtggggcagaagggcacaacaggcgtcgatgtccaatgcaatctgaccgcgggagttgttcatttaattgatttatgtatgttacacgagtgacttgtattggtttaaattctcttcaatgtatttactttgtggtcttcaatgaaatcgttagttagaaactttac

SEQ ID NO: 32223 - DNA, 185 bp, Glycine max
ttttttttactcggatgtctgattgagtcccgtaatatatcaagacgctcgaaattgaatgttgaacctatgagccaattcaaacgagactaactatttaatcggacgtctgattgagtcccgtaatatatcgagacgctcgaaactgaatgttgaagctttatgcaaattcggacgacaataac

SEQ ID NO: 32224 - DNA, 366 bp, Glycine max
tcaacattcaacttcgagcgtctcgttatattatttttctcaattagacatccgagtaaaaagttattgtcgtttgaatttgctcagagcttcaacattcaatttcgagcgtctccatatattacgggactcaatcagacatccgagtaaaacgttattggtgtttgaatttgctcaaagcttcaacattcaatttcgagcgtctagatatattacaggactcaatcaaacatccgagtaaaatgttactgtcgtttaaatttgcttagctctccagctttaaatttcgagcggctcgatatatgacgggactatattatacatccgagtaaaaagttattgtcatttgaatttgcttagagattc

SEQ ID NO: 32225 - DNA, 278 bp, Glycine max
agcttcttatccaagtcatttcttggtggtgaagctccttcttccttggcttattccctagtggatggcgcctcccctctcctcttctcctttgccttctgctgcatctccatggtgaaaaatcaccattgaaggacctcattggagctcaaagatccagcctccatagaatcttcacaagcaagcttccatcagctgtcttactggtttagcctcaccctctaaatttatccgatgcatacatgtggatgggctaataccaccaagtccaccaggtc

SEQ ID NO: 32226 - DNA, 316 bp, Glycine max
tctttgagaaaacttccttgaaaagctagagcttagctacacacacccctctcataactaagctcacttccttgagaagcttccttaagaagattccttaagaagctagagcttagctacacatacctctctaatagctaagctcacctccttgagatgagaagctagagcttagctacacaccccctataatagctaagctcacccccatgacaaaaaacatgaaaataacaaaaaaaagtccttattacaaagacaactcaaaatgccccgaaatacaaggctaaaaccctatactactagaatggccaaaata

SEQ ID NO: 32227 - DNA, 267 bp, Glycine max
agcttgaactgaaacttatagtccaacaactgctattcgagttggataattatttggcactaggttttggaaaagtctaaaagaaatgctcttgggtcatggctggaatagaactttgagaaagaaatatgtctgagcttagtcctaacaaattagagtcattaattgtagttattattcaattgataccattgttaggaacaacatagtgttaggaacaacatagtgttaggatgcagagatggcaatgctggtggttggctctaa

SEQ ID NO: 32228 - DNA, 359 bp, Glycine max
tactcaagcttctagccaaatggacttaccttgaattaattcctttgatagcccttttgatccttgtttccctttccttgttttgaagctcactacaagccttaaatgaaaaaccatgatatcaccatatccttaaggaattttggagctttggaattgttttgggaataagtgtgggaggtttttgtttcattggataacttgttttgttggctatgcttcatgatgtattttgggccatacttgatgtacattgtatattggttaaatgttggacatgctgaatgaaatgttgtttctcaaaggctatagagtaaaaaaaaaaatcggaaaaaaaaatttcaaaaaagaaaaagaaa

SEQ ID NO: 32229 - DNA, 330 bp, Glycine max
agcttgattagtgattatattaatttcaacttttaatacaataaaaatataaaacagtcagtaaaaagggggagcagatcaataaaacaaaataacctcacgcttgttatactcctttaagactggtaggatcaattcatctgctttctggccagtccacccaaatttctcccagcacaatctgtgcacaggaagtaactcagaatatcagaaaatatagacatacatattaaattaaatacaggtttagaaaaagattaagtaaattccaaaagtgagatcaatagtgtctcaagtaaagatatgcgataatcatgttcagatttataa

SEQ ID NO: 32230 - DNA, 340 bp, Glycine max
ttgacttgagtcatcaagagattataaatatgtgaccatggcatgagttttaaaaaaacaatcaatcatcaatcatctttgaatcatctatctttcaatctttttcaacatcatctctcaaacatctttcaatcaatctttcaatatctttctacagaatttttctgattcatttctcttcatctttctaaaatttttttatcaacactttttcttccgagaaaagttcttcgttcaaaaacttgtggtattcatctttttcattctcttttccctttgccaaaagaacgaaagactaaccgccttgaattcttttgtgtctctcttcttccctttccct

SEQ ID NO: 32231 - DNA, 328 bp, Glycine max
  unsure (1)..(328): unsure at all n locations
agcttggatagttacaatttgtgtttgcttatgctcaattatcatgaataacacaattcaagagagcttaaaacttattttgattcacaaatccagccacaactcagcaccataactcaacttcatcataggcatcgtataggaaacttagaaaacaaaaaaagagttcaacaacaagactatttctaggaattgatttagaacatgttaagaactaaataatatgcatgaactagactcaaattcaaaagataggctaagaatgacaagaatacatgaacaaatgtatctagaattcaatncacaaaaataaaaattcaacacaaac

SEQ ID NO: 32232 - DNA, 340 bp, Glycine max
tagccctagaggggatggaccttttcaggttttggagaggatcaataacaatgcctataggttggacctcccagaagagtatggagtcagcaccacttttaacatttctgatttaactccttttgcaggtggagctgatattgaggaggaggaactaacagatttgaggtcaaatcctcttcaaggggaaggggatgatgcaatcctccctaggaagggaccaatcactagaaccatgagcaagaggctccaagaagattgggctagagctgctgaagaaggccctagggttctcatgaaccttagggtagatttctgagcccatgggccaaggttgggt

SEQ ID NO: 32233 - DNA, 342 bp, Glycine max
  unsure (1)..(342): unsure at all n locations
agcttctagccaaatggacttaccttgaattaattcctttgatagcccttttgagccttgtgtccctttccttgttttgaagctgactacaagccttaagtgaaaaaccatgatattaccatattttgggccatacttgatgtacattgtatattggttaaatgttggacatgctgaatgaaatgttgtttctcaaaggctaaagagtnnaaaaaaaaaaaaaaaaaaaaaaaaaaatcgaaaaaagaaaaagaaaagcaataaagttgagtgaataagatcttaaatggcacaagaatgatgaaactcttggttctactcttcatgtttaattnttatctt

SEQ ID NO: 32234 - DNA, 372 bp, Glycine max
  unsure (1)..(372): unsure at all n locations
tcaagaaaaatggcctcagcaaatttcttattttcaaaaggaaattctatcaatagacctccaatctttaatggagagggttaccactactagaaaacccgaatgcaaatttttattgaggcattagacttaagtatttgggaagccatagaaatagggccttatatacccaccacagtagaaagaattacaatagatggaagcacatcaagtgaaagcataacaatagaaaaacctagagatagatgatctgaagaggatagaagacgagtacaatacaatttaaaagccaaaaacatcataacatctgccctgngaatggatgggtttcaaattgtaagagtgctaaggaaatgtgggacactctacaat

SEQ ID NO: 32235 - DNA, 297 bp, Glycine max
agctttgaacaaacaaatcaatttttgacccaacacataaaataaaatagattgagtattttaacaagaacattatattcagcatatcaatctcaattacaaaagcgtgtttcaacaaatgagaaatatcaatacagcttgtgcaaatacgtaatttgaaggcaaaagaacactaaaacagagtaccagcatagaagacggaatcagtgtcatcgcccgcattgaggaaggaattgttggaaaaataatacataaatatagaaaaataaatacgaagaagatgcaccatcttgaatt

SEQ ID NO: 32236 - DNA, 334 bp, Glycine max
tatcttaaaatcaagcatccaaaacacgtatttatgtatattgaacaacactctcataattttattttttttgttattgttcttccaatcttattcgttcttccttcgacacagacacatataagcaaaatgcattatttaaagtaaattattgttatctaaacctctgccgatcctatataataatattgcatatgcatttcttgaaatggaattttatacacatataattaagtgataagccatcatgtttaatttgtcaatcaagcatatgaactaaattattattctttagaaactaattatgaatactaattaatgaagatgattgctt

SEQ ID NO: 32237 - DNA, 323 bp, Glycine max
agcttcattagatgttgcattttcgtatgacttcccctaatggaagaacaatatccaaaacttgtatagtttccccaatttatagttattttgtagggatttgtaaataaatcttgttttattgttataactgtctctagaatatttttcatttgatttaatgatgaaatctgttcaatttcaggttaaaagaggctaagtcttgaagtgctaaagtggtagttgtgctcagctcaccaattgggatcagcgtgcatccaacgctaagcgcagcttcagcatgcttagcgcgacagaagaatctggcagagcataaatatcaa

SEQ ID NO: 32238 - DNA, 320 bp, Glycine max
  unsure (1)..(320): unsure at all n locations
tgagatgangatatgttgaagggtgaaactttttgcttttattggtgaccacaaaatggtacctggaaatatgtcgcgggggtcaagaaaccttggggacgtcaggtggggtgctattgcccaaaaccaagcttgaccaatcccgacccaacccgggcatagtcggtcagtgagaacctgcgatgtacctaagcaggcgagctcatggcagtcaacaaataaaaggaaaacaagaccacaaagcaaggaagcttgtggtggctggccagctgtgaattttgtgtaatatgtggattgtggcctctggtaatcgattacca

SEQ ID NO: 32239 - DNA, 338 bp, Glycine max
agcttgccacccagttgcttcctccagtatcaaccgtcttctggaggaacatccgggaaggcccaagtgggcctggtttctatttgcacccccatttttactaaatacaaccccttgcctttttttgctgattctttttccgtaacgttacggaaacttacaaattccgtaacaatgcttgttttccttccgtaatgttacgaaaccttatagattacgtaatcatccattttttggcttttggaatgttacggaacctcacggattgcgtaacaatgctttcttttggtttccggcatgttacggaatttcacggatcgtgcaacaatgctttcttt

SEQ ID NO: 32240 - DNA, 349 bp, Glycine max
tccaagaatcaagatcaagatgcaagactcatgatttattaatcaagagaagaatgaatcaagataagtatgaaaaagtattttcaaaaactgagtagctcatggatttttctcaaaacatgtttaccaatgagtttttactctatggtaatcaattaccagattattgtaatcgattaccagtagcataatgttgttgaaaaagttttcaattgaatatgctacgttccaattgatttcaaaaagctgtaatcgattacaatgttttggtaatcgattaccagtgtgcttgaacggtgaaattcaaattcaaatgggaagaagcacattcttttccaaaaaaagcttt

SEQ ID NO: 32241 - DNA, 338 bp, Glycine max
agcttatcaaaataaacttaaattaatgtttttcccaccataaatgcagaaaaaaagatgttacatataggtgaacaattaaacaaatttatttcagtttcagtatgtgataggcaaaaatctgtgaaaataacagacagtgcctagacacacacagatgctgttcaatcattaatatccctcacttagttatgttgtaacttgtagtatgtttggaaggttacaggcatgcatgtgggtctctcagtaaattcaacaaaccaagaaagaactcttaagttggttctcttagattatggatgttatgtgggagacttatctataaagttagaaggtgg

SEQ ID NO: 32242 - DNA, 351 bp, Glycine max
taagccatcatcttatatagcatttaagagttgacttttatgacttcatttaacactttgtgttggagattttttttgtagagacattctcctagaatttgtcgaatcctataaaagataaatgaaaatcaagatttgaaagtgccaaactctatcaaagggcaagctctaccatgcatacttgctttgatttatagggaagcattttttgctgaagtactcaacatgaaagccaaccagagtgaactttttgcacgaagaaatgacatgcatttaatgcaagcattaaatgcccaaacgaccactatcaataaatgaagaacacaagaaaaaatctacctgttgtgagat

SEQ ID NO: 32243 - DNA, 337 bp, Glycine max
agctttaaaagattctagcgtgagtgctacacatcaaagacgtagaagatcagcatcatgtagttagtttattgtaacttattatcaatatgcaaagatcttatccttttgaactgtgaatatcatgcattagaaatataggtggtacagtagacaacgtaaattagccgttaggttagttcagacaccatccatgtattaaataagaatgcattttcagtcataggcttacttcaaataagaatgcattttcaatcattgtcatacttcaatattatcttagttcatattaccactgtacaacattttttatcttggaaaatgatagttgtcacaa

SEQ ID NO: 32244 - DNA, 350 bp, Glycine max
caatacaagatgcaagtcaagattgggtcttttatgttatagataggaaaactcatacttttatgctgcaaagtgtgcctgatgctttgcctacccaaaactactgcatcagtgtacaaattacaaaatcattatgaatggtggtagcattggcaagcatgcagggatcacattgttgcaaccttgcaaaagtttctcatacatttccattcatgcggagcccccaaaaggttttggattcatgcttagcaacctccaaatgtggattattgttgagtgttgatcccacttcatatgatatgacaagttcatcatgaaatagatcatatgctacacatgtcagatccttg

SEQ ID NO: 32245 - DNA, 337 bp, Glycine max
agcttgcaaattattttcccttgctagagatcaatcaaaacccctcctacataaaggaagggctttcccaaaataattggaatttcctaatcctcctttatgtccatgatcacaaaatcagcttgaaaaatgaatttaccaactatgataagcaaattctccactattcctttcagataagtaatagttttatctacaagcacaagagaaatgttaatgggttggggttcttgtaactcgaacttcttataaacaaaataaagcatcaaatcaatgcttgcaccaagatcacataaggctctatcgattttcaagctaccaatagtacaagggattg

SEQ ID NO: 32246 - DNA, 350 bp, Glycine max
tttcgattcattctatgtacccgtagtggtttacattgtgtttcgtgcattttgattctcgttttgtttactttttataccccctgttgacgtgcttaagccattttacttaagtcgtttctcgcttaacttaaaaataaaataaatttccaccgaacgtttgaattgtattatccattagcttcggttaaaataaattccgaccgttcggtcatgccgtaaccacattggaaatcaaaaagaggtaaaaaataatataataatcaaaaagacatctttaggtaaaataaagcggaaaatcaatcggacgttttctctttgggatttctcattcttaaccgaattgatta

SEQ ID NO: 32247 - DNA, 347 bp, Glycine max
agcttttcgcccttaggaacaaccagctttgcatttttggtcaataaatattggtggatatactttcgctttaggttatacacactcatacttagaaagataaaaacagaaaatattatgtataagatataatatatgtaataagaagaagaaaagaatgggcaaaaaaaaaatgatacgtaaattaataatgtattcagaacaaaagtaccactcttcattatatatatatatatatatatagatatatattttaccattcaacagttctggtattctctgttcatttgtatgtgccctcttgcactcacgtactcattcccgcgtatagagaaatgagtacgctg

SEQ ID NO: 32248 - DNA, 371 bp, Glycine max
tggttggggtcatttttccactgtttggcttgttttgtacactcacaaatcggtgcgtgcccttttgtttgtttcctcacagcacaacttggggatgataaaaatgaatgcttttgacgatttacaattagtttagagagtttgagttttgttctttatctgggttgtggagtagtgtttgtggttgagagatttggacgaagtgtgtgcttttatttatatttatcatccttttttttcttgtgtctatggaataattaacaatggtctggctttgaccttgcacccatctgttgctgattgtaagaaattgtttattttattcttaaaaaaaactatcattctcaaaactcatctgataaaaggatctc

SEQ ID NO: 32249 - DNA, 335 bp, Glycine max
agcttgtaggattatggggtattcgtcatatgtggtactaggtgtcgatcgggcaatggtgcaagtcgactctccacatccacaaatcacacataaatccaccatccctagttgcccaccttcaactgagctcacgtactcccacgtagcccttatcctcgttcctctcaacaccgggtccgcatcaatccatccaagcttccacaacatccaagcaattcaacatccaaacatcatgaactatccaaaccaagaaaatagggccgaggcagaaaactctgcccaaaacacattccaataccacagttttcctcactcaaataccccagtaacat

SEQ ID NO: 32250 - DNA, 350 bp, Glycine max
tgagactggcgctaagcccaatttcacttactttcgctaagcatgagggtggcgctaagcgcaacgtcacgattttagagcctatttaaagcctgttttgtgcagaattagggtagagaattcctagggcacaaaattctacaatatccacagtacctattttgggaaaagagccttggaagcagcaaagatgagcaacttgtgcattgaagcctaggttttgtcattagagagagattattgagtagagagtgagtgtgagatgttgagaaggggaaggggaatcccccttcttgtgtaaggaactatcattctctgcttttaatcttatttattgttagggtttcttt

SEQ ID NO: 32251 - DNA, 332 bp, Glycine max
agctttacagcccctcaccttgttctaggctacgggcttggcttgtctctaagaggagaagttgttggacaatcattgccctttctgtcctcgaccatctacttttcctccaccaccgaccaccacgccttcgccagctatggctcctccttcggtgccgttatttccgcctccagtgaagcctcaagcctcggttcccattaaatggctatcctatgaggagctcaccttgcgatgtgaacatggtatttgtttcaactacgatgagaaatttcatcgcggccacaaatgcgcctctaaggcttttctactcattagggacgatgatgacc

SEQ ID NO: 32252 - DNA, 346 bp, Glycine max
tcctcaattgatttttgtttaggaactaccttattttttatggtttctcctaaagcttgtaagtatttgttggtataatttgcatgttccattaagctcttaatgtctttagaggttacttcctcgttgacatcttttgtcttgaatggaattgccatgacaggtttattgttactgtctttgatatttggcagttgatattgtgttgcgggaggtaattccgattggattaactcaccatccttcacttgccaatttgttatgagatttgttgttggatcacctatgatgtcttgtttccaagggtaatctatatcctttctgatggcataagcatgaaaccaat

SEQ ID NO: 32253 - DNA, 276 bp, Glycine max
agctttaactaaattctgtagttatgttcgaagaccaacactaataaggaatctggaagttcctttcccaccccctcagccaggtccataatatgaacaaagagttatctgttgttctgggtttaagaaacaaaaacatgagacaaatttcaaaccaaacaggccttattatttgtacaacctatgatttacccacagcagctatctagacgatgggatgggacatcctacaaaggactttgtttcaacaataacttgaatggcctccttgcttga

SEQ ID NO: 32254 - DNA, 348 bp, Glycine max
tctaccatgatgacgacatcccttcgttctttttctacgaggtctaaatttactcgcaacacttcattgttctcaacctccatgaagttctgtcttcttagtgatattttccccacttctaccaggaccataacattcatcccgtataccaaccaaaagggtgtatcttgggttacagattggggagtgcaccggtatgccataaaacttcaaagagctcctcagcccatcttcccttgacattgtgtagttgtttctttagttccactagaattactttgttagccacttcggcttggtcaattgtttgagggtgttctacggatgtcaccatgtgcttgatgctga

SEQ ID NO: 32255 - DNA, 332 bp, Glycine max
agcttcaggttgctcattgactccagattgctgcaaagaaggacaaagatccgtatggtgatctgcaaaagaacatagaccacagactcttgcaacaggtgtagatttctgattcatggcaagctgggttactgggttgaccaaggcatcaagttttccttcaagctttttattttgagtagataaggatgaatccgtggccacctcatggactcctctaagaacaatagcatcatttcttgcactaaattgttgggagttggaagccatcttctcaatcaaattcctagcttcaacaggggtcatatcaccaagagctccaccactggcag

SEQ ID NO: 32256 - DNA, 312 bp, Glycine max
tcttatacaacgcgcatcctgggtgatgaagttccttcttccatggcttattccctatgggatgacgccttctctgacctatgatcctttgtcttacgctgctatacatgggggaaaaccacacattgggggacctcattgaaactcagagatccaccctccatacaagcgccacgagcaaacatacatgtgcagctaagcgctagctatattatgaatcttatcatggaggtgagcatagttatgagaggggtgtgtgtatctaagcgctagctacacatggaagttatctcacataagctgaccctgaag

SEQ ID NO: 32257 - DNA, 371 bp, Glycine max
tcattaaaaggcttcctcctgaagctttcttgtggcttctttgagaagctttctcaagaggcttctttgagaagctagatccttatctatccacacccctcttttaacttaattaacctccgtataaataattacggatgaaaataacgcaacaaataatcaaacatcaaacataattactaataatatatagatatatatatctgggtgttacaactctcccacccttttagaaatttcgtcctcggaatttaccttactcaatcaaggatgggtgagcttctcgcatctgactttctaattgccacgtggcatcttctcctgatgcacctccccagatcaccttgaccagcggaatctctttccctctt

SEQ ID NO: 32258 - DNA, 324 bp, Glycine max
agcttccacatacttgatacctattctacattttcagcaatcagagaatttaaataataacttgcgaggtcaagatagaccaaattggagagattcccaatctgagatggaatcttccccatgaatccattaccagagaggtcgaggtgagtcaaggaagtcattgtcccaaggaaagaaggaattgacataccttctccaagaaatctattgccgctcaagtccaagtaattcaaatgctttaaatcagccaaacaaggacttatctctccaccaaactggaatcccctataagcttccctatcaaagtagccatcatagtaa

SEQ ID NO: 32259 - DNA, 321 bp, Glycine max
tgacggagtttgtagcatcagggaacaattttattttaaaagtgggtcccaattggcgtcctaattttcggctttcctatttggatgtgacatcatggcagttaagtcccaactttccatcgtggattcagtcacaaaacaaacttcaatatgttggactgtctaacacggggattttagattctattcccacctggttctgggaaacaccttctcagattttgtatttaaacctctcttataatcatatccatggtgagattgagactacattaaagaatccaatatctatccaaactattgatctaagctcaaatcact

SEQ ID NO: 32260 - DNA, 326 bp, Glycine max
agcttgttgtagtgatgattgttaattgttttacctggtgaattacattactataatggcaacaacaagattttctatgatactgtgttctgtgtaaatatagttgcaagatagtattcctcgtaacaatatattaacaccaaagattaaggaaagaatcaagtcaaagattttatgttattaacaactagaaaattgagaattagcatgtttgattcaacattatgaatgtgattcgtggtatacgagtatatatacatttctattgcgccaaagaaatgacagctttatttcgtaaggtgacgcgaaatcagaaggtcaagttt

SEQ ID NO: 32261 - DNA, 322 bp, Glycine max
  unsure (1)..(322): unsure at all n locations
ttttgtctattttccgattccttggnttcatttttgttgcttgtattcagggcttcgaatgcaactccagttgctgaaactggaatctgaagattttgtggaaaaacccgtgctaattcaaagtgatgaagatggtatggaggcatctactggaattcaaaagacagtggattgcttcagactagagatagctgggagtcttcctacaccattgatgtcttgtatgaatctggtattgatagagctcaacctgatgcatttttggaagttggggattctagagaataccctgttagtctttcagtgtttggtgaacttgaaa

SEQ ID NO: 32262 - DNA, 333 bp, Glycine max
agcttagatcaggcatccgagtttacgttatggccgtccgaatatgcatgggcattccatttcaacttttaatcgtcatgatatattacgggcctcaatcggacatgcgagtcaaaactttagcccgtcagaattcacccgagtcttccatgttaaattttgagcgtcgcgataggttacttggcttattcgaagatccggaggaaaagttatggccgtttgtatttgcgatgggcttcaattttatcctaagagcatctcgatatattatgagcttcaattgggaatccgagccaaacgttatggctgtccgaatttgcgtggtcagtccat

SEQ ID NO: 32263 - DNA, 342 bp, Glycine max
caaacttaaaaatcaagtgatcatgtatttcgttatatagggggagaaaactgatgcacattttatctatatacagttgtttgttgtttgcttgaatcttgatttcaggtattgtattgtcatcatcaaaaagggggagattgtagatgcaattggctttgatgttttgatgatgatcatgatgatgtgttgcaattgatgcaaatgggcttttcaagattaaaattcaagacaatacttcaagattacaagtcacaacatcaagatgatcactagaatattaggaagggaattcctaattgaattagcaaaggtttggccaagtgatttaaaataaaaagt

SEQ ID NO: 32264 - DNA, 340 bp, Glycine max
agctttgagccaaaatcctgactcaccatataccttgacccagggtgagaatgtcaatccttaccctcggaagcaaaaaagaatagaagggaaatttccaatcaaagaaaagagaaggaaaatttccaatgaaagaggaaaaaagaaaagaaaggaaattcccaatcaaagagtgggagaaagaaaaagaaaagaaagaaaattcccaaccaaagaatgggagaaagtaaaaagggaaggaagctcctggtcaaagaaaccagagaggtctttggaccagataatatctgaacagtacagaattgtcaccaaatgaacaaaaaggaaggaaaggaaaccc

SEQ ID NO: 32265 - DNA, 347 bp, Glycine max
tgctctaaatttacattgatgtttgtatttattggatgaggttgtatgccatttttgttttaagagtagtgtcccactggtaaaactaactttccaaatgtttgccttcgcagaaaatggccccgaggaagcttgcctcaaagaggtcctggaaggacaaggcagccgaaggaactagttccgctccggagtatgacagtcaccgctttaggagcgttgtacaccagcagcgcttcgaggccatcaagggatggtcgtttctccgggagcgacgcgtccagctcagggacgacgagtatactgatttccaggaggaaatagggcgccgacagtggacatcactggtt

SEQ ID NO: 32266 - DNA, 339 bp, Glycine max
agcttaaccaatttctgatattctctatcacaaaaagacaaattctgttattgagaaattagtataaataagactatgtaaaaagtagcatcatcaatgaaaatacaattactttcctttccttctctctttctggaggcactggtcctcgaaaccagtttttcttttcttcccctatcattttccttgttcaaaatgaaaattactcttcttgaacatcaaaactgcaatgaaaaccctcatttggatattacatacaggtaaatttcataaaatcagacttgtgattcctaaaatcaaaatctctaaatttcaatctacagaagaaaaaaaaatagc

SEQ ID NO: 32267 - DNA, 361 bp, Glycine max
agctcgtcttttctagaaaacgaggtgccacacgatcacttccacttgagatccccacattgcttctcatgtgtcctcagatcagagagcaccgagaactgcttctggttgcacctcttgcacacgtacattttggggcagtggcttctcttgtaatggttcttggcacaaatcattgacttcagtggctggaacttggcatgcctctggttccacctacacccctcttgaggacacgaatacctctttggcttcacactcatcaaacactctagatctctttggttcttaattgggttactcaaagcagcattggtcttgtactcatccccgtgagccctcatgtgcatcctcaaattcg

SEQ ID NO: 32268 - DNA, 339 bp, Glycine max
agcttctacttatgtggcaggttgggcttccttcactttcttgtctccaacgcgagctctgaccactgtttttccttcccgcgatgcttcttttcatgttcgcctgagtgggcttatagcctaaaccatacttcccacgatttccttgggtttttatcaggctagttatgccgccattgtctttgcctaaacccatcccgggttcataaccgttccccaacataactcgggccatcattaccgccgcatcggacaggcaaggttgcccaaagagggagtccacggaggaaatgctgaccacctcaaaagactgaaaagcggtttctaacgattcttctg

SEQ ID NO: 32269 - DNA, 355 bp, Glycine max
tataaatatatttacatgtatcaaatatatatataattaataataacaataataataaatgtatcattagataaatatttatttaaatatatatatatatatatatatatatatatatatatatatatatatatatatatatataagcacataaaataattaaatgtactaaaaacattaacatgaatatactaaaatataaatgtaagtttaataatatatatatatatagaagtaattttacatgtatatatataatttgaatgattaaatgcattaaatataaaataataagaacacgctaaatatatccttagataaaaataaaatatatatgtataatatatgtacataa

SEQ ID NO: 32270 - DNA, 346 bp, Glycine max
agcttggtgccaatatgttgatttgaagtcactcgtgaagtaggtttcataagagattgtgttggcagtaccttaaacctgattgttaattttacattgaagaatatgtggggatttaaaaataataacacttgtttaaagcttattgagaacgtgaattcaatatcaaaatattagcacatttaatcttgctaaaacacctatagactagagattagagattaattctcatttcacaatcattgttgccaactcttggactgcttgcggattgacagaaccaatgtaatgtaaaggcagaaagaacttgcactactaaaaaattacttttttacaacgcgtattt

SEQ ID NO: 32271 - DNA, 375 bp, Glycine max
tgaaccaaaaaccggtgagaatgtgacctttttctgtgagtgaacgactagctatgagtaataatctttgcatgaatctctgaattttagaatgaaatgtataaataaggacatgatgaaggccatgattgtacatacacaagctctctgaccaaataacttaccatgaatgatacttgtatcttttgctcccgtgtataaagcgtattgatttgtcattaactgaaccctgaactttaaatgattatctcctaataccttgtttagattcaaggagagcatatggttcaagacaaatttactctaaatttgggggagaaaagttgaaaagaatgaaaagaaaaaggttaagcatcagcatacacaacaaataag

SEQ ID NO: 32272 - DNA, 333 bp, Glycine max
agcttccaaattagtgtaccattctaccgcagctccggccaagctatcctgaaagaagtgtatcaacagcttttcatctttagagtgggcgcccatcttacggcaatacattttgagatggtttttgggacaagtcgtccctttatacttgtcgaagtccggcactttgaacttcgggggaataacaacatcgggtactaaacaaagatccgtcatgtctgcaaacggatagtccccaaatccttccacagccctcaatctttcctcaaggagatcgagcttcctcctttcttcagttgccgggggtggcccttccgtggacaaaactattgg

SEQ ID NO: 32273 - DNA, 342 bp, Glycine max
ttcttgttctctttgttctccatctaccttgttttctgtatgttctctatctgaccatcgttttgtctaagatcgagcatcgtgttcatcgcactcgaggatcgtcagaagtttgtgcttcttctcctttgccacctcgcgtaggtatgtttggtctaatcctgtataaatatttgattgcattcatgtatcgcacacttagtgaactaaacatggctagggtatctcatatttaactcgagcatcgtgacaactctgtgcttcttctccttagtgaagtttcccttacccttattgtgttcttgtaacagtttaagtggatttgttaatgccaacctcttg

SEQ ID NO: 32274 - DNA, 329 bp, Glycine max
agcttgtagggttaaagtctcacgattgtcatgtgctcatgcaacaattgttagtcgtggctatacgagacatcttgccaaacaaagtcaggttcacgataactcgcctgtgctttttcttccatgctatatgtagcaaagtgattgatccagtaatgtttgatgagttggaaaatgaggccgcaattatactgtgccagttggagatgtattttccccctgctttctttgacatcatgattcacttgattgtgcatctggtcagagaaatcaaatgctgtggtcctgtttatctacggtggatgtacccggttgagcgatacatgaag

SEQ ID NO: 32275 - DNA, 343 bp, Glycine max
tgaagtgagaaagtgtggaagagtcagtctttctacttttattcgttgaccacaaagtggtacctggagatatgtcgcgggggtcagaagaccttgggacgtcaggtggggtgctatttcccaaaaccaagcttgaccaatcccgacccaacccgggcatagtcagtcagtgagaacctgtgacgtacctaaacaggcgagctcctgacagtcaaccgataaaagaacaaagaccacaaagcaaggaggcttgtgtggtggctggccagttatggatcttgagtgatatttggaatatggcctctggtaatcgattaccaagggtgtgtaatcgattacaagg

SEQ ID NO: 32276 - DNA, 334 bp, Glycine max
agctttttatggaatttatgatatgaatccagataaggtaaagtaactgttttttatggacgattttccattaggccatggaaaatctagcatgatattccattcttgattttaaattacttaccaaatgaaacttgtgtactgatgtaggtccttcaatcaatgattcaaatgggtgttcttgtcccaactggagatatgactgctgttaaacgaacagcacagttcttcctcaacaggtagtttatcaaatccatttagtgggaatacataaaacaatcaaaacacctacatagatttagcagtagtatttctatatatcaatatcattaga

SEQ ID NO: 32277 - DNA, 355 bp, Glycine max
taggcactgatgtttgtgacgcatcatattgttctccctttgtacaaactgtgatcccgggaaaaacataccgactcagaattgctagtttgactgctttatcagcacttagcttccaaatagaggtaatcaaataaatgtcttgtttaaacaaactttttcttaaacattatggcaaaagaatccaagaaaataaggaagtaaaataaattaaaagtttaggtaaaagtgttacaattttaattttgattgaagctctcttgtgtaactttggtgtaaaagttgattttaagtggattttttagtccctttaagtttaataagcgaattttttaatatttgaagtttaattctg

SEQ ID NO: 32278 - DNA, 334 bp, Glycine max
agcttcttccccttttctttttgtaaaatgagttcctctctattcatatgagaaagtttattcttttctcacttcctaaattttgaatttcggtgttgtaaaaaaaaatcattgatttgcttagctcggtgtagaaaagggagggacatagaagaaagtaagaaactattgatgctggaatcacttgctgcaatcttttcataagaatttatacaacaaccaatttgcatttgtagatcccttttatcccaataagcaggcactttccttccggtttctaggattcttggatcctttgatttctagaaggttaaaggttgatggtgcgtggcat

SEQ ID NO: 32279 - DNA, 353 bp, Glycine max
tgtatctctccttgattctatttcatatgttttttacacattgttattgcttgtggatgggtttactgcatgcccgaatatgtgtttctagtttgaagctaagagtaggcttctcttaggcttagattcagtaagaaccctagggttgggtgcctaagtttcattttctaagtagaatttgaaagtgcttgtgattgcttgtaaaactcaccatgcataatggaaatctaatttgggttgaattagataactggactagattcactaaggaccctagggttgggtgcctaagtttcgttttctaagtagaatttgatattgcttgtgattgttgtaaaactcacattgcataa

SEQ ID NO: 32280 - DNA, 351 bp, Glycine max
tccatcttgtgtgtttcagagcacaagagcttcaagtaggtgctccttaaacctccattaattttttgctttaccttctcttcctttgttgtttcttcattttttctccatgtatctcctcacatgtcttgtgctaaatgtttttaacatgattctttagagtttccaccgattaaacttgctatagaagctagatttgattttatatggttcaaatttcttgttcttgttcttgaaccatgaattgtgttgagtttaggttcctttgagttttttcttgttattttttggggctgaaaactaaatcataaaattcttacaaaaatattaaagtagaagaaaacctcaaaa

SEQ ID NO: 32281 - DNA, 324 bp, Glycine max
agcttgtttgttataaagacccaacatttttacctactgctgtcacttttacttaccttgcattttatagttttagcataaaggtttagtttaaattctgtttgaaattatcaatcatacatattctttcaataatgctttatttctgaacttaacttaggctaacattagttccctgtgttcgatactcagattcattcgttttaatttttaaacacttgacaatccggtgcgctttccggtaaaccggatttcccttgaatatatttgtacgaagaaaaagtggataagcaagaagaatgatgactcatgttggtttctaag

SEQ ID NO: 32282 - DNA, 323 bp, Glycine max
tcatgatgatgaaccaagaaattttgatgatgccaaaagcccaagtgattgattcaagatttcaagatcaagcatcaagaatccaatccaagattcaagattcaagagaaaaaatcaagaagtaacaagtcaagatttcatataggataagtattaaaagattttttcaaaaagcaaatagcacagttttgttttacaaaagaattttctcaaattttctaagttaccagagtgattactctctggtaatcgattaccagttagtagtaatcgattaccagtgaccaaattggttttcaacatgttttcaaatgatttgtaac

SEQ ID NO: 32283 - DNA, 322 bp, Glycine max
agcttttggggccaataaccacagactaccttaaccttaccatgacattccttcacatgggcctacccatcacacttcatgcagatgcaccccccaccccttctcatgcctttgctcatcaattaaaatgcttggcccagactcagagcatatctgctctgttccatatcaccaccaccaccacgcctgtcctatcttcaccacccccctcgacctcaccaataccttcacagattgcatcagtgcttgacaaatatcctcacatatttgcagaacccacgcaactttcccccaaccgcaacatccaccatcatatacacct

SEQ ID NO: 32284 - DNA, 341 bp, Glycine max
tgtcacagttctgccatcactggtggtgacttgaaaagagagggattgtccattgaggtatgagttgctctgccagttttgcccccagtttcttgacatgggctgccacccagttttggaccctttaatggacactgaattcacatcaccagctccagccacattggtgatcaaaactaggttgaagtaagagtggccattgattgtgaaccttattcctccctttttcacacaaggaaccctgccatcatcaccaaaagtttagtttagtactagttaaacatatgagcaattgaaaattaaatatccgagataaattaagtaatctcagtcgttaatga

SEQ ID NO: 32285 - DNA, 338 bp, Glycine max
agcttcaacaaagcaaatgatcgcatactcagagactgagaaccccacgactcccaatacacgcattactctcctctcgtacataagacgtacaacttatatatttcatacattacatatataaaacatagaacataacccatatgtttcatacatcatatatataaaacatataacccatacatcgcatatatataaaacatacaagtagcaatgatatggttatcacctctaacaaataaagccaaatcatgacatctaggatgtatttaaaattgcaacccaatacaacttacaggtcgcccaaaattaaactacgacatgtaggctgcaaaagg

SEQ ID NO: 32286 - DNA, 344 bp, Glycine max
tggaaggctctttatcacaagatatacaatattactattactcaattctaattcttgtgcttctttttattgatcaattgtttgtatcttatgctaaataaacccacaaaatcctttttttccctaattgcatgttttgtatttgatgtttgagaaaatgtgtgaattgaatcatgttaggagttttcttttaatgttgtaaaatctcactgacattttgatgtcatggattgtttgcctgcttttagaaaaaaatggtacataacggttcatgtcaaccttttcaaaatttgagcaacattttcagcaaagaaggtgatatgtgtcatgaccatgtaattggt

SEQ ID NO: 32287 - DNA, 330 bp, Glycine max
agcttgtacgcacatcgttcgtgtgtatgatatccactccacaaggtttgaagtagaggagagcttcaaccctataacgcaatgtggcggacaaaagtgggcagtaaacttgaatggtcgtcattgtcaatgcggaaggtattctgcacttcactatccatgttcacacattattgcagcttgtggttacatgagcatgaactactaccaatatatagatgttgtttatacaaacgagcacatcttaaaagcttactccgcacaatggtggcctcttggaaatgaagcggctattcctcattctaatgacgcatggacacttatccctga

SEQ ID NO: 32288 - DNA, 341 bp, Glycine max
ttctccactgagttgtctaacgcctgaaatatcctttctgatggtcatggtcctggaagcagggaaattttttttctaaaaatactctcttgaggtcatccctcttcaagtccaagcccaattctggatttaagcccaagcccaattctggattcaggcccaatgcttcattaattcctgaaattagattttaaacatcaaattagctgaatgggcccaaataataaaattgcctaatttatttgacaattaagactaatcaatacttaaaagggtgcaaaaagggttaagaaataggagaaaataatggcacatcactctccataacagggaagcttctt

SEQ ID NO: 32289 - DNA, 342 bp, Glycine max
agcttatcagctacttggttactctccctaagagaatggagccaaacaaagcttccttgttgttcctcaaaagccttgaaatttcaaaacatgctttaagacaggtgaaatgaagggcagccatgattcagaagtgaaatagccacaaaggaatcagattccaacatgaattgcttgaatcttctactccgtgcaatttcaattccaagcatgatagcctcgagttctgcagttacaactaaacaatagcatacatcaataacaaaagagaagttcgctttgccattataatccttgagaactccaccaacaatggccttcttcgtgtctctattgattgaa

SEQ ID NO: 32290 - DNA, 362 bp, Glycine max
gctcgcctgtccgatgcagcagtaatgatggcccgagttatgttggggaacggttactatcccagaatgggtttaggcaaagagaacggcggcataactagcctgataaatgccaaaggaaatcgtgggaagtatggtttaggctataagcccactcaggcggatatgaagagaagcatcgcgggaaggaagagcggtggtcaaagctcgcgttggagacaagaaagtgaaggaagcccgccctgccacataagtagaagctttataagagcgggtctgggagacaaaggtcaagtggtcgcaatatgcgaagatgatgttccgagtacattggatttggtacgaccatgccctcctgattt

SEQ ID NO: 32291 - DNA, 339 bp, Glycine max
agctttgagccaattaagacgacaatatttttttactcggatgactgattgagtcccgtcatatatcgagacgctcgaaattgaatgttgatgctctgagcaaattcaaacgacgataactttttactcggatggctgattcaatcccgtcacatatcgagaagctctaaattgaatgttgaagctctctgccacttcaaacgacaacaactttttactcggatgtctgattgagccccgcgacatatcgagacgctcgaaattgaatgttgaagctctgagccaattcaagcgacaataactttttactcggatgcctgattgagtcccgtcatatat

SEQ ID NO: 32292 - DNA, 336 bp, Glycine max
tcaacattcaatttcgagcatctagatatgtgacagtgttcaatcagacatccgagtaaaaagttattgtcgttcgaatttgctcagagcatcaacattcaatttcgagcgtctcgatatatgacgggactcaatcagacatccgagtaaaaagatattgtcgtctgaattggctcagagcttcaacattcaatttcgagcgtctcgatatgttacgggactgaatcagacatccgagtaaaaagttattgacgtttgaatttgctcagagcatcaacattcaatttcgagcgtctcgatatgtgacgggactcaatcagacatccgagtaaaaag

SEQ ID NO: 32293 - DNA, 333 bp, Glycine max
agcttgttagtggttcatgatgaaccaactatatcaactgttggattcatctaatttatatggttccaatttacaccactcacactagatttattgcttccctcctagcaaccttctgatcaccatttgccgttgtcggaggcaatttctggcaacggcattttttttaatcctttcctcaccacctttgttcctttctctccccatcaatcccttgtcttcgactgcaattgtctttcacaaaatactggtacccctaaaatgtgaaattaaggccattccaagattgaaaagtgaaacgctacataaacatcaaaagtgatgcttatgacc

SEQ ID NO: 32294 - DNA, 369 bp, Glycine max
cgacgctctctaatagtcagactagagtttgcgaatagactgttagccttagtttcactttagttattagtcaattcaattaacaatgagaaatcccaaagagaaagcgtccgattgatttttcgctttattttactaaaaggtatttttttactattatattattattttacctttttttttatttccaacgtggttacggcacgaccgaacggtcggaattcattttaacggaaattaacggatattacaaatcaaatgttcggtggaaatttattttattttttgattaggcaagaaaatgacttagataaatgattgaagcacgtcaaaaaggggtacgaaaaagtaatgaaacgagaataaaag

SEQ ID NO: 32295 - DNA, 328 bp, Glycine max
agcttttatccatggcttcctatggtggtgagcttcttcttgactcatattctccttgaagtggtgcctctaatcatctttcttccttcttcattccactgccattaaacttttagaagcaaatgacttcatggatgaagaagatgcaaggcctacaagcttcacatggagctacatcatgtggtatcaagagcatcttcgtctaggtgatgttcttttgcttcctctatttttttgtttggtcaattcactttaattcctttttcttcattttattctccatgtatatcctccattgtcttgtggtttggtgctgtttagagtagat

SEQ ID NO: 32296 - DNA, 339 bp, Glycine max
tggaacatatgaactgaaacatcagaggatgaaaacaaattcaaggtagagagttccagtgtacaaaatacaacaccaaatactgaaaattcttctcctgagccatgatgctgaccagtccaatacttcatctgagccatgatgaacttcttctgatacttcctcagacagtgagaccaaaacaaagatcctcaaactcaggtaacaatacaatgtcttaactaaaaaaacaattcttattgaaccccaaggacagtaacgaagtccatgattgagacaaagaccgaaccattggatctgggacaaggatgggccagtgcatctaagacaactctaaca

SEQ ID NO: 32297 - DNA, 328 bp, Glycine max
agcttttatgaaattgaaattgtagccatctggcccaaggcttttattaccatcacactcacattgcatttttaatctcttctttagtgaatgcctccactagcattgaattattagcctcacatatagattcaattgaattccttccaagttaacccattgatctctttcttcccagagcctattgcaaaaaaattgcttcccttctccttcactttctctggctccttcacccaacatccatttatgggcaatcctttcgcagtttgttcttcttctccaattcaccacaacatggaaaaaatggtatttgcatcaccatcaggaa

SEQ ID NO: 32298 - DNA, 334 bp, Glycine max
tggtattctaaaatgggtctaggccaagtgcttaaactggagggaaatttatgaacatactacaagtgatgggacaagggtttttctcatgattaaacagcttgttagccgttttgtcagtatcctaaccttcgatgagattgcgaggacccatgaaacactcttgatagcattcatcatagacgtgaaggtattagtggtggaataaggctctggttcaggaaaatggatagaggcgttggtagcatgttgttcaaaggtagacatgatgatcaaaggttaaggttttcaagtactgatttttgagggaaaggattctagctttcttatagtg

SEQ ID NO: 32299 - DNA, 335 bp, Glycine max
agctttgattccgtttcattctgtatttttctgattttattggtacctaagaatttattttatttctttctgcatttttctgttgggaatatattgatctaacctgatattattttctgttgaaagctctttgagagctctgctctgatgcatatatctgctgtaaagtctctcctctctgcattatgccaactttcacatcaatgcatgacttcaagcagtttgggaccaacaactagtcaaaaaattggaagcataagcttttcagtggaaagaatgatatccatccttgtgaataatgttcacagtatgtagctccaataactttaaccatg

SEQ ID NO: 32300 - DNA, 360 bp, Glycine max
ttttgttcaaaactttttcttccaagaaatgttctttgttcaaaaacttgtgttattcatctttttcattcctttctccctttgccaaaaagaattcgtcaaagactaaccgcctgaattctttttgtgtctctcttctcccttttccaaaagaacgaaggactaaccgtctgaattcttttgtgtctcccttctcccttgtcaaagaattcaaaacgacacagtctgaaaattcttttgattattctctttccctaaaacaaaagatttcaaaggactaaccgcctgaaaattattttgtttccccactcacaaagtttcaaaggactaaccgcctaaaaactttgtcttaacacatcg

SEQ ID NO: 32301 - DNA, 326 bp, Glycine max
agctttgaatgaggctgaagaagctgctgctcatgttcaacaagatccgatggagattaatttatctcagcctcatttgtcacaagatagtgacatggagttgatggtaaatatttgtcacaacaaagtagttttatctcaacctaatttgttgcagcactccatttttatatattacaattattcatgtttgacatttacatgtaggtccctgcaactattgttccaccaatagcaaggaataagttaaccataacaagagccaaacaaaggaaggttgctgataaagatgatgcagaaaactgaagaaagcatttttgttgcat

SEQ ID NO: 32302 - DNA, 347 bp, Glycine max
  unsure (1)..(347): unsure at all n locations
tgaggtaggtcttgaaaccattagagatgtttctatcgctactagaacacacaggagtccacttataagtaagggatgagattatcgtaattggggttagaatgaacatctgtaggaatccttagggtatcaaattgaggtttattttgggatgtttattgtattgaaattttgcctgtatgatcatgtaaaattgtgtgaggggtttactccccatggattgagaaacatttttgttcaatttgtttgtgtttatgataatattaacgtgataaatattgggatcatgaaataatgattgaaaatatgtataagtgataaatttaatatgtgatgaatngtgggac

SEQ ID NO: 32303 - DNA, 316 bp, Glycine max
agctttaaaaggtgttttatctctacaaaaatatatgtttttgcactagtaatcgattaccatatattgtaatcaattaccagagacagattacataattttttttttaaaaaagttttcttttgaaatttgaattttaaatgttctaatcgattaccacttgtatgtaattgattaccagtgatgaaacttcagaagttaactttgaaaagtcatgacccttcaaaacataattgtgtaatcgattaccaagaatttgtaatcgattactagtgagagaatttttgaaaaatattctgaaaagtcacatctcttc

SEQ ID NO: 32304 - DNA, 322 bp, Glycine max
tgtaggattatggggtacccatcacatgtggtactaggtggcggtcgggcgatggtgcaaatcaattctccacatccacaaatcacacataagcccaccatccccagttgcccaccttcattgagctcacgtactcccacgtagcccttatcctcgttcctctcaacgccgggtccccatcaatcctcccaagcttccacaacatccaattaattcaacatccaagcatcatgaactaacacagccaagaaaacagggcagaggcagaaaactctgcccaaaacacaaaccaatatcacaactttccttacttaaagacccc

SEQ ID NO: 32305 - DNA, 408 bp, Glycine max
  unsure (1)..(408): unsure at all n locations
atggaaccacngaggaggtgacctgagccttgaggccctcgaancancctaatnncctctgnccgcctgcaagctatgacacacatttactcttcttccatttcgacaaaagggaaccgaagaatgtatgtcaaacccttcgcccttctcggttgggaaaataccgaaatgcacatgagacttttacaagtttaaagctgcttgacagctaggttcggacgcatatatgtgctgaaaagtcactcctatctgcactatcccaacttatacattaatgaatgacttcaagcaatttgtgacctacaactaattaaaaaattgggagcttaagtcgtttcaccggaaagaatgatatctaggcctgtgtaaaatgttcaaaggatggagatcccacggcgtgtgccggct

SEQ ID NO: 32306 - DNA, 378 bp, Glycine max
agcttctcataatggaaagggcaaacaccaaaacttggtaaaaagagaatacaaggaaaatcatccacgtttttgcaccccgccttctcatagtgcacattgagtttaggtttccatccctaaaaacaactacttattggagcaccggattcaccttttgaatcatcaagcagacttggaatcagaaccttggttattacaggctcctctatccctgaaatatcccttgctccctcttcaccaggcttcttacacacctagctagaacaccacccaaaaaccatttctgtaacagagttcaaacaacgagaaaatatatagggttagagacgaaatggatcataagacttgaaacttgtttgacacatcaatatgttt

SEQ ID NO: 32307 - DNA, 373 bp, Glycine max
agcttttcaactcattctatgtacccgtggtggtccacattttgtttcatgtatttttattctcttgtccatttgctttttatacccctttttgacatgcttaagccatttatttaagtcatttctcgcttaatctaaaaataaaataaatttccactgatcgtttaaattatatcatccgttaattttggttaaaatgaattccgaccgttcggtcgttccgtaaccacgttggaaataaaaaaagaggtgaaataataatataataatcaaaaaataccttttagtaaaataaaagcgaaagatcaatcggacgttttctctttgggatttctcattcttaattgaattgactaataactaaagtgaaact

SEQ ID NO: 32308 - DNA, 275 bp, Glycine max
acctcaagtcatacctacatattatattcttgtaaggatgggcatcacgatattcatcatcgccccactacttgactgcgtggtgagactatttgtattccaaactaagtagttaagccaaccctacatgagaaaccacatgaaagatcaaaagacgatgtctcataaacaaccaacatctgcaagttatacttagactaatacaactatacactcctggaaatggcttcatcagctattactgcaaaaatgattaatcctgaccatatgaaaga

SEQ ID NO: 32309 - DNA, 344 bp, Glycine max
ggaaccgtgaaattattagtatttttttattttatgagacgcaactaggtgtagaggtgggaaacatgcatatatatattctttacccccatccatgctcgtcctttaaatctccaatgactttgctttgctaacacagtttccctgcgaggcatgtaagccaaaaacattgaatagcggtacatttatagtttgcggtttagtttagtggtcattaagttggatcttttggacgcatcaagcagtatggttatttgttctgaattcagtattttatgaaaggaattgcggctaatttagagattaattcgttagcgtgcacttttatatcaagttgtatctag

SEQ ID NO: 32310 - DNA, 219 bp, Glycine max
gaaggtttttgtgcttaagaaatggggctggtctgaggagatactaccttccacgtgtctatcgaacccctgttgtatgctggtcttctcagaagaaaattgacgccatgattggagttgattattacacaaaggggttcggaaaatatgtgtattgctaatcatcccctgcttattgcgattagcttggataaaagggtagttcccagggcttctgtg

SEQ ID NO: 32311 - DNA, 376 bp, Glycine max
agcttgttgattaggatgttttgactgacttctactcatagatccattccagtgctcatggtgatcctcctcatcattaccttctgaagagaaagaagtgatcatcaagtcttaaaagtggattgaaagagtatcaaagatatctttgaggatataacagtgacaaggcgtagtctagaagaacaaatcatatagaaaaatcttcagctaatcatgtaaagacattgtgagtgcattaatagaacaataaatggatgaccatttcacttgcagtgtatcatcaaatactatagtgtatctatattagtctaactcacaccaaggtttaaaatactttgtagtatctacaaactattttcatgccggaagaaaactt

SEQ ID NO: 32312 - DNA, 167 bp, Glycine max
tgtggctattagatcatttaatgcttgcattttactcatatcctgctttatgtaggaaaaccactttgattggctttcgtgttgaacactataacaaaaaatcagctccttttagttaaagtatgatctatcacactgaaacacatcttttgatgctgtttggaaac

SEQ ID NO: 32313 - DNA, 371 bp, Glycine max
agctttagtctctgcagatcttcacacaacaaaatctctcaaaactctctggaacttggacctttctctctctagaatctctagacatgcaaagctctgaatcccagcccaaactcccttcacaaaatctgattttaggcttaaataggtggctttgtttgtgctcgtgcgcttagcgagattatgatccacttagcgcacattagtgaattttcgcttagcgctcttttctcgctcagcagatgggctgaagcggtgtgcttgatgagatgaagcggtgcgctcagcgaacctgtacaactcatcttcttctagatccttcctcacacttagccactaagtgttgtgcttagcgaatgctcgctaagcca

SEQ ID NO: 32314 - DNA, 374 bp, Glycine max
agctctgcaaggcttgattctatatattagagagaaagaagaccaatatgaattaagggctacacctatttaggtcactctcctacaaattgatgaagatgctttgaggccaacttgaagaattactttgggaagcccaatttataagacaagaagcatccatgggctgagttgatcaattttggtggactattaatattaggatgactagataataattaagcccaacatgctcataaattttaaccaacttttagaatatgatttattttcttttttattgtattttgagcttatttttaaacttgtaatgggctaccacgaccttttattattattttagaaagtcttttaattgctatattaattattgg

SEQ ID NO: 32315 - DNA, 373 bp, Glycine max
agctttgatggtgtcgagaagaaatcacatgtttgtcatcatcaaaaagggggagaatgtgaatgtatgtatacatgatttagatgatgtcaaagaagaatctaacaaggctgcttcaaatgataagcatttgcttcaaaaataattcaagattgcttcaacaaacaaagccttggttcaagattcactaaagaccaagccttgccttaaaacaaagtgctttcaagacatgcaaggctctggtaatcaattaccaggaagtgtaatcgattaccagaagacagggttgagaaatagctgttgaaaaaggttatgaatttgaattttcaacatgtaatcgattaccacatgtctgtaatcgattaccagcaac

SEQ ID NO: 32316 - DNA, 308 bp, Glycine max
ttaagtattctatatggatgatcaagacagttttcatagtcttaagtagggtgtttttaataggaagggaattcctaattgaagtaacaaaaggtttggccaagaaatttaaattaaaaagtcttttaagagatttactctctggtaatcgattaccagaggatgtaatcgattaccagtggcccaaaatgatttacaacagctattaaaatttgaattcaaaatttgcactgtgtaattgattacacatatatggtaatctattaccagcagttattgaacgttttatttcaaaattttaaaagctt

SEQ ID NO: 32317 - DNA, 370 bp, Glycine max
  unsure (1)..(370): unsure at all n locations
aaaactataaattgtgcatagttttcttgtgctcaaaatttttctagaacaaattcttcttattgctacctattattgaatctctttacgttcctaaatgaacacaccttcacattcgctgcccgtgtcctcctctttgagtttctgtcatacaaagacaaatcaactatctatataaaacactggcatcacattccntatgtgatgcgcatgttacatgttgtatattccagaaggatatatgtatatgattattcacgttaaagtcatatcattgaactgtttaattacaatgttaataagaattgtttataagcatgtgttgctcgcataatctacaaaataaaaaactgcagactaccatatcttt

SEQ ID NO: 32318 - DNA, 326 bp, Glycine max
tttatgggataatctcttcattcggggttgatgaaaaccccatggatcaatgcatataccacaaagttagtgtgagcaaaatatgctatcttgcttcatatgtagaagaatatcttacttgcagccaatgatcggggtttgctacatgaagtgaaacaatttctctcttataattttgacatgaaggatattggcgatgcatcttatgtcatcggcattaagattcatagagatagaactccaggtattttgggtctatcacaggaaacccttataaccaaacttcagagagatttcgatgaaagattgtcaccatgtgttgctcc

SEQ ID NO: 32319 - DNA, 259 bp, Glycine max
taggccatctttaataggaagggaactcctaattgaacgtacaaaacgtctggccaacaaataaaaccttaaaagtcccctcaagagatgtactctctggtaatcgacttccacaggatgtaatcgattaccaagggccacaaatgatttacaacagctattaaaatctgaattaaaaatttgcactgcgtaatccattacacatatactggcacccattaccagcatttatagaccgttttatttcctactttaaacc

SEQ ID NO: 32320 - DNA, 371 bp, Glycine max
agcttctcgtcagtggtaccttatgtttcatgggataatttcttcatttggttttgatgaaaaccccatggatcaatgcatataccacaaggttagtgggagtaaaatatgctttcttgttttatatgtagatgatattttacttgcagccaatgatcggggtttgctacatgaggtgaaacaatttctctctaagaattttgacatgaaggatatgggtgatgcatcttatgtcatcggcattaagattcatagagatagatctcgaggtattttgggtctatcacaggaaacctatattaacaaaattctagagagatttcggatgaaagattgttcaccaagtgttgctcccattgtgaaaggtgata

SEQ ID NO: 32321 - DNA, 346 bp, Glycine max
tatgctgcaaacatctacaatagacctcctttacctcagcagcaaaatcagccacaacagaacaattatgacctctctagcaacaggtacaatctcggttggaggaatcatcccaaccttagatggtcgaatccttcacaatagcagtaacaacaacaacaacaacagcagcaacagcaacagccccagaaacagcaaacagttgaggctcctccgcaaccttcccttgaagaacttgtgaggcaaatgactatgcaaaacatgtagtttcagcaagagaccagagccttcattcagagcttaactaatcagatgggacaattgtctacacagttaaatcaacaac

SEQ ID NO: 32322 - DNA, 371 bp, Glycine max
agcttgtctcagcgtctatgcgagtattataccaacatgttagctatcatcgccaagtaccaagaagagttgggtctagccacggctcacgagcatagaatcgcggatgagtatgcccaagtatatgcggaaaaagaggctagaggaagggtgatcgactctttacaccaagaggcaaccatgtggatggatcggtttgctcttaccttgaacgggagtcaagaacttccccgattgttagcccaggcctaggcgatggcagacacctactccgcccccagagagattcatgggcttctcggctattgtcagcatatgatcgacttaatggcccacataattagaaatcgttacgaaacttgtatggactc

SEQ ID NO: 32323 - DNA, 348 bp, Glycine max
tggagaatacccgctaactagcaagaacagtatccgaatttgatgcaagagctcaatactgtgaccattcctttgaatctataacatcctaaaattataatataattattattcatgttaattttagtataaatttttttattagaataataatttatttaaattaaaagattaaaaaattattattattattattatttttggaccaaatacttgttatatttaaatttgtgatccttcaaaaagatttaaatcttatattgttttatcttgaaagaaaataaaatattagttattgttaatagctagttaaatctaaacaataggttaaaaaatataaaaaaaaga

SEQ ID NO: 32324 - DNA, 376 bp, Glycine max
  unsure (1)..(376): unsure at all n locations
agcttntatgtgaaaggatgtgactctctacatttgaatttgaatttcaacgttcaaaggcactagtaatcgattaccaaaacattgtaatcgattacagctttttgaaattaattggaacattgtaaattcaatttgaaaactttttcaaaacaattttgctactggtaatcgattacaacaatctggtaatcgattatcagagagtaaaaactctttggtagacatgttttgagaaaaatcatgtgctactcaatttttgagaaaaaattttcatacttatcttgattaagccttctcttgattcttgaatcttgagtcttgaatcttgatcttgattcttgagatcttgaaccttgaatcttgattcttgact

SEQ ID NO: 32325 - DNA, 346 bp, Glycine max
tgccacccagctcgcccaggcgagcagggtttcttcctccagaagcaacagccttctggaggaatcttctggagggcccaagtgggcctggttgctatttgcacccccatttttactaagtacaccccctgcctttttttggtgattcttttttcgtaaagttacggaaacttacgaatttcgtagcgatacttgttttctttccgtaatgttacggaaccttgtggattacataatcatcccctttttgacttacggaatgttacggaacctcactaattgtgcaacgatgcttccatttgatttccggtgtgtcacggaaccttacggattgtgcatcaatatt

SEQ ID NO: 32326 - DNA, 372 bp, Glycine max
agcttgtaggattatggggtacccttcacatgtggtactaggtggcggtcgggcgatggtgcaccaaaagttttccacatccacaaatcgcgcataaacccaccatcccctgttgcccacctccaactgagctcacgtactcccatgtagcccatatccgcgtttctctcaacaccgggtccccatcaatcctcccaagcttccccaacatccaagtaattcaacattcaaaccacacaaactatcacagccaagaaaaacagggcaaaggcagaaaactctacccaaaacaccaaccaaaatcacagcttttctcacttaaagaccccagtaacaattcttttgttccaattcgataaccgttggatcgac

SEQ ID NO: 32327 - DNA, 302 bp, Glycine max
cgtgggtttattttcggaagcaaggccaaaccaaatcgggctaatagccctcctttggatctaaggctactcggtttcatttatagaagtcggcctttcatctgttaacacctgatcaagaccttactgcaccaaaaggtcttgaatagtactctgccaaatcataaaatttatttttctgtcaaacaatgatatctcaaacttttgtgtgctcccgaccatagctctgataccactgttggataatcaacactcccacaaataaaattacccacacccacgaaagatcatgagaacacaca

SEQ ID NO: 32328 - DNA, 344 bp, Glycine max
agcttttaatttcaatgcaaggaatcttgtcttctgcctatgaatctaaattttggttttgaatgtaaaaaggcatgaatattatgacatgtttgagaggtttttattagaatttaaatttggctgccccatgaggaataccttgcaccttggtagcatggaaaatacctttcaacggtgtgtatatgtgaatatatgtggcataaaaatacgttgcaaagtgtgtgaatatatggcataaaaataccttgcaaagtgtgaatgaatagcccaaatgcctttcaaaatatgcatatttgtggataggtagcataaagagcctttcaaaaaaaatgtacccctgt

SEQ ID NO: 32329 - DNA, 358 bp, Glycine max
ggaatactcaagcttgaaccctcttaccccaccatgtttatcattttaaaacactgattatgtgtctactatcatggttatcatctccttttccatcattgggggtgccactaggcccttccaaaacatttgggaagcggggttgcttatggaggaagcaacctagctcgtctgggcgagctgggcgggcacctcttcccccttttcctataaagaggtgaagaggggttgttccaaagggtccctaacccccttggctatgcatttttgatgttttgggtgaaaaaaattgtttccgtgaataaaatccaagccgaggtgctttcgtaacgcttctgagacgcttccgtgagcaatt

SEQ ID NO: 32330 - DNA, 334 bp, Glycine max
  unsure (1)..(334): unsure at all n locations
tgccttctcgtcggcgtgacttcagtgtttttatcactcctntcacctgctgtgtatgaaaataatatgacgttcttgtgatcaccctctgcatgccgtaggacctaagacttgattgcgtttaatgtgcaagaatgagttgtttatttgaccggagagccctgcgtttacctctttgagggggcacattttttgtcaagcaatctttacacgttaagagcagcattaacttctctaggagtagatcgtaggatttgatgacacagaaacctcatacttgtatgtacagattccaagcccgtggtgaataagatatctagtgactctccgaaaa

SEQ ID NO: 32331 - DNA, 308 bp, Glycine max
  unsure (1)..(308): unsure at all n locations
atcgganaacatatacctggcactgtnagatatgggagatgagtcctatgggtctgccatggtcccacgcaagcgccaaccagctgctgttgcactatagacggatgctaaaccaaatgagttttagccgggacagaccttgggatcctggcattactttcggaagtcatggtttgaagacccaacaccttgaggacaaggtgtttatgatgggtcagggaatgttaggaattaggaaccaagctcttgacgtgccactaagaacatgcacccactacccaaacgcaagagcaaaccacccaaccact

SEQ ID NO: 32332 - DNA, 239 bp, Glycine max
tgccagcttgattagtgatcatattaatttcaactttcaagtcaacaaacatatacaacagtcagtaaaaagggggagcacatccagttaacaaacatacctcccgcttggtatactcctttaagactggtgagatcaattcatctggtttgtggccagaccatccaaatttctacgagcacaatctgtgcgcacgaagtgactttcaatatcacaagatatagacattcatattatat

SEQ ID NO: 32333 - DNA, 274 bp, Glycine max
gtgaccatggcatgagctctttggatgacaatccaccagtccccatcatcgaaccagtggatcttcccatcgcttgcaacgtcacctctcagacgtctcccaatcagtctttcaatacctctctccagaagatgtctgattcacttgtctcacacttgctgaacccttcctatccacactttgtgattcgagaaaagtgcttcgttcagaaacttggggaatacatcctctacatacacttttgcctttgccaagagaacgaatgactaaccgc

SEQ ID NO: 32334 - DNA, 363 bp, Glycine max
gtatgggttaacaagttttcatattatcgcaaacgagacaaggaagcaaaacacaacactgttacactgctaattctaggaaatattgctacaccattgacattgtcacatggacaagggactgaacgcaaccttattgtataagaaatttgaccatgacaacaattatcctaagtttgacattgcagttatactacacattgatctaccattactatatatggtcctaacagtaaaacaatgacgataatttataaattaggttttaaccctatggtgggtgtatgcttatatgtttgaagagtctagtgtccctcaacaaaacttctataacttattatatgaattggacgtaataatctt

SEQ ID NO: 32335 - DNA, 271 bp, Glycine max
tcttgtttgatcttacattttagagccaaggtttcaaaacatactccctaacaaaacgctcaagtaggtgagtaaattaatgatagggcagtgtatcgagttttgcgccaataagacctatgttgtttgcaccagcaagccatgccttgcatgaagaaagaagttgagtattgcgaaggaaaataaaggtctttttaaccaggggctggagtactcaattctttaacaaggtctttgtttctcctgagacagaaagccgaaaaccattttc

SEQ ID NO: 32336 - DNA, 264 bp, Glycine max
agctttgtattcatggcacctatttttgtttaatccacggctgccatggcgcattccctaaaggatggcgcctcctctcacctattgtcctttgtctcttgctgtatctgtgtggtggaaaatcaccattgaaggacctctttgtagctcaaagattcattcttcttaaaagcgcgagaagaaagcttccatcaactttcctccttatttattctgctgccataggtcttcaagaaatgaatgacttccttggagaacaagatc

SEQ ID NO: 32337 - DNA, 376 bp, Glycine max
atcttatataagaaaatagatgttcttaatgttaattgaatgaagaacatgaactaattaggctgcaaaacctatactacttaaattgggagcagcaggacaaacaattagtgtctttggcttctaccatcaatggcactaagtcttcacacaaaacaatggttggaagatacttgaaacctaaccttttataccaaagccaaaataaaacaactaaaatagaaaaactaactagttttgaaacaaaattaactataagagcttctcaccatgtctcttatagataggagcaatgaatgcctatattttttaaacataatcataagaacacgaatgggtaaaaaaaactaactagctttgaaacaaaattaactat

SEQ ID NO: 32338 - DNA, 281 bp, Glycine max
taaatctctttgcaagaaaagattctcatgggatggaccctcccttgttctctttgaacaaccaagtggatgtaccctccacttgaactgatccacatgagatgtaccctctcttgttctcagttacaacaacccaagtagatgtatcctctacttgtaccacaaaggatgtaccctccaaaaagaattcatgtgattaggccttgttgaattctttttggcaaagggagaagaaagacaccaaaagaattcttgtgattagcccttgttgaattcttttt

SEQ ID NO: 32339 - DNA, 359 bp, Glycine max
  unsure (1)..(359): unsure at all n locations
agctttattaaaaatggtaataaataattaaatatagtaacattaaagggttgggtaaaattagtatcaatntattctcttttattttttacaactatttacattcatcttaataaaaaaattatcttgcggggacaagatctattttttatgggacaaaaaaaaaatatttattcaatatattcaagtttaaaacttactttgtaggggcaattgcccccattaccctccatgtaaatccgccattgacactaactatctatcgtcttacaaacgattatacaagatcaagcttacaatttttttttctcgagactttcaggtgtactgaaatccttttctaagttagaaaatttgtg

SEQ ID NO: 32340 - DNA, 341 bp, Glycine max
ttgatgatatggtcttcatcgacgaaaggatcaaaatgggtctaaaaagaggcaaatctgatcatcatgctgtgataaatgccaataaataaactagggcaaatgaagagggtgagaatgagggagaagcccatgctgtgactgccattcctatacatccaagtttcctaccaacccaacaatgtcattactcagccaataacaaaccttctccttacccaccgcccagttatccacaaaggtaattcctaaatcaaccacaaagtttggctaccgcacttccaatgacgaacaccacctttaggacaaaccaaaaacaccaaccaagaaatgaattttgc

SEQ ID NO: 32341 - DNA, 373 bp, Glycine max
  unsure (1)..(373): unsure at all n locations
agctngcatttggaattgcgaaagctttactccatcattaggattagtacctgacatctcaaacaaacaaatcaaacgtaacaagacaattatagttgctgtttgaatacctcacccactcaagtgtatcacacaatgatggcttttctctaatgaaacactctttccttttaccactctaattccccttgagttcttaggcaattcaagagattatggccacaacaaagaacaattcaccaatatgtgtaaggtaaggctagagagacaaggaaaaggttaaccaagaaaaggctaacaatgtttttaggcacaaatgacggaaataaaattcagaatctaggaattcaagtacaatcctccatgcaaccaa

SEQ ID NO: 32342 - DNA, 346 bp, Glycine max
tgaccggatgtaagatacatcttcttcaaccttaatcattcttgacttcatttcattgaagcgcatatccacttgcagttccaaagtatcaaacctctcaccaacaaaggtttgaagaccatcaaacctttccaatatcttagaaagaagagatgaatcttctccctcatgtccttcttcaccaacatttctagcacccttctttatccaagatccatcatgctctttaacatatccaaaggatgctatgactgaagcgcctataaggaattatctcttgattagaacataaggttcagaatcaatagggatgttgaagtgttgaaggaaaagggtaacaagatga

SEQ ID NO: 32343 - DNA, 374 bp, Glycine max
agcttgaaagaaaactggatgcattgtttatcttggtaacccagctggccttgaaccagaaatctgtacctgttgcaagggtttgtggtttgtgctcctctgctgaccaccatacagacctttgcccttccatgcagcaacctggagcaattgagcagcccgaagcttatgttgctaatatttacaatagaccttctcaacctcagcagcaaaatcaaccacaacagaacaattatgacctctccagcaacagatacaaccctggatggaggaatcaccctaatctcagatggtctagccctcagcaacaacaacagcagcctgctccttccttccaaaatgatgctggcccaagcagaccatacattcctcca

SEQ ID NO: 32344 - DNA, 343 bp, Glycine max
  unsure (1)..(343): unsure at all n locations
tgatccttaggaacccctnggnggngaagctccttcttccttggcttattccctagtggatggtgcttcccctctcctcttctcctttgccttccgctgcatctccatggtgaaaaatcaccattgaaggacctcattgaagctcaaaagatccatcctccattgaagctccacaagcaagcttccatcaatatcaccttcttaaatgcatacatggggcactatgccaccaaatacgcaagtaagaagatatgatttttcggtctctcgtgtccgtaaatgcattcatatcatgcaccacataaacatctcttcatggcatcgtaatggacatatcattcct

SEQ ID NO: 32345 - DNA, 374 bp, Glycine max
agcttgcatataaaaatcattatttttggttataactgggttagtcatttagttgaatctatcacctaattatggaaattttaacttgtgtatccgcttttcacgtaatatttgaaattcaaaacatttttcaattttcaaaatatggaatttattgctatattataaattaagaatactttgtgaactaagatcaatctttttccttttcttttacgaagggccattaaccctaaaactaaatattatgctcataaactaacaagaagtggaggaaaaaaaaagtcattggaagcttgttgtcgcgtgaataactgaccattatctgaacaaagttcgactgctccaacacaatttcataatttgaatatttg

SEQ ID NO: 32346 - DNA, 345 bp, Glycine max
tactcaagctttcaatgaaatgctggtcaagggcgtaagatgaaacgtgaagacatattctgcaattatttctggtttatccaaggaggggagagcagatgaagctcttaagttgtatgatgagatgatgagaatgggtctaatacctgatgacagagttttcgaggcacttgttggtagccttcataaacccagttctcatgctgccctgaaacaaaatgagtatggggaactgaaaataaacacttctgatacctcgagcttgccaaacactggtttgtcaatttcacacaggaaggtggtacatacatgataatcttgtccttgaagcccaagtaaaaaacc

SEQ ID NO: 32347 - DNA, 377 bp, Glycine max
agcttccctttctttggccaatgctggacttgcttggcagtgatttccttggcaatttgatgctcagaaacagcaatatccaccactccttcagttggtctgcccaggtatttgttgattacagcaggggagaatttaatacattttcctctgacaaacactttctgatactcatcactctttctgtttgttatgtcagagggaatgttgacaatgaattctctgactagactttcatagcaatctcccaacttggtgacagttttcagcagtccagcagccttgatgaggtccatgatctccttgcaatccaaggcatctcttcccagttctctttctaaggcaagtctgcgttgatatacaaatttccacctttc

SEQ ID NO: 32348 - DNA, 337 bp, Glycine max
tcctgcgaaggcaaacatttggaaagttagttttagtgggacattactcttaaagcaaaaaatggcatataacctcctcccataaatacaaacatcaatgtaaatttagagcaagcttatgcgcatgtttccttacgaacgttcacttgcggaagacatcctattaaccgaaaaaatgcacccatatacaatcaaggcagctttgttacctagattatttacacgtacttccaaggtgtatttgttacttacatcacacacatctccttggctaaattcacatacatgcatactccaagcattttggggtaccaaaaattgcacatgtgcatatctt

SEQ ID NO: 32349 - DNA, 356 bp, Glycine max
agcttgtatggataaagtctcacgattgtcatgtgctcatgcaacaattgttagtcgtggctatacgaaacatcttgccaaacaaagtcaggttcacgataactcgcctgtgctttttcttccatgctatatgtagcaaagtgattgatccagtaatgtttgatgagttggaaaatgaggccgcaattatactgtgccagttggagatgtattttccccctgctttctttgacatcatgaatcacttgattgtgcatctggtcagagaaatcaaatgctgtggtcctgtttatctacggtggatgtaccccgttgagcgatacatgaagatcttataagggtatcaaagaatctat

SEQ ID NO: 32350 - DNA, 333 bp, Glycine max
tgaagtgagaaagtgtggaagagtcagtcttcctacttttattcgttgaccacaaagtggtacctggagatatgtcgcgggggtcagaagaccttgggacgtcaggtggggtgctatttcccaaaaccaagcttgaccaatcccgacccaacccgggcatagtcagtcagtgagaacctgtgacgtacctaaacaggcgagctcctgacagtcaaccgataaaagagcaaataccacatagcaaggaggcttgtgtggtggctggccagttatggatcttgagtgatatttggaatatggcctctggtaatcgattaccaagggtgtgtaatc

SEQ ID NO: 32351 - DNA, 261 bp, Glycine max
acaaatcctcattactccatagatgatattctgaacctggtatgagaaaagaaagcttttgcgtgtttttaaggagaatgcacaagcttatttacgaaatgttgcagtaaaactttatgaacaaggctctataaataataacattatgatgttcagaacaaggatgcttacgcatacattgatgtaaatgcactgactaaactcagaatccacccatcatctttgagcaaagcacaataggcttttaaaaggatattgggg

SEQ ID NO: 32352 - DNA, 216 bp, Glycine max
atcaatggggccaaacacaccaaatgattatgatgaatgatggctcaaattctcacaaaggggaactcatcactttcaaattgagctttcaaaactatcatgacatgtcgaggagaatcatggatttccagtcacaaaatgtcccgaacttttattttcaaaacaattacccatttgttgaacatatcctataattcaaagaataacatgcaaagt

SEQ ID NO: 32353 - DNA, 301 bp, Glycine max
tgtgaggatatattggatattaccgggattttaacgtaaatttttttttatagtgatcttaacgacaacgttagtaatggtattaatgatagagattaaaacacagtaaatttagtggtccagacaccaaacttaattttttctacatgtatggtcgaaatagtaaagtacagattattaataattaaacttactattcaaaaataataataattaaacctacttgtaatttctttgacttttctgaatgataaaaaaactaatttgtaattcaaattttttttatggaatgggatatatg

SEQ ID NO: 32354 - DNA, 297 bp, Glycine max
tacgctagcttcaaactcgaaggtggaggaccatgaaccaaaaacaattcatggggctccgaaaaaggggttgagaatggataattactctaagcaatcactacgcatagctccaaactctaaggtggaggacacattaacgataacgctattcatggggctccgaaaagagcgagaatggagaattgcactacacaatcactacacatagctccaaacgcgaacgcggaggactcattaatgaaaacgcttttcatggggctctcaacagattgataagtggataattgaactaat

SEQ ID NO: 32355 - DNA, 329 bp, Glycine max
cttaaaaggagccataccaatactggcttgttttctattgttgtaagtgaactcaatcaatggcaaacaatccatccagctaccttgttgctctataatacacgcccgaagtatatcctctaaagtctgaatagttcgttcagtctgaccatttgtttgaggattattagctgaactaagcttcagctttgtccccaaggcttcatgtagacttgtccaaaatcgcgaagagaaccttggatccctgtcagatacaatactagaaagaattccatgcaaccttactacttacttgatatacaactacactagcttttccattctatacc

SEQ ID NO: 32356 - DNA, 487 bp, Glycine max
  unsure (1)..(487): unsure at all n locations
atcgtaagtctcactcactnttggtntatatgtttcnnnccntatatagacnnnctccccccagcagagggtttgacgcgtaggacccgccgagatnnanaacgcccgcggaggagacatcttaaaaggggcaaagattttttgttataaaaagaacctccagagaggccgcggacgtaagtaccaaccgcgtgtacaggagaagcatataaatataccgacacgtgtcaaaagttcacaaaaggacacaatcaaaaagctcgagactaacaaaaacaccgatacagcggagcaaaaaagcgggaacgggcccaaagaagggaggaggccaacccccatgaattaaaactagctcccgaaaacaagggctgacactcgaaagcaaaggaaaacgaaagaaacttcgcggaaaaaaccacaccaaggaaatcgcaagaaggaatacccgagaaggggcgcccctaaacatagaaaaaagccccagaag

SEQ ID NO: 32357 - DNA, 465 bp, Glycine max
  unsure (1)..(465): unsure at all n locations
gtgctttctccctgtaatacaggacatccttttgatatcttaccncccagaatntttgatcttaacaccgatgtgaatcacagagcggagcctgcaataacttctgcttttgttattcagaatgcacccagaggataacacattgtccaaaattataatcaagtgcaaaaaaattgggactaaagggaatggagtaataaaaaatacatgcctgccctatagaatgcatactataccaacaggagaaggaagatatagcattgtttatgaaacgtgggggagtacaaaacaaaataaaagattatgaacaaagtaaggatgagggaagcataaataaaaggcccccatggaaggtggtaatggaatccttcatgatgtccagtgcttaaggggtctattctgcaagatggagaggacgcaaaaacaacttactagacgtgcaagacaagacacatcgtattggag

SEQ ID NO: 32358 - DNA, 393 bp, Glycine max
  unsure (1)..(393): unsure at all n locations
tctacacagtgaacttgacactttgaacatggaaacccngttgagctctcactctaggaacctaaattctcaactcgtttngctatggaatggaaagatagatatagtggtgaaatcctcattactccctaggatcaatattctgaacctgttatggaagaaaaagctatatccagtatagatggagatgcccctgcttatgtaagaaattttgccgaaaaactttctgaacaaggctctaaaaatagatagccttatggacgttcaaaacaaggatgctttcgctcaaattatcgatgatgcaccggcttaacttacaaatcacccatcaactttcagcaaatgaccagtagcttttagaatgatttttgtggagactggtcatgaaaatcc

SEQ ID NO: 32359 - DNA, 370 bp, Glycine max
agctttgatattggtaagttaatgcctcaaaacttctattatatttcctgtttctgaagtacgttttttctcactaacatctctttttataacattaatctctttaatcctctcatttgtactaattactttatcttacatttttcttccttttcttctcatctccttttctattaaaaaagttgcccgattttgatttataaatgcaatttctcttttcattttaccaaactttatataaagatattttatttgattcaccaggacatatttgctgctggaactgatacttcagcatcaacactggagtgggctatggcagaaatgatgagaaatccaagagtgagggagaaagcacaagctgaattga

SEQ ID NO: 32360 - DNA, 417 bp, Glycine max
  unsure (1)..(417): unsure at all n locations
gaccancttcgatgccttggannnncnnttagagacccttcgagcacncannggttgaagacatctccagctacttatgtgacactgtacaatactcaagcctgccagtgttttgactggatatngaggattctttttttattagctacttatccttccggctggggagtttcactatgtcccaagtccaccctcttacattgcagcttaaaaatatgattttcgtaaggatacgtcattcaaaggatttttatcattgcaaaccgctagcatcacttctctacgctattcttcttattacccgaatgcgaaaagagaaactaatatccatattttaatcactgcttgggagaatgacatgataattgcaaactaacttttattataaaaacactagcaattgtatttaataaatcg

SEQ ID NO: 32361 - DNA, 328 bp, Glycine max
agcttgtagatttctgtcttgtatctgtttaatcgattacaaccctctcgtaatcgattataaagttgtttttgatgtagctccacgtggagcttgtaggccttggatcttcttcatcaatggagtcatttgcttcttgaagatcaatagtagcggaatggagaaggaagaaagatgattggagacgcgacttcaaggagaagatgagtcaagaacaagctcatcaccataggaaactgatggaagcttgcttgtaaggcttctatggaggctggatctttgaacttcaatgaggtcctttaatggtgattttccaccatggagatgc

SEQ ID NO: 32362 - DNA, 344 bp, Glycine max
tgcctaattaacctgaaattgagagaaaatgattattaaacatccaaaatggaagcactaagtatttattacctatacttaacaaaaaatacttataacactacaaaataaccataaattggaagagtttgatacaatttatacaagttttatacacaaaagttagtcgtattcaccaactaacaactcccctaaatttacattttgcttgtcctcaagcaaaaagagaacatctcacttgtcctcaagtgacaatgacatgcaatgactatgtacaaaggtgtgtgcaacaaaagttactgattgcatgataagagaatggagtaaaatgccctcatcactta

SEQ ID NO: 32363 - DNA, 337 bp, Glycine max
agctttgcgaaaagcttgccgctggatctgacccatcaactgtcgtaactcttttagactggtgatccctaggctcttgaccttgacttgatagaacctctttttaagcgaaggtgtttgacttgatcccatgttctactaaagtacaacaaaatcggtgtgaatcaaaactccgacatctatcatgggtggaatggatgaatgcatgaagaaatgcatatgatacagatgcaatttatgaatacgggagcccgaaaaattgtctccttcttagatacaacatcttggggtagcaaagtgcccgacgtatgtatttaagaaggtggcacgaaccctc

SEQ ID NO: 32364 - DNA, 346 bp, Glycine max
ttccaagtttattttgatgatgccaaagactctagtcaataatcaagagtcaaacaagttttaagaatcaagattcaagtgaagattcaagagaagactcaagatatgcaagaacttcaagaaaaacatcaagataagtataaaaatattttttcaaaagaaaagattgaatagcacaatttgtccaaaagaatttttcaaagaaaaatcttttaccaagagttttactctctggtaatcgattaccaaaaggcagtaatcgattaccagtagccaacattcttttcaaactgatttacaaagcaataatcaattaccatgagcatgtaatctattaccaatgttt

SEQ ID NO: 32365 - DNA, 374 bp, Glycine max
ttaagtcacctcccgcatgcaagcttcaagcgagtatagcattatttcttggaaaaaatgacgtcaccaacgacggggctgctcgcggtttctacttcttcggtaggagctgtggatttggctcatggtgtatgaaaactcttagagtttgaaaaaaacctgtttcatgaccaattcttctgattgtgacccaattttgatctttgaaaaagaaatatttttatatttaaatttccgtcactattaatttctttccatatggaaccagcttttgcattttccactggacatctttcgtggttggcctaacttgtctaagaatgtggaaagtgctttcccctatagatagttagaaaaaagaagtccatgtgagt

SEQ ID NO: 32366 - DNA, 344 bp, Glycine max
  unsure (1)..(344): unsure at all n locations
gtgcgcctacagaaacctaatgcaaagnngcttacatactgggatatattcgcaatgtatgcaaaatttcctgagttctttttaaagacgcgtaatttcttttaagacgaatataacaagtgaacaaataaaatatgactaatggacattcatctgcgaagggatatgttctaggtatgggcatctatccaaatggtgaccatattctactattctcccactacttcaatctctatgctgccagttctggctgttgataacctaagctaacaaatcatgtcattttcatgagtgataaatgcaatttgcaccacaagtgtatcttgttaatatgcatttaaaat

SEQ ID NO: 32367 - DNA, 221 bp, Glycine max
agcttgcactgtgctacgagattctcctagaccagatcctcaagctccatgcatgtcgcgagctcactaatgttaaaatggaagcgttcgcgaagaattgcaaaggattgttaaaggtcttctgctaatcgtgcacattcaggtcaagcctttctctagaccctgtatttaattgatgataaactataaaagtcatagtcttgaaatcctagaaaagagtg

SEQ ID NO: 32368 - DNA, 346 bp, Glycine max
tttaatcatatgtaacaacattcattcaatatatgatttttctagatgttggtccatgaccatcataattgattatgggaataaaaatgtcaaaattatctacaatttgaaatttaattttattgcttattaatagaaaagacttttgttaatgtcatgtgagaaccgaattaacatgcttaaactatgtcaatagttgttagaggtaaaacttaattaggaaaaaaacagataattttaatgaacattttatgtgtctatgattcaagacaatgaaaaaataataatcatgaaaaatttacatatttaatgatagaaaatgaaatgattaaacaatttataatat

SEQ ID NO: 32369 - DNA, 376 bp, Glycine max
agcttgtaacacgtaagtgtcaatatcgtcataaggtgcaataattgggcctctttaatctttataggttcgagtgctagtttcctcgggtaacctaaactaggtgttaattaatattatgatgtaccaaggcttatttatagaatatagatcatcaatgaattgtgtatcatgtttataaatcgttgaagtttgattgttatctatatagaaaagttctaattattattaattatctgacggcaaaagtccatttaaaaatgcaataatgaaaagaaaaatattcactagtgaatcttttagctcgcaaaagatgtgacaggcggcagttgcaacgttgacatgggagcaaccatcaagggggggtagcattttg

SEQ ID NO: 32370 - DNA, 348 bp, Glycine max
taaacatgtggttggcagaaataactagttgtatgactgttgcctcacattacttcatttgtataggcacaataagatgcatatgaaaacgaataaagtaagtatggatcttcaaggatcaactcaaaccaagaacatattttttttatttagcaaattgttagaaccaacttgaatcggtggttattaataatcttattcacttttacagaggacaacaggtaatgggtatttagttgggccctaccatcttttctgctttagttggccctacaacaaagcttaccaaaaaaacttattcattgactatgtagcttaccaaaaaaacttattcattgactatgttat

SEQ ID NO: 32371 - DNA, 363 bp, Glycine max
ctttatacaatgggagactgttcatttcaagtgctcgaaagaatcaatgacaatgcttacaaagttgagctgcccggtgagtataatgttagttccaccttcaatgtctctgaattatctctttttgatgcagaaggagaatcccatttgaggacaaatccttctcaagaaggagagaatgatgaggacatgaccaagagcaagggcaaggatccacttgaaggacttggaggacctatgacaagggctagagcaaggaaagccaaagaagctcttcaacaagtgctggccatactatatgaatacaagcccaagttttaaggagaaaagtccaaggttgtgagttgatcatggcccaaatgg

SEQ ID NO: 32372 - DNA, 224 bp, Glycine max
ataaatctaaatggtctttacttgtcacacagggagtgagtattcacagcttttgtatataagccattacctctcgaaataagatctttctgacagcgagttgagaaactttggttggtcattactaatcacgcaggacgttggaatcacgcgcctaatttgttgtgagctggaaactaagaacggatgcttttccaagagcctgatgggtattactggtgaca

SEQ ID NO: 32373 - DNA, 330 bp, Glycine max
cgtactccttaccatcaacagttggtggcgaacctgttgtgcatgacgtttctccctccattgatatctctcagctcacagatcccttaaagataagagctctgatacccatttgttgtttgtggttaataacggtcagcataaatatttaagaatgaaagggagcgtgaagaaagactttgagactacagacgcttgttatattctgatatgaaacaacgtgtttacatacatgatacgatagtaacggctaacaaaaagactcccccactaacagatcatgcctagaagatacgatcaaaacttatttatcctatcaggcaacatgac

SEQ ID NO: 32374 - DNA, 297 bp, Glycine max
cgattgcaatgaccattcaaaaagagaactaaagcaccattaggagtatatataatgaaaaaacgccaagacacaacacagcttatttcctatactgtcatttaataaaataagacatattaaatatgatgtagagttttattacaaaaacaaaattggggtttgcatgaataagattttaatcacatttggtgacaaaggacagattcactctcgaaaaggatagccaacctatgacagcctcataacacattcattaacttgtacttcctacacctctaattataagacactttt

SEQ ID NO: 32375 - DNA, 368 bp, Glycine max
agctttgaatgaggctgaagattctgctgctcatgttcaacaagatccggtggagattaatttatctcagcctcatttgtcacaagatagtgacatggagttgatggtaaatatttgtcacaacaaagtagttttatctcaacctaatttgttgcagcactccatttttatatattacaattattcatgtttggcatttacatgtaggtccctgcaactattgttccaccaatggcaaggaataagctaaccataacaagagccaaacaaaggaaggttgctgataaagatgatgcagaaaactgaagaagcattttttgttgcattttgaaggttgctgaagacccattttttgttgcgcattttga

SEQ ID NO: 32376 - DNA, 321 bp, Glycine max
cttggattctattaaagcctatagatgatcatgttaaggttttcgaatcacaagagaatattctaagacaatatgaacaagtgttgttacgctgtcagtccattggaggaaagaaacttgatcaaaacgagtgaatcttagctatgctaagttggcgagcttcattatattcgaagcttactttgtaaacactctttgagttataagaacacattttctataaaacatatattatttatgaaagttaggagtgacttagtgacaaagaatacttgggtcttaatcttagggggagattaagcgtattgccaagagtggcct

SEQ ID NO: 32377 - DNA, 360 bp, Glycine max
agcttcattagcgcgggtctggtatattttgtcagtggtcgcgatatacgaagatgatgttccgagtacattggatttggtacgaccatgccctcctgattttcagctgggaaattggcgagtggaggaacgccccggcatttacgcaacgagcatactgtaaacctttgcggatctaaaagctttataattgggcctaagctttatagaattatcctattgttaacgcttcgtgtcttttgtttttgaatttataatacaaggatctgtcttcatatgttcctacgtctctacccattctcattcatttgcgtgtttacttctttttctgaaatggcagatcctatgactagtcccccg

SEQ ID NO: 32378 - DNA, 319 bp, Glycine max
tgttcgcacattgttcgcgtgtatgacattctttccacaaggtttgaagtttaggagaccttcaatcctattacacaacgtggccgacaaaagtgggcagttaacttgaatggtcattattgacaatgcagaaggtattctgcgctttactatccatgttcacatattattgcagcttgtggttacgtgagcctgaactactaccaatatatagatgttgtttatacaaatgagcacatcgtataagcttactccgcacaatggtggcctcttgggaatgaagcgactatatctccttctaatgacgcatggacactta

SEQ ID NO: 32379 - DNA, 366 bp, Glycine max
  unsure (1)..(366): unsure at all n locations
agctntataagaaaactattataatctatttataagtgctaacattttaatcccaaaaataattaaattatggcacttatcatgtacccattaatgtcccaaccactactagaaaaaacattttctatgacaacaaaacgacgacggttcctcaagaaccgtcttattatgtaaggtagtgacaattttgtaaatatggggtcttagaaactacccttccatgacggtttcgcaaaaattgtcttaaaagactgtcattctaagacacttttgtaaaaatcgttttaaaagaaaacatgtctttaatttttatatctccctctcgtgcgcttaaatgtttgctctttctttcacactctctctcac

SEQ ID NO: 32380 - DNA, 334 bp, Glycine max
tcaataccagccccttatctgatataacatcattcattgtcaacaataatgcttataaaaatcaacatggacagtccatcttaaaatacacatacccagccaagcaactccgacttacaaaatataaggagaaagaacatgattgacgtagcaagcctgtgtgttaatccaatcaacaagtttgttgacacaagctctactcctcaccattgtggagatcaagctactggagaaaatgaaaaaaaccaaagaaatccgcatgctgaggcaagtccttctacttctacaatgagaagtcctttgagaccatgtacacatgttattagagacaacc

SEQ ID NO: 32381 - DNA, 263 bp, Glycine max
acaattagagcaatcacacggaacacatattttcactgacaagataacttcaatccatggatttcgtaactaccgcacagaatagatggggacaactgctaagcacaactaacactcgctaaaccaaaattgtgaccgaataattatccaaaaattgaataatggtctaaaatgaactgttacagatgatgagaatgcatggctaaatcttcctggagaggcgaaaattggcactcttcgctaggacaggtgaatacacaaat

SEQ ID NO: 32382 - DNA, 439 bp, Glycine max
  unsure (1)..(439): unsure at all n locations
cccgccaccctctctctgtatatatgccgaggagaatgagtctttatcntaatagggnngtgaacttgacacctggaccttaaaacccagcttgaacatgaaggcctaggggacctcattctacgccgtcatgtcaacaaaactcaaggacacgctagattgctacatcacggtttctatcatcaatacacataaaactccacccctttctccaaaatgctcacatcggcttcctagaggaaaatacatctcagacgaactattgaaacatcaaaatgcaaacaatggttagcaccttcctcccaactccctctaactaataggtcgattaggcctcctgctaaagtagcaaagaatttttttcctaaaagaaaacagttgacataagtaactgagatacatgaagcaccttgacaaaatgcctaccatacctgtgaag

SEQ ID NO: 32383 - DNA, 370 bp, Glycine max
  unsure (1)..(370): unsure at all n locations
agcttcttgcgtagccgctcttggtgctcanaaaatcccaaaaacaaatccctcttattactagctattttgaattctttagttcctgaatgtacaaccttcaaattgttgctcgttcccctctttcttttctgcaaaaaagaaaatcaaatgctgtcaaaacatggatgaagtcctaagaaaatcaatatcaaagaaaacatggatgaaatcacaattaaaaagcacaactacctatctttcagagtcctttggatcatttgacttgtctccttatgtggtggggttttgtttaataatcttatacttttgccttccaaaaaaaaacttatcactaatcctcctttcattaatccaattttgcatgtta

SEQ ID NO: 32384 - DNA, 180 bp, Glycine max
tttgattttttattattacaaacgtgtaatttacatataacagacggtatggaaacttaaaagacaaaagtaccctattcattgacttatgacgttgcctctgacataagaatatacgtactggtttcgtgagctgtatgagaactctcagagaaatttatggctttcgcctcttaatta

SEQ ID NO: 32385 - DNA, 376 bp, Glycine max
agcttatagttattggagggagaatttaacaatccaaaatcaattgtacctttcaagtaacgaaaaattctttttgcggcttttagatgaggagaggtaggagcctccataaagcgacacacaactcccaccgcatatagaatatcgggccttgtattggttagataccttaaactccccacaagactcttgaagatcgtggagtctaccttctctccttcatcaaactttgataacttcaagccaccttccataggggtgttcacgggattgcaatcaagcatattaaatttcttcaacacttcttttgtgtacctttcttgtgagacaaagataccattctccgtttgcttcacttccattcccaagtaatatg

SEQ ID NO: 32386 - DNA, 348 bp, Glycine max
tgcaagaggattggtaaaggggatctcatcttaagcctttatgtcttagatctcaaggacactcttgattgcaaatttactttttctattatcaattcacataaaattccattccttttcaaaatgctcatatttggcattctagattttatcatatctcagacaaagttttcaaacatttgaatgataaaattggtctgcacctttctcccaatttctcttcttctaattgttctatttgtcctcttgctaaatttggaagattttcttttcctaactctaaccatttgacttaattcactgtgatatatggggtccctagtccatatgctcaccctacctatgagg

SEQ ID NO: 32387 - DNA, 373 bp, Glycine max
agcttgtgccttttcacgtctggattattaatgtagcatatagatccaaagacccttatgtgctttgttgatggcttcttctcgttccaagcttcacttggagtcttgtcttttacagacttagttggacatctgttgagtatgtaaacaacagtgtagactgctttagcccaaaatgtgttaggtattcccttctccttgagcatccatctagccatttccataactatgcgattctttctctcggacactccattttgttgaggagaatatgcgactgtaagttgtcgctcaatgccttcatcctcacaaaatctttcacactcgcgagaggtgtactctttgtcatgacacttcttagtacttttatccg

SEQ ID NO: 32388 - DNA, 322 bp, Glycine max
tgaggacagacaacaagggcttgaaggagattagagcttgaacgagacttgaaagaggggtctccccaacccacttgggtcgctccagcttcccttcttcgtacctacccaactgcgcttgcgcggcggtggtagtgtccgacgacgccgcgtgaaccgcccagggccgccctctcggaggccgtgctgtaactgttgtggcattgccgctggcagagatcagtgcagagaggttctgaagtggcgacgacagagccatgtgtgcaaactgcaaagagggacacacgccgtggcaagtgacaaccacgaaggcattgctatg

SEQ ID NO: 32389 - DNA, 374 bp, Glycine max
  unsure (1)..(374): unsure at all n locations
agcttgccgttagaatcatagacctgtggtttgttgaaactaaagataaatctgaacaaggttaaatgattatcatggatgaaaatgtcatcttatttaactttcttatgttgttaatagatattgtatggtttgtctaacaagtttcaatatcttatgtttttgtctacaattagtttgtttatttaataaggatgtatacagatcattatcttttcccctcttttctttcatattttagatgccactggtgttgttcatgagttgacatcacaacatgntttaagtagtcccaagagggtcctctttaccatgaaagatctgaggtacaaaaactatctctatctatttattatccttgatgtgcttagtat

SEQ ID NO: 32390 - DNA, 324 bp, Glycine max
ccccgattacccaattcggtcaattcgcgctttagagcttcaactggggcttaggtttgtaaatatttttaccccttatgggttttacccccaaaattattttattttattttatgattcttgggttctctttgtatttttttttatcgatttaagaccccttttggttgttgggagttgtgttaacttttctgaaattttccgaattggtatggttctatattattgtatcttgggaagattttgtgtgttgctcatgatccttataattttttatttttatgattctatagtaattaagacccttttgttgttggaaatttt

SEQ ID NO: 32391 - DNA, 366 bp, Glycine max
  unsure (1)..(366): unsure at all n locations
agcttttcgattcattctatgcactcgtagtggtccacattgtgttccgtgcatttntattctcgttttgtttactttttataccccctgttgacgtgcttaagccattttacttaagtcatttcttcgcttaacttaaaaataaaataagtttccaccgaacatttgaattgcattatccgttaacttcggttaaaatcaattccgaccgttcggtcgtgccgtaaccacgttggaaatcaaaaagaggtagaaaataatatattaatcaaaaagacatcttttagtgaaataaagcgganaatcaatcggacgttttctctttgggatttctcattcttaatcgaattgattaataactaagtg

SEQ ID NO: 32392 - DNA, 341 bp, Glycine max
tctgttttcaattacgagcttctcgatatattacgggactcaatcggtcatccgagtaaaaagttattgtcgcttgattattctcagagcttcagtttttaatttcgagcgtctcgatatactacgagacacaatcggacacccgagtaaaaagttattgtcatttgaatttgctcaggcttctgttttcaattaccagcgtttcgatatattacgcgactcaatcggacatcccagtaaaaagttattggcgtttgaatttgctcagggcttctgttttcaatttccagcgtcttgatatactacgggacacaattggacacccgaggtaaaagttattg

SEQ ID NO: 32393 - DNA, 336 bp, Glycine max
agcttaatgcttgtatccatatttttatctaataagagttgcgaaagttgttcttttatcaagtccatgaaaaaatatctaagttcatttggtttttgagaaagtccttcattgtttttcattctcaaatgtttacaaaaaaaatccttttgttgcgttctgatccaaaaataagttgcaaaaatactggttcatgattctttccaaaacatgttatgttcaagaaaaaatgtctatttaattcctaaaaaagagtgataatttataactatactaacagaatatcaaagcacgcacaaattagtcaaaataaacttgctgtactttttcacaaaa

SEQ ID NO: 32394 - DNA, 345 bp, Glycine max
tatgcacggaaaatgtaattatgaaattgatatgcccgaagaaacactatttcctagttaaccatgcattaggtaccatgttcaattattttgtttttaagtgaaacgggtttatgatcccaacatggttggctcgtggtgcctaacacatgaaactaagaatgtagtgtgaagtttcacgcttcccccttttttgtttttgttttgtagaggaaaacgcaaggatgagcaaacatgaaaacaaatggtatgcaattttgcagatcaaaaagtttgttgaacgcatttgcatgatgatgccatgactcatgcaaaatgtgaggctggaatatgataacggacaaa

SEQ ID NO: 32395 - DNA, 309 bp, Glycine max
tgaccaatcccttattaacccgggcataattttgtcaagagaacctgtgatgtacctaatcaggcgatctcctgtccgtcaacagataaaaagaacaaagaccacaaaccaaggaggcttgtggtggctagccagctgtgaaacttgattgatatgtgagatatgggctctggtaatacattaccaagggtgggtaatcaattacaaagcttaaagatgaaaacaggaggctaagatggtctctggtaatcgattaccacggggggtaatctattaccaagtttgaaaaccaggtcaggaaacttaaga

SEQ ID NO: 32396 - DNA, 354 bp, Glycine max
agcttatttgacttttttagttttttatattttagatgtgttgcaaaagtgacataactaaatttttctttgagtcttgtttttaatttttcaatctaatctagtgccattctagaacttccgttgtgtcccaccttggcttgaggcgctatccttttgctttatttttgcatgaatctcattgaattaatgtcatgttaaaatatcattttgtttagctttcatttcatcttttggtttcttacttgacttcttcttcttttttgagtttaagtgttgcttacattaacgattggaagaggaaattggtgcattgcttgaacgaagaattttgagtcttgaatgttaatgttc

SEQ ID NO: 32397 - DNA, 324 bp, Glycine max
gaggaagcttctatgggggaagatattttagagagaaggtggccttgaaaattgaaggaagaaagggagggtggttgaactttgaagtgtgtttcataaaactctgatttatcaaagttgtgacaagtgttacacatgttcctatttatagcctatgtcactaacaaaatgaaattcacttcatttcatgtgaatctaaaaggaatctttgaaggatatgccaaagacaacttagaatattccaagaatatgccaaaggcatcttataatgttccaagaatatgccaaagacatcttagccatatttcctttacatgttacaag

SEQ ID NO: 32398 - DNA, 369 bp, Glycine max
agcttgaagtgagaaagtgtggtatagtcagtcttcctacttttattcgttgaccacagagtggtacctggagatatgtcgcgggggtcaggagaccttggggacgtcaggtggggtgctatttcccaaaactaagcttgaccaatcccgacccatcccgggcatagtcagtcagtgagaacctgtgacgtacctaaacaggcgagctcttggcagtcaaccgataaaagaacaaagaccacacagcaaggaggcttgtgtggtggctggccaactatggatcttgagtgatatttggaatatgaccactggtaatcaattaccaagggtgtgtaatcaattacaaggcttaaaaatgaagacaggaag

SEQ ID NO: 32399 - DNA, 323 bp, Glycine max
tgatttgtctttctcttggtcttcttcatcgcacgtgcactcggcagcgactaggcttgggattaccaccaggaagatcaagagttttcttttactatgaaatcttttcatggtgattagtgtaatgcaggaaaaaatagagccaaagaggatctaaactaaagtgctggacaaagtctctagtgtagagaacaagctaaaagtcacatatagagttatgaagtgacagaggatgatatgatataaatacttgaacctcctcaatattaaaaatcagaaggtgaggtttgaagatacctgtacattaatccgggacgacttaa

SEQ ID NO: 32400 - DNA, 373 bp, Glycine max
tgcttgccacccagctcgcccagtctatctcagctcgcccaagcgagcagggttgcttcctccagaagcaacaaccttctggaggaatcttctggagggcccaagtgggcctggttgctatttgcacccccatttttactaagtacacccctgcctttttttggtgattcttttttcgtaaagttacggaaacttacgaatttcgtaacgatacttgttttctttccgtaatgttacggaaccttgcggattacataatcatcccctttttgacttacggaatgttacagaacctcactaattgagcaacgatgcttccatttgattttcggcgtgtcacggaaccttacggattgtgcatcaatattttctt

SEQ ID NO: 32401 - DNA, 326 bp, Glycine max
tgaagaggatgctttaatggaggaaaagatttagagaaggggggagcactatattgaaggaataaaagagggacagaagtggaactttgaagtctatctcataagactttcattcatcaaagttacaacaagtgttacacatgcttctatttatagactaggtagtttccttgagaagttttattgagaaaacttccttgagaagcttctttgagaaaacttccttgagaagctagagcttagctacacacacccctctaataaataagctcacctccttgagaagcttccttgagaagattcctaaagaagctagagcttaactg

SEQ ID NO: 32402 - DNA, 289 bp, Glycine max
  unsure (1)..(289): unsure at all n locations
ccgcagctgcagctggttcgaggacttatttttgttgaactaanaacgatgtagaacgaatgaagaacgtcgccatccttcgatacctttgcgaacatcctcacggaaaacgctacggaaacatttcggaagcgcctcggcttatatttacttcacggaaacaatttttcctagcaaattccaaagatagagaaaagcctaaggggctgaacccttttcttcttcacttcctcccctatttatagcaaaataagggaggtggttggcgtccaactcgcccaggcgagcc

SEQ ID NO: 32403 - DNA, 430 bp, Glycine max
  unsure (1)..(430): unsure at all n locations
agaataaataacttgatgacctcgaacaccnatgagaacattggaaaacaccagntttgagacactcgcaccactccangngacantatattattctcgagctttataagttctggtgtgtaaacacgaatgttctagtcccgccatatgccaagatgacttcccgaggagatccgatttggtaccgtcatgtcctcctggcttctgactaagaaactgacgagtggaggagcgccccgatgtttacacgacaagcataatggtaccccttggagcttaaaaactctatgggtgggcccacgccataaaggtgcctttcggtaaggcattatgtcctcttggtcttgaaaactataatctaaagaagcttctccttcattctggtcattgcgccctctaaccttattttcatttatttagcatggttatg

SEQ ID NO: 32404 - DNA, 370 bp, Glycine max
agcttgaatttggtttaaacatgattgatacatgatttgggacttgtaggatttgatttgggcaagattggatgagaggaagggtgattttcgaaatctgcacttatgcagaattttgctgtcaaaataggtgcagcaagattttggctttgtgcagaaaaatgcttgtgtgtgattggctgtggaaagagtagtgcaaaatgagttctggatgtttgctagtagatcccaacggtcaaaatgtaggtttatgtactatatacttccagtaaaattttcgagtcgatccaatggttaatgaaccggaacgaaggaattgttactggggtctttaagtgaggaaagctgtgttttggttggtgttttgggc

SEQ ID NO: 32405 - DNA, 310 bp, Glycine max
tatcaagcttgctttcatcaagtggtacaatagcacaagagcttcaagtaggtgctccttaaacctccattaattttcagttttaccttctccactgttgttgattcttcatttttttccatgtatcacctcacatgtcttgtgttgaatgttgataacatgattgtttataatttccaccgattaaacttgctataggagatatatttgattttatatggttcaaaattcttggtcttgttcttaaaccatgaattgtgttgagttaacgttcgtttgagttttatattgctattttttgtggctgaaa

SEQ ID NO: 32406 - DNA, 375 bp, Glycine max
agcttaacaaaaggcatgcgaagtgtgtggtattcctagagcaattcccttatgttatcaaacataaaaagggaaaaggtaatattgtagccgatgctctttctcggcgtcatgcattactttctatgcttgaaacaaaattgaatggtcttgaatgtttgaaaagcatgtatgaaaatgatgaaacttttggagaaatttttaaaaattgtgaaaaattttcagaaaatggtttctttagacatgaaggctttcttttcaaagaaaacaaattgtgtgtgcctaaatgttctactaaaaatttgcttgtttgtgaagcacatgaagaggtttaatggggctatttggggtccaaaagactctagaaacattaca

SEQ ID NO: 32407 - DNA, 344 bp, Glycine max
ttgagcaaattctaacgacaataacttttttcttggatgttcgataaagtcacgtaatatatcgagtcgctcgaaatagaatccagaaggtgtgagaaaattctaacgtcaataactttttactcggatgtccgattgagtcacgtaatatatcgagacgcccgaaattcaatacaaaaactctgagcaaattctaacgacaataattttttacttggatgtccaattgagtcgcgtaatatttcgagacgctcgaaattgaatacataagctgtgagcaaattctaacgacaataactttttacttggatgttcgataaagtcacgtaatatatccagtcgct

SEQ ID NO: 32408 - DNA, 362 bp, Glycine max
agcttgtatggttcttgagaaggtggatttgttaatatttggggttagcaaattgatgttcttggaggatttccagtactcctgtgtaacactattataggaaaacatataatatagtattccaattggtacctgtcattttctataaaagtagttgagatctgctagtgctaatgatattcactttgtattgaattttattaatgatggattgaccagaagttctcaccttgaaactgtcaatgtaatttgcttcagtggttatttatatgttcttttgcgccactgccagcctgtttatacttgattaccttgccaacaagactatttgttcagatgatttggtagttgtctcgccagat

SEQ ID NO: 32409 - DNA, 345 bp, Glycine max
tggataaggacctactattccatggactaattatctaaaacaaaatttcatggttctgttaattttttttctacgaaaatattctagcactcaggtatatatggaccgagaagaacatacgaaaaatattatagcactcatacatttaaagaagagtgaagaattgaagaattcatgactaaaataccaggggtgatgaatctgagaaggaagcattcatctctgagcggccttaagaactaattatctttgtaaactaatttagtagcatatgtacatattatttgcactccaaataagatattattttttttattgaaattaaagaagagattactttaaatc

SEQ ID NO: 32410 - DNA, 342 bp, Glycine max
tctgatttctggcttaaataggtggctttgttcgtgctcatgtgcttagcgcaattctgaaatgcttagtgcgcattagtgaatttcggcttagcgcggcttttctcgctcagcgaatggaccgaagcagtgcgcttagcgggatggcccttcgcttagcgaacaagcacatttcatccttcttgcagattcttctttgcgcttagtcgaggattgttgcgctcagcgaatagctcgctaagccagcagattggcttagcgagagggtgaaaatcaacacttcaaaacttgcctaattatcctgaaattgagagaaaatgattattaaatacacacaatggg

SEQ ID NO: 32411 - DNA, 344 bp, Glycine max
  unsure (1)..(344): unsure at all n locations
tgcttcataccgnatattgatttctttaatttgcacaccatgtgttcctttccttcaactgagaatcccattggttgatccatataaacattctcctctaaatttccattaagaaaggcagttttcacattcatctgatgtaactctaagtcataaagggctactgatgtcatgataatcctaaaagaatccttttgtgagatcggtgaaaatgtctctttataatcaatgacatctttctgagtaaatcccttaacaaagccttgtaacgttcaaagttgtcatgagagtcacgtttaatcatgaagacccacttacaaccaactctcttaataccctttggc

SEQ ID NO: 32412 - DNA, 375 bp, Glycine max
gcttcctcaatcaccttattgagaatttatatgccatgaaggatatgtctgtctttgatgaaagttgtctgtctctcatcaataaggatagatataacatgcctcaatttgtttgctaataacttggctatcaccttgtacatacaaccaatcaaggagattggtctgtaatcatcaaaggactgagggtgttttactttgggaattagagccagaaaggaagcattactacctctagggaagctgccatgcacatggaactcatccacaaatcttctgaagtcaggtttcaccactccccaaaattctttaataaaattgaaattaaaaccatcaggcccaggacatttgtccccaccacagctttcttgatct

SEQ ID NO: 32413 - DNA, 347 bp, Glycine max
tgcatacaagattctccttgcctggcactttataaccttctggttgggtcatatagatgtcttcctctaaatccccatgcaagaatgcagttgtaacatctaactgctccaagtgaagattctctgcagctactatgctcagaataactctgatggtagtcatctttacaactggagagaagatctctgtgaaatcaatcccttgtttctgctgaaaccctttcaccacaagtctcgccttgtatcttcttctaccgacagattcttcctttagcctatagacccacctattctgtaatgcctgctttccttctggcaatttagttaaagaccacgtcttattcttt

SEQ ID NO: 32414 - DNA, 333 bp, Glycine max
tagcttcttctgtcaactaacgaagactgtctctccgttagtcggtaactcatccacaactattacctgagccgatcctatgagatattgagggatgctgggtggtttccggtcaaaggttatttcgaatggagagatactagttgcgaagtgaattgaggtgttgtaggacattccgcccacatcaagaattttccccaagtggttggtttcgagtgaacaaaagcgcacaagtactgctccactacttaattgatgacctcagtttggccatttgtttgaagatggtaagccgaactcatgcgcagtcacatgccactcaaacgaaagagc

SEQ ID NO: 32415 - DNA, 347 bp, Glycine max
tgcaatagtgaaagtagctttagggtaagtgttagatttaaaattctctttttccgtaaaatgcatgcctaaatatgcattccatacttcaaattagcctgtgtttttatatgaacgcataattggttcccttctaaactatagatacggggacccctccagcattaataagattgaagcatttgacattgccataaactaatctgatgaattatcttgttaggcttggggtgctatgcctctgcagctacatcacccttccattatatgctcttgttactcaggtactatatgcttttcgtttcctgattttcttgtatttgatcggagccaattttgaatgacta

SEQ ID NO: 32416 - DNA, 351 bp, Glycine max
ctgcaatcttacatcatgagccatgttttttatcttgatttggaatctgctttggcaagtttatattttatagttgaatggtcagtgtgcacaatgatctttgatcctactataaatgatcataactttttgaaggcctaaaccactggtaacatatccttcttcactactacacagttgatttgggcttcatttagcattttgttggcatagtaaatagcatgaaatattccactccttttttgttctaatactacttttaccacataattattcgcatcacacattaagtcgagttcttgcccccgattgggagccactatagctggagtggttactagcctttttttc

SEQ ID NO: 32417 - DNA, 319 bp, Glycine max
tcttgagtcgccttttggttatctcatatgtatgggtggtgaaatctattatctcattaaaaacatccatattgaagtgattaatgaatctagaggctaagacaccatatggaaattcataatccactagtcaatgactctttaacataatatcttcaatcagaagtacctaattcatttgaatacccgatttcaatccatatacaatttataaggcatttagaaacttgagcatgattgcttgaccttggtgccataatgtaggtaatgagatacattaacattctatcttcagtagttaaaccaccaactcctacac

SEQ ID NO: 32418 - DNA, 372 bp, Glycine max
agctatgaaatattatttttgggcgctggaacgaaacccctacttttagtttgctaccatgtatcctctaaaaactcctcaattaagtattatcaagactagggagttataaggtggtttggtagttggaagaggaacataagattggagtaattagaaggttatgagttcgaatccttcctctaacataacatactaattattaacatttaccaataaaaaaatatattatcaagactaattctcagtgttttaatttcttcaataaaaacaaatttattagcatatatattaacaatatataatatgtattagaccttatattagtgttaacatagaatcccaatattatctatattaatatttcttttt

SEQ ID NO: 32419 - DNA, 328 bp, Glycine max
taagaaaagtttttaatcgattacgataatgttgtaatcgattaaaacaaaatattttgccttctgaagaaacttttctaactttagaaactttcttcccacttacccatgatgatgcatgatgcacaaaagatatgatatggactaagatgcaacactcaacataacaaccaatacaaatgccactcaagggagttgggcatgtaaaagacaaaacatcatcaagctttagtcttcatgtggctccccctatctctaacaaaagagaggtcatataatctaagaagaataagataatactaaactaaaaattctcaatcaaattccc

SEQ ID NO: 32420 - DNA, 458 bp, Glycine max
  unsure (1)..(458): unsure at all n locations
atgcacccctcccctcatatatcacgcataagaatacaccacccccagagganttgtgcactgacgccccgtatcataagccaacgccgcagcaagcaccaagcacctgaggaattttttcgcccgccggatgcgctcgcacagagagataacagccctagaaaacagcggcaacgaacgacggcctcaaactgcgtagatcaaacacaagcacaaagtgagtgaacgccccaccgggtgacatcaagacataagacaggcaggagagagggtgaataaactccagagacctaatgcgagaggcaggagaacaaggaaaaggctagccgcgcaacacgctggaacaagcgcaagcgacacacgacctgaaaagcaacacacaagcatacacaagatagtcctcggaagcaaaaaaactagagccgggaacttgttaccagaaaatgcgacagcaatcg

SEQ ID NO: 32421 - DNA, 296 bp, Glycine max
tactcacgctttggtatgaaactttagccatctgggcaattgatggtgaatccatagattttcgtttcttctttttctgatcccgtatatgcgctaaatgatcgtgagttggagaataaaagcagggcctctttctataactggtatgaaggagacttgtggagttgggcaagtttcttacctttgatagggcatggtggcttatgcatatcgaatatacctacacaaagatttctatttccagtcatcaccaatccacttgcgtttcgaaagacaccttcggatggcaccctgac

SEQ ID NO: 32422 - DNA, 265 bp, Glycine max
ctcgaattaaatatcgggagctctcgacattagtaatcctagaaacattttggcgctgaactgcaatcaggcgcataatacgcagagaggcacgagccttagcacccgcaagaatagacaaaagaatctggtgagacatttcacggggacgtcccgtagggggccaataacatcgtgggacgctccagattgaagaggggaaactcctgtcaaaataaaatggggaaaaccttccactacaaagttcgtgccacgggataaagca

SEQ ID NO: 32423 - DNA, 487 bp, Glycine max
  unsure (1)..(487): unsure at all n locations
ttaccttatcncccattgatatattctcatacattattgttattattattcttnncncnaagagaganttgtgtagctgtcattcgctcggcatcgggataaccacagcagctgcaggctgcagtgtatgtagaggatttttattatcgctctcctttgagtctcacgattaagttcgaaaaaagctcctatgcttgcacaatctcaatggtctcgataaccactaccctcctcttacaatcacacacccctcggatagaaaagaacttagtgtctcttgcttacctgctaattacattaaaaccgtatgtaagaacatcatacttatcagctctgtagaccatgtgataaaccctgaagttatcattcaagtcgtgccctcatctgagcaattaaaacaaataagccttgatccctatgacatgaaataatgtgcgcgtgggtgaatgataagaccacttcctatcaacctatatatttactatcg

SEQ ID NO: 32424 - DNA, 108 bp, Glycine max
aaaaaattattgagcagggtttttggaagttaataaaaagttatatctattgaggaaaaattaaacatctgagcagggataaaaaaaaatatggtttaaagtttattt

SEQ ID NO: 32425 - DNA, 368 bp, Glycine max
agcttgttgctgctggaattgggattcgtcctgttgtttttgttactcacaggttagtctagctgcccgagtgtacaaatgacatgcatgcagtggacattggacttctgtgaactcgccagtttacttattcatttttttatgattgacatgcatcttttgaaagtgcatgtgattcatgcttcaaagtatatttttttttattcttgcttggtttcatgtataacttaaatgtttttaggcttaaatatgtttaatccatgtaatatactcactttttttatagttatttataaatcaattaaaatagtccttgcaatattcaatattttggcatgggtccttgttacttaattttcatagcacct

SEQ ID NO: 32426 - DNA, 302 bp, Glycine max
taagggttgtttaacatgattgcttatcctgtcaatttctttgcatcttgaaccgtaatatgcacattgatgatgatgccccaaaaactaaactacttggttttcttttagagtttgtttggatggagaaatttaaaaatctgataaatttaaaatcctaaaaatttcaaatacttcaattgaaattcttttattttcaaaatattgtgtttggataaaaaaaaagctcaaattatgagggtgaaaaaaaatgaatgaaaaaaaaaagacaagatatatttggtgtactatttatacatgtt

SEQ ID NO: 32427 - DNA, 372 bp, Glycine max
agcttgtagtgaggtttggctacttttattcattggttttactaggattcaaaggtttatgttctaagagagcacaaatccttgacttatcccaatggtcttgtattatactagaagctttctcactatcttatcctttcaagttgcttttgaacttattgtaactacacaatttattcttttctttcttctttttgcttttaacataaaacttatttgttgtgtgtgctgatgcttaacctttttcttttcattggaatagacttccctcccccaaatttagagtaaatttgccttgagccatatgctctcctataatctaaacaagggattaggagatatttatttaagtttaaggttcaatttttttta

SEQ ID NO: 32428 - DNA, 337 bp, Glycine max
tgttcatatggcttgaaacaagcatcgaggcagtggtacatgaagtttaatgagtttaagagcaactcaggattcaaaagatgtgacatgaaccattgttgatatgttaagaaatatactaatagttatgttatccttgtcgtgtatgttgatgacatgttgattgcaggatctagtatggtagaaattaacaggttgaagcaacagttggcagaaaacttttaaatgaaggatcttggtccaactaaacaaatccttggtatgagaattcttagaaacatatcagaaggaattttgaagctgtctcaggagaaatatatacacaagttgcttgaca

SEQ ID NO: 32429 - DNA, 375 bp, Glycine max
agcttgtatgattatggggtacccatcacatgtggtactatgtggcggtcgagcgatggtgcacaacaagttttccacatccacaaagcgcgcataaacccaccatcccctgttgcccacctccaactgagctcacgtactcccacgtagcccataaccttcgttctctcaacaccgggtccccatcaatcctcccaagcttccccaacatcaaagtaaatcaacattcaaacagcacaaattaccacagccaagaaaacagggcaaaggcagaaaactctgcccaaaacaccaaccaaaatcacagctttgctcactgaaagaccccagtaacaattccttcgatccaattcgttaaccggtggatcgactcca

SEQ ID NO: 32430 - DNA, 342 bp, Glycine max
tcctcgtggcttctttgagaagctttctcaagaggcttctttgagaagctagatccttatctatccacacccctctattaactaaattaacttccttaaaaataattacagatgaaaataacgcaacaaataatcaaacatcaaacataattactaataatatatagatatatatatcagggtgttacaccgtgtggtgttagctggaatatggatgccaaagtggcaagcgcatccgccatctgattttcctctcggggaacatgatggaaggagatctcatcaaaggaaccagccaactccttgatataggcttggtagggtatcaacttggggtctcta

SEQ ID NO: 32431 - DNA, 361 bp, Glycine max
agcttctactgatgtggcagggcggtaccccttcggcttgttgtcctaaccgcgagccttggcctctgttcttcctttgcgagatacttttccttatgtcagattgcgtaggtttatagcctaacccaaacttcccgcggtttcctctggtgcttactaggctggttctgccgctgttgttcttgcccaaactcattccgggctcgtagccgtaccgcaacatcattttaggtcgtcacgtgaaaaataataaaatacggtcggtagactcttttcaaataaaatttgttaacacttccttttcaataacatgagtaaacataattacattcatcatctaaaactgtccaaaatatgggag

SEQ ID NO: 32432 - DNA, 344 bp, Glycine max
tgatactatataagcaccaacattggaaatttttcatgtaataaaattgtttgatgaaaataactagagaaaattaccaaccatcagcagcaacaggctaataaggagctttagttggagcatctaatcattgaagaataattggattatccttcataatagaaattgagaaacctaacaaagaatgacataatgctaattagaactgcgtaatgaaaaaaaaggcttattgttattggttgtggtaacaaacctgccatatcaagagaagtgataaatgaccctgtataagttatcgacacagtgtgttttctgcaaacattaccaaacaaagattgtgaccc

SEQ ID NO: 32433 - DNA, 376 bp, Glycine max
agcttgacccatcccgacccaaccctggcatagtcggtcagtgagaacatgtgacgtacctaagcaggcgagctcctggcagtcaacagataaaaggaaaacaagaccacagagcaaggaggcttgtggtggctggccagctgtgaattttgtgtaatatgtggattgtggcctctggtaatcgattaccaagggtgggtaatcgattacaaggcttaaaattgaagacagggggctaagatggtctctggtaatcgattaccaaggggtgtaatcgattaccaggcttgaaaacgaggtcaagaagctagggaagcctctggtaatcgattaccaaggggtgtaatcgattaccaggcttaaaaagggaaatggg

SEQ ID NO: 32434 - DNA, 342 bp, Glycine max
tcttttggaccttgaacaggcaactaactcctctttcaaaaccatgctatgtgctcgcgactggtccctttcttcctttcgcaacttgagttcactattgctaccccatagagctccgcgaaatttgttccggccatactcttccttgcgagccctcttggtctcttgttcaagggctcttgcggtaattgcattctcttcccgtaacccggcacactccttccgaacgtgtgtagcggccaacttgaacttctccttggcaagttttgcctttcctaactcgcttttgagagcttggacttcttcgtcctcttccggtgcttcaaaactctctttgctgac

SEQ ID NO: 32435 - DNA, 377 bp, Glycine max
agcttgaataggacctcagtgtgaatatttatgaccattttaatttcccgagagcttccgttgttcattttcgagcgtttctatatgtgatgcaccttaatctaacatccgtgtgaaaagttatgaccatttgaatttctcaagagctttcgttgttcaatttcgagtgtcttgatatgtgattttccagaatcatacattcgtgtgaaaagttatgaccatttgaatttctcaagagcttccgttgttcaatttcgagcttctcgacatattatgcgcccgaatcgcacatccgtatgaaaagttataactatttgaatttcgcgagagttttcgacgttaatttcgagcgtatcgatatataataagcccgaatc

SEQ ID NO: 32436 - DNA, 316 bp, Glycine max
gcttatatatatcgacacgctcgaaattaaacatcgggaactctcgagatattcaattcgtcatcatttttcacacggatgtccgattcgggcgcataatatgtcgagaggctcgaaattgaacaacggaagctcttgagaaattcaactggtataacctttcacacggatgttccaattatgccaattacatattgggacgcttcgaactgaacaacggaagcttctgacaaattcaaatggtcataacttttcactcgaatgttcaaatcaggcggatcacctatagagacgcttggaaatgaacaacggaagc

SEQ ID NO: 32437 - DNA, 343 bp, Glycine max
tgccatcttgttatgatggctaacgctctatggttctatagaatggatgggttggcaaattcttggatgggttggtaaattcctaaataggttaaggcctttgcaagccttactgaggtaagcaactacccacactcatccattattttttataaaaccctacttcctatgtagggttaatttgaatctcccctaatggttaaatcatagagcacgactatattaaggaatgtgcttaagataattgctcgagaggggaaatcgtccaaaagtaaagaatcagcatgacataacatgatagatagacatgtgcattgataattatgacttgcgaatgaagtgc

SEQ ID NO: 32438 - DNA, 328 bp, Glycine max
ccaatctgttttaaatccaagtccataaataaaataaaataaaatctagatcagataagatctagatgagatcaaatctaaataatatctatataagataagatctaattttgtagaataaaatagttttccctcttcaagtccaagcccaattctggattcaagcccaatatttcattaattcctgaaattagattaaaaacatcaaattagctgaatgggcccaaataataaaactgtctaattaatttgacaattaagactaatcagtacctaaaatggtccaaaaagggttaagaaatatgaaaaaataatggcacatcaatca

SEQ ID NO: 32439 - DNA, 356 bp, Glycine max
agcttcgagatgtaggctgtaactttacgctccttcctatggcattcaaatactagataagctttttagttgcacatgtgagagacagaggctaatcgcaggttcgtgcgtgaatctagtcaaagtttctcattatcttctgcgttagagacacgcacaaacttgtcatctcccttttcttaacctgttttgtttcctttgccagcaaaactttgtatgatacattcgacttcgaatacagattcagatctctactgttagtgctcctcaaaccaatgacgccgaggctagttaacttctggctccgttacggtatggcatcctccatattgcacccataatgcacttttttttcc

SEQ ID NO: 32440 - DNA, 245 bp, Glycine max
ttgcccaaaatgaacaattgttaagcctttacgtgttatatcaaaggaacaattattactaacttaagagaagagtgtgtcaaaccagattacaatagatatttggaataaaatatgaggcatcctctatttgcaagtcatcttgaagtgaagatacctgtaccataggcaataacacattcccatgattaagctatcttctgttatattatgatagtaagaaggcattttctacactaaactcc

SEQ ID NO: 32441 - DNA, 368 bp, Glycine max
agcttgcttatgcgggcatcgtattatatcaccataacatgatgggtttggtttaatttcattttggaacacttgccgctatctttgctcttagatccttgcgcaagattttgcctgacggtgacttgggaattgcatcaatgaagaatactcggtttattcttttgtaaaacaccacctgcacaattccacaactcattacattccttattttgtggctaagaaaggtacagtacacatcataaacctgtaaaaaacgcatattatatctgatagtgacccagacatttataattaggtgggaagaagcggtgtgggtcagttataagataaaatgagaaattatatttatacggggtgaatgagat

SEQ ID NO: 32442 - DNA, 329 bp, Glycine max
tgttgagcaatttattgtgtaccttactttttgcttgcaatccaccaaatgcaaaagagaatgccctcaccaatgtgaatagggaattcataatacaaaagagacatattattgcctgcaccgttaattatcatctcaaaacaaataagagaattacattcaatagtagttgatagtctatgcaaaagattaggaaattgtaaatttttaatattactacaaatggtttataaacagtgagctaataactttcaatactgcttaatactgaaattatctgaattactattagcttcgttttaactactccattctacaacatgatattt

SEQ ID NO: 32443 - DNA, 320 bp, Glycine max
gtccacataatatgacaagtttatatgttgtttgtgggggtaacctcatgttaaaacccccaactgatgccatcaagatagaagatatgagctctaacccttataataactcatgagatataaggattatgaagagaggcgtcaactatgtggagaaagatgatttcaaaactaaattgtgaaagtagatgcaagctctaacatttgagattgtgacactcatgaaagctcatgatcaagtcaccatcacttcacctcatatcctatcttgcgattgatgtggaattgtgcctgggctaaaagaatgcactgtttatgat

SEQ ID NO: 32444 - DNA, 314 bp, Glycine max
agcttgtctacacatgtttggtgtttggagatgttttcttgactggatgaaatggtttaagcttcattgacaacatgagaaagctcttcctcttccaaccaatagttttcaaaatgaaacctcttatctttaccagtctgataatgttggctcaccttccatagaatatggaaatgatctaacctacaagagataatgttagataaacaactatttgggaaagtatcagcttgaagataccaaagctcagtcaagcttttccaggatttcaatgggttgaacccttgctttttacccatgtataacaatagccc

SEQ ID NO: 32445 - DNA, 421 bp, Glycine max
  unsure (1)..(421): unsure at all n locations
cgagaggttttgttaagtcttcacgccccngganntnnaacgcagctgagactgcacctgggagtgcagttttgtttttatttggtaaagctattctgacccataatagttactgattaaacataagtggcaaacaaactctgccaatatatcctttcggccttgtgaactaaagtgagttcatgcacatacttcctgagaaacataaactattgagtttgaattcagaactgggcttgggctcctatacagcataaaagtgtatcagatactatcttatctagattggatctaatctagagattttgttaagtacatcatatgcgaatccatggagaaattttcacatctgcatactcatgttatcaaagttactcttggcttgccaaaagcacatttttttattggcttggactcacaa

SEQ ID NO: 32446 - DNA, 369 bp, Glycine max
agctttaaggatggaaggtttctttttatctcttgcaaggatattagtgtcattcagacaaatgttttaagaatcaaaccagtcattaaattgatcgagatgttggattaatgaattaccgatataattatatcagtggatcagtattcaaatctgtttgacttgatatatattagcaaattttttaaaatataatataattatcataatttaatcaagttgatactctaaatttagaaactaatatcaacatatgagatttacactacaagaaaaatgacctatgcctatagacacttttgcctacatgtttaatctagtgtaggtaaaacctaagaaatacttttacctacaaatatttatcgtacg

SEQ ID NO: 32447 - DNA, 174 bp, Glycine max
acctttttctaataatactgacttaccgcagcctgctattcctattgcatgcccaccttcagcaatttcaagacaaaaaaattgaacaagcagaaaaagagatcttggagaccctcatgaaaagagaggtgaacatacctctgctaaatgccatcaagcttattccaaaatatg

SEQ ID NO: 32448 - DNA, 374 bp, Glycine max
agcttcctcggggccatttcctgctaaggcaaacatttggaaagttagttttaccaagaaatgctactcttaaaacaaaaatggcatacaacctcctccaataaacacaaacatcaatgtaaatttagagcaaactcatgcacatacttccttatgaacattcactcgcacaagatattcttctacctaaaaaaatgcacctatgcgcaatcaaagcacctttgttacctagatttatttatgtgtacttccaaggtgtatttgctacctacatcacatgcacttccttggctaaatttacatacatgcatactcaaagcatcttggctaccaaaaattgcacacgtgcacattctgttatttctaatacctat

SEQ ID NO: 32449 - DNA, 346 bp, Glycine max
tgttctatcatttgatcaatttgtgggttttgaactacatcatggcctaaaccaccattttgaatgttttgcctcaaagaactggttgttcttgttcatttgctaatcctacttgaggatttccaagatcatttcaattattctggacttattgttcatttattgaaatttcatgaattattggcctattggtagggtgatttctaggaatagccaaaatatctccaattcgagttaaaatcccattcatttgttgataactttcattagtagatctcaacatgggattcaaaattgatgtcatataatcggtcaaattattgactatttcatgattgttacgatt

SEQ ID NO: 32450 - DNA, 292 bp, Glycine max
agcttaatgctcatgtatgttttgtttataatctaatgaagttccccataaaaaatggcggactaattatggatgcacgactcatgtttctaatactatgcaaagattgctgacaatccaaaccataagcctaaataagaagtacagtttcatggggaataaagtgaatgctctaatggaagtttatgtccgaatttacttttcttatctaaactagatgttactggatactcttttcatattggcgatagatgttttgcaattttaataactttaatcatatcattggtat

SEQ ID NO: 32451 - DNA, 346 bp, Glycine max
gctttatgtttttgtcatttaattatttccatccctttcagttatcaatgatttgcgtatagggattgtttacagagaatatatcgtgcaatgatttgtgtatcatttcattttttaccgatggcatttttcataatctaaacgttttggttgtagatttttctctttaaatcacttcctaattagtattgggaatggataaccctcaaggtgctactctacattttagtatcatttctttcggagttctataggtttggtgcctttcatgttttttgattgaaaagtctctatcattcttggcttattattattccttttaagctttgaagagaaagttttatga

SEQ ID NO: 32452 - DNA, 484 bp, Glycine max
  unsure (1)..(484): unsure at all n locations
agcagatcnnnattgaagccgcngtcangnccnnccnccatnggtnaanagaacancacagcangctatgcgtagcctnttctagagtcgaagcttagaagttttcttattatataganaacacaaagcgtatatggacgctgattaaaaccatgagcgaacgtatacatgttagtcaagaactacagcaattaggatctaagaatatgatatcagacactgggtcaatgctttagctcgaatccataaaacgtatacgaaacataggagtgtaccgaccatatattatttcgcaagaacagtaattcacataccgttctacactaaacgacctctacttctatgggggtgtacatatgacacttttgattaagttatacggccatctcacctgactttgtcactgtgctgctgaggaagtaagtcacttatacagaagttaatttacacattgaatttgaatcaatttcacttagcaacagtc

SEQ ID NO: 32453 - DNA, 396 bp, Glycine max
  unsure (1)..(396): unsure at all n locations
ggagaggnnattgagcgttgagnccnatgagtcctagaaaccncagcttgaacaatgaactcagggntgttatcttatcgttattataaaaactggattaagatctggaagcaattggtaaataattaggaattattattatcagtaaatcgcgtgtgaaatgtatattttataaagacgttattaaagagatggaacatgacaagaaatgatgctaacatttaaatgtaaaagttgagcaaattaacatatcgcgtttaataaagatgttattctcaaagaagataatagagcgagaacgttctgatcctgagatgatgaaaaaagttgtcattttattttacctgggttcaagtctgtatatatatattcatacgaagaatatatagtgggctt

SEQ ID NO: 32454 - DNA, 374 bp, Glycine max
  unsure (1)..(374): unsure at all n locations
gcttctcccccaattntctataaatttggggagaagtgaagtgaaaaagggttcagccccttaggcacttctctctctttcgaatttgcttagaaaaactgtttccgtgaagaaaatccaagccgaggcgcttccgtaacgtttccgtaacgtttctgtgagtgatttcgcgaaggttttcgaccgttcttcgacgttcttcattcgttcttcatcgttcttcggtcttcaacaggtaagtacctcgaattaagcttttcgattcattctatgtacctgtggtggtccacattgtgtttcgtgtattttccttctcgatttcatttactttccgtaccccttttgacgtgcttaagccattttatttaagtcat

SEQ ID NO: 32455 - DNA, 353 bp, Glycine max
tcaagcttgagatgaggaagtgttgaagggtgaaactttctgcttttattgttgaccacagagtggtacctggagatatgtcgcgggggtcaggagaccttggggacgtcaggtggggtgctattgcccaaaaccaagcttgaccaatcccgacccaacccgggcatagtcggtcagtgagaacctgtgatgtacctaagcaggcgagctcctggcagtcaacagataaaaggaaaacaagaccacaaagcaaggaggcttgtggtggctggccagctgtgaattttgtgtaatatgtggattgtggcctctggtaatcgattaccaagggggggtaatcgattacaaggctt

SEQ ID NO: 32456 - DNA, 356 bp, Glycine max
agcttgtaggattatggggttcccatcacatgtggtactaggtggcggtcaagcgatggtgcacaacaagtttttcacattcacaaagcgcgcataaacccaccatcccctgttgcccacctccatctgagctcacgtactcccacgtagcccatatactcgtttttctcaacaccgggtccccatcaatccttccaagcttccacaacatccaagcaaaacaacatttaaacagcacaagctatctcagcctagcaaaacagagcaaaggcagaaaactctgtcaaaacaccaaccaaattacaggtttttttacttaaagaccccagtaacaattccttcgattcaaattttta

SEQ ID NO: 32457 - DNA, 313 bp, Glycine max
tcatctaactggtcatacatatgaaccagtgcgggaactgcccaagcataaccaccactctgacccaggtcgcgaaaagcgtctaagtgcaccacatgaacatatgttgcactcttatttgcaaaaagaaggcaaccgaccaggtgcaacagataagcacgagctgctacaatccaccgctgagcctgacatctcatctcatagatgtctcgaacccatcccagtcgtacgtatgccccatgtgatcgtgctgtctcggctctagcctcctcagcagacacctcaagtgttatcgtcaactcttctaccggaa

SEQ ID NO: 32458 - DNA, 372 bp, Glycine max
agcttatgctgcgaaatattactatatacctcctcaacctcagcagcaaaatcaaccacagcagaacaatcatgacctctccagcaacagatacaaccctggatggaggaatcaccctaatctcagatggtctagccctcagcaacaacaacagcaacctgctccttccttacaaaatgctgctggcccaagcagaccatacattcctccaccaatccaacagcagcaacaaccccagaaacagccaatagttaaggcccctccacaaccttccctcgaataacttgtgaggcaaatgactatgcagaacatgcagtttcaacaagagaccagagctgccattcagagcttgactaattagatgggaccatt

SEQ ID NO: 32459 - DNA, 300 bp, Glycine max
gttaaaattgaatttaaacgttcaaaagactttggtaattgattaccatatatgtgtaatcgaatacacagtgcaaatgttgaattcaaattttaatagctggtggaaatcagttttggccactggtgatcgattacatcctctggtaatcgattaccagagagtaaatttgttgaaaaagactttttaacttgaatttcttggccaaacctattgctacttcaattggaattcccttcctgttgaatataccctttctaagaatctagagactggttaggatcatccatcttggaaatc

SEQ ID NO: 32460 - DNA, 372 bp, Glycine max
agctttatctaatatcataatcaaattcctgaatgaaatatctatttaaccttttggtctgttcagtctagaagcaaaagtgtgtgggcctcatcttgcagatctatgctgcttcatcaactttttgcttttgcttcaagatgtgactcacttgcttcttcatattcagaacctagtgagcaaagatttgaaaagttttttatttgcaatttaaattatcttcctttttaatctgaaatggaaaaaaaaaaaaactttatacaaagatttcagaatgcggcacatatgcttcgagtgctttcattctttcggcatgggtaagatgaaggtctttctgtccatcaaaattggcagcaagattttttagaaact

SEQ ID NO: 32461 - DNA, 379 bp, Glycine max
gcatgcaagcttgtgaataaaattctgtttctgaagaggactataatgacctgcgaagagctggtttacgcagttgtttgctcggaggcctgccggattggcttgttgcgtatgcggatcgccttgtatgagccttcatctgacaacaatggtttcatgttcatgtggttctttgcggatcaattttccctaacatatatgctatggcgaaggtgagaatcatcaattattgaaagaacaaaacttcctgaagaaattctaaagcataatccataagaaaaaagagaatatttctcaaatataattctcgaagttgaaaggagcgatgcctgaggtcacggtccctctttggccgtggggatacattcctttatacact

SEQ ID NO: 32462 - DNA, 401 bp, Glycine max
  unsure (1)..(401): unsure at all n locations
agagatggggtttgaacattgagaccattgagcactgaaaacccnaggtagtctaaaacttcgtgttgggaaacatcctgcgtctagngaatgtttaccgagtggtggttgcgattatgttgtctcttggcattaaacgcttcaagatcattccctacttcactctggcctataagcccacaggtgcccaatagctgccaaaacggatcttagaatgtgattgtgaacctgtgaactatgctccatggctagctgcttgcttgataaaaatgcattgccatgatgaccttgtaacggtgaggggtgcgagcgctgaacatctgttaattttgtgctaaacaaggaccgtggactctggtaaaanaaaacccaacgtcggggaaattatttcacgggtgtag

SEQ ID NO: 32463 - DNA, 373 bp, Glycine max
agctttgtggggggacaaggaggtttcatgggaatggcaggcagcagtaaactcagcatgcgggttattatgtttatggagtgaagaagtcttcaaactacaaaacaaagtcattggtagtggattcatcttgttggtaggccaatggctcaaggaagctcaaacggcccatattgtaatattcgttcaccttgtgatgtccatgttgaatcaagtggcctcgaaataattaagatgggaggttgaattaattattaatgagccttgactatttaaaaactaatcattcttaatgttattagattcaattatgctgttactataaagttaacagagtcctgaacagaaatagaaacttaatcaaaagtaaaag

SEQ ID NO: 32464 - DNA, 323 bp, Glycine max
  unsure (1)..(323): unsure at all n locations
ntacaaaaaatgtcactctactctaagttttttaaggatatgttcacaaggaaacacaagtatattcaccaggaaaacattggtctggaaggaaattgctttgttgtgattcaaaagatccttccacccaagcataaagaccttgggagtgtaaccattccttgttcaattggataaatcactatgggaaaggctcttattgatttgggagccattattaacttaatgttagtctccatgtgcataaggttgggagagttggagatcatgcccacttgaatgattttacaacttgctgaccgctccattaccagaccatattg

SEQ ID NO: 32465 - DNA, 317 bp, Glycine max
ttataagtgcgggtttttaagacacgaaggccaagtcgccgcgatatgcgaggatgactccccgaggagatcggatttggtacggccatgtcctcctggtttctgactaggaaattgacgagtggaggagcgcccacatgtttacgcgacaagcataatgtaaccctttgtagctttaaaactctatggttgggcctaggctttagaggttccttttgttagggcattatgtcttttgttcttgaatttataatataaagatctttcttcatctgttcatgcgcctctaccctattctcattcatttgcatgtttat

SEQ ID NO: 32466 - DNA, 288 bp, Glycine max
tgccttatactttcttaaaatgactccatagaagcaaagaaatcaatcaaatatgatctcccacaaattcggaagagggatatccacccccaatcattgtctttttcgcactatattgcatattaagactgaagttgttaaccacgcaaacatttattcaaaacataaaatatactttatatttattccattggattaaacatgagcctataaagtggaactaatatgggggcacccatttagggtgaacaaccaccaaggggatggctgtgaaccttttcggtcaaa

SEQ ID NO: 32467 - DNA, 530 bp, Glycine max
  unsure (1)..(530): unsure at all n locations
gcctgcactcgttccnctcaccntcatatcnttntcctaaccaaccattntantnnatatatcttcnctgctaaattntcntacccccaggagagnnaattgagtccctgtcttagcaccgccgcggagatacaacaagtccagccgtaggcatgcaagcgttgagaaagtnttaatgtatttttcacaaaactaacaatctgaggcactagctgcgacccataaaacaatcacttttgcagagacaataagacagctaagtgaatgaaagccttagcaatcagcacaatggttatcatatggggaggaacatcgcaaccgtttaatcgagaaaagctatacacgcacagaatcgtataatcttacaaataaggcctcatattaagctttaagggtacaaaggaaacatgacaaaatcccagaaaatgaaagaacggctgaataaaaacagtggagggagtcaacgaacgtcagatgttcaaccctcccaaggcaccaacattacatgctcttccgcaaaacacactcca

SEQ ID NO: 32468 - DNA, 299 bp, Glycine max
tcacaggtatatatggagctctaaaaaaactttctgccactcatgatgccttggacatggtggctgtcaaaagattgatctcactcactaaataccaagataattcattctgggcatcaatgctttagtagtattcctggaagcttctcgctataagttattacggacatgatggccctcgaaagttgaaaaatatcaaaatttatcaaacatagatatcacaagttttctgaaacatgggaaaaacacaagttattaagagcatttttggaaaagttgggtgataaattgctaaatgc

SEQ ID NO: 32469 - DNA, 468 bp, Glycine max
  unsure (1)..(468): unsure at all n locations
ngaatgtcacattagagccttatcagctgagcacgtgctgcactggtccnagctgataaattaccgccaggttgggtggctcttgtgcacatcaaccttgccttcatcgcacctgacaatgacacctaactatgcgaaattcataactctaactacacaaatacccaaagacattgacttcacaaatcacctgatgagaacacctacctaatgtcacctagacacagaacgtctctcaaaggtgcagaacctctctcccatcacacagcacacccgaaagcacgtggcctccacctctaaactggagaatgattcagaatcagtcagcagaacaagctcatcaagctacataatggcatactcccatgatacacagccaatntgcagctgattactgcaaatcaaatgaggcattatggcggaagatgcagactaccgtgactctattgatgacgcactatttcaaag

SEQ ID NO: 32470 - DNA, 179 bp, Glycine max
actctcagccacttatgatagtcgtcgatgctcccattactgcttccactaagctctcggtcctatcttcacactgcatcacatgccttgtgaactccttagagtacactcgctattgggtcactgaaacctcgtgcgatgaatggcgcgatgctctcgtctgatggcactcctctcat

SEQ ID NO: 32471 - DNA, 223 bp, Glycine max
  unsure (1)..(223): unsure at all n locations
catgtaatataatgttggaattgtgctatataatatatagaacannatatatgtaccttggatacaacatatgcatacacatnggaatgcccaatgtgactgcatgcataaaggcggataactaattagtgccctaaccttatcattcatatggctattggacatgtgttntgtcttacctaaggaggaaaccatatattgggaataatacaaaatacaacac

SEQ ID NO: 32472 - DNA, 287 bp, Glycine max
  unsure (1)..(287): unsure at all n locations
tctattctaaccttttgcccatttaatactgatagtcttaatgcaaataatatgcagtttatcattgngcctattnactaatntgtgtnttaattaatttaggagaatataacaattggctgaatcagattggcttgacttgaaagagcaanatttataaatttatctatctgatttatctatctagatatttttatgagatctatctgatctattagatttattcattcatttatttatacatctatcttgcttgctaatttatttattatgggctggactaaaca

SEQ ID NO: 32473 - DNA, 71 bp, Glycine max
tactcctctttactactactctaataactactactcctccttaactactaccctgaaaaactaaatcaaaa

SEQ ID NO: 32474 - DNA, 209 bp, Glycine max
  unsure (1)..(209): unsure at all n locations
tgaatcggacctccgagtgatatagtatgatccattgaattgctcaagagcttccattgggtcaattcgagcgtctcgatatattatgcgccataatccgacctgcgagtgagaattatgaccacttgaattctcgagagcttccgttgtcaatntcgagcgtctcgatatattatgtgcctgaatcggacctccgagttagaaggatg

SEQ ID NO: 32475 - DNA, 648 bp, Glycine max
  unsure (1)..(648): unsure at all n locations
aatganncanccattgnattgccnacgttgaangacnntctgtagtacnctatgantactcaagcttcctcagagcctttctgcgaaagcaaacattnngnannagtagttntaccagtgggacatctactaaaaaaaatggcatacaaccctcctccatanatacaaacatcaatgtanatntagagcaagcttatgcgcatatttccttacgaacgttcacttgcacaagacattctattaactaagaaaaatgcacccatatacaatcaaggcagcttcgttacctagaatatttacatgtacttccaaggtgtatnntgtacttacatcacacacatttncttggctanattacatacatgcatanctcaagcattttgggtaccaaanattcacatgtcacatcttggattctaatcctgtcatcacaaactcatgataatcttgatattacacataggtgctcattcatgtcttttcagatttgctactaagcgatgcaatcagatatttctttgtgctanatgattcaataaggatatatntttgatgattcttactacagcacnttatttttattataattttatttataattttatatggggaactgctccaaatttttcctccctgttgttctccaaa

SEQ ID NO: 32476 - DNA, 444 bp, Glycine max
  unsure (1)..(444): unsure at all n locations
tgagccattccatagccttaactcacttaaattggaggttggatgacacactattacctttgagtaaagacgangttgatcatcactcatataacaagattccaggtgtatcttatcaaagattgaatactacttgatatacacactacttatcaaaaactctaggactataactgagaacaactattactaaaacttcatactactaataattggtatttccccgagcaaaggtgaacctttctgggaacatctcacttaaaaaattaaaaaaaactgtaccgatttgaacagcggatcttggaaaaaaactgaatttcactctcatctcagatcagagctatgtgggaatttgaaaagaaattgccgccgtaggagcgtggggaaaaactgccccttataccaacataaatactgtaacagagggattggtgtatgaaaaaa

SEQ ID NO: 32477 - DNA, 661 bp, Glycine max
  unsure (1)..(661): unsure at all n locations
atgnnccgcagctaatgatcnaccctttgatgcgacctatagantactcangctcacangagaaggatatgcctactataggacatantggatatgcacataaagtctacttagtatagtaattggctaatcaccacaattggagatattcccattcctagacctaaaacanaatgtatagaagcagaccttgctataatggagctaaacacanaagcttgttatactctgacatgcgatttatccagaaatgagtataacaatatctataaactgaagataaccaaagagatatggaatnntgtgcttatcacctacgaaggaacataagatgtcaactgagagaaagtgcactntgacatgacactataagagcttntccatganagaaaaggaatatgtggatgaacatgttggaaaactcaagtctttataatggactgaactctaggaccacctcacaaagctacataacttaagacctaatagattccacgtgtggaaccaaacacaacatcgaaagctaaactgaaatctacatggatgactgtacgctctagtgtaatgtgacatgatatgaatagggacacatgntgtgctggcaaacttatcttgtctgtcgcatcttatacaagtgattgatatatgttatgtttctatn

SEQ ID NO: 32478 - DNA, 520 bp, Glycine max
  unsure (1)..(520): unsure at all n locations
tagncncagtgtcaccttgagtacctatgatactaagctctactgaatngcatcgnccaatatttagaactggtgtatcgatacaagattttgtatcgataccatgttctgacatgaatcaatcatgtaaagccatcttctaatgcttggtaacatactggttggatcataccatacagtttgataaaaataaaatgacttctatggtttcagtttctagatatactcttcatggtttaggtntcttaagcttactctccaatgttttgacatcatanagttataaacaaacttgctggttttttaaaaaaactgattaacttttatatattcttacaaccttaatctttgacatttttgacttgcttctttattcttgcaaagttctagtttttgttcaacattttttacaaaacaaagtttatttttttttttccttccaaagatgtaggatacactgatttttttttttctttaaaaaaaacccaattttgcttttttaaaacacacaatatttttt

SEQ ID NO: 32479 - DNA, 155 bp, Glycine max
gcagttgggtaatgtcactgtgtcctaaagcttgcagaaactcatcacataatgccccgtatctaacactaacaattcttaattgcttgtaacaaatccataatatactactaggccaacagtctacaagaactgtcaggctcctacactcactg

SEQ ID NO: 32480 - DNA, 667 bp, Glycine max
  unsure (1)..(667): unsure at all n locations
ttgcnccatgaccnaccttgangtgacacttaganactcaagcttgcnnntgntnnnagacatagtagtagcttctttgaaccaagcatgcatcatatatatcatagtatgaatacctggacttgacaaggtaacagatcctctggttgaccattgatagtgagagcatcatatacgcttggggctgctccactttccatagattgtctgaagacctcgtngacatcactcgtccaccattctcctgcatatgcatgaataagtaaataaaatggtacagtcttttcatgttcttatcaaacatatatgttctaagtattgcttagctctgaagatccgtgacgatcttgaaggttgttgtccgcacattgcgatcagaaatttctctttcatgtgtttcatggatattaagataggaacacactgacggtgactgtacacgtgacagggatatgatatatgatgcatatgttgtgttgccagggtgttaatagatatcatatgtcctttataatctaacaattcttctcgcttatattgtcaaaccacacaacatgtacatttcatgtacttcatagagtgtaacctcactctacttattacaaaccaactctaatctagtatggctctcagaacaggatttcactttataatatagatcaaactn

SEQ ID NO: 32481 - DNA, 182 bp, Glycine max
  unsure (1)..(182): unsure at all n locations
tatgactaagcgagagcatgagtccattaaggaatatgcccaaagatggagagatcttgtagcccaagtcgtaccgtcaatgacggagagggagatgatcacaattatggtagatacgttacccacgttctactatganaagcttataggctacatgccagctaactttgcggatctcgtca

SEQ ID NO: 32482 - DNA, 241 bp, Glycine max
  unsure (1)..(241): unsure at all n locations
caagataagaaatgaagaagcaacatgtcaagacttcatataagataagtatanaagattttttcanaatcaatacacagtttgtttacaaagaatttctacatttctaagtaccaaggatacttctggaatgataccagtggagaatcgatattttgacacatgcttgaaatgttcaagattgacgtccaatgattaatgttatcatacctattagtatcattcaggaattgacgtggaa

SEQ ID NO: 32483 - DNA, 527 bp, Glycine max
  unsure (1)..(527): unsure at all n locations
tgacgctatgctctatgcaggccatgatctagcttgacctagactngggaggactgtgattatatgaactgttctaaagattgtggcgagacagttggatcaccgcaatttatgacttntgtcccctacaaatcagaacaagatagatatttggctccatggaaatcgcgcaattgcttcaaaaattcatctcaagatctgaataactatactgctaggctcaagagacatcaaatgggaggcgatgatttgcatccttgatgccaataaaccagatgatgcttcgcgcacctgtgattaaaatatatttaaatagctggaagaatgatctctaaatttgtaccaaaaaaacctcatccaattcagggaacagcagtcttttctctctcatattgaactcaaaaatctaaacattcttattttattccacattataagcacttttcatcgtaaataagattcttaaacttgccccaccgctctataatgtccaggtcgacattatccttttgttactgcactcgacn

SEQ ID NO: 32484 - DNA, 601 bp, Glycine max
  unsure (1)..(601): unsure at all n locations
ncgtacgaagctgagctanggctnnctagagtataggtaanagactgagccacctcattatatgccttngcacaatcatagctatccctttcagcagatggaanaatggccaaaaataaagggaggcaaccaatgggtcctgtgttgtgatccaaaacgatctggcccccatattgtatatagtcttcatcacacaagtntcaacaatttagcacaatagattatganatctactaaatatagagataggttgaaagggtattattatgcaactacctctatatctgatgtgagactntngactatatcaggtnattgaacattaactcgcagtacggtcatgtactcagaaatcagctgaagatcattttacctatatcaatgtgataaagcttctgaaagactctcttttgcatagtgctgaatactccctgcacanaataaatcaacattcatcatantaatagatgaaatctatccatatgatcaatctactgaacatctattgaactaaaacacaaagattcatcaataatgtattaatacctgtctatacttgagggtaaacgtgatgcagctgattcggaaaagctattatgtt

SEQ ID NO: 32485 - DNA, 138 bp, Glycine max
  unsure (1)..(138): unsure at all n locations
tggataacacgaataatgtgggggttgttcatggagatatgatattggtcatcttaatgtttattttggcatgcttgatgtattatatatngcctagtcttctttaatctcaattcgtctcatcaaaaacaaagattt

SEQ ID NO: 32486 - DNA, 447 bp, Glycine max
  unsure (1)..(447): unsure at all n locations
tgagaccatggtgcncttagcaccttgagaccttaatctagctaaagagaacagaagtggtgcattatcaagaagttctctcgcatacatcctctgccagatctctctcagtaattctcatatatctccctttgttaatgacatggcatcataacactagattatgatattattagctatataacctggattaattaaacactacgttctgtcgggatgtgtgagtaacaccgttttatgtcatctccttattccactataccttataggatcaggtgttgaaaaaatactctcaagcatttcaacaaatctttgagataaaagatatacaaaatttttgggttcacattatttaaccaattaatatcgcctattgggtgntagataccacttaaaaggtcgcattttctttcatttacccttatctctattaaatgaataaaaccg

SEQ ID NO: 32487 - DNA, 197 bp, Glycine max
  unsure (1)..(197): unsure at all n locations
acttattactgttccgaggaaatctatacatttccttatagagntctctttctttattatcatgcgacatgagtatgttacttatggcctagcatgtggtaatgggagtctgttcagtgtatgaattgtatgggtcataaatagcattgtctgcattcttttttaatagaagcataggatgttaaaaacctcatttg

SEQ ID NO: 32488 - DNA, 690 bp, Glycine max
  unsure (1)..(690): unsure at all n locations
gatgcgccagccatttagacactatgtgtctcacgctcatgatgaatcaagatnngattantgataccccagatgatnacagagctcagaagtctagatcacttcatgataacannagatatgatctcaagaatcanagaatgagttcaagatngaatcaagaacacttcaagggtcataaggaaatntgatttcaagaatcaagaatcaagtntcaagaatcaagttccaagaatcanaatcaagattcaagaatcaagagaaggctcaatcaagataagtattaanaagtctttttaaaaactgagtagcacatgaatttttctcaaaaccttntatcanagagtntttactctctggtaatcgactaccagattatttgtatcaattaccagtagcanaatggttntcanaaagctttcaactgatattacaaccgttccaattgatttcanaatgntgtantcgattacaatgattntgtaatcgattaccagtgtgtttgaccgtngaattcaaatatattgtaagagcacatcctttcacacacagcttgtgtatcgatacactgattggtatcgatacagngatagtttgacaaatcaaaatgactcttcatagttcagtttctaaatatactttccatggtttagttctaaatatacctctatgtcttgcaactagagcttt

SEQ ID NO: 32489 - DNA, 367 bp, Glycine max
  unsure (1)..(367): unsure at all n locations
gtagaaattgctattctaagctcacttttgcgattcacatcccacgtggctttaaacaatatttccaataccttttaacgaaacatgttctgtnttataaatttatgaaaaatgggtaataatatatatatagctaatttttacantaatagataagtatatttttagtatcttaattaatatcatatataataatcgatactctataaatggaagctatatctaataatttatgctattaaaaatnaatcttatagactgactactataaaaagggaattgatctaaataattaatttacgtttaaaatatgattatatcatataattgatatctcataaaaattctatataattaaaatgtaaat

SEQ ID NO: 32490 - DNA, 179 bp, Glycine max
  unsure (1)..(179): unsure at all n locations
ctagctcatatacagtantctggctgacttgttatagcgttgatataactatacgttaggtagtttataaatattagttaatataatattggataagtgtcacagacaaatattttggcaccctaatctttcattgatatggataattatggaaattacatactcatgaatgatcttct

SEQ ID NO: 32491 - DNA, 122 bp, Glycine max
  unsure (1)..(122): unsure at all n locations
tatcgcccttccatatggggtcccctggccgcagaccctccctttggcggtcttgaagaccgcccctttagcctgtctgagttgctctatctgaccattcanattgactgatactgctacaa

SEQ ID NO: 32492 - DNA, 425 bp, Glycine max
  unsure (1)..(425): unsure at all n locations
aatcgcagcattagccttgatctagctaagatctaccacttctaccactgttaccaactaaagtgaatgttgtgtgttacaagctactcttactngatctgacacataggttctctaactcatactactcttatatgaactatccacagatctagaatcttcatttctctcaatactcaggtgccaacattaacaactatcctcaacgaaggaaccctgtccactaaccttggaaaccttatatcgactggaaatgaccctctccaccttttcttaaaagataatcaataaaattttaatcttaaaacttcaagaacgtttcctttactctataggcaaataaatcccacacagctcactacatattacctccatgatctaatttgcatctacaggttaccctttcccaagccgaactcgacaac

SEQ ID NO: 32493 - DNA, 131 bp, Glycine max
  unsure (1)..(131): unsure at all n locations
gtctaacatacacactagttcanacttatgaaaagggacacaatcttcatcaatatcatgcattcaatccaaaatcagtntataacacccatntcacaaanagatanaagtgtntcactgcatattcatca

SEQ ID NO: 32494 - DNA, 238 bp, Glycine max
  unsure (1)..(238): unsure at all n locations
attcggtctgacgatggatcgaggtttagtaatttaaggtacaacatanaacacaagaacatgattgataaaagaaatatatttatatgcatcaacttgttngtagaaagacccaacatttctacctactactgtcacttttactacctttcatctatagtttagcataaaggttagttaaatatctgttgaaaatatcaatcataccatgtatctcaacaattcttcatttctgaac

SEQ ID NO: 32495 - DNA, 59 bp, Glycine max
tactctaaatctatacactactcctctttatctatcattctgaagaacaactactcccc

SEQ ID NO: 32496 - DNA, 216 bp, Glycine max
  unsure (1)..(216): unsure at all n locations
tgatgatgacaatcccctgaaatcaagacagctatatacaagatgatagcacgttcacacaanccttactcctnctatcnttttgccatgtatgcctaatgataaattctaattgatttctaacccaagtcccaagttctctcaagttctcttcccctttggcaacatcaaaaagaactaagcaacacaatcaatatccaaacagagcataacaat

SEQ ID NO: 32497 - DNA, 563 bp, Glycine max
  unsure (1)..(563): unsure at all n locations
tgtcagcatagtagccttgacagccgcatcgtgcacagatgtggccantatgtagaacgtacaactctgatggttactgtaaacacagcagttaactacctgataatgccaagggatcgtcgaagatgggtaggctttaccactcagcagattaaaagaacatcgcggaagaagacggagtagaactcctgtgaacaagaggtgatgaagccacctgcccatagtngagcttataacgcgggctggagacgaagtcagtggcgcgattacgaatatatgtccgagacattgatttgtacgaccatgtctctgatttcactggaaattgcaaggaagaacgctcngcttaccaaaagctaatgaaaccttacggttaaaactctatactggctngcttagattttctttgtaggcttgtgctttattataatacaggatcttctatctggctacgtttaccatctatcattgctgttacttttattaaacgcgatcatacagtcctaggtctatctggactgcttactgacagacgataacgaatgaaacagtgtgactccgat

SEQ ID NO: 32498 - DNA, 734 bp, Glycine max
  unsure (1)..(734): unsure at all n locations
ttgtctggtgtgcgcgcgcntgttgttanatgaattcacgccaatgaacgtgtcccgtgaancnctgaanactcnnatcgnagcngaacctgtaatagaatatgaacagtagtanactttgcttctattccncnttcagagatgctatccntgaagtcaagacaagctatatacaatatgatatcgcgttcacacaaaccttactcctctatcatttgcatgatagcctaagagagattcttattgatgtctaaccctagtgccgagttctctcaaggtctctgcaccgttggcaacatctaacagaactaagcatcacattcgtatatccaacacgacacaacagtgatacatcagttaatccngacaattgtcatacctacaccacaatcaangtccatacgcattatataagtgcaagattacgataactgagcaatgcatagtcaaatacactgtcattgaccaaagtactactaatacttatatacgcagaatacttatgtataatactgatgctgacactatcatcgatgctgtgtaggtagattaaagcgagancggatgaccgagaatnttgttcaactntggtgatgcttgatgcatggcatccaacctatgtcgacntgatgtgcatgcaataatactgttacaatattagtcttacgtctctatcttgtcatagctctgtgnatgantgatattattactcgtcgatgctctgactggctggg

SEQ ID NO: 32499 - DNA, 362 bp, Glycine max
  unsure (1)..(362): unsure at all n locations
atggcatgacttcanagacgggtgatatccncaaccatagcagtctatatatgaacaaagatgggtnttataaaacctccttcataacatacacatcanaggcggntntataaaaactgtcgntaacgacataatatnagtggtattaattgcananataccaccgtatcatgtactacnatcggttttaataaccgatgtagatagagcgatgtggaagggtactntttgagtagtgaacggttgttcaagcatggntaatgagtgaatagntatctattatacatattttgaacaacatcatagtaatatcataccagagaatcaattatctatagttggatgagtatttatgagatgat

SEQ ID NO: 32500 - DNA, 137 bp, Glycine max
  unsure (1)..(137): unsure at all n locations
ctgagctcacgtactcncacgtagcccatatactcgtttctctcaacaccaggtccccatcaatcctctcaagcttccccaacatccaagtaaaacaacattccaacagcacanactatcacagccaagaaaacaga

SEQ ID NO: 32501 - DNA, 699 bp, Glycine max
  unsure (1)..(699): unsure at all n locations
nttgtgacgatgangtgaccttgnatactcagcttcttctaataatctgngtcnaatcaattctagttcatgtaacattctttgtctnntcttgtctagcatacacacttgctcaaactcatgganagaaacacannatccatcaaaatcatgcattcaattcaaaagaaagtcatacacccatttttcacaaatagaataaagtggtntactgncatgntcatcaaatcaagtcaaactgttccatatgcttcagaataagcanaccaactattcattaataanactagaagtgttataaacatanaagatatatttgactgaaactattatcattantantantaaacccatanatgccagaagtgtcatcaggaatcaaaaatcctgtgactggtcctgtgtgtcctgtgtctgaacatcctcttcatttgtcanatgtacactggaagagctagaggagatgaagtcatagctaggactggtgatgtcgggtcctctgcatctctataaaaagagtgaggggcctgctgangctgangtangggtatgtttctcttgtgcagaaggtctgaagtagcctcagggatcgctanngcgtgcacactactngttcactgtgtctctctgctnttctctatacaaatggcttacgaggtggcctacatgattatcttccatgcgaagacctggtgnggt

SEQ ID NO: 32502 - DNA, 451 bp, Glycine max
  unsure (1)..(451): unsure at all n locations
ntgtcacatgagcactaaaaccactaagaagaagcacaacaatgttcctagctcttttaattgctaccccatgagattcatctaaccaaaaaagttaacctactgttatggacaaccaagctgtatctctactgcattatcaaaagagttacatttcataactgagataccaaagatatgattgtgctatcactcaatgaacttatgtaactgaaaagtccctttgatacacatagactttcagaaacaggatattgatactgtggagactcatctatatgcttgactttgaacactcacaatcataataaaactattatccatggggaacaaaacacctcaagtaaactaattactgatactgagcacatgtatgtgacagtaaaatgggcaatgtgtgcgcatctatctgctgccattttacagtgttgaatatgtatgttctttcatg

SEQ ID NO: 32503 - DNA, 73 bp, Glycine max
gtcatattgctatatactaagaagagagcaaagctttcttactactcttaggaccatattatttactttactt

SEQ ID NO: 32504 - DNA, 578 bp, Glycine max
  unsure (1)..(578): unsure at all n locations
ttcgnccatgatgnccatgatgccnctgaggacctccanactangcnnttncccntgttgtaatctctaactctatctacagagatatntcatatataaaccgacaagnagtcagatatattgatagctaatatagactctttatataaaatctaataaaaatttctaaataaaacgcactatgtaatacattagtgatttaagtctcttaaaaaaatacatagagccaaacattcctattacattctatgtttacaattaacacttgtgcattagtttgacaggtgtaccaatagggatggttcttggagacatgaggacgttggactctactcttacctaggatcatttggtattacgacacaataaaaaggaatattgctcccgctatacactaaacctttctctttggtgtaataccagatttctcagtgcgattgatacactatcgcgctatcaatttactatttgcccctcttataaaataactatagagcacttgtagccccttcgggaactctgtggaaattatattccagattttttttttcgcattaaaaactatgggtgtttacttt

SEQ ID NO: 32505 - DNA, 644 bp, Glycine max
  unsure (1)..(644): unsure at all n locations
cattgaccccgtttgatgtgccccttnantactcagcctctagaagannnnnatgatgatcactgctactgatcgtggcgtctcatgangattctctnggaaagacatctnntaatcctgcataatggttgacactacgagatacatatatagctaactgattagaattatcactctctctctttcgtgtatcacactntacctcgagtgtatcactcctctttttcatattccgttgtggagcctcactattttctttctcatgatctctccttcctctcaatctgatctgagcatcacatgcctctctaggagatagacgattaagagtanaccaggangattcgctattcacctgtacggctctctttcgtacggatcacaaactgtgcattagattagccacgcgccagatatatgcgctgaattctccagtcatgatatacaccaccatgcaccattcttgcatggtacagaacaagaattctgcgtaatgaacaaataaaattcagcactcccactctctccgtgtattgtcttgatggaacacacggtgatgcctaatatagcttggtgagattcacttgcataccccactcctctaatctgatgaccattaacacagctataaaataatggagacg

SEQ ID NO: 32506 - DNA, 674 bp, Glycine max
  unsure (1)..(674): unsure at all n locations
tgatgtgcagcattagtaacttgattctcagctaggatatcttgtcaattgataaanttcggccantgcttctagttggtctctgagtgcatacttgattgtcganggaattaatctcaccgctttcatgtcgtgtacttggagatcaatgaganatgctgctgaaacttcgtcaaattaacataagagacttaaccttgacgtatgaatctaccatcaaaatatgtcttctcgaagggatanggtcacatcattaataaaaaaagtgagatttcatgcatcgaataactttgtgagtatcacagagttattatttatatggatcgacgttgtatgaacgaaagtcgcatgagccttgcatatgatgatggcgtgggagaagtcttgcaattngcttctnaaagaagtcaaccacgtgaggacgaaaaatattcttgtccttgtataaatngtttgacaagagacgacanatactcgttacatacnggacatctgtatgtgatggatatgtaaantatacacatgatatgctgggaatgaagactgccagtggtccactcaactattgtgttgaatggtatcgtgtgagcgcactaggcangccctgagccttgatgccctgacnaagcaacttacagccaccntctaaacatgttggtattataccgcatgtn

SEQ ID NO: 32507 - DNA, 549 bp, Glycine max
  unsure (1)..(549): unsure at all n locations
atgtcagcatgatgtctcgatgctcagctctgtctgaattccgatgctcatataccactgcccacagacatccgagtatttgtattgtctgatatactacgggacccaattggacatgcaagcacannagtattgtcgnttgactnttctagagctttattctgaanttcgagcatctcatatactacggacacaatcgacatccgagtaaaagtatggtcgtttgataggccaagagcttctgtctgaattcaagcgctngattactacggacacanatgacatctgagaaaaagtatgtggttgatttgacagactttgtctgatacacgccgattctacgaccatcgactcaggaaagttatgtgattctcactccatcaatcacgttgatttagaactataacttgtaactttgcttgatgccaactttgttatacaacctaatttacgatatcgactcatataagatgcgtgattactaacttgttaatttgcgctgttaatgaccacgcaccaaaaagttgcgtgatttagactcttgatgcn

SEQ ID NO: 32508 - DNA, 422 bp, Glycine max
  unsure (1)..(422): unsure at all n locations
atgacacttgtactatgaggcgnaacccctgggaccgccnanncgacatcgcatcactaaccttagtctgcatcaggaagaacacgcagcgctgtccggtcatgaattaaaatgtggattgattcaccatagcggacatgaacgggacttattagcatagcaagagggaccgagagggacctgtaaaaacggatgtaggactgggggaacgtgatatcttcattaggatgatgaggtcactagataaggttgaactgtatgatctcacattggtgttgacatgactactacaagcatgaaccatgtggaagatacaatgctctgcatctctcaataaagttaaaatttgctcctatagtcgattgattcaaaattattgcgatccaaaagtttcttgaggtgaaagattttcttcttttcat

SEQ ID NO: 32509 - DNA, 136 bp, Glycine max
  unsure (1)..(136): unsure at all n locations
gcacttctctctctctcgaaantgctgaggannaatatntccgtgananaaatccaagccgaggcgcttnccgtaacgtttcgtgagtaatacacgaagatctcgaccgttctcagaattcatcgtcgtctttcgt

SEQ ID NO: 32510 - DNA, 564 bp, Glycine max
  unsure (1)..(564): unsure at all n locations
cgtcaacgnctagacatgatacccgacggtgaggttaggttaaggataacanggattgctcacattatntccatgacacanatgcataactgatgtattggaaactttatgcaaaactggtcatgcatgcacctatgtggacactcaagtgtcaaatttttatggtcatgtgatgctanggctcatgattcattgctctattctaatcacccaatatttcaaaattgttctttatcaatagtgcattctccgagtccattcaggcgttcgggaaattcacagattcaccttaagtgttacactttttcaaaactagtatgatcatgaattctttcaaaaaagtggaaccactttttcaaagctgttgttatcacttgcaactatatcattggtattcttttctgttgatttctttcccttctttcatagatttgcactaactgtcatttttggagtttttgtatacagctatcaagacttgtctaactcatttatgtgtagattttgctaactcaattagttctccctactcatttattccaagggtttttataccactcagtg

SEQ ID NO: 32511 - DNA, 598 bp, Glycine max
  unsure (1)..(598): unsure at all n locations
ttggnnccactntgtgnngcgtgatgtaccttgangtgaccttagatactaagcttgtgcnncctnnctcatagtttagttattgagaaaacaattgagtggtgtatctgtataaantcccacaccgattaatgaaaagttcttcaatttacgagaacagatactcaggtatctcctgttaaattacatagtcaaattcagacccttatgctcctgacttcttgcaaagaatatatatacgaataaagaaataagaactatatgaatatactgaagtaaattattattaacacatgacaaatatactcttaaactgcttcttgaccatggacccaatgacgaatgaactttgaatacttgctatgacagttcttcgagaatataatgtaacatagatgataccggcattcagtctctaactttgaaataatggacttggaattacattctataaagatttaaggtttatttctgaaggtccatcaattatgtgtcttctcgatagataacaagatcattgattactattctgtaggatatgtgatcaccatcattttcgaaatcatcctgcgtataattacattatgaacctcttgcg

SEQ ID NO: 32512 - DNA, 197 bp, Glycine max
aaaaaggatgaccttccctgaagttgttaaaattataaattatatatgatttatccttataaattggagggaaggtgccatgagacactttatcatatatgtgaatgacactattatccactatcatttctatgctcggttatacccatgtatataaaatacttgttgataaaaacattaaagttataaagttattc

SEQ ID NO: 32513 - DNA, 78 bp, Glycine max
cttcactttgtagaagcaagcttcatgatgatgaatcaagttgattcaagtagttttgatgatgacaaagatgatgac

SEQ ID NO: 32514 - DNA, 687 bp, Glycine max
  unsure (1)..(687): unsure at all n locations
gttaaacagcattgatatctctgatactcagctcgacacatccnacccaacccaggcatttcantcnntnanactgtgatgtacctatatcatgcgagctctgtttgntcaacagataaagaaacanagaccacanagcanggaggcttgtggtggctggcagctgtgaatttgtgtgatatatggtcgtggctctggaatcgataccaaggtgggaatcgatacaaggcttanaaatgaagacagaaggctaagatggtctctggtaatcgantaccaaggggtgtaatcgattaccanngcttgaaacgaagtcaggaagctaagggagcctctgggtaatcgataccagtctgtgtaatcgattacacagaggaatgggcactgcgaatcgattaccangtatgtgtaatcgattacatnagtgcattntgcatatntcatgttctgaggctgtgtaattcgagttagcctcttgtaatcgataccaagtctgngtatcgataccagagatgaaagccttagatacccctttaatacatgtagtggtatgagacaaatgtcngctgcatattagattctttgaagagctacnctctctttcttctgtaatcgtgatgctggcaactatcttatcactanagatgaggcctaatgagctggagacctnangcacacatgtgcatt

SEQ ID NO: 32515 - DNA, 85 bp, Glycine max
agttaattacactttagccaatattatttacttaattatatggcctcctcagactaaactgaacctttttatcattaaactataa

SEQ ID NO: 32516 - DNA, 610 bp, Glycine max
  unsure (1)..(610): unsure at all n locations
nttaacnccccttaaactcactnatgatgcgccctatganacctcngctngctcgcacagtntgtgctcgancanacgctctgcatgactctgttcaatcatctatgttttcattacaatatncgagnaacccctngaaagtacttaatcattgcatcatcagaccatcgctctgtatttattntctgattgaggattcntaccagtcttatgtggtggcatacagatggaatagatacattctcggtttatgttatgttaatgatctatgactgaatngtnntatccattaanagccactacgctcacaacaaataactctaaatattnaggccataacgcattgcccacaccattatatttatttaattccatgtaactgtattgtatatgaactgtattggttaaacacattttataaagaaagtcccacccttatgtcactgatcatatctgctccataacacctaagatacgctactttattntcttatgacattccnaatagatgaaatgtgtgcatctgacattatatcatcgattatccggtgttaggtttcaaacatctacaactaactctgttgtttaactttctatgtggcagatgttn

SEQ ID NO: 32517 - DNA, 198 bp, Glycine max
cctgtcggcctattcaagtcttctaaatgagtagagatataaactaatcactataacatattgcttcatatatatatgatgataaaaactatcaataatatattacatttataaatatagtattttcattatatactatatataagatgatataatcttaataatatatgaccattattcataaatttattattatat

SEQ ID NO: 32518 - DNA, 386 bp, Glycine max
  unsure (1)..(386): unsure at all n locations
atataagtgatcatgattaataagatatgaacgacagaaagaagaagatttccttaaattgttaactgccattctaacaaattncataataaaaaattaacatcatttgataatacaaacatgcaatcaatggtgaaatatttcaataatagacttaagttaagtctagttacatatatacattaatcttgaagaaatttgtatcataacatctatccaatgacaacaatattcataaaaactataacatttataattaaacctcatcttttatagaaaataccttattatttatatacgtgtctataacaataaagataaattattatttcctgtgttaataattgcaaacttactattatactatagtctacacacactatacc

SEQ ID NO: 32519 - DNA, 621 bp, Glycine max
  unsure (1)..(621): unsure at all n locations
ttgccccagtgaccaccatgangtgaccttganactcagctnncatttaanttcaagtctcgatatagtacctgactcatncggacatccatgtataaagntatgggcantncaacttactcagggcttcagatcttaatattgagcgtctcgatatatacatgatcatcagacatgcagaaagagtattgcgttagaagttgtacgagcttccgctctcaatttggagcatctatcgatatatgagacactctgtgcggcatccagaagaagtattgtcggagaatttctaagacgtccgtttgaatttggagcggctcgtatatactggactgcaaacgacaattcggtacaatganatatgcntctaaactatgactagagcttgtatgcacaattatgagcgtcttgtatcttacccgatcattcctcatacgacaaatagtttgtagtggatatccactactgctgtccaatagagcggcgattatgctgataactgaatctggtacagattgagtaattttccacatagttaattcggctcatatatacgacccatccatcagggaatttgcctgaatgacaactctttgaatgcgatcccaatcaacttgcgtt

SEQ ID NO: 32520 - DNA, 294 bp, Glycine max
agcttgagctcggcttgagttgaatacgtaaagcttgagttgacataggctttttttaaggctctgctcgacttacataaaagtctgacttacgagcctatttaaaagcttgcttaaagacgtcttttattaattaattattttaaaacctagtgaaatactaactaaaaaaagaaacttataaaatttcgtataaataatgtacaaatctaaaaataattgataaacaaaattatattgaattcaagtcgttaaagcacaaagtatataaaaaaaataaaaatagcataatat

SEQ ID NO: 32521 - DNA, 337 bp, Glycine max
  unsure (1)..(337): unsure at all n locations
ntgatggtgtcgagaagaaatcacatgttcgtcaacatttaaaagatgtagaatgtgaatgtntggatacatgattttgatgatgttcaacaaaaatttaatatagctgcttcaaatgataagcattcgcttcaagaataattcaagattgcttctacaaacaaagcctagtttcaagattcactaaagaccaaatcttgccttaatacaaagtgctttcaagacatgcaatgctctggtaatcgattaccaatacatgtaattgatttccagaatacagggttgagaaatatctgaagaaaaatgctttgaattcgaattatcaacatggaatcta

SEQ ID NO: 32522 - DNA, 291 bp, Glycine max
agcttggttttggctcgttcttattttctagttcctggtattttggcatttacatggggagagcttgcattatctcaacgaaattgggcagaagcagaacgttacccatcacaaaatggtttgtatatgcgcgcacaagatgggtataattacatgtttacatttacattcataatagttgaaggacttatcttattaatgagggctctctatctaacaatattattctctcctagcattgtgatggcaccatttgctgattgttttggaccaaactttaggaaactgtgg

SEQ ID NO: 32523 - DNA, 283 bp, Glycine max
agcttgtcgccgttcgagacctctttcgggtttaggcctttggttatggggagaaggagcaacggtgctgttgttttcgcttctgaaacctgcgcgcttgacctaattgaagcgacttatgaaagggaggtttaccctggtgaggttcttgtggtggataaaaacggtattcagagtctctgcctcatgtctcatcctcaaccaaaacaatgcatttttgaacatatttactttgcacttcccaattcggttgtttttgggaggtctgtgtatgagtctcgta

SEQ ID NO: 32524 - DNA, 375 bp, Glycine max
tctaagtatagtttattataacaagttctttatactttgctcctatatattttattcaaatttatgacataagttattatattactgaacttatagaatacacacttcactaagttgtttaaccctaatacaccggaagttcttatacatttttgaatagtatatacgtgaaagaaaaaaaaatagtagttttatgtgctaactttctcatttatatacaagatgaaatgaacataccagcaatgttccctcgaggctgtgagtaaggggtgttacatccagcgctattaagcatggaatctgcaccttatgcatatgcatggatacaaatacagtatctaacaattatctattgtctaaatcttaaaatactat

SEQ ID NO: 32525 - DNA, 286 bp, Glycine max
agctgtattcagatccacaataaatgatgaatggatttggaaaccagaacctagtggacaatattcggtaagaactgcctataacatgttgaaaggagtggatgttgaggaggataacatgtgggtgtttgaggagctatggaagatacgagttccacctaaattactatttttgcatggaggttattaaaggagaggctacaaacaaagacaaacttgaggaggagaagggtgacaatcaatgacacattatgcccattctgtgggaattttgaggagaatgaag

SEQ ID NO: 32526 - DNA, 430 bp, Glycine max
ctcaactatgacctttgtcacttgagatccaaagaaaaatcattctattcttgtgatataaataaatcttgtgatattcaatcatcactatcataataatgtaggaatgtaacaaaatttggtggtattctaaaactgttgagactatctagcaatttcacccaatattatgacattttagtataatatataatgtcacacctatctagcaatttcacccaaactgttgaaacttttctaaactcccattctttctttttcagtgaatagttaaacttttctttatcccatcacatataattccttctctcttattgaaggtggtccacacattggtatacttagtcatcttttctttcaattctacatagcttctctatgataggctaaaagatcttgctagtttgtcttcctctctttgctttatcaa

SEQ ID NO: 32527 - DNA, 287 bp, Glycine max
agcttatcatttaagattttcacttaccttttatgtgtctcactttcttcaaaaagatcatttttactattttccaaatcttcgtaatctttttgtagaaaaacatggtttgtctgaagatcatacctttcttcattaagctaatcttgcaactctttaagtactttcaacttattttgaactacctcaatttttgtttctaaatcatgaaagttctataataagatatccttttctttggatagttgttcattttcaagttggagcaggacttcggaattttgtcc

SEQ ID NO: 32528 - DNA, 406 bp, Glycine max
tgtacacctctgtttctctacctttcatcacaaaccctgttggttgattgacaaaaacttcttcttctagtgagccattaagaaatgcagattttacatccatttggtgtacttcccagcaattgaagctagccattgctattacaagtttcactgtttccaacctagcaacaggggcaaatacttcatcataaaccagaccttgcttttgcaaaaatccctttgcaaccagtctggctttgaactttgttacttctcctctaggattcaacttagttttgtagacccattttactgctatggctttctttcctattagtagctttgtgagactccatgtcttgtttctctcaataaacctcaactcttcttccattgcttcaacccaatgtgagtgcttcaaagc

SEQ ID NO: 32529 - DNA, 154 bp, Glycine max
atcacagactttatgccaacgatcattattcacaattagccctccactcacagagtaaggtcacactctcaacggattttggttcaagcttttcttttacaatcagcctgtctagtgactaactattctattataagttcgcactctcgcaatt

SEQ ID NO: 32530 - DNA, 227 bp, Glycine max
aactcagctattagagctttatccttttattctatttgaggttactcatagtcgctcaagcccattgcaggttttgaaacactcagcgttatgatatatgtcacttaattgaagccaatggccttgcgataggtatttgggttttgttggagaaaaaatcagggactttcctatcactaacgtccatacttttcccaagccctctacagttcatatacttaggaatt

SEQ ID NO: 32531 - DNA, 291 bp, Glycine max
agctttgcacttgcaaatgattcattcccatagaacctcatcatacaaaggaaaagaaagagagagagagaacttatccacgttcccacgtggcactaatgagtgattcacatcatgtggcggtatgttaatttccataacttgcttactctcgcttagtaatttttttctcttcatcaatatgtttttaaagtctctcacacacacaagaaaaaattcttgtaacaatattttaattactaggaatgctgcatatactcaagtcactatcgtattcactaactttatgtt

SEQ ID NO: 32532 - DNA, 369 bp, Glycine max
tctgcatgtcaagagatttctagagagagaaaggtccatgttccagagagttttgagattttgttgtgtgaagacctgcagagaaccgagcttgaagaggaagttgtcctgagaccacttgtatttcttcaatccttcatttttctcttctctttgttgtaaagaaagcttcccaattatggagagctaaatcctctgttggtccttccttgtaggtacttgaagtaaatacctgtagatctatttaatgatgttttgtgtgttcactgtgctatcagaacttcattctaccatgctttttccttgatcacgtacatgcatgtgtcattaggatcattcaatagtggaaactggtctgattcttagaac

SEQ ID NO: 32533 - DNA, 283 bp, Glycine max
agcttgcattaaaaattaatatacatatattactacgaaaaattagttttgataaataaaaaataatactaaaaaattaaaagaatttaactcaattgattgagtaaagtgcatgagttattataaatttttgatacctatccttaatatttatgaatgaaaaaaatatgtaattacatatttaacatccaacttttattattttgtgaataatatcctttaaattttatttttatgaattttattatctaaattttttatttttcattcattttactgatgt

SEQ ID NO: 32534 - DNA, 402 bp, Glycine max
tataaatcattaaaattgattagttttgttatctatattataatttgatttcacgtgcatcaaaactttgttttgttttaaaaaattatccattaggaaacaattgtgtgtaatatcgcattatttctacaatatgtcgtttcaaatgatttctttataattataaagctgaagttttccgacccaagaattaaaggtctccctagtgaaatatcattttaacttacgaaataatttgggtcagtttatttgttaaaaagtagagaccattgttatctataaaagatgaattgatgtaaataaaaagactaaattgatcgatttttttattgtttaacaacaaaattggtaattttcattcttccacggaatatcaatcttaaatcttggaagggccaaaac

SEQ ID NO: 32535 - DNA, 284 bp, Glycine max
agcattaataatgctattttttctatttataccgacacaaacgtattcaattcttcaggtggttcgagatttgaagttatgtcaaataaaaagattaaaataagaaatggtccgtgttaaatggattaatattagtgtttaaactcaactttgaaatatttttagcctaattggtaaaacaaaaacaaaaaatctgtacccaaaaaaacaaaataatctaatcttcaaaaaataataactatcgctaattattatcattattttcatcattgataagattaatt

SEQ ID NO: 32536 - DNA, 415 bp, Glycine max
tcttcaagctagaactaatgtaaatgctttaatttcatttctctattgacataataatataaatgaaattcggaaaacttgttttaaattgattcaactcattctttctttctttttcttcagattagcgtaagggtcctcttctcttctatcttgatatttgttagatcttggacttttcttttcccaagttctctgatttatgcacctacagatgaatggctcaaaggaaaaccgcgtgcctcctctttcgctcatacctttttcgaatcttcaacaaggttggtttgttattttttattcttttcatttgcctctcgacaacatcagccataatattatgcctcattttcatgtcaagaaactacatctttccaaatcaatctactgtcttatattttacacatcataatat

SEQ ID NO: 32537 - DNA, 284 bp, Glycine max
agctttaagccaaaattaattattggacaaggttgagaaatggatgtcagcatgtgaagaagagagttggcttgaagactataatagggtacttataatcaaccatcttcattctatatttgagtctctaatatcttgttgcatgcttacatcttaggtggaaaagttgaatcacttgagaatctaactttatttctattaataacccctaattctaggtagaaattgaccatgatagtcatttgcactccaatttatgcaaaccaatgtacatctttaatgta

SEQ ID NO: 32538 - DNA, 423 bp, Glycine max
  unsure (1)..(423): unsure at all n locations
aatctaagcttaaaatatcgtcaaacctcagccttgcaatgctgttggncacaatgacctgaagttcaggcgaaacaccacagattttggtgagacctcctgggccacctcttctcttcaccttagtttgagtactacaagacacaagaaaaacagcattactccaatcccaattgcaacaaaaaaagcaaatttaacagacacagacataatattctgtttataaattactaaacaaccaagtttgaattcaaacacatgcagactcattgtcccttattataccatgcagcgatcttgagtaacatgctgctgacatatgcatatgttgttaaagcctaatcttctgccaaaggatgtttggatccaaaaatcattctctgtcttcatttctatttctacaaataatcacaataaatgccc

SEQ ID NO: 32539 - DNA, 280 bp, Glycine max
agctttcatttttttccttttcatataatcagcacacagcagaaagctaactgaaccacccatgctatcttccaagaccccatacccacgaaatttaagagagaaagaagtgcacccaaacctgaaatttataagtcccactcgtaggcacacacttcacgaccccgaaaatgctcttctttcgcgatttggagcataaatgagttccaaaggatggagctttgttggggtgtcaatggaaaatgagggaggagaaaatggcaacgttatggaaagagaa

SEQ ID NO: 32540 - DNA, 415 bp, Glycine max
  unsure (1)..(415): unsure at all n locations
taaatggcctaactctctaaaaactctccctagtggagtcaccaactgtcgcaacctacccttcgcgggagggcgacgcgtgactcgcgggagcgtgttccaagaaaggaatacgcgcggagtcgccatgaacgtttatttgaggaaaacgtcggaaaaacttgaaaagactgatctacgaacttttagtgaaaggttcgggagttgtatttacgtacggggaaggtattagcaccccacacgttcgtcacaagggacgacaacctttaatcaaatgtgaaaatatgacttcaatttatattcttttcccttnttatgttcttatatctttcttatgcctttttataattttatctttttgtggtcganaaggatctagaacgtgtacttcaggatataccccaaggagagaaag

SEQ ID NO: 32541 - DNA, 247 bp, Glycine max
agcttgttgttttttaaaatttttatcttaaagtaattcaaacgattatttgttattagatgatcgtgtaaaaatatttttcattattagtgcataagtattatactctaaaaaaccctttttctatttaaatataaaacaagactagatttgaattgacaattgggattcctcttatttttgttgacaatctaaatacaaatcaacatgcattatagtgcaaaaagagaataaagagaaagagtgc

SEQ ID NO: 32542 - DNA, 409 bp, Glycine max
ttgaagttactgtatatggtgttaagccttggtgtcataaattattacatggtccgacaccaccttgtatttataatatcgactaatctttacctgacatatattctattttccagaatttctttttaataaaaactgaatacctgacaaaaattgattggaaccaaattaattttagatgatacaataattataataatttctccggtgtacattattttacaatctggcaggatgagaaataaggctagaggacggggcagcattgatgtttcatagatggagtaaatagtgtacagcacagtctcagttaggtgctatacttcaaatatgcaaatacaaactaagtcttttctaatactgagataagtggtgttaggaggcaagctaatttcgtagctcacacttt

SEQ ID NO: 32543 - DNA, 294 bp, Glycine max
agctttgcggatttggtcttctccagtgaaaggatcgaagtggatctgaaaagaggcaaatttaatcatcctgcttagacgactgagaaaactggggcaaatgaagagggtgagaaagagggagaaacccatgctgtgactgccattcctatacggccaagtttcccaccaacccaacaatatctttactcagccaataacaaactttctccttacccaccacccagttatccacaaaggccatccctaaatcaaccacaaagcctgtctaccgcacttccaatgacgaagacc

SEQ ID NO: 32544 - DNA, 421 bp, Glycine max
gatgctattgtcctacaacagatgttgcgcatagggcattgaatgctggactgcagcaatctcaaataaagatttttggtctacctgtccgaccttcctttgttaagcctgtccagccaaaggtatgtaatattcttatagccattacttgaatttattcgcaaatttacttacaattctggaattggaatacaacatgatgtgctatatatattattcccaaacaaatgtcagtggattgtttgaatttatgctgtaggatgaactaaggagagaattaggaatggatgaggatcttcctgctgtattattgatggggggaggtgaaggtatggggcccattgatgctactgctctggcacttggagattcattatatgacgagaatattgtggctcccgtacgtcagatccttgagatc

SEQ ID NO: 32545 - DNA, 292 bp, Glycine max
agcttataagaacaaaattgtctatatcatttcctaatatgcatctgaattaggaagcatcaacaagaatcaagccaaggctattgtgcaagcaatcaatggggcaaaacacaccaaaagattatgatgatggatggctcaaattctcacaaaggtaaacttatcactttcaaattgagctttcaaaactatcatgacatgtagaggaaacacaaggatttcaaatcataaaatgtcaagagacttttattttcagaacaattacccattacttgaacatatcctataattc

SEQ ID NO: 32546 - DNA, 505 bp, Glycine max
  unsure (1)..(505): unsure at all n locations
cgtatggtgncgnngttgataccctttgatacggtgacactatccgaaacccatgcatgccaccaccgcgcgccccgtcgagctcagtngctttctgtcaaaagcattttatccttctggantgaatgcctctggagcggcccaaggtgggatctaggtctgcttattatgcaccacacctctttgttacatataatagcatctccaccttctatatccttttgtgagtactttcttcgtaacgtttcgaaactttacgaatttcgtaacgatacttattttcctctcccaagggtacgaatccttacggatgatgtatttacctttttttagctctcaaagaagttacggaaactcacggattgtgcagaaacacttctttagatatccaccacattacaaattttatggatggtgcgagctgctttcctttgtgtgtgaaaccactcgggacttcttcatggatggctccagaataataccggctgaatcaggtttacaatgc

SEQ ID NO: 32547 - DNA, 285 bp, Glycine max
agctttgcggattcggtcttttttggcgaaatgattgaagtgggtctgaaaagaggaaaatttaatcatcctgcttagacgaatgagaaaactggggcaaatgaagagggtgagaatgaaggagaaacccatgctgcgactgtcattcctaaatagaaaatcccctaccagctcaacaaacatcattactcagccaatatcgaaccttctcattacccaccacccagtcatccacaaaggtcatccctaaaatcaaccacaaagcctacctaccacacttccaat

SEQ ID NO: 32548 - DNA, 210 bp, Glycine max
cttcttgaaacattcagaccagcaattcaactttttatccccaccgaattaccactgagatctactgtgggtatgcgacgactttcgaatcgcaacgcccaattcatgacaccagaatactaaacacattctgattcattcaaggaaaagcagctgatattttgtgataaaggagactcaactaatattcaggtatcggtcacaccaacc

SEQ ID NO: 32549 - DNA, 288 bp, Glycine max
agcttgtaggattatggggtacccatcacatgtggtactaggtggcggtcgggcgatggtgcacaacaagtttttccacatccacaatgcgcgcataaacccaccatcccctgttgcccacctccaactgagctcgcgtactcccacgtagcccatatcctcgtttctctcaacaccgggtccccatcaatcctctcaagcttccacaacatccaagcaaaacaacattcaaacagcacaagctatcacagccaagcaaaacagagcaaaggcagaaaactctgctca

SEQ ID NO: 32550 - DNA, 424 bp, Glycine max
gtccattctcttggaagttcatcattggattcgacttcttctagagtatcttcattgcgtcctttatcatttcctttggaattttgttcatgaatgttcatatgttctaaagaatctgcaatgtcatctagcatattctttcttgacaatatatcattacattcatcaaaggtaacatgaatggattcctcaatattcatagttctcttattatatatcctatatgctttgctttgtaatgaatatccaagaaaaatgccttcatcagattttgcatcgaattttcctagattatctttaccattattaagtacaaagcacttgcaaccaaaaacatgttgatgagagatattacgttttctatcattaaataactcatatggggttttctttaaaataggtcttatcaaagccctatacatga

SEQ ID NO: 32551 - DNA, 288 bp, Glycine max
agcttgtaaagcattgatttttttcagcttccctcatcatgtggctgatgatgtttacaatttaatgatcctttgctaccctacaatgagacacacacagatacacaaacacacacacatagagacaaacacacgcagacaaaaacacaaacacacacacacacacacacacacagagtcacacacacataaagagacagacaaacacactgagccacagacacacacagagacccacacacaaagacacacacactaagtcacagacacacacatacacaaacacac

SEQ ID NO: 32552 - DNA, 254 bp, Glycine max
tggagatatgccgtgggggtcatgagaccttggcgacgttctgtggagtgctattgtccaaaaccaaactggacctatcccgtcccaagccgggcatattccgtcactgagaacctgtgatgtacctaaacaggcgagctcctgccagtgctcatcatatatgatcacagaccacccagcctggaggcttgtagtggctgaccatctgcgaatcttgtgtgatatatggggtatggcctctggcaatcgattac

SEQ ID NO: 32553 - DNA, 291 bp, Glycine max
agcttgttttggcaaattctgtgccagcagtgacagacaagctttacgcatccagttttgcaaacacgattggcgaggacaagatcttcctcactgttgcacaggctgttgcatattgttctccaaaggtggttgaggacccatgaaaaatatgaatttgctgagagaaaaaaatgggacacgtagatgaaatgtcgagggaatagaaatagagacccgaagtgattttttatccatttacaccttctctctccataaaattctcaaaatatattactttacattttatat

SEQ ID NO: 32554 - DNA, 327 bp, Glycine max
ttaatggagtgtggaaccggccactggcgtactggcttctacttggccgccactggttcaactcctttcttggaaaccatgtgcccgatgtactccacttgttgttgtgcgaaagaacatttggataatttgagaacaaaatgattatccaaaaggacctgaaaagcttgttccacatgtgctacatgctcctcaattgttgcgctgtagatcagtatatcgctgaagaagacgatcatgaaacgacgaaggaacggtctgaagatcatgttcatgggtgcctgaaacgatgagggagcattgcataaaccaaaaggcgttaccttg

SEQ ID NO: 32555 - DNA, 290 bp, Glycine max
agctttactttaaataaaacactaaatttgttaaaattaagaaatacaccatataacacatgatttctaattaccaaaaggttaatttaatttcaatcatataatgatggtagctaaataaagactcgatctagaaggggaaactattagaggacaatggtgagggtgaaactccacgtaaggaattaatgatcgacgatgtccaaatgtagcatgctagtggggactaaatgagtaacaattgcacatataaggatttatttataaatattttaattataagtatcaaa

SEQ ID NO: 32556 - DNA, 211 bp, Glycine max
tgtacgccttggatcttcttcatcaatggaatcctctgtttcttgaattttgatggcagcggaatggagaaggagaaagatgattggagacgccacttcaaggagaagatgagtttataagaagctcaccaccatgggaagccatggataagaacttgaatgtaggataaaattaatgggggaagatggagaaaaagaacaccaaatttat

SEQ ID NO: 32557 - DNA, 234 bp, Glycine max
agcttaagggacttctcatgtatgaatttctctactaatgttattagaaaatatcaacaagttaggggtgaagtgacaagtcataaacaccattgtactacaatgacccaaatgcaatgtcttaatgcacataaatgagagacaaaatgaaaaataaaacaaatggaaaagtacatggaaacaagggaaaaaagaaagatatagagataaaactcccttaagaggggggggggg

SEQ ID NO: 32558 - DNA, 423 bp, Glycine max
taacacatcattgcttttaacatgtctacttttcagattgaaaaaaaaggagtaattaagtgtccttttttccctaaaaggtgccgactaactctttttgaaggcttgtactattgttttttacttatacctacttcaatcttctctttgtactaaacctcaaaatgcacattgcttttgattagaggttgtacttatgctcaaagaaaccttgttttttttattaaatgctcaaaatcaaatgttaggcatattcaaaaaacaaaaggaatatcagagatagaacataagagaagtttaaaccttagcaatcaaaagcatttaatattttgctttggatgaagaaaacttaagtgaatatataaatctatcatagtataagttttcttaaagtgttggacgaaatcaatgcattggatcctg

SEQ ID NO: 32559 - DNA, 284 bp, Glycine max
agcttgtagggttaaagtctcacgattgtcacgtgttgatgcaacaattgttagccgtggctatacgagacatcttgccaaacaaagtcaggttagccataactcacccgtgtttttcttccatgccatatctagcaaagtcattgatcttatcaagtttgatgagctgaaaaatgaggccgcaattatactgtgccagttggagatgtatttcccccctgctttctttgacatcatgattcacttgattgtgcatctggtcagagaaatcaaatgttgtggtc

SEQ ID NO: 32560 - DNA, 412 bp, Glycine max
  unsure (1)..(412): unsure at all n locations
ntgaatgcactattcaatggagttgacaagaacatcttctgactgatcaacacttgcacagtggccaaagatgcatgggagatcctgaaaatcactcatgaaggaacctccaaagtgaagatgtccagattgcaactcttggctacaaaattcgaaaatctgaagatgaaggaggaagagtgtattcatgacttccacatgaacattcttgaaattgccaatgcttgcactgccttgggagagaggataacagatgaaaagctggtgagaaagatcctcagatccttgcctaagagatttgacatgaaagtcactgcaatagaggaggcccaagacatttgcaacatgagagtagatgaactcattggttctcttcaaacctttgagctaggactctcggatagggctgaaa

SEQ ID NO: 32561 - DNA, 282 bp, Glycine max
agcttggatcatccacggcatacagttaacgtcaatcctaccactgggagaggatcaggcccccataaagaaaaagttctatagttatctaggggttgtagcgcgagaaaaaaaaatcccatgttgtgcttgttataggactctttataggaacagatgacctagggtaattttgttctaatggtcctactgacatcttgaatactgctattgggcgactggagaatccaggtcgtgttcgtgtagcatggattggtgtcaccatcagtcaatactttggac

SEQ ID NO: 32562 - DNA, 428 bp, Glycine max
tatggaaatttagaaattcaagtcattacaagttagccattgtgttaaactcgttctcttagattcttctcagaatctctggacttatcaagggtgcttatgatgaggacatgaccaagagcaagggcaaggatccacttgaaggacttggaggacctatgacaagggctagagcaaggaaagccaaggaagctcttcaacaagtgctgtccatactatttgaatacaagcccaagtttcaaggagaaaagtccaaggttgtgagttgtatcatggcccaaatggaggaggactaaatgacaccactttgtctcaatttttagagtgtttagtttgtctaaataatggcccaatccttgtaaagttggctgaccaaaaatatgttttgggttaatcaattaaaagggctttagttaggtttagttcaa

SEQ ID NO: 32563 - DNA, 283 bp, Glycine max
agcttgaaccaaaaccggtgagagtgtgatcttaaactatgagtgaatgactagctgtgagtaatagtctttgcatcaatctctgaattttagaatgaactgtataaatgaggacatgatgaaggccatgattgtgcatatacaagccttttgaccgaaaagcttaccttgaatgataattgtatcctttgcaccctttatgagttgaatgatattgtcaaaaatttgaaccctgaattaaataattatctccagataccttgtttagattctaggggagcat

SEQ ID NO: 32564 - DNA, 420 bp, Glycine max
tccatcaagtggtaatcagagcacaagagcttctagtatgtgctccttaaacctccattatttttttctttaccttctcttccattgttgtttcttcatttttctccatgtatctcctcacatgtcttgttctaaatgttgttaacatgattctttagagtttccaccgattaaacttgctatagaagttagatttgattttctatggttcaaatttcttgttcttgttcttgaaccatgaattgtgttgagtttaggttcctttgagttttgtcttgttattttttgtggctgaatcctaaaccataaaattcttacaaaaatattaaagtagaagaaaacctcaaaaatctagagtgacttgttcacctattgtagttttgtcatagaagtcatgtctagtcatgaaacttgtcacat

SEQ ID NO: 32565 - DNA, 276 bp, Glycine max
agcttcatttatgggtgcatttatacacaaagcaggggcttggacagtgaagatcgattgtgtcaattgttgggtggcataatggaggtgttgctatatatggcttttaatacttggatttcaaacgactccaatgacgagacacaatgctcaaaagagatggaaaaggaagtatatataggttaggcctaagaaaggaagaaaggggaattggggaaacaaataggaagagaataaaataatttaattgaaagtgtttagggatgaaagaagcat

SEQ ID NO: 32566 - DNA, 365 bp, Glycine max
tcatatcagatgctatccttagagtgtgatgagctgtatgctaagaatgtatcttacaatcgaagaatctcaacaactgagaaagatacatcagagctggaggactgcaagcgtataaaaattgagcttgaggaaaaaaatttacggctgcaatggaatctaaccataaaagaagcttcttgtcacaataatgctcagttaaagtatgaagttgcacaaatgacgagagaaaatggcgagctacacagggagaaagattctcttcaacaagagaatgaagagtacaagaacaaggttaaagatcttgaaaaaaagctgaaacaaaagaaagatgtaaagcaagatcaatatgatgggaaagattg

SEQ ID NO: 32567 - DNA, 285 bp, Glycine max
agctttgcatgtctatagattctttagagagttaggtccaagttccagagagttttgagagattttgttgtgtgaagatctgcagagactatagcttcaagcaggagccgttcttagagcttgagatgagtttgggagtgattgtgagatcctagaggtgaaggagacatccttaccacttgtgtttttgcaatctttcatcttgctcttctctttgttgtaaagaaggctacttgggtatggaaagctaaatcctctgttggatcttccctgtaggtaccatag

SEQ ID NO: 32568 - DNA, 412 bp, Glycine max
tttgaataattggagagttctagagagagaaaggtccttgttccagattgtttgagagaatctggtgtgtgaagatctgttgagagcatagctggaagtggaagctgtcctgagagcttgagatgactctgtgagtgattgtgatgtccccactacttgcatttctgtaatacttcatctttcttttctctatgtagtaaggaagcttcctctttttggaaagctaaatcctctatcggatctttctatgtggttcttgatgtaaatatctttgcatatatttaatgatgttatgtgtgttcattgtgctattaaaacttgattctaccactgcttttgtcttgatcacgcagatgcatgtgtgtttaggatcatttctctgctgaaacttgtctgattctttaaacttgat

SEQ ID NO: 32569 - DNA, 289 bp, Glycine max
agcttccatcaagtggtatcatatcacaagagcttcaagtaggtgctccttaaaccgccaattttcagctttaccttctcctccattgttttttcttcatttttctccatgtatctcctcacatgtcttgtgctgaatgttgttaacatgattttttagaatttccaccaattaaacttgctatagaagctgatttgattttctatggttcaaattccttgttcttgttcttgaaccatgaattgtgttgagtttaggttcctttgagttttgtattgccacttttttg

SEQ ID NO: 32570 - DNA, 167 bp, Glycine max
ggcagaaatgctaagttgaatactggcatgtcatatggatgcttatcgaacaactatgagggtctatatgggacatatgctatgcgtctgtgctcatggttggtgatgtccctaaagaactgcgtacattgtccgggtttgggttctaactgcaacttgacaatctt

SEQ ID NO: 32571 - DNA, 285 bp, Glycine max
agctttgtgcttgcactagtttttctaatgccattcctgtacagttcctccaagatcatgacctgttctgtggtagggctccatgttggtaaccctgttggggacatagtatagtagtagtagtctatatttttgttaatctctttcatgatgagtttcttaagacaggagaaaggggatgtataaatagagggacagaggcaaagatacagtaaagaggagaggaagagacgaaaaggaaaggggttgaagcaggcataaaaagtactagtctttcatgctaat

SEQ ID NO: 32572 - DNA, 174 bp, Glycine max
atgaacttctcgtacatcacgggggctctatgatggaacatacaatatcgaacttcttaagatgcttatgatgatcttcatctgtcacaccatgaaactcgggcaccaaatgttctattccatgtcttggaacttctggaacatcctcataatgatattgaatgcacaagctta

SEQ ID NO: 32573 - DNA, 283 bp, Glycine max
agcttcggaagaaagtgatgttgttcaagccctaaaggcagagcttgaaagagcccgggtagtcgaagagaagttcaagtccatagccatcaaagtttgaaaagagtatgatgaactaagggacgtcaatatggccaccgctgaagccttggaatgagaaaccaagaaggcccgaaaggaagaacacgaccaaaacaagttttgaggggctttatagggcagcaatagtgagctcaaactctgaagaggtgaaaggaatcatcatgggtcaaaggcatgatct

SEQ ID NO: 32574 - DNA, 424 bp, Glycine max
tggagaggatgcttcaatggaggaaaagaaagagggagataaagagagaggggggagcacgaaattgaaggaagacaaaggaggagaagttgaactttgagttgtgtctcacaagactctcattcatcaaagttacaacaaatgttacacatgcttctatttatagactatgtagcttccttgagaagctttcttgagaaaacttccttgagaagcttctttgagaaaacttccttgagaagctagagcttagctacacacacccctaataactaagctcacctccttgagaagcttccttgagaagattcctaaagaagctagagcttagcttcacacacctctctaatagctaagctcaccttcttgagatgagaagctagagctcagctacacaccccctattatagctaagctcacccca

SEQ ID NO: 32575 - DNA, 286 bp, Glycine max
agcttgttcgcacatcttttttgtctatgatatccaatcgacaaggtttgaagtagaggagaccttcaatcctataacgcaacgtggcggacaaaagtgggctgttaacttgaatggccattattgtcaatgcgaaaagtattttgcgcttcactatccatgttcacacattattgcagcttgtggttacgtgagtatgaactactaccaatatatatatatatatatatgttgtctacacaaatgagcacatcttgaaagcttactccgcacaatggtggcattt

SEQ ID NO: 32576 - DNA, 281 bp, Glycine max
ttgttcttcatttgccaaatttgacatatttattcaacaatgccctggtttcttgcgtaacactgatgtttgtgttcaatgccttgtttttgtagggaattgggctatagggcttatagacattaatctgttgatcatgttcacaatccatgtgtgcccatttacttaggtgttgcttatttagcatggttgactaactgtgcaagaatgttagactaatatggtatctcacccgtaaattattatttttggattacgatactcctatctatgctaataat

SEQ ID NO: 32577 - DNA, 285 bp, Glycine max
agcttgactcactatactttgtttggactgtttcctttctctacatcctaccatgttggggttaatcatcttgccaacttcacaaatctacaaacagaaagttatataaactaaaaactacactgacatcagtgagctgtctttttcgttttcaatggttttgtcatatcaatatatgatagtctggcagtggccattcttaatgtgtagggggactgctttatgccccaacatgccataacaccatttaccaaacatggtaacactaggttatagctttgcatc

SEQ ID NO: 32578 - DNA, 311 bp, Glycine max
tcccagatgtgacatatgtcaagtacactcccttcactctatgtccatcttctagttttatgatattatcacatattcttttacaaattgttgtgcttggatgaatggatcgtttaattctgccaacttttttccctctcaatagatgtcagtatgtgtgtttcaaatgagaaacaacaaggatatctaaaagtgtagttataatttatagccctggctattatttcaattttaaacatagagatgtgtagcccaggacgccagatcttttaaatgaatttgtttgacatgtatggttatgcttttaatgg

SEQ ID NO: 32579 - DNA, 284 bp, Glycine max
agcttgctaacccatggttttttcctaatatctcccacactttttggggttggccattcttggacggccttgattttctcatggtccacatggacctcatttctaccaactacaaacactaagaaaactatattatctacacaaaaagtacacttctctatattttcatagagggtgtttttcctaagaactgaaaaacttgcctgagatgtcataagtgatcatttaggctcctactgttcagtaaaatatcatcaaaataaacaactacaaatatacctctg

SEQ ID NO: 32580 - DNA, 233 bp, Glycine max
cattcggaccttaaatctcagctggagctcagtgcaccacctctactgaaattttaatacttcttaatgaaggagcctccaggatgtctttattaataaggatttgagaatattgaattatttggattatgattacatactttgatgcaatcctttaagaaggagatccatcaccagagtcacgaccaggagacttcagaagattgtgcaatgatggatgaaatggtaaaatg

SEQ ID NO: 32581 - DNA, 282 bp, Glycine max
agcttttaggagtagaaactttggacctactcagcttatctcaaaaaggaagtcgtatctagtcaaggtctgagagaccatacaagtttcctaacgatttctaattatgtgggccattaactctatcatatgctgacaatagcctataagcccatgaatctcttcgggggcggagtaggtgtctgccatcgccttggccttggctaacaatcggggaagttcttgactcccgttcaaggtaagagcaaaccgatccatccacatggttacctcttggtgtaa

SEQ ID NO: 32582 - DNA, 305 bp, Glycine max
  unsure (1)..(305): unsure at all n locations
tctcgattcgctctatgtacccgnagaggttcacatcgtgttttgagcatttatatcctaggattgcggactatttataccccaagttgacgtgcttaagccatataacctaagacatctaacgcactaacttaaaaataaaataaatttacaccgaacgtctgaatttgattatgcatgaacttttgttaaaatcaattccgaccgttctgtcgagcaaaaccacgtaggaatcaaatagaggtgaaacataacataataattaaaaaactccctttaggaaaataaagcggaaaatcattagg

SEQ ID NO: 32583 - DNA, 281 bp, Glycine max
agctttggagtttccaagtgccaattcgtcttcttctttagtccagtcttcttctggcttcaattcttcagtgggctttccttctgtgtccagcatcttgggatgttcccagcctttgatgacagctttccaggttctgctatccagtgatttgaggaaggccaccattcttgctttccaatattcatagctgcttccatcgagaattggtggtatgttcactggtccgccttctttctccatgttcatcagaatttatctccctagatctcactctgtga

SEQ ID NO: 32584 - DNA, 422 bp, Glycine max
  unsure (1)..(422): unsure at all n locations
tgttaatatttatagtgacacccttcaacatacatattgtgtaacacaaattcacgtcactcagtgtcactttccaaaggaattgtttaatttaaaaaccatagttggcatattttagaaaaataagagtctaagattatactaaaataggaaaacactttaaaagtctgtggggatttacagagactatntacaatgtcatagtaacaaaacatatttttccaaaactaaatttgcattccaagtacccttttcaaactcattttccttttgttggcaaaattctattttagtcgtcattaatcatttgtaattaacaaagtaccttgaacatttatgagaaaaatgaagcattctctttagagataactttacgacattcatttttcatgcatgatatatatgcactaaatcacttaata

SEQ ID NO: 32585 - DNA, 279 bp, Glycine max
agcttgatttgtgagttgattttagccttagtttcactttggttattagtcaattgatccaaggaaacttccaaagaaaaacgtccgattgatttttttgattattttattcaaagatattttgattattttattattatttttcaagatattttgattattttatcattattttgcttttttttggtttaatcgagattacagcgtgaatgatcggttagattttgttttaacagtgattaaacgagattacaacgcaaatgatcggttgaaattcat

SEQ ID NO: 32586 - DNA, 145 bp, Glycine max
  unsure (1)..(145): unsure at all n locations
tgagtgagccaccatagagtgagtctaatttgttaacacatccttgtaaccctactatcatttngtgtagtggaagaatctccatattggagaattataattgtgtgctcccattactacctttaattacttagtgtctatctta

SEQ ID NO: 32587 - DNA, 276 bp, Glycine max
agcttgtgtcagttcatcatttgcaataatccatataatttgcatctccgcaagaaatgagcatttgggtgttataattctaacaagcagtatgtgaacagatggtgcaatttactacacattactaccaaaatgggaaggacaatatttccaacattaaacaaatacatttcttcactccatgcaaagaaaatggatagaaagtagttgataaagaaattaacactgacaaataacatatttcacgtttcaacttcccaaggcacatcactgcaa

SEQ ID NO: 32588 - DNA, 305 bp, Glycine max
  unsure (1)..(305): unsure at all n locations
ngcaaaccttattctctcctgactctcgaggcacttgttcatacacacttcctatagatcctcatggataaatgcgttattgacatccaattggtgaatgaacccattgttgatagataccaaagccataaagtcgaactcagattatggaatactttgccattggagataaagtattaaaggaattacacccttaatatgggtgcaattaacctcttggtaccaaccgagccttgaacctagctcttaatatattcatccagatttcctcttcaattagaacacccattggcagacaatgggca

SEQ ID NO: 32589 - DNA, 289 bp, Glycine max
agcttttcttggagggttgatggtttctatcacgcagaatggcatgatcactggttgacatattctcaattagctcagttgcttcttccggggtcttcaactttatttttccccctgtagaagaatctagtagtttcttggattgtggtctcagcccatctatgaacatattcaattgaattggcttgaaaaacccatgggtaggagttcttctcaataaacttctgaacctctccaactcttcattcagagattcatcagggaactgatgaaatgaagagattgcggc

SEQ ID NO: 32590 - DNA, 391 bp, Glycine max
  unsure (1)..(391): unsure at all n locations
ntacagcagatgcccctttactccatgttcttgaaggatatgttaacttggaaacataagtatattcaccatgaaaaaattgtcgtggaaggaaattgtaatgttgtgattcaaaagatccttccacccaagcataaagaccttgggagtgtaactattccttgttcaattagagaagtcactgtgggaaaagctctgattgacttgggagccagcattaatttaatgtcattctccatgtgcagaaggttgggagagttggagaccatgcccactaatatgactttacaactggttgaccgctccattaccagaccatatggagtaattaaagatgtgctggtcagagtgaaacattttaccttcccgacagactttgtggtaatggata

SEQ ID NO: 32591 - DNA, 286 bp, Glycine max
agcttgctgtttactacatgctttgtaaccttctattgtatccttcttgggcatatgctattccttcgcggattctcaaaattcccgatacaattgtggaggttgctgtttgggtattcctcacctactatggtattggatttgacccaaatgttgggaggtaaagaaactactttaaacatttaggagcatgcgaatgttgttgcttctactaatttgcgtgttacttatgatgtgagctcttgaattttgtgcaggttcttcaagcagtacctcgtgctattaa

SEQ ID NO: 32592 - DNA, 286 bp, Glycine max
agcttgtaaaggagtgtgaatctttgctggaccaccttttccctgtgaatgatcctgctccagtttccactgagacaactccccaagctgaaggttttgatccttcaacttcaaccactaccaagagtgatggtttggtgattccgaaggaattagctgagatcgagtacatggagagcctttatatgaagagtactgtatcagcattgcatgttttgcaggaaattagaagtggaagctcaacagttagcatgttttcattgccaccgttgaagataagtggttc

SEQ ID NO: 32593 - DNA, 318 bp, Glycine max
tgccaagatacgctgatagtacccaagttctcatgcgtttatgctcttttataatcagaaaagtgcttaatttaactcaactgtttgcacaaattcaagccaaatcatagaagacacggattcaccattgctgcacatattcatgatcaaactacaaaatgtactcaattctctcattactatttcaataatatcacgtgtggaaacgcaataagctcttatcttctatttgtataactatgtatctccttctgtgatagatgccaggttttcattagattccccttataaattgggtctggatattgctttttgcat

SEQ ID NO: 32594 - DNA, 286 bp, Glycine max
agcttctcaaggaagttttctcattaaagcttctcaaggaagctacctagtctataaatagaagcatgtgtaacacttgttctaactttgatgaatgagagtcttgtgagacacaactcaaagttcaacttctctccctttttcctccttcaatttcatgctcccccctctctctttctctccctctttattttcctccattgaagcatcctctccaagcttcttatccaaggctcatcttggtggtgaagctccttcttccatggcttattccttaatggatggt

SEQ ID NO: 32595 - DNA, 405 bp, Glycine max
tgccttacctgcaaaatctttcggtatatgttcttaaattacgaagttgtcgtccaccaccatactcattctctccacttgattcttgtgttgtctatcttatatgtcgcaaggcatgcatagtcaatttcacaattctcactcactaatctttgaataagttaaacataactaattcatttaccaagctactccttacttgtacaactattggccatttttgaggcaagaactttcatgattacaattcatacaatggcctgagtacttcatgcacactctatagttgcatacaataacttactcaactctagaacataggtgctacgatattgatatgctgaaaatgacttgcgatacttttatatcacttacatctaagtctatatgatctacaatctgaca

SEQ ID NO: 32596 - DNA, 288 bp, Glycine max
agcttgtccatggaaccgattttttactcctttccctcgcgaacagcactagtggctgcaccattctcgagtacttcttaagtgcatgcataacatcgtacccgaggtgctacacgagctagatgttatcctctttatcttttttgtccctaacttgacagcctttacccccctttgtataaccccccaatgaaaaactatgcttggacttacttccttcctttgagacactgttgatgcgggcggctaagctgctgctgtcggggatgctatctatggggatggtgc

SEQ ID NO: 32597 - DNA, 286 bp, Glycine max
agcttgtaggattatggggttcccatcacatgtggtactaggtggcggtcgggcgatggtgcacaacaagttttccacatccacaaatcgcgcataaacccaccatcccctgttgcccacctccaactgagctcacgtactcccacgtaacccatatcctcgtttctctcaacaccgggtccccatcaatcctcccaagcttccccaacatccaagtaattcaacattcaaacagcacaaactatcacagccaagaaaacagggcaaaggcagaaaactctgccca

SEQ ID NO: 32598 - DNA, 337 bp, Glycine max
  unsure (1)..(337): unsure at all n locations
gacactatggaatacttagtcttgganaagtactatttatgaccttgtctcttagccaatttgatggcttacagagcgtccgttgagcgcaacactcgtgggctaagcgcgaggaagactttggaatatagagacctgcacaagttgcctaagctcacctattcatctaactacttgcaccgcttcagttcatcccatgctcgagaaatgctcacgctaagccgaaactcactaatgcgcgctatgcgatccataggagcgcttagcgcacgagcacgaacaagaccacctatgtgagcctgaaattagattttagagggagagtttgcactgggat

SEQ ID NO: 32599 - DNA, 285 bp, Glycine max
agcttaagacaacttgtgtaataaattacaataaggttgtaatcaattaaaatagagagtttttccttctgaagaatttttccaactttagaaattttcttaattcttaataattttactaatgctaatgcaagcaataaagcaataaactagttctttccaaatgcttatgcaatgcaagcaaatatgcaattcatacgcagttcatctccccctttgggcattaacaaggccaaagagtttaaacttatgcacaaaaaagaacacacaaattgaaggaaataa

SEQ ID NO: 32600 - DNA, 410 bp, Glycine max
tgttactactattagatagctactaatactattgcaaactgttattgtttttttaacttaattatattacacttgtttatgtatgtgtttttctcttgacttaaatataattttggtcattttattttactcaatacgtaattttggtctctctattttaaaattaaaatatttgatactcctatttttaaaaatctacaattttggtctctctattttaaaatacaaacattttgtccctatattttagaaaattcataattttgattctcatattatagaaaattcacaattttggtttaatatataattattcctatgttttatttcttttattttttactttgtagttaattaaatcatttcttgatgatatcttaaatgaatatgtagatttaggatttaattag

SEQ ID NO: 32601 - DNA, 282 bp, Glycine max
agcttgtagaatggctatacttgatacatgtcagggtttggtttggttcaaggataaaagggatgccccacattatttccatgacacaaatgcaaaaatgatgatttggaaactttatgcaaaactggtcatgcatgcacctatgcggacactcaagtgtcaaatttttatggtcatgtgatgctagggctcaggattcatttcctctattttaatcaacccaatgtttccaaaatatgttcttttatcaatttgtgcattcatccgagtccatttcgggcg

SEQ ID NO: 32602 - DNA, 334 bp, Glycine max
  unsure (1)..(334): unsure at all n locations
tctataccatcccatttctctccncctttggcgtcattttaaagccaaagtgtgtggcaatcaacacaagataatataactaaggtttacataatcaatcataagtcataaccaaatataagataatcatccataagttaaaaccaaatataatccaagcataaataagtcataaccaaatataatccaagcataaaagactaagtgccaattattgaaagataacgaaagttcagaaaatgataacgtaaaaagcatagtcaaatacacggcttataataaaagataataacatcctaaaaactaagacgatggtggaaggtcgaagctctga

SEQ ID NO: 32603 - DNA, 283 bp, Glycine max
agcttgaacagattaccccatttggctttgtgttggcctttgacaaaaatctcttctagtcatctaaggtccaacatgctatggattctgccaaggtctttcttcagctgagtttgacaatcctggaagagaatggacaaaggcaccaaaaggcgctaaacaaggtggtgtcattggaggctgagtttgccaaatggagggctactgctcgcatagtctagcaagtggagtgccctaaggtagctaatgccatcttcgtatttgttgaaattgtgaagtcgaa

SEQ ID NO: 32604 - DNA, 339 bp, Glycine max
tgaaggtgtgtaacccaccatttccataatagaacactttttcgtgtctactatcatggcgataatcactttctctgttattgggggcgctacttgagctgccaagtctctccatctttgggcgtattttttgaaatatccgtgccccctttttgcacatgttctgtaattgcatcctatccgaagccattatactgacactgcctaacaaaggcaaccattacgtccttccaagaatggactcgggaaggtttcaagctagtgtaccatgtaatatctaccccagtaagactttcttggaaggaatgtgtcagcaattcctcatcttttgcgtatgcc

SEQ ID NO: 32605 - DNA, 285 bp, Glycine max
agcttctcccctattttgctataaatagggggagaagtgaagaagaaaagggttcacccccttaagcacttctctctctctcgaatttgttgaggaaaattatttccgtgaagaaaatccaagccgaggcgcttccgtaacgtttccgtgagtaattacgcgaagattctcgaccgttcttcaagattcatcgttcgttcttcgttttcttcagtcttcaacgggtaagtacctcaaatcaagcttttcaattcattctatgtacccgtggtggtccacattttg

SEQ ID NO: 32606 - DNA, 428 bp, Glycine max
  unsure (1)..(428): unsure at all n locations
ntgcttctacatctcttatagagttattcgagcttaatataacaaatagaagagtttttgggtagtagttcatgagacccaacatgtctccacggggagtgccagtgttgttagtgaagaagaaagatggaaccatgaggttgtgtgtagactatcgccagttgaataaggtgatgatcaagaacaagtaccatttgcctagaatagatgaccatacggaccaggtgataagaacttatgtgtttagcaagatagaccttaggtcaagttaccatcagatccgagtgaagtctgaggatatcctgaagactgcctttaggacctgttatggtcactatgagtatctagtcatgcctttcagtgtgactaatgcccttggtgtgtntatagattacatgaatagaatctttcacccttatcttgatagg

SEQ ID NO: 32607 - DNA, 277 bp, Glycine max
agcttagcatattgcaatttttacttccttcaaccagtaaccaagcctctttgatagccataaacatctttctttcatcaatgtgcaacaccatattcttgtctaagatgttaatgtgcctcctcatgagttaggtttggatgaaccctaagcttttcaaccaccctttttgtcacccatttcattgtagcttgcttctttttgaagacccttccacatatgtgcttcgccaaaaaagtctagatttgaaagcttcttgtaagttgtaactttagac

SEQ ID NO: 32608 - DNA, 311 bp, Glycine max
tgttaaagaactgaggaaaaatcaagaacaagcttgtatgcacatcgttcgcgtgtatgatatccactccacaaggtttgaagtagaggaaagcttcaaccctataacccaacgtggcggacaaaagtgggcagtaaacttgaatgatcgtcattgtcaatgcggaaggtattttgcgcttcactatccatgttcacacattattgcagcttgtggttacatgagcatgaactactaccaatatatagatgttgtttatacaaacgaacacatcttaaaagcttactccgcacaatggtggcctcttggga

SEQ ID NO: 32609 - DNA, 277 bp, Glycine max
agcttgtaaaggcttagagaatattggttgtatgatcctgtggaggctttagtaaagaaagaataccataaagtgcttgatcttagtggaaagcctacaggtgaaggtattggatgtagccagagtggggtgaaccaatataaatcattggtgtttcatttccttccttactacttattgtttgttgttgtgtgttgaagttttgtttcagaaaaaggtttttataaaattgttttaatatttagaagcaaaacctactttgttctaagaaaagaaa

SEQ ID NO: 32610 - DNA, 390 bp, Glycine max
gtaacatcagaccacttcaagggtgctggaacttcttcacatggacttgatggggcctatgcaagttgaaagccttggaggaaagaggtatgcctatgtcgttgtggatgatttctccagatttacctgggtcaactttatcagagaaaaatcagacacccttgaagtattcaaggagttgagtctgagacttcaaagagaaaaagactgtgtcatcaagagaatcatgagtgaccatggcagagagtttgaaaacagcaagtttactgaatactgcacatctgaaggcatcactcatgagttctctgcagccattacaccacaacaaaatggcatagttgaaaggaaaaacaggactttgcaagaagctgctagggtcatgcttcatgc

SEQ ID NO: 32611 - DNA, 288 bp, Glycine max
agcttaaggttcaaattgttggaacacagatttgccactctcctcaagaaaaagatgtagaatctataaccaaagactcagaaaaaatgggtcattccaaaacatctcctgtggttcttcaagaaggtgagaaatcagaagattccagggcaaatgagtcttatttggctgttgaacctgatcctccacagctcaattctagaatcaattagagaccaaaaagggtcactaaacctcctgaaagatatggttttgaagacatggctgcctatgcattacatgcagctg

SEQ ID NO: 32612 - DNA, 416 bp, Glycine max
ttgcggatctggtcttcgccagtgaaaggatcgatgtgggtccgaaaagatgtaaatttgatcatcctactaggacaactgagaaaactggggcaaatgaagagggtgagaaagagggagaaacccatgctgtgactgccattcctatacgaccaagtttcccaccaaacccaacaatgtcattactcagtcaataacaaacctcctccttacccaccacccagttatccacaaaggccatccctaaatcaaccacaaagcctgtctatcgcacttccaatgacgaacaccacctttagcacaaaccaaaaacaccaacaaaaaggaattttgcagcaaaaagcctgtagggttcaccccaaattccgttgtcatatgctcccatatccactcaataattcaatggtagccataac

SEQ ID NO: 32613 - DNA, 287 bp, Glycine max
agcttgtgcaaatcaaatcactcctacatctcatctctagcatgcattttctttctttacccactcctcacgtttggttttttagggaaaaacaccataactaaacgcgccgcaagggatccctatcgcaccagatccaaatctagaacgatgggcgatcaagaggagacgcaggaacagatgaaagccgacatgtcggctctgaaagaacaaatggcctccatgatggaggccatgttaagtatgaagcagctcatagagaagaacgcggccaccaccgccgctgt

SEQ ID NO: 32614 - DNA, 341 bp, Glycine max
  unsure (1)..(341): unsure at all n locations
tgtgcaactcaaatcactcctacattntatctctagcatgcattgtatgttattctcgtcctttgtcacgggaagccggaaggtccatatcaccttcttaattgtacacatggggcactgcgcccccaaatgcgcgagtaagaagagataattttccgggctctcgtgtccgtaaaatgcattcatatcatgcatcgcataagcatctcttcataacatcataatggacatatcctgcatttgtccgttatcatattccagcctcaccttttgcatgagtcatggcatcatcatgcatatgcgtccaacaaacttttgatncgcaaaatgcataccattgt

SEQ ID NO: 32615 - DNA, 287 bp, Glycine max
agctttcttgagaacactttcttgttaagcttctttgagaaaacttccttgagaagctagagcttagctacacatacccctctaataactaagctcacctccttgagaagcttccttgagaagattcctaaagaagctagagcttaggtgcacacacatctctaatagctaagctcacctccttgatatgagaagctagagcttatgatgtgccattattttctcctatttcttaaccctttttacaccattttaattactaattagtcttaattgtcaaattaatt

SEQ ID NO: 32616 - DNA, 328 bp, Glycine max
aaaaccacctagagccaaacctgactacataaacctgacccttgtgagaatgcctatccttatcctcggatgcaaaagaacaatagaaggaaaacttccaatcaatggaaaaaggagaaggaaaatctccaatcaaagaacatgagaaagaaaatttccaatcaaaggaaaaaaaggaagcaaagaaattcccaatcaaagagtgggagactgaacaaaagacaagatcggaatttcccaacctaagaatgggagaaagttaaaaagaagaaagctcctgatcaaaagaaaacagaagaaatgtgcagagaggattttggaccacaca

SEQ ID NO: 32617 - DNA, 286 bp, Glycine max
agcttgaacttggctgctgttttttctttgtcaggtattctaagttgttctatatgcttaacatgaatgacatgtatcttcagattcatgagaatttcaaatttgtacatctttttttctttttatttctacacatgatacatggttctcataaaatgttggaattttctgtgaacagtttctggagtactgaggttaaggcgggcactatacctgtaagcaagctaaattttatcagcttgaagccatagaatcaagtgtattgactacatgtatgatatgcgtc

SEQ ID NO: 32618 - DNA, 354 bp, Glycine max
tcatccgcgttcaatcttatcgtagcattggctgctttatttctattttacgatcacacactgtggttattggacacctctctgtcgaatggcacatgcaagtgcattattatcacactcagcttcgtttgcttcccatatacatgcctcttcatacccggaaaatctttagctttggagttgatacaattctctacggagaatacagcccttaatgaaatcgagtggtccttattatgagatgcaaatgtttaaccctaaaagtattgccaacactggattttcttctaaagatcaataacgaattgggattggggggacacaaagtaaatgcaccgtgcaaaaaataactaa

SEQ ID NO: 32619 - DNA, 304 bp, Glycine max
tatagacaccctgcatgcatgcaagcatttcatcacatcacttttactgtgtatatgatgttcatcttacttttgctgcatttatactattacaataggaaatacaataatgtgggtagtaaattcatgtgattgacttttgctttatgtcatgtggatggtcggttcccatttaaattttggggattccctataatgataaagtatataactagaccaaaaataatgagtttaccagggtaaaaacagagttatagatgaaccaaaacaaatgagtggctaacaagatcaaaagcaaagaaat

SEQ ID NO: 32620 - DNA, 453 bp, Glycine max
  unsure (1)..(453): unsure at all n locations
ganaaccngatganccnatgattactttgaacaccagaactatgcaaacggcacattcaattttctgagcccagtgnatacttctgaaaattttgttgcccaacacgaattggggcgtaggctttcaaagccaatttacacaaacactcttcttcctctactacctgtgatcgagtcctacgttaaaatcgcacgaacaaaaccgtttttttgagccaccgatcgagcccaccataggacattctacagacactgaaacacctacaaaatcctcattatccaagccacctacatgattcattctattgcccagtgatggacctttaattacaatccgtgaagtttaacacatgctaacaattacatgttgtcattagaccacagatctcaattgatatcctttccaatcttcgacttatttctactccatcatatatccactcaccaccctac

SEQ ID NO: 32621 - DNA, 235 bp, Glycine max
tagcttgcctcgaaggtttatttctatgatccgctggaggcggcgcatcttcactgcgggtgcggcgcgtggggtgttttcttcacgggattgtttgcgaataaagtgtacgtggaggagatttacggtgttggaaggccgttcggggctttgatgggtggcggagggaggctgttggcggcccacgtgatttaaatattggtggtgtgcgggtgggttactgtgaccatggtcc

SEQ ID NO: 32622 - DNA, 551 bp, Glycine max
  unsure (1)..(551): unsure at all n locations
tgctatggtgcgncgttttgatacccttgaataccttangcatttacgtgcacactataacatgctcaacgctatctcttgctcatctattagcttgagtccacagagtatactgtcttatataatatgctcgttcctatatactcgcgacacgattagctctatctatatggatatatattcactacactgtctacatgattttatataagatatgcaaacaaactactagtctaagtcctgtatctccactcatgtgacgttacggctccatgcgatacccactcatgtgcatatcggcaccaatctaaaaatcccaagtcctaaattactaaactatctaaattcacaggcttagatatctttttaatactctacaatataccattcttttgcttttcgtgcttgacaaccattttatctcaatccatgaaaatcatgctagaagcatttttcgcactatagcgctttggaaaacactatttaccgttgaatgtctttctcaaatgtttcaaggactctaacaaacaaatctcaactgcgttgatact

SEQ ID NO: 32623 - DNA, 283 bp, Glycine max
agcttttgcatgtttaggatgttctagttagagaaaggtccaagttccagagagttctgagagattttgctgtgtgaagatctgcagagaagcgagttcgaagcggaagccggtctaagagcttgagatgagtttgtgagtgattgtgagatcctagaggtgaaggagacatccttaccacttgggtttttgcagtctttcatcttgttcttctctttgttgtaaaggaggtttccggactatggaaagttaaatcctctattggatctttcctgtaagtacc

SEQ ID NO: 32624 - DNA, 336 bp, Glycine max
  unsure (1)..(336): unsure at all n locations
ccttgtatttaaaaatgtnttacaaataatattaattaatatttgttttgttattcctttattaatatatatgtgaggggtacagggtgtcacaatacgtgccagcttgttgatgtggaaaaatgccaacagccacttttgaaggtgagaaggcatctctcacagtcggatttggagagagaataaaggaaagcttttctagatttattattttctttaaaaatggatgactaagggatcttatgtcttatatattctgagataataatgggttgctaattttctttgggctacggcttgagggagccaattggaattgtgatctagttatttttc

SEQ ID NO: 32625 - DNA, 284 bp, Glycine max
agcttagatagaaacattgtatacatgaaaataacctcaaatagataataaaaatatttacatcaagtgctcagtacaaattcctaacaaaggattttagccctccattacaagggagcagctttcacaaataggagaagggttttagagaaaataccatattacaaagcagtggggatgtctcctccacctctaagaacctagaaaataaatctaaaacatataatctacctaaaagttaggacctttgcttccttgctcaacttttcctttgttttctacac

SEQ ID NO: 32626 - DNA, 281 bp, Glycine max
agcttctacattcaatttcttgcttttcgatatattacgggactcaatcggacatccgagtaaaaagttattgtagtttgaatttgctcagggcttcggtattccatttcgagcgtctcgatatattacgggactcaatcggacatccgagtaaaaagttattgttgtttgaatttgctcagagcttcggtattccatttcgagcatctcgatatattacgggactcaatcagacatccgagtaaaaagttattgtagtttgaatttgctcagggcttcgg

SEQ ID NO: 32627 - DNA, 424 bp, Glycine max
aaactacgctttgaaaattaaacacaataacttttactcggatgtttgattgagacccgtaatatatcgagtcgctcgaaattgaataccgaagcgctgagcaaattcaaacgacaataactttttactcggatgtctgattgagtcccgtaatatatcgaaaagctcgaaattgaatgttgaagctctaagcaaattcaaacgacaaaaactttttactcggatgtctgattgagtcccgtaatatatcgaaaagctcgaatgtgaatgtagaagctctgagcaaattcaaacaacaataactttctactcggatgtctgattgagtcccgtaatatatcgagatgctcgaaatggaataccgaagctcggagcaaattcaaacgacaataactgtttactcggatgtctgattgagtcccgt

SEQ ID NO: 32628 - DNA, 284 bp, Glycine max
agcttcttttggaccttgattaggcaactaactcctctttcaaaaccatgctatgtgctcgcgactggtccatctcttcccttcgcagcttgagttcactattgctaccccacagagctccgcaaaatttattccggccatactcttccttgcgagccctcttggtctcttgttcaagggcccttgtggtagtttcattctcttcccgtaacccggcacactccttccgaatgtgtgtagcggccaacttgaacctctccttggcaagtttcgcctttcctaac

SEQ ID NO: 32629 - DNA, 427 bp, Glycine max
  unsure (1)..(427): unsure at all n locations
tcagaccaaagcaacacaaaatctaggtatccaaaactcttctcattttaatggattttcaaggtttgagaagtgaaattgataatggggtaaatttggagcaaactctcacctcacacaagtctataacatcaatttaaacttgttcaaactggatttacacctaaaattccaccgaaccaaaatttgacccctcaacacctaattttaccctagaatggctctttgttcactttggtcatttgtttttctctctagcacagcccaaactttctcataagtcttaaatgacatttcaagctaggattaactcactttaacctccaaataccactaaatccagatttggccttccaactttcaaaaactcactctntttccactcataacaccatattctcactgtctaaccctaggttaactctac

SEQ ID NO: 32630 - DNA, 277 bp, Glycine max
agctttctcatattacttctttaaaagctaatttttaacctatgcataaactagttttagtttatgaactagttttagtttatggagaagcttatttcatttttttcttttattttcttctcttataagtatttatggagagatttatccaaacaaaaataccatgaagaacataaaattagtcagcttaacctcaaaagtacaaagaaggttaagtcaattcataaactatcattatgttgtaacacttacaatttggaattcatctgatttgcct

SEQ ID NO: 32631 - DNA, 303 bp, Glycine max
tccatcagttagccttctgatgaaagacaagtttgtcttttgccagctaaaacttagaattgggggtggccacacatgaaaattatgagccaatcatgaatggaagatgtgtagtgaacctcccaaattgtcttaaagaagtctatcttgcaagaatttcttttctttatgtagacaacttcagtctcaactcagctccatagtctgacggctctgattcagaaaatcttggactatgttaactcatctctacaactgtggaattttatcagcaagtgcattgagtcatacaagtagtataaa

SEQ ID NO: 32632 - DNA, 279 bp, Glycine max
agctttatatattgttgagctttctcataccacataaaacttaactataaagcttaccttctcaataatgcaacatctagcactttctctcaccatagtaagggactaagaataaaaattgattaaatcaattttagtgctagcaaaactaacaaatgacttgttttccccatttgaccttcttcatgggatctctaatcacaaaggtaacccacaccattgtttgttttcaagtggcttaagtctcattcccctcgatgtttctaatatcatatttct

SEQ ID NO: 32633 - DNA, 416 bp, Glycine max
ttagtgtactgctttaagtagtgcacgatatgcttccttaggtaaacacgttgcctaaaagttactatcaggccaaaaagatattgtgtccgatgggtatgaagtatcagaagattcatgcttgcctgaatgattgcatattatacagacatgaatttcaagaaatgcccaaatgccttatgtgtggggtatcacggtacaaagtgaaagatgatgacgagtgtagtagtgatgaaaactcaaaagacctaacatggcatgcaaatgggagaaactgcgatggaatgctccatcatccggctgattcctcccagtggaagaagattgatcgtttgtatccagatttcggcaaagaggcaagaaatcttatgcttggactatccactgatggaatgaatccatataggtagttaagt

SEQ ID NO: 32634 - DNA, 285 bp, Glycine max
agctttggtaattgattacacatttttaaaatactttaaaactgtttaaacataagttataactcttgaaatttgaaatcttaacattttaaaacactggtaatcgattactatcttctggtaatcgattaccaaagagtaaaactctttggtaatgattttgtgaaaacttcttgtgctactcaatattttgaaaaacttttttagtacttatcttgattgagtcttctcttgattcttgaatgagtcaagagcttccaaggttgtttgcagggggtagccatg

SEQ ID NO: 32635 - DNA, 344 bp, Glycine max
tagcccaagaggggatggaccttttcaggtctcgaagatgatcaataacaatgcctataggttggacctcccataagagtatggagtcagcaccacttttaacatttctgatttaattccttctacaggtggagctgatattgaggaggaggaaccaatagatttgaggtcaaaatctcttcaagggggaggagatgatgcaatcctccctaggaagagactagtcactagagccatgagcaagaggctccaagaggattgagttagagctgctgaagaaggccctagggttctcatgaacctcagggtagatttctgagcccatgggccaaggttgggtccac

SEQ ID NO: 32636 - DNA, 284 bp, Glycine max
agcttttgttgatgcacatatatttttgcgttatccatatgtgaattatggatcaatatatttgaaaagcattctagattgagtgagatttggttttggaactagttgttattacactggtgcatgaaatatcgtgcaaatttatttgtaataatacatttttttattgtttcaaatttaaaatcaagataaatcatatttcatttggtgatgttttcgttttgttattagagagtgaatgcataattaaaaattaatcttgatcaattagttatcataacttt

SEQ ID NO: 32637 - DNA, 480 bp, Glycine max
  unsure (1)..(480): unsure at all n locations
tggatggacacganattgagacgcttgaatccctagcaattcgagaccctacatacttagactggtgtacgcatttatcatcaaatgcccatcctacccttttatacattggcgcacatcaagcttaaggacactctcataccactgcatgatcgaccaccgtgactcatttgaattaacgtcgctgttccaatgactgcttgggatatcagtctaccaacctagagagctgtactgacaattaatgaaatgcgttaaattgaaatgtaagaacggatatctacatgtcgtggacccccttataaaatacctgataataaactagaaagttcaaaatgcacacgtttaaatgccccgctcctgaggttgttacatgtgcctgctcattaatgtccatcacttaacatccgggataactgaaaatagtcgctctaactcagtgcgatgaccatggtggcacccaagtttggtggtcaagag

SEQ ID NO: 32638 - DNA, 283 bp, Glycine max
agctttttcaagcaaatcatgtttcattttgcattcgcggaatctacattaataacatcttatcgtgtgattttttaatttggtagactataaagtggggttaaagtttaataatttgtcacctatatgctcgtactgtaacaggtgtagagtcagctgaaaaagtatagaaaaaaattgaattggagcgcatatgggtaaggctcctctcaattactggaagtgtccagcagtgactaaaataaattaacaaaatataagaggcgatgctttttttttctcc

SEQ ID NO: 32639 - DNA, 287 bp, Glycine max
agcttggggtatggttttgagttatagcctaaattgttacttgacaggcagtgttttactaagcatgaaccacaatcagttaatcaaacatccatattcagtactccttctcattgtccagacacagaaaaacaaactcacacacacaaaattgacagaagacaggtattgccaaacacaaacaccctttctagcatagggatttgatctctccaccttggtgaaagccttgtgacccataaggtaatgcatgctttattagtattttgcatgcatcattttttttt

SEQ ID NO: 32640 - DNA, 283 bp, Glycine max
agcttgctagctgattctctttttaataatttttcagatatgttctcattcttatgagaccaaagcacagctgcatatttgaccactttagatgtatcacacaatcaaataaaggggcaactcccagattgttggaaatcaataaagcaattagtgattcttgatttaagcagcaataaattgtcagggaagattcctatgtccatgggcgccctaattaatatgaatgccttggttttacgaaacaatgggttaatgggtgagttgccttcttctttgaaga

SEQ ID NO: 32641 - DNA, 330 bp, Glycine max
tatggaaatatacaaattcaagtcttactgatagcttttgtgttaaactcggtctcttagattcttctcagaatctctggacttatcaagggtgcttatgatgaggacatgaccaatagcaagggcaaggattcacttgaaggacttggaggacctatgtcaagggctacagcaaggaaagctaacgaagctcttcacaagtgctgtccatactatatgaatacgatcacaagttcctaggagaaaagtccaaggatgcgaattgtttctcggcccaaatggatgatgactaagtgacaccactttgtctcaatctttatagagattact

SEQ ID NO: 32642 - DNA, 284 bp, Glycine max
agcttcttgagcgatcacgttttccttctgaagtatgcctcgcatcctaatttaagccagataacttcctagcttttatttattttaatgatgttttgttgggtgtagtatgccacaaatttgactggaggttcatttgatgaagctcgaatgcttcaaaatgtagaagcatgtgaatggttgaccagtgccttgcatggtcttggttttgcctaatctagatcctagttatgcaaacatgagagctttatgttcctttctttacttttctcttaaaaatcatc

SEQ ID NO: 32643 - DNA, 265 bp, Glycine max
tgacatgttatttaataccacacaatctatgaatgacatttttaaacaacttaatagttagttaatgcacagaatccaggacaccgattataaccagtgactgctttttctttttttttttttattccaaaactcggtgaatctttctatacagaacagagatcctttccaacaattttatccaatcattctctgttgtttcttatattattttcccctcatacatgaatctgttttaaaaatgcatcaacgaaattaaacattt

SEQ ID NO: 32644 - DNA, 285 bp, Glycine max
agcttccctcttagtaatgtcttagtcatcatatcagcaccattatcatcagtatgaattttggccaactccaacagcttagcatccaaagcacctcgtatccaatgatacctcatatcaatatgcttagaccttgaatgaaaagttgagttcttaccaagatgaataacactctgactatccataaataatagatatttatcctgaacaaaaccaagctcctacaagaatatcttcacccatagcaactccttgcatgcttcgataatggcaatgaattctacc

SEQ ID NO: 32645 - DNA, 349 bp, Glycine max
tgatcaaaacaattatctaatcattccaatccattcaaatcatacaattgctcatccaaatcattctcaaacactcatttcatgcaaaacaatccactgcatatcattttcaatcaattcactgttccaacaagctttttggtacaagcaaacaactcaaagtgctgaaatttaaataactgaaatttgaagaattgaaatataaaaactgaaattaaaatgactgaacaacaatcataaaataactgaaaataaactaaaatgttcaagatgcacaaatttaaatgtcccgctcctgtggttgctcttgtgcatgctcattaaggtccaacacctgagcaactggtga

SEQ ID NO: 32646 - DNA, 285 bp, Glycine max
agcttgagcttcagcgattttatcatttaagtaattgtctttacatattataaaagtaactaaaatacaaccatttacataaaggtcagaaaaaggattttaaaagcatcaatttctaccatagatttcataaggaaaatatctatattttaagttttacctgatagatgctacagatattaatacatcctttttctccaatacaatggtgtaaaacccttgaaagtttaaacgagcaaactcagacctgaaaaccatatgaaataaagcctctcaaatcaaaat

SEQ ID NO: 32647 - DNA, 399 bp, Glycine max
  unsure (1)..(399): unsure at all n locations
agataatatacatagntnggcttttagggatttgatatgcttcatagccctataattgactgaggaaacgctctgaaattctgcaaaactaatgaatgggaaatcaatgcattgggaaagacaaaacgcctattttacagcttatcctcagtgtagttgccttcaagctcaagctgtatcacaaatatttatctcaaaatcattcacagattatgagcgcggacaaattatacacgtaaacacactttaacaaaccaaatgcttgctttgctaatagatcaaaaagactcgatactagtatttaataacgtttgtctttactagcatatatacatagtaggagtaattgattaaagaagtacgcataaaataataatttaccgttagataaatccatca

SEQ ID NO: 32648 - DNA, 284 bp, Glycine max
agctttctgaagttttctggttttccaaaccttgaaaacttgtgttattcatctttttcatccccttctccctttgccaaaaagaattcgccaaggactaaccgcctgaattctttttgtgtctctcttctcccttttccaaaagaacaaaggactaaccgcctgaattcttttgtgtctcccttctcccttgtcaaagaattcaaaacgacacagtctgagaattcttttgattcttcctattcccttatacaaaagtgttcaaaggactaaccgcctgagaa

SEQ ID NO: 32649 - DNA, 422 bp, Glycine max
taagcttgaagggtatcgaattacttgacttattacgggattaaacacaaatagcacacggggagtgagttatcacattcctaactaatagagagaaaacaagacaacatgtgggtctagatatcatataaacaaaataaaacttacttaaacataactgccatcatttcatcactttgtcgtcccacatcgcatcacaacataacacgtcttattcattcacgtactcagggatcaaaacacaatatcaccaagtcaatcaatatcgatcaatacataagtgttatgcatcatatacactaagattcaatcctatatgcaatgtggtaccttgtcagtgaaaaatatacactaagattcaagtgaagattcatgagaagactcaagatatgcaagaacctcaagagaagcatcaggataag

SEQ ID NO: 32650 - DNA, 282 bp, Glycine max
agcttctggtgggacatcttgacttgctttccaatctgacattcaccacagattctgccttcttctattttcagattgggaatgcctctaacagcacttttgtcaaggattttcttcatgcctcttaagtgcagatgtccaaacctttgatgccatattctgacttcatcttctttggaggatagacatgtggaggagtagctggtttcttggggtgtccataggtaacaattgtcctttgatctgctgcccttcattagaacttcactcttctcatttgtc

SEQ ID NO: 32651 - DNA, 429 bp, Glycine max
tgacaaaagtgcgagaaaggtgaaagtagcccaaggatcgacccacataagtcaaacaaatgacacaaacaaagcaagggttaaccccttcaaaggggaccaaggtatgaatattatacaccgttgatggcaaatctggccaccatcgttgagcaagccttcaatgttgaggttcccatacaattaccccctgtacctcccccagacctggtctgcatagaactaagcactacaggtaccactgcaactatggttacaacatcgaagactattgggccctcaaggacaagattgaggaacttgtacaagaaaggttacctagcccagtttgtgaaaaaaccttataacaaccaggccgaaggatgacctgtagggcacaacaaggaccatctcaagggaaaagacaaaggacaagatagaaggggagat

SEQ ID NO: 32652 - DNA, 278 bp, Glycine max
agcttttcgattcattctatgaacccgtggtggtccacattgtgttttgtgtatttctattctcgtttcatttactttttatacccccttttgacgtgcttaagccattttacttaagtcatttctcgcttaacctaaaaataaaataaatttccaccgaacgtttgaattgtattatccgttaacttcggttaaaatgaattccgaccgttcggtcgtgccgtaaccacgttggaaatcaaaaagaggtaaaataataatataataataataaaaaa

SEQ ID NO: 32653 - DNA, 303 bp, Glycine max
tgatttgtgagttgattctagccttagtttcactttggttattagtcaattcattcaaggaaacttccaaagaaaaacgtccgatcaattttttttattattttatttaaagatattttgattattttattactattttgctcttttcggtttaaccgaggttacaacatgaacgatcggttagattttgtgttaatagtgattaaacgagattaccacacaaatgaccggttgaaattcattttatcatttattagatgagaaaacgacttaaacgatcgattaaagctcgttaaaaataga

SEQ ID NO: 32654 - DNA, 278 bp, Glycine max
agcttgtcatcctttttgagtgactcaaataactctgagtttacttcaattgttgttctttacagaacttgtttttttctagatatacttaagcaaactcatcagttggcataaccttagaaggcttatgatttatgtttagaaggtctgtcataattaaaacaccaaagtattcttagaatcatatatagtgaaagttcaagatggagccgaaagaggaaccagagtctatggttggtctagcgatgggtgctcaggattaacttgtagatcttgag

SEQ ID NO: 32655 - DNA, 417 bp, Glycine max
tattcccagatatacagggcatccttgccttatataatcagaggacaaaacagaaaaataacagaataaacttccatatggattttagtcacaactcaacaataatgttaccaatactctccttaattgcatgcacaatttgttgctcaatatgctgattatcgtacccatttttaagcaactcaatagtagtttcaaagtcagattgcacttaaacgttatagttcccttcttgcatgtacatagtctctcatgcaatgcaaagaatagtatccctctccacttcacacaaatggcaaggagtactagagaatcctctctcccaatgagcaacatagtccccaaacctcctctggcaatcttccataaacgagctcttgttcggtcttcacataatatgcgaatgtttgatctaaa

SEQ ID NO: 32656 - DNA, 287 bp, Glycine max
agcttctccagtgatttcttcgagaggatctcttctggcctcggcgactgcactctacggagagtggagtctcagcgtgaaggaggaaaacctaagctagctgcttctgctaatactatgaaccattgcatgaaggaaagagtgagatgtggaggaatattcagtggcttcgttatgaattcgtcttcatcaacaacgtcttcttcgtcttgggtttcttcttctgttgatgatggcagaggaaggagttggggttgggcgtttgctagtcctatgagagctttcac

SEQ ID NO: 32657 - DNA, 371 bp, Glycine max
tttcagtggaatgcttgatagcatcttgcatgcaccaatgtcattctttgacaccactccctctggcagaattttgagtcgtgtgagttttaattaacacccctttttcacattaatttctgctagtaaacaacgtaaactacattctttaaattatattgtttggacttactgtcttatgaaatgtttaggtatctactgatatactttgggttgatatatcaattccaatgttagtaaacttcgtcatgatcacgtacttttcagtaatcagcatcctcattgtaacatgccaaaatgcttgggaaacggtcttcctcttaatacctctgttatggctgaataactggtatacggtatgatatgcctac

SEQ ID NO: 32658 - DNA, 286 bp, Glycine max
agcttgtactaataaatgatagatttttctttgctttcagatttcacctatcccaagaggctgccttgaggtatctccagaggcccaagcttgataatctttctcatgctacttatgacaaatttataactaacaaatcaaattcttaaattgaccaatatataaaatttgggcaaaattatatgtagcaagcagttcattattgaaccataaactatagtgactgctacttctgtcaacaagtcgggctctttagaatctataatttataaagaaccaacggact

SEQ ID NO: 32659 - DNA, 496 bp, Glycine max
  unsure (1)..(496): unsure at all n locations
tgcaacggtgangantttagatacactgggtattcatcgacactatcagaaactcaagctatgacctcatctcactctaatgggactcgacttaaacctaacaacagttatgcaacagcatattatgacctcactacttattctcggaccccctcctttgatgacacttttccatacctgctactttcatggtgcttatgcacagcacactattacatcgcttagacctgctacatatgcacaccaatgtgatggtcaaaccatcagcttcctacaatatagccactaaacagagctttgtgcactagagcacacgtctcttatatattgaaccaactacaataatagatggtcatacattcccaacaacggtgtttacacccgccattatataaagaccctcgtcgtagtatctatctacataatagaatagtgcctcttacctcggaaggggattcgctctcgttcttctaacaataacatacctctgaaaacg

SEQ ID NO: 32660 - DNA, 285 bp, Glycine max
agcttgccacccagctcgcctatgcgagcattgttgcttcctccagaagcaacagccttctggaggaatcttctggagggcccaagtgggcctggttgctatttgcacccctatttttactaaacatacccccctgcctttttttggtgattcttttttcgtaaagttacggaaacttatgaatttcgtaacgatacttgttttctttccgtaatgttacggaaccttgcagattacataatcatcccctttttgacttatggaatgttacggaacctcactaat

SEQ ID NO: 32661 - DNA, 562 bp, Glycine max
  unsure (1)..(562): unsure at all n locations
cctccacacaccccttctcatctatcanntanactntccttactaaatattcacttctgtntcaantattttcagttataagaccacctttgataccttgctatcacgtgacactatanaacactcacgcttgacatgtctacgtgctaataggcgaaacttcctgcttttattgctgaccttttagtgctacacagtagatatgcatcgggtgtatggataccttgttgactttcggtggtgagctattgcccaatatcaaacttgaccaatcccgacccaaccctggcatacacggtagtgagaacctgtgatgtacctaaacaggcgaactcctggcattctaaagattatatgaacctacaccacaaagcaccgatgcttgtagaggctgaccatctgagaattacgcgtgaaatgtggaatacggcctctggtaatcaattaccaatggtgagtaatccattacaaggcgtaaaaattgaacactaggggctaaacaggtctctggcataacatcctccccacgagtataactaaagcacgctcgtaaatgatgccg

SEQ ID NO: 32662 - DNA, 285 bp, Glycine max
agcttacttataacaaattattttttttttttcaaatacccttacatatcgtttaaacgtgattatatcttgggcctttggccctccgtagaataaaaacgatttatattttctaattatccatacaaaatccaattttaaaactaactcttttatgtacaaaaaaaaaaaaatactctttcaacgtaaatttttcacaataacacccaaacgcaatagtgcaactaacttgtaaccaatgtattttagtcagaggataagaaaacatcaatccaaagtttaact

SEQ ID NO: 32663 - DNA, 425 bp, Glycine max
atgaatcttggaggagaatatgactcaggatcaagaggataaacttgttgttcatactcaaaagctccatcattatccgcagactaggtagccttcatagatcacttcaccttcaaggtggtctcccgatgctcaaaaagaagaaagaataacttgtcctactgtcaaagtcaattgcaaaccgattaaccggaatcaaggaaaaatacaataaagagcttttcagattatgaacacaacgcatgctaggcatttttgaattcggattcaatgaattggcaaagaagtcaatagtagcaccgcaccacgtgaatttgcaaacattctctgaggtaactgatagagatcaatatataatgcaaactttattattaaaattatatattcagtaagaagttggtgtcttagagacacatatacatgac

SEQ ID NO: 32664 - DNA, 300 bp, Glycine max
acctgcctgcatgcatgcttgctatgaggaagtgttttttggtgaaacttcctgcttttattggtgaccacagagcggtacctggagatatgtcgcgggggtcaggtaaccttgctgacgtcaaggatggtgttatggcccaaaaccaaccttgaccaatcccgacccagcccgggcatagtcggtcattgagtaacctgtgatgtacctaagcacgcgagctcctggcagtcaacagataagaggaacaatgaccacaaagcaaggaggcttgtggtggctggccagctttgaattttg

SEQ ID NO: 32665 - DNA, 79 bp, Glycine max
aataatgcaatggaagacataaccctaacacaaggttcctcaaccttcattgttctgaggatacaatctcgaacagcaa

SEQ ID NO: 32666 - DNA, 562 bp, Glycine max
  unsure (1)..(562): unsure at all n locations
ccccaccctctcttctcgatcactaatcctaacattctatcctcntcatacacactantgtnctcatccaaaatctctattctctcttctaggacnaaggacaaanntttgttgtcgcctcgagctcccaacccggggtantntnttanagtcgtacctggcatggcatagcaagactatctnaagtatttatattgtctctttcatcttctaagtgatcttgttcgatatctataaccggtatatatatttacatcctccttcgagagcatgcctattgatagtttcgctggtacaatttggataccatattaaatggctctgcaattaaaaatagccattcgtatttcttctatcactgactgtgagacaacacaactcattggttataccttgtcagtgtgaggaaacatcctttaaatatgggcaactcatctttctcttagacatataagagtcaggttcttgcctacaaccaaaagcaatcgccttcttaggtcgtgtgtcttcgacatacctattcacaaagctataaactttctcattttatatctttcatacg

SEQ ID NO: 32667 - DNA, 362 bp, Glycine max
tgagctcattgttgctgccccacaaagcttcacggaatttgtctcggccctgctctttcttgcgagccctttttatgtctcgcccatgatcagatcgatcaccacccagcatcctgctaaagacattaaagaagcactcctatgaggcaacctagtatctctaacttttctctttaatttcatgtctcatacttattcattttcttgaattatctcatgaattcgcctaagcttatacataattaataaggtttaaaagggaaatatatataacaacaaatttgcaaaataaaaaaatttcaactcgcctaggcggtggccagctcgccgggtgaacaggtctgtacaaaataaaaagggga

SEQ ID NO: 32668 - DNA, 285 bp, Glycine max
agcttgtcaagggaacaattatgcatgaattcatagatgagagctttcttgcgtccttccaaacagaatcaaagaagtatgacaacattaacatgagaagttctactgatacactattagaaaatatgttttctacatcggttatttatgactttcaacatcggtttttcaaccgatgttgaaagtaccgacgttgatagtattatcgttaacatcgggttttgaaaaaccgatgttaacgtaaaattaccaacatcggttatataaataaccgatgttgctaat

SEQ ID NO: 32669 - DNA, 376 bp, Glycine max
tccatcacaagataccttggacacgcatgtatatggcaaaatagctcacaaaatatacgtatgtttaggtagcaaaatacctcaaaaaaaaagagagagagcaaaaagagagcgagcaagaaaagaataagaaaaaaataataataaaaagttgtctagctaaaaaacaacatgcttgtgaaaagagataatttccaacttttctttgaaagattttactgatcttaaccagttttttgaaaaaaaaaaatgtgtgtacatatttgaagggtaaatgctgtgaaaagtttttcgaacacccaagatagactcagatgaatgcacaaattgatagatgaactattttggaaacactgggttgactaaaataggaaaa

SEQ ID NO: 32670 - DNA, 284 bp, Glycine max
agcttttccctttagcttgattgggcactcacattttttggaactagtcaccttagataatgtattcttgtatggtctatattttccactcctttcacaacccagaattacatatgtcttccctctaatattctttttattacttcctgtatgtgtttctgacctcaaaatagtaaggacaaatccattctcttttgcaacttctcgagcccaattcagcacagcatctcgggaagggaaaagctgaaatatagataaaagataagaattttatggtcacatgt

SEQ ID NO: 32671 - DNA, 404 bp, Glycine max
  unsure (1)..(404): unsure at all n locations
tctcgcaggaactctgtgatatttctagtactcaactttctagccattttcactggtatttacctcctcctctttggctcaacaacttgtgatgaatccacgtcgaggctctactttggtggtgccattttgctcctcatttccccactatgtatccctggaactatatatgctcgagattggtttcaccatgccatccattccagctttcggatggaaggttccggcttcattcttgttcatgttgatgatcttgagcttcataaggaactcctcacatgtcaaaacagcgctctaagtctcagtaatggggacagtcatggcctgctgagtgagaatggatccatttatgtaattagttagagtgcaaaatctagtgatntgtgttgtgacaagatgtttgg

SEQ ID NO: 32672 - DNA, 283 bp, Glycine max
agcttataagaacaattattttctcaattatttccaaatatgcatgtgaattaggaagcatcaccaataatcaagccatggctattgtgcaagcaatcaatggggcaaaacacaccaaatgattatgatgatggatggctcaaattctcacaaaggtaaactcatcactttcaaattgagctttcaaaactatcatgacatgtagaggagaatcaaggatttcaagtcacaaaatgtcaagaacttttattttcaaaacaattacccatttcttgaacatatc

SEQ ID NO: 32673 - DNA, 344 bp, Glycine max
taattgaatctcgtaatattaagaaagataaattttaattattcaagacacattaataattaatgcaaccccccatcttaattattccgaggccacttgagccaacatgtggtatcagagcatgtttcttgagaaaagtttcacaacttcaagataaatggcctctttaaatactctatttttggaaagtaatttcatgtatagatcaaatctgaaatcattgcaagatcatgatgaacacttatccaacttatgtctcatgaaaaaatctcatgagaacaacgaggaagaatctgttaggaagaagtggtacatccacagaggatgttccaagcatatgacgg

SEQ ID NO: 32674 - DNA, 277 bp, Glycine max
agcttattgattttttcacgggtataaaagcacagatatgctttgtgctttccagagcctatagcagaaacactaagcccccagcagagacagaggatatatccccattatacaatactaaaaaggccaacaaggtgatgaaaagttatgtcattacttaaatcaactcaacctttcaatgctgaaaacatcatattaaaattcaatgcttaggaaacaattgacagaagtattcataacatgacacttgacagtgacataacaatcaagtgcaaaa

SEQ ID NO: 32675 - DNA, 420 bp, Glycine max
tgagccttgtggatgaaaaaaaacatggctgggtgataataactccactaaaggtggtcaaccaagttttttgatgacaattattcatcgggagaaccaatgtattatctgcaagagaacaaaaatggctatatgtctatagttctctctcatgcaattcacataagcgctgatcataataaaaatacataaataaattcttttttgttttttcttttttacctatcaaaccattttaacttaaatatatttcttcattgctaacatatttctctatgaccaaataacttgtagatatctttattactcacatattgatcttcttttgttttctcatcaactcgctccattttatactatatgacgtgctatagaagaaaagataaattgccattatcgaccctgaatgtgtagaatact

SEQ ID NO: 32676 - DNA, 279 bp, Glycine max
agcttaccttgataccatgccaagtagttttttgtacaaggtaactttacacacatgcccaaccacgtgcgtgtttgtctcaaaagatgctttaatttggttgtgttaaagtgtcatcatgttgttcattacttcccgtatgtcaccaagggatttttgtaggagtctctttaatgaccaatgagcactctcaaccctacaaatgaaatatacaacaacgtataaacaaccgcaacattttcatttaagtcatcacttaaacaaatcaacacaaacaaa

SEQ ID NO: 32677 - DNA, 387 bp, Glycine max
  unsure (1)..(387): unsure at all n locations
ngcattctagaatttgaaagattgcacaagtctcatcaagttacaattttttggagaggctctatatcttgaaacgttaaatctagaaggatgtacacaactcaggaagatagatccattcattggtcttctaagaaagcttacaattttaaatttaaaagattgcaaaaatctagtaagcttacccagcagcatactgggtctcaattctcttgaatacctaagtctttctggctgttaaaaaatgtacaatatacagttatttgatgaaccaagggatgatgagatttcggagaagctttgtataggtgaagctcctactcaatcccaatcaacatcctccattttgaaaaggttgttnttcaggcctttacatttggtgtatgc

SEQ ID NO: 32678 - DNA, 287 bp, Glycine max
agcttccatcactaggagtccagccttctccttctggagggggtgggacctctacagaccatgaacctgtgccagcagaggagcctcttccagatgcagaggatgagcttgttcctcctaagccatttatctttgagactgatccagtcactcaggaggaagcagcagctcaagatcctacttatctagttcatatctctctagcacccatccctgaggattcccaaccatctacaccagcatcgaagccagagcagcctattgttcaagatccaccaactacttcg

SEQ ID NO: 32679 - DNA, 363 bp, Glycine max
tgaggagtctcaggaaaatgttagagatgtcgctatcactgccagaatcttacgtgagcccagttagaggttagagacgagtttatcgctattggggttagaatgaacatgtgtaagggttcttaaatgatcaaataggggtttactttgggatgtttattgtattgaaattcttcttgtataattatgtgaaattatttgaggggttttactccccgtggattgagaaatattaatgtacaatctgtttgtgttttgaataagattatcgtaataaatagttatattgggattattaaattatgattgaaattgaatataagtgataaattgaatatatgatgacttgttgaataatatctt

SEQ ID NO: 32680 - DNA, 283 bp, Glycine max
agcttgcatgtagacctgttatatttaatcaacagtgaatatttcctctattgttcctcttgttctgtcatacaatggtatttcctccagacagtacccaaataactaatagtattccggttaaatacttttacgaatcatcatcaaacttgaaaattttgtcagacttcctcttgttcctcatactatgatatgcaatgaaagccatcttttgcaggaaaaatacatggctgtgtcaaataaaccatgcagcatctttttaatatgcatgacatgaaactta

SEQ ID NO: 32681 - DNA, 470 bp, Glycine max
  unsure (1)..(470): unsure at all n locations
agccaggctgnaattgagaccttggatccctgcacatcgaaacctaagctacagtgtcgctcttcttatatccatctcgtccagaggcttatatgctttttttttctgcacacatgggatactagccaggtcaagaatggattcatttattcctatggatctcccactggggggatcaataaaccgaacatctgctctcacattagtctaatcgataggtcgcataccatttgcctgctgcgggattaaacgcatcatgcagattcacggcacctttctggttgcatagacctaaccttactctcatagctgctgatgtcactcgacggtgctaccattcaattataaaaaaaatattcacgcatacactgggcctatatgttgaaaattatgccgccagctctgaggcatcaatcttgaccatacctcccagagtctttatgtttctgatatacaactagccgtggccg

SEQ ID NO: 32682 - DNA, 286 bp, Glycine max
agcttctcccttattttcctataaatagggggagaagtgaaaggaaaaaatgttcagccctcctggtaattcgagattacttgaaattagtgaaaaaaattgtttctgtgaagaaaatccaagcctaggtgcttccgtaacgtttctgtgggtaatttcacgaagattttcaaccgttcttcgacgttcttcgttcgttcttcgtcgttctttggtcttcagccggtaagttcccgaaatcgaacttttcaattcattctatgtacccttagtggtccccatttgt

SEQ ID NO: 32683 - DNA, 265 bp, Glycine max
gaatgctctattcagtgtagtagactagaatatattcatacggatcaacacatgcacagtggtcggagatgcatgggtcatccagagaaccactcacgaaggaacctccaatgcgaagaagtcctgatttcatctgtcgcctacaaaagcctacaatcttaaaatgaaagaagagcgaatgtttaatgactttacacctgaacattcttgagattgcctacgcttgcactgcctagcgacaaagaatgacaaatgaaaagctggt

SEQ ID NO: 32684 - DNA, 285 bp, Glycine max
agctttcattaagatgggggagttcaccgggagtggtgagtatgtgactcacggtgaattaccttcctccaggccaaatcattcaaggaaagttacagatcttcctcttgtgctgctgatcttctatgagggttcaggggggcctttcggggtggaggatactgtgcacgcagcaggtcctctgttagccctcattggattcttgcttttcccattgatatggagtgctcctgaagctttgatcactgctgagatgggtaccatgttccctgaaaacagtggtta

SEQ ID NO: 32685 - DNA, 351 bp, Glycine max
tgacttatctattcagacaatcgacgtagaatagtaaaataagtgactatgctctgtccaagaggataacgctgttcttttcatcaacccgtgtgctatttgtggtcctgttggtccacatcaaacacaaaataaaaaaacgcgcatacattcatggaactaatcatgtaatatgtaaattgtaaaaccaattgggtcacctgaagctaaaggaggatgtcattacatggaagaaaaattattggagagctttgaagtatgtgaagcaccggaatatctcttgactccttgctgatccaacgctcctattgttccagctggcagaaaaaaaagaagaaaaaagagacaatt

SEQ ID NO: 32686 - DNA, 279 bp, Glycine max
agctttaattcctccggaataataagttgtccagatgaggatacagtagcacaaaatttacggtatgaaaatagtgcattgatgcaaaggtttgtcacttgttcccgaacaagtgggagtggctttgacggaatctcactagcagctgcaagaaaaaaaaaaatggtaaaattcctacacccaaaaattatacctataaacaccatttaaaatattaacagaatgacaccaccatgggaacatttaaaataaataaagccaacaaaatttaatatagag

SEQ ID NO: 32687 - DNA, 391 bp, Glycine max
tggaccttcatgaaataaaatatttatcaagactcaaatagttgcaatttatccttatacaataccagacctaatttttaacatgtctttattaaacaatacttagaaaagttatcacgactttttactaatgcattagcattgaaggaaaaggctattccgagtcctataactgacatgaaatttagtgaatttatagtcaagagaataaaatcctagttctatatatgacaatcacactatgataaatgaaagggaacttcacaaacactttctaccagatttgacttaagcaacatcacagtaatgggtaaatcatgttatgagcttcaaatcgagtttgaaactttaccatgtgatagtcatgagcgtacactcatgattgccccta

SEQ ID NO: 32688 - DNA, 281 bp, Glycine max
tatcttcaaagggccgatatataccattcgaaagcatggtattggaagacaagttgaaggcttgccaaaggtcaaaaaggaatttgtctaagcaactgagcaagaccgaagaaaacatgtgggccttcattgaccaatacaaagagaagctaagtctagcttcaacccatgagcaaaggctagaggatgagtatgcaaaggtgtcagtcctgcaagaagaaagggaagcaagggagagggtgatcgattcattacatatagaagcaatgatgtggatgaat

SEQ ID NO: 32689 - DNA, 322 bp, Glycine max
tgtagttgagcccttatgaccctggttgaaccttgatatttttgcttcattgaatcccatatatttattgtcatgtccctcttgaggattgtttcaaggacttcactatctattgcctgtaaaaggtaattctttacctttaagtccttcaacttctgctcctcgatcaatttgcattgtgcctccgtaagctctattccatctgccaccatcaatatcccattctcaatgagatcccaatattctttggagcagagaaaattctccatcaacattgcccaatgatcataatgaccattaaaccttggaattgcaggctgca

SEQ ID NO: 32690 - DNA, 283 bp, Glycine max
agcttaaagcttagtaacctttaacttgaggggaagcattaaaataaggacatgtttcatgtaacatatgctagatgcattaaacgtttcataggaattgatgtctaggaaatagcatccatttatcattagcgttgtaaattgcatcatggtgtgtgtttgtgtgaagttgagtgtctttccacctgaagctattccatcatatctcattttaacagttttcacctggacaagacttggtagatgtagttccttaagggtaggtttggtttctaagaagggg

SEQ ID NO: 32691 - DNA, 415 bp, Glycine max
tcctcggggccatttcctacgaaggcaaacatttggaatgttagttttaccaagaaatgctacccttaaaacaaaaatggcatacaaccccctccaataaatacagacatcaatgtaaatttagagcaagcttatgcgcatacttcttcacgaacgttcacttgcacaagacattcttataactaagaaaaatgcacccatatacaatcaaggcaccttcgttacctaatttatttacatgtacttccaaggtgtatttgttacctacatcacacacatttcctttgctaaattcaacatacatgcatactctaagcactttggctatcaaaaatttgcatacgtgcacatcttggtatttctaatacctatacatacacaaacttcatgatgaatcttgactatctacacaata

SEQ ID NO: 32692 - DNA, 285 bp, Glycine max
agcttgtaggattatggggtacccatcacatgtggtactaggtggcggtcgggcaatggtgcacaacaagttttccacatccacaaatcgcgcataaacccaccatcccctgttgcccacctccaactgagctcacgtactcccacgtagcccatatcctcgtttctctcaacaccgggtccccatcaatcctcccaatctttccccaacatccaagtaactcaacattcaaacaacacaaaccatcacagccaagaaaacagggcaaaggcagaaaattctgcc

SEQ ID NO: 32693 - DNA, 330 bp, Glycine max
  unsure (1)..(330): unsure at all n locations
ntaaactcatcgtctctcaagtctttagtttagggagccaatccagtccttgtgttcggactctcagccacttatgatagccgccgatgctcccattactgcttcccctaagctctttgtcctttcttcacgccgcatcccatgccttgcgaactccttggagtaccctcacgttatggtcactaaaaccccgtgcgatgaaaggcgtgatgctttcgtctaatggcgctcctctcatggggtagccaagagttggtgcacaacaaacaattcttgcgccgctcttttcacatcctcggtcgaacgtgtcatacatggccaaaatggcga

SEQ ID NO: 32694 - DNA, 281 bp, Glycine max
agctttaaggggcaccactgtatacacgttgatgaaaaagacttctgcttgagggagagactaccatatgaaagagactgacacatgataggaagattgtcagagtataaatgtgaaggtaaagtcccacattgggtagaatgggcaagttaagtaacatatacgagaagaaaccataaatctaatgccttaagtttttttagttgaagtgtaacgtcaagttcacttgtatggtttgctcatgacccattagtgaagatctctcgagtgtttatcccttt

SEQ ID NO: 32695 - DNA, 332 bp, Glycine max
tggcattccttcttgtccatcacttcccttttagtctcttgtatacataacatatctattctttcttttttcactagttttctgattaaggcccactaccccctccccagcccccttatattgtatgttataatattcattattcctttgcgcctcttccttatccctttcttccatgctcaccattttgcataccattatgtcctcctggttacagcattagaatcccaaatattttgccatatcccaattgcttgcagcttcttttaccagctcacattttgtagaactcgtaactgactttaatactcctgttttgtaataatcattgt

SEQ ID NO: 32696 - DNA, 265 bp, Glycine max
agcttatgcctttgctaaactagaagagttgttcctagtacccaatatcatcacccctcccaagttcaaggtgtcagactttgacaagtacaaggggactacttgccccaagaaccatctaaagatgtattgtcggaagatgggggcatacacaaaagatgaggaactgctgatacatttcttccaagaaagtcttactggggtagctgttacctggtacactaacttggaaccttctcgagtccattcttggaaagacctaatg

SEQ ID NO: 32697 - DNA, 415 bp, Glycine max
  unsure (1)..(415): unsure at all n locations
tgatctcctcgaggaaagattgagagccgnggtttgatttggggactatacgatcgcagacatgacagatctttgcttagtacccgatgttgttattcccccgaagtacaaagtgccggacttctacaagtattaagggacgactggtcccaaaaaccatgtcaagatgtactgtcgcatgatgggcgcacactctaaggatgagaagctattaatacacttttttcaagatagcttgaccggagccgcggtagagtggtacactaatttggaagcttcccgtatacgtacttggaaggatctgattactgccttcctaaggcaatatcagtacaattccgatatggcccccgaccgcactcaactgcagaatatgttcaagaaagagggcgacacctttaatgaatacgcgcag

SEQ ID NO: 32698 - DNA, 277 bp, Glycine max
agcttgtgactcttggcaatttctttaaaactagtcacttaaaaagttgtgacttttgaaagaatcttcagaaacaagtcacttgaagaattatgacttttggaaatgtatttttcgaaatcagtcactggtaatcgattaccattaaagtttaatcaattacacatcaacagatgtgactcttcattttgaattttgaaaattagaacgtttagaaacactggtaatcgattacaagtactgtgtaatcgattacacaagttaaaaatgtttaaac

SEQ ID NO: 32699 - DNA, 310 bp, Glycine max
tgaacgcctaggagctacattatcaacggattcctgttcttctggctatacgatcggcgacgtaataaatattggctaaagacacgatactcctcttcccggaaaatatgaatctacaatcatctcaccaccatatgaggccatgggtaccagcttccatgaaaaaagatactattgaataaagaggacgagctgatcatgagatattgtgctcttacacagctctgaaaactcatgtgtcaatatccaatgatctgaggtggaataatgcacacacataccctctatttatagcctaagagtcacacac

SEQ ID NO: 32700 - DNA, 273 bp, Glycine max
agcttgttattgttaaaatttacttgtactcttatttttatttcttagtactactatctgacttgggattttcatttcttaggttttaaaagatcattgtatggaattactatccatgaaagctccagctgatgtctctacaattttggagcctgagaaagaagagatatctttcaaaactaaatctttctgggatgtggtaaaccccttctattcagaaattcaccttatggaagacaagatcaatcgtgatggcggaagcgagagtccaag

SEQ ID NO: 32701 - DNA, 269 bp, Glycine max
tggagggactcactggacactgtttttgagttttttatattgtgggcttatgcaggacgactcaggctagatgggctatgagaaatgcttcagtaatatgggtgaagatttaccatagaatacgcggagagctgtagatgacctttgctcagagtctagtgaataaagtgcttcttgtgccaatgcaacatttaaggtgtgatgggaacgacagccagactattatttgagacactggagaacatgaatgctttgactaggatgttcaa

SEQ ID NO: 32702 - DNA, 286 bp, Glycine max
agcttcatgttattggaatgtattctattgacttcaagccttccaacttctaatgagcaccattatcaatttcactatcaaagctaccagaccttttcaatgcggggccaatgctatctggtcgatttgaaggcagaggccatgaaatttacctcaactatatatcaaatgatatacacctcatatgccgcttggggctataatctacacataaaggaacaactaaaaatctattgaggaacaggtagagaaactaaagccaccaataagtgtaaaatgctcacat

SEQ ID NO: 32703 - DNA, 278 bp, Glycine max
atgctgagctggaccggagacaagatggctagatttcctatgaaccaaaggagtcgttgcctaaagaaaacaggcacaccgcgcgtgtgagatgcagattgtggatggttgactcgcgaagttcaagcgcaattcatgcggtgagagctatagactatgatgatcttgattatgacagcattgctaacttcgtgagtttcgttgttgacaacggggagagaccacggatcaatcctgactttacattcctgtttacacctattccttcttactgtaac

SEQ ID NO: 32704 - DNA, 390 bp, Glycine max
taatgaaattgctatgattaaactgagtgtgaaattagaaaatcttaatgaaaatgctatgactaaacattcttcctcttttacgtttactctgaatcagggaatgtttacatgctcaattaggatcaaattcatatgtatattttttatccatgactccatgccaaaaattggttgtgtctgtgtatatttttttatttctattctaattaacaataacagatgaattgatatgtatttataacgtacaaacacttgtgggttgtactctttccttttttcattattcttagacaaaaagtatacactacaatagatcaatattttctcattgaaaatcatatttacttcgatagtctgatatatatttttatacaactttcatgtgta

SEQ ID NO: 32705 - DNA, 315 bp, Glycine max
agcttttgcatgtttaggaagttctagatatttttaggtccaagttccaaagagttctgagagattttgttgcgtgaagatctgcgaagatgcgagttcgaaccttaagccgttctgagaacttgatatgagattgtgagtgattgtgagatcctacaggtgaaggagagatcctcaccactggtgtttttgcggtctttcgtcttgatcttatcttttgcgggaaggaggtttccagactatgtaaagctccatcctgtgttggatcttgcctgtacgcacctactattaatatgtgtctgtctctgtgatgat

SEQ ID NO: 32706 - DNA, 384 bp, Glycine max
tgaagtagttcccccatctccatctttgaatatcttctctgattccccatctggagaagctgttgctccccctgaattcccagcttgagaagatgttgatctttctgattccttatttggagaagttgttgctctctctgattcccctgtttttccatcagacagatgaggaggatgctcagacacaggacacacaggacctgtctcagggattttaaattcctgaggattttgctttttggatattttttatataattattatatttcagtttagtgtcttagttattttggttaatgtttatatacactgcttttttgtttgtggatagctagtatgcttgttttgaagcatatggaatagtttaacttgacttggatgatt

SEQ ID NO: 32707 - DNA, 315 bp, Glycine max
taacctccttcaactgcttattgtatttaatatttgaagagaatccttgtggagccttcacccgacgactaaactgataaataattatccttggcttctcggacaaagtttggcacgctgggggcaagattaatcttattacaatgagaccttggatgccatcgtgatcttatacccgtgagaggttgatcttgacgggtcgggaagccatccttcgccttgccttgaatgttaaggagcgtcccaatcacactgtcaccaacatttgtgtccacatgcataacattaatacactgtctaacgtcaagatctcac

SEQ ID NO: 32708 - DNA, 373 bp, Glycine max
tatccaaacatacccctaaatatacttgtgaaatttaaaactatgtttgtggactttacctcgttgaaacccattacacaagtaaaaaaattatttgtgaagtaaaccatgtacttggtcttcggaaaagagtacgctaaacatgtgttttggcttgtaggtgattgaattgaacagaaagaaaacaattgaaagtgatatgaaaatgaaccgagcatttagaaatgatcagtgtgatatagtcactaattcaattgttatgtacttttcgtctcacataaaataatatttattggagaacttgacccaataagtattggttgattccgttctattatgctatctataagtgtattctcatggagagacatga

SEQ ID NO: 32709 - DNA, 324 bp, Glycine max
agcttccatcaagtggtaatcttagcacaagagcttcaagtaggtgctccttaacctccattaattttttttctttaccttctcttccattgttgattcttcatttttctccatgtatctcctcacatgtcttgttctaaatgttgttaacatgattctttagagtttccaccgattaaacttgctatagaagttagatttgattttctatggttcaaatttcttgttcttgttcttgaaccatgaattgtgttgagtttaagttcctttgagttttgtcttgatattttttgtggctgaaacctaaaccataaaattcttaca

SEQ ID NO: 32710 - DNA, 386 bp, Glycine max
tgagatgaggaagtgttgaagggtgaaacttccttcttttattgttgaccacagagtggtacctggagatatgtcgcgggggtcaggagaccttggggacgtcaggtggggtgctattgcccaaaaccaagcttgaccaatcccgacccaacccgggcatagtcggtcagtgagaacctgtgatgtacctaaacaggcgagctcctggcagtcaacagataaaaggaacaaagaccacaaagcaaggaggcttgtggtggctggccagttgtgaattttgtgtgatatgtaaagtaatggcctctggtaatcgattaccaagggtgggtaatcgattacaaggcttataaatgaagacaggaggctaagatggtctctggtaatcg

SEQ ID NO: 32711 - DNA, 323 bp, Glycine max
agcttataagaacaaaattgcctcaatcatttccaaatatgcatgtgaattaggacgcatcaacaagaatcaagccaaggatattgtgcaagcaatcaatggggcaaaacacaccaaatgattatgatgatggatggctgaaattctcacaaaggtaaactcatcactttcaaattgagctttcaaaactatcatgacatgtagagaagaacattagtaacataaggaaaaacattagtaacaacaaaaggaccaatccacttagatctcaacttaccactcatgagtccaagcctagaattatacaataacactttttgccc

SEQ ID NO: 32712 - DNA, 239 bp, Glycine max
caatcctttccctctgaagccaaaaaaagaagggaaagaaaattctcgatctaatgcaaaaataaaggaaaggaaattccccatctaaaaatgggagaaagctcaaaaaaaggaaaggaaatttcctatccaagaatgggagaaagcgcaaagaaaacaaagaaaatttcctatccaagaatgggagaaagaacaaaagagaaaaggagaagaaggaaagaaagctcctgatccaagat

SEQ ID NO: 32713 - DNA, 319 bp, Glycine max
agcttcctttacaacaaagaaatgagaaagatgaaggattgaagaaatacaagtagtggggatgtctcctccacctctagaacctcacaatcactcacaaactcatctcaagctcttaggatgacttcctcttcaaggtctggtttttgtaggtcttcgcacaacaaaatctctcaaactctctcgaacttggacctttctctctctaaaaatctctaaacatgcaaaagcttcgagaattgcccaaactcctctccaaaatttgatttcaggcttaaataggtgactttgtttgtgctagcgtgcttagtgcgactat

SEQ ID NO: 32714 - DNA, 382 bp, Glycine max
taaagcatggtaagctttagcctattgagtggtatattaaatgaaaaatatccaataatatctttgattatatttttagaataacttagagtatcttatattttgttaagattattctctatatttcctaatatttcatgatttgtttccatattgactattagtataaataaggattagtgctttatgttttagtcatactataacacatcatatcaaataaagtcaacatcaataatctcactgtattcagtttcttaattcctattcctctctctctatacctaaatccatatagttttaacacacgtaatgtatcagttcacactagcataaatttaaaaacaaaatccaaatgatgatcataagtggcgcacatgga

SEQ ID NO: 32715 - DNA, 317 bp, Glycine max
agcttctgaaaacccatctgagaaataaataaagcaaagaaaaccaattcgtccacccatgatcaaaacataatcaataatgaaaactttcccaaaaccctcgccatttgttcagaccccaatccgaaatttgccttagaagagtgaaaagcacgaagtcaacaaggaaagtcgccatgggtgtgtttatgttaccttggtgggatcgatgtgagtgccgttagaagaatcgcggatggtatagtcctcctcgccgtacgaataaaggatgtcaccggaacccaaatcaaagccgttggaaccaccgatgctgcgac

SEQ ID NO: 32716 - DNA, 377 bp, Glycine max
  unsure (1)..(377): unsure at all n locations
tgtgcaaactaaagcaggttcttttatattcaagttctctctctccaccaccgacttgtgaagatttggaaccagctntgcttacgtttcttgcttcttctttttcaaatttcaatcaatcacttccttgttttgactactctgtgtacggttgataatggaaaatgagtaccatgctgctgccatttattctgtatagattatgaatctttatattttggaatttgtatgttcaccatattattaactacatatgattggtctttaagctaacattagaaaatgagccatcagagttctttaatttctaggagcctttccctgaattatcctataggaacttcaactaacatggtatggtatgatatgatatggat

SEQ ID NO: 32717 - DNA, 267 bp, Glycine max
  unsure (1)..(267): unsure at all n locations
agcttgcaagatctggttattattcttagttttttctttgttttggattattggtatatactacttgcttagctcttcaatcatgaaccatggttgatcaattgttctccaaattggaatagttgtcatgtagtatatgaagtgtgggtccactttgttttttttttttttggaggggagtaggctaagtaaggaagagggggggccantcctccttttgcctttaatgtgtaagacagtctccatcacatctgtatcgaacatttt

SEQ ID NO: 32718 - DNA, 373 bp, Glycine max
ttgcctcaaaacaaagtgtttccattacatgcattgctctggtaatcgattactaggcagtgtaatcaattactagaagataagtttgaaaaatagctgtttaaaagggttttgaatttgaaaattgaacctataatcgattgccagatgtgtgtaatcgattaccagcaacgatactctttaaattcaaattcaaaagtcatgacccttcaaaatataactgtgtaatcgattaccagaaacctgtaatcgattactagtgaagaaattcagaaaaagctttttgaaaagacacatctcttcaaaccattttgaaaaggcacgaagggcctatatatatgtgtgtgtctgacttcaaaaagcaagagagaga

SEQ ID NO: 32719 - DNA, 304 bp, Glycine max
agctttaataatgctatttactctatttataccgacacaaacgtatttaattcttcaagaggttcgagttttgaagtcatgttcaatgaaaatattaaaataagatatgtgccgtgtctcatggattaagattagggtgtaaactccacgatgaaatatttttaccctccttgttaatgccctaacaaacaatctgttccccatctatgcgacaaatctaatgttcatgaaataataactatcgttgagtagtatcattatttccttcatgtataagattaattagttaatatgctgataccta

SEQ ID NO: 32720 - DNA, 380 bp, Glycine max
tgcgactgatttttgtaatgtgcatttcatgcattctaattaagtagaatcttaacaaacttaactctagaatctatttccaattattggttcttttttttttttaggttattgcttcctactttaaatgaggcttaatatcacttttagtctattatatttcagaagtgtttcattctagtacattaaatttaattttttttactctagctatttaagtttctaaaatgcctcattttagttcttttgatggtttcatgttaaggcatgttagcaaatgcttacgtgtccgttaagttgtcttgttggtctgtgcaccatgtacacttgtttttctaatgtgaaaataaatataattaaatttttaataagattggaat

SEQ ID NO: 32721 - DNA, 297 bp, Glycine max
atcttgacacatttcataagtttttaatgatgttcatgtcctttatgggtggggtgtgatttgcttcatacacatgatcatattacttatatgagtgtcaagtggaatcacttgtatgacatcttgtcgatattgtctaaaaactcatgaatgtggaaaaaaaaatttggcccaatctattaaccatgctggcctaatctattatagaaaaaatgcgttaaatcttattaaataattgatgtaaactcacgatgctttagaactcttgcacacacaacacttaaattactcccaccc

SEQ ID NO: 32722 - DNA, 324 bp, Glycine max
tatgctgacctgatagtctttttaaaaactttcttcacattaaaccttcaatatttctttgatagttgtttttacaaaaaaaaaaataacacactttctataataggctaaacaagactttaatatataatttggcttaattgttaatctaacattaatttagttggtaggcctacaaatatattaataatataaactgaaatgatataaaataatccaaaacaaacaagaacctcatacttgaggtagcatcattcaagtctataaaaccaacatattaattattatcaacaaagaataaaacttacatcttcattccatttg

SEQ ID NO: 32723 - DNA, 313 bp, Glycine max
gagcttgaaagattaacattattatttgatgcaaggcaaggtataaattaaatggacatcattaaggttaattaatggcgaactatatttcatagacttagaaaaagggtaatggaatcataagaatttaaagtggagggcattctcataaatgactattcaactagtttaaaaatagaatcttagtttaattagatcgtgactaattgaattgtctaattatataatgtaaaataattaaaataagttagaattgtgacaccttaaaaaatacaactcacactgatagagaaaactctgtattgcgtcattt

SEQ ID NO: 32724 - DNA, 373 bp, Glycine max
tgccttaggtggtttgaacatgtatggagaagactctgtagaagccctggtaaagaaagtagatcgggtgaaggttatccctaattgctagaggtgtactataagtgaagcaattaagaaggattcagaggtcaatattcatttatagagtatagacatgatttgcaattgaactttattgcatcttttgattcacgtagttaattctacccaaagttgtcatcgtgacgagtgatcacatgatgtgcactataatggcgctttagtaccattgcgtcgcgactcacggctatgagctgctccattgaagctattgcagtgcagctctttgttgcacctgaagcggggcaaattgtggtgcggacacatttgt

SEQ ID NO: 32725 - DNA, 327 bp, Glycine max
agcttatcaacatcaaacttgtagaaagagttcttggggtcaagacatgagaagcaatcaagtataatgttacttccttcactaaagcggtgatccatctccacacatattttatcaatagcaacataaaaaatctctgcacggtaatgatgaagattagtgatagtcctcccttctgctcttgaacgaccccgaactggtatttcgtcatccatatttggtaccagaatacttttagcaacacaaaatccttggacatcggcaaaaaaattattccagccactctctctcattgtgcccaaccgagctttgacaacatcaactaat

SEQ ID NO: 32726 - DNA, 393 bp, Glycine max
tagagaggaagcttcaatggaggaagagaatgagttagagagagagaatgagagagagtggcagagaaattgaaggagaataaggagagaagttgaactttgaagtgtgtctcataagtttctcattcaacaaagttgggacaagtgttacacatgtttctatttatagcctaggtcactaacgttgtgaatttcattttcatttcatgtgaacctaaaagggatattccaagaatatgccaaaggcattttagtatattccctttagatgtcacaagcatggaagttgtggctctagcacataggaagcttccttgagaagcatgaaggtagcttccttgggaagcaaggaagaaagcttccttgataagctagagggggggaagtgcactt

SEQ ID NO: 32727 - DNA, 325 bp, Glycine max
agctttcttaatgcggcttctttcatttttagcttcggctgaggctggtgtctcaaagttgagtgcctggcaaacagcaaggggtggggtgggtcacagccatatcagtggtcaagtggagcaatgccctcagtgtggtgccaagttttcctcagttactactttggtggaccatgtgcaaaaagttcacgagaggagtggcaaccgatctggagcgaaggttacaattgatgtttgtccaaaatgtagtagaggatttcgagatcctgtggccctagtggaacatgttgagaaggatcacggtggaagttctaaatcataagta

SEQ ID NO: 32728 - DNA, 398 bp, Glycine max
gacctctaaaactcagcttctcaggaggtgagcttatttatgagagggtgtgtttagctaatttctaacttctcaaagaagctttctcaaagaagtttctcaaggaagttttctcaataaaacttctcaaggaaagctcctagtctgtaaatagaagcatgtgtaacacttgttgtaactttgatgaatgagagtcttgtgagacacaactcaaagttcaactcttctcccttttttttccttcaattttgtgctccccccctctctctttctctccctctttcttttcctccattgaggcatcctcgccaagcttcttatccaaagttcatcttggtggtgaagctccttcttccatggcttattccctagtggatggcgcctcctctcaccctctc

SEQ ID NO: 32729 - DNA, 321 bp, Glycine max
agcttttagcttttatttacatatccttgatagaaggaagaggacagagtatgctccaaatgtatttcaagattcaatggtgatcgcctagtaaatgtgagctacattcaaattgggaaatatctattggttataatgatgaaaggaaaaactctaaacaagatcctttattgttagtttcatatctactgcgtgtgtctatatgtattcgattgttagtaagaagttgttctaaatatattaatgttgaacaagatgcacaaggtggtctcacaggaagagaaattctaatggaattcttctaggattgtgcttgttctt

SEQ ID NO: 32730 - DNA, 400 bp, Glycine max
gacctataaaactcagctttgaggaaagatcttaccactctggcccaaactattgagtgttctatcttattctaacttggccccgacatcccatatttctgatcttaatctggataggaccaggttagtctgcgggcttgtaatgaagatgaacatgaacttaggatcacttatttctggtcagatttcactcattgctcagtccaactcctcgcggcttggatttccagccttgattactgccttgtgcaaggcccgaggagtcacctaagattctcttaccttcgagtcacttagcccagccattaatttggcctatattaagaagaattgttggaatctggatgacccttcggtcacttttccagggacccaaaaatcccgggctagaagatctgag

SEQ ID NO: 32731 - DNA, 320 bp, Glycine max
  unsure (1)..(320): unsure at all n locations
gagctttaggtgagactccattatagctttatgaatggangagcctttgaaatgaaatgactcttttgagatttgatttcactaacgagcctaaatttttaaaatcttttatgaggttgaaatacacgacattgaacaatgttaagaagataactaagtgattataggataacttggcagttaagaagccaccactgattacttctagtttttgtgtgttaagttggtaataactcaggttagaaggtttgcggataaattatatgtgcttgtttactttcaaagatgcattttgattgaattttattttcttaattgtt

SEQ ID NO: 32732 - DNA, 385 bp, Glycine max
tattgaaatcaaacaagataataaattatcctcactttataatagaagcatatgttcataaataacaaataagtcataagtcatcaaaacataaatcatttgtctaagtcacttgcatctagaagtcctaattctcttctaatggtgtagaaagaatctttggttagtggttttgtgaagatgtctgcaagttggtttttagtatctacaaatttttaaaacacaatcacctttttcctaagactaagtgctaattgactatcaacacttaccaagataagtttttattaacatagaaggttttatcatatcaaaataattttatttgaaataaaatataataattttgaaaagcataaaaaatattttaaacaatcaatcaagt

SEQ ID NO: 32733 - DNA, 326 bp, Glycine max
  unsure (1)..(326): unsure at all n locations
agcttaaagtatgcccgagtcattcattcctatgagatgntgntgaagtattggcgatcagaattgccattccttggattatagggttgaaccaagctcatgcttttacaaaaaggttcatcaagtcaagttgaaatatggaagtaaccgtcttgcaaaattggggcaaaagatgaatcgagtcacatcactgcttcgtctactgccaaacatatttaggattattgatgtccttgttacttccagtttcaccttgacaaagatgtcatggaccatgttgaaaatctaaattgattcaaccccatatcttgcgtaaaaattcgcaa

SEQ ID NO: 32734 - DNA, 387 bp, Glycine max
  unsure (1)..(387): unsure at all n locations
tcagaccatagcaactcaaaatctaggtatccaattcccctcaatttaatggattttcaaggtttgagaagtgaaaatgagaatggggtaaatttggagcaaactctcacctcacacaagtctataacatcaatctaaacttgctcaaactggttttacgcctaaaattctgccgaatcaaaatttgactcctcaacacccaattttaccctagaaatggctcttgccttcactttggtcatttgtttttctctcttgcacagcccaaactttctcataagttctaaatgacatttcaagctaggattaactccctttaacctccaaataccactaaattcagatttggcctttcaactctcaaagcctcactctntttccactcat

SEQ ID NO: 32735 - DNA, 322 bp, Glycine max
agcttctggtgggacattttgtcttgctttccaatctgacattcaccacagattctgccttcttctattttcagattgggaatgcctctaacagcacctttgtcaatgattttcttcatgcctcttaagtgcagatgtccaaatctttgatgccatattctgacttcatcttctttggaggatagacatgtagaggagtagctggtttcttggggtgtccataggtaacaattgtcctttgatctgctgcccttcattagaacttcactcttctcatttgtcaccaagcattctgactttgtgaagtttacattgaatcctt

SEQ ID NO: 32736 - DNA, 418 bp, Glycine max
atgaccctgaatcgtcgcctcaggaccatcaatctcggcgttgtgcacattggaaggttttggaacaatgttatgacgcgctccatgagacggtggatcaaatggataatagagatcattctgcaataaagcaggatgagagaagggactgattatgtttctagacacaaccgaatcgatggtattaaactcaacatttctctctctaaaggaaagaatgatccagaggcctacttggaatgggagatgaaaatagagcatgtgttctctgcacaaactatgatgacgaccaaaaggtcacgcttgccgccacggagttttccgactatgctcttgtgtggtggaacaagctacacaaggagagaacaagatatgaagagtcagtggttgctccatgggcggcgagaaaatgatcatt

SEQ ID NO: 32737 - DNA, 305 bp, Glycine max
agctttggcagaacaacttccttttgccattccctcgaggcttggccaaaatggtaaactggctgagcttgacctctcaacaaacaagctcactggattggtgcctaaatctctatgccttgggaggaggctcacgattttgatcctgctcaacaattttctctttggatctttgcctgctgatcttggacaatgctacacactccaaagagttcgttcgggacagaactacttgacaggatcaattccaaatggttatctttacttgcctgagtaggcccttttggaattgcagaacaattacc

SEQ ID NO: 32738 - DNA, 375 bp, Glycine max
tgtgactatcacgtgacaaggggctgctttctatttatttatattcagacagatgtcaaattgcatatctattaataaattccttatttcggaaaaacactgagagaatataatgtgaatgcgattataatctttaaataatcttgtaatttgaactaataaataactaatatgggaacaataactataattgttcaaagttcacatgtgatacagatctgtgtgacctatcctcaaggagctaaagagctgactttctacattgtcaatagaacacctgagaaacaatcgttatttaatgacgtgcagaaatgtatagctttaaagaagaaaagttcttatacgttcatattgcatgttctctcttcattgact

SEQ ID NO: 32739 - DNA, 316 bp, Glycine max
agcttgtttcttggcactacatttagtggggatacaggtaaatgtacacctttaaccttttcttgtatgtgatagtagatgggtctaatgtgtcaataacttcttaattcgggcaaaaatctaatcacgcgaaatttagatgctttattattaattcagctagatctaataccttcttgaccctggctctgcaggtcacgtgtcattgacctgcttgtattaggtgccaagaaatctttttaaggtggtgtactgcaaaattgcttgtctacacattaagagcttgtctaggagcgatttaatgacttgctcgggc

SEQ ID NO: 32740 - DNA, 255 bp, Glycine max
actttgcctgcaccttgggaattgcttaaagtatgaacgcgtgtggagaaagcatgctatagaacattattgctgcaaaaatcttgcgatccatgattctgaaatttaactatgttgtgtgctcgattgaagaatccaatgatttggatactatgacaatcgatgaactgcagagcagacttttagttcataagtaaaggatggtgtgttatgaaaaggagtgactagctccgtagattactcatgaagataggg

SEQ ID NO: 32741 - DNA, 319 bp, Glycine max
agcttctgacccctttccatattctgataaggcagcaaggtgtctctataatcatcaaaactctcccaagtactgctggaggcaccatcaagaagcacaaggttgccagtgtcattgaacacaccactagaaactctagcagtgaagccaccagtgttccataacttatcaccatttggggcagtgagaaccaacccatcatcagcagaaagctcaacttttgagccctttggtgcaggcttgttgtccctattggcaaaccaaactatggttctgtcttgaatgttggcataccaaatgcaaagtatgaaatgatcag

SEQ ID NO: 32742 - DNA, 374 bp, Glycine max
  unsure (1)..(374): unsure at all n locations
tgaatcattataaataaatgtgagaattcaatcacatgtttgtattacacctatcaaaggatacaatacacatgtcaatcacacaaaaatttagataacacatgttatatggtgcttcataaatatttggtttgattacaaagcataattaaaatgattagatttatcattttatatacctgaaatattaatttttgtaaccaatctgaacttttatgcaatttatacatgtatttcaacctttgaaagctactctacacgtgtaatccgaacctatgatcgaattatcatatttatttaaaatgatttgcagaataaattttatgttgattagttnttttttccaatgcctatatttatcgattggtttaaat

SEQ ID NO: 32743 - DNA, 324 bp, Glycine max
catgcagcttttaaaaaaaaatgtttttacattgaccaaaaataaactatattaactgaaacatgagttaccaaagaataaacatccaacatgaacaacaaaaacattcaaaaccgaccatcacccaattaaatctattaattgaaaattgaaaattatgactaagggggattaataagcaattgccactattcctcgccagccccacagacatgcacatatacccattaaatatgttactttgaagttaatcaactacattgtcaaagagtaaggtcagacctattcgattaagcttaaaaaaaaaaacagctatgcttgatt

SEQ ID NO: 32744 - DNA, 378 bp, Glycine max
  unsure (1)..(378): unsure at all n locations
tatcattctatctctcaaaaagtatgaaaggaagttcaagagatgcaggtaaagcatacccctagtagacaaatatttctatcttaccttcatgtagacatctgtatctggatcaggtgtaatatttgcttctttttctcttctgaacacctctgctagcaaatctgcagaatgtgaaataattttagttaaaacttgatttttcatatgaattttggctcgatttccaaattgcagctctgtgggctaaccataaggaggcccaactccttggactcatgctgagaaggccagggtttctctgactgtcatttctccaatatgaagatcattntgacttacaaactcattcatcccatgaccattataagtcacctt

SEQ ID NO: 32745 - DNA, 230 bp, Glycine max
aaccgatgaaagagatggatattctttaaggatggccgcacaccattttatttgacggccactcaaccaataagtttttagcctttcagacaagacaaaatatttcaccttgatcccataatgattcactgaccctgcgtccatgcattcactgcaatggtgagcgttccatagagaaagaatggatcataatttggatacatgaataaaagcagatagactgatgtaaa

SEQ ID NO: 32746 - DNA, 333 bp, Glycine max
gtaccagtggttcaagtaacatatggaaagttatgtttttcgttgtcatagggattgtaatttaaataataatagtgcaaccaactaattacttgttggtttaggaataattaattttgaaaaattttcttttttatttgtctgaaagaaacacgtaattaaaataatagatgattcaattaatattaatagttaggtgttgaatccactttatttcaccgggataatctcgttctattacatgaacaaggcagtactatatttttcataaagaccgactaaacaattctaatttaatctcaagaagaatctaaattaatttaaactgatata

SEQ ID NO: 32747 - DNA, 197 bp, Glycine max
gaccatattgggccggctttgggccccttacatacctcaagtggagacagactaacttgacaagaaagcagaacctataattgtggtgcgacatatgtcaccttactaagcctccttagatgacctaccaaacaaccccaaattaattgacagaagggatgtcgaattctatgaggcagatgtgtgggactggaaaa

SEQ ID NO: 32748 - DNA, 159 bp, Glycine max
tgtcctttctcacgcgctatgctcaaatcacttctatcgggtatgggacaagagccagcaacattgctacttaacacccagatttgagcacaacaaatacagaacgggacttgttctgtgttatgataaagcactacagaggatgaggaccttcacaaa

SEQ ID NO: 32749 - DNA, 280 bp, Glycine max
  unsure (1)..(280): unsure at all n locations
agcttggactcatgagtnggaatttgatgtctaagtggattggtccttttgttgttactaatgtttttccttatggtacagttgagatcaaaagcgactccacaaacaagagcttcaaggtcaatggacatcgacttaagccattcctcacaaacccttatggtacaattgaggacaatgtgttgtttaagtataggggggagtgtgttctttggttttggttttgttagttgtgttaaattagtttaatattgttagttttgttgggttctaaattaat

SEQ ID NO: 32750 - DNA, 391 bp, Glycine max
tgtaggattatggggtacccatcacatgtggtactaggtggcggtcgggcgatggtgcacaacaagttttccacatccacaatgcgcgcataaacccaccatcctctgttgcccacctccaactgagctcacgtactcccacgtagcccatatcctcgtttctctcaacaccgggtccccatcaatcctcccaagcttccacaacatccaagcaaaacaacattcaaacagcacaaactaccacagccaagaaaacagggcaaaggcagaaaactctgctcaaacaccaaccaaaaatcacagcttttctcacttaaagaccccagtaacaattccttcgatccaattcgttaaccgttggatcgactccaaaattttactggaagtctct

SEQ ID NO: 32751 - DNA, 261 bp, Glycine max
agcttctaaactttatacaatattgaatctctgataccacttgttggacaagtggcctcaaatatcttaagaagggggggggggttgaattaacatatcacacactatctccccaattaaaaccttatttcaccttcccttcaaactatcaattcccttaatattgaacttcttaaacactgattctaataaaccaactttaatatgaacattatacaactatacttaaaggagttccacggaatagaagacccaaactca

SEQ ID NO: 32752 - DNA, 393 bp, Glycine max
tcctcggggccatttcctgcgaaggcaaacatttggaaagttagttttaccaagaaatgctactcttaaaacaaaaatggcatacaacctcctccaataaacacaaacatcgatgtaaatttagagcaaacttatgcacatacttctttacgaacgttcacttgcacaagacattcttctacctaaaaaaatgcacccatgcgcaatcaaggcacctttgttacctagatttatctatgtgtacttccaaggtgtatttgctacctacatcacacgcacttccttggctaaatttacatacatgcatactcaaagcatcttggctaccaaaaattgcacacgtgcacattctggcatttctaatacctatgcatatacaaaccttgtgatgaa

SEQ ID NO: 32753 - DNA, 322 bp, Glycine max
agctttgcagaaaaagactccttttgaagcatggcacgactacaaaccaaagctaacaaatctgaagatatttggctgcctttgtttctcttacatacctcaagtaaagagagacaaacttgacaagaaagcagaacctagaatttttgtaggttatagctcaacttcaaaggcctacagaatctacctaccacaaagcaacaaagtaattgtcagaagggatgtcaaatttcatgagtcagatagttgggactggaaaaatgataagaggtctgagtttcaagaggagaatgaagatgtagatgaagaacccatgagagga

SEQ ID NO: 32754 - DNA, 388 bp, Glycine max
tcatgatatttcgttgttacttaaagatactaataatatgagtagatttccgtgtctagaatttttgcatgctcagaaggctacttagtatttttatttgtgttttataaacacataaccatcttatttttggctaagatcaaattcttttgaaaataatgatctccgtaattgtgatcagtttgacatagtgtgcatccaactattttgtttctcaacaaacttaaaaaaattggatctaagaggatgtgtttcccttatcccatttataagcaacattcatcaagtgaagcaaatcattcatttcaccttgtcctccctcctcattctgttgttccaaaatgatgcctctcgtggacacatttctttacacacatgtgatcattta

SEQ ID NO: 32755 - DNA, 317 bp, Glycine max
agcttgtattataaattttctttattttggcaaattataagcatttaattttcctattattatattaatttgattgatttacttttaattagaaattgttacactattggcacattcctttaatttatatgtatatatatatatataaaattcccaacttcgagtgcaggtcaactaatttctataccattttatttttacttcctatgtcatttttcacaatttgatttttccactactaaaacaagcatgaactgaaactagaagataagttttgcagatgattgtttccctaaggagatttttaattatatagt

SEQ ID NO: 32756 - DNA, 340 bp, Glycine max
tgaaatgccatgacgccaaattttgatcgagccattagcacctctgattagtgattaccatcgattgtgattttagcgttgtgaaatggggtgaagcgatttcagcattgtgtgaggtgtggttttctctgtgatgtcgcggactcgcggtacatgatggtgaagttggactggctcgtacctgatcccgaccttgttggggttggtggcagtgaagaggtaagtggcgtcgccggacgaagaagagaaagggaggaaggaatctaaaaagtggtgttagggatgtggggcatttttatccaaatcgaatgtttcaacttttctaacggggtgagaaatg

SEQ ID NO: 32757 - DNA, 325 bp, Glycine max
agcttgttaaaagcctgtgttttattgttatttttcagtgaggagacagctgtgttgtgtcagagtaaacagctgtgtccctctcttttgtactctatatatatatgctattggaaagcaataaagaaaagaacctagtgagtgacattttcctcacaaattcaaacttcaactaagctattacatgctccttccatttagaaacaaatgctaagtgtcagacacgttcgctaaagataatgtggcattctttgaatttcatgctcacttatgctttgacaaatcacaggggaccaataaagtgctccttcagggagctgatggt

SEQ ID NO: 32758 - DNA, 379 bp, Glycine max
tgttaaagaacttaggaaaaatcaagaacaagcttgttcgcacattgttcgcgtgtatgatatccactcgacaaggtttgaagtagaggagaccttcaatcttataacgcaacgtggcggaaaaaagtgggctgttaacttgaatggccattattgtcaatgcggaaggtattatgcgcttcactatccatgttcacacattattgcagcttgtggttacatgagcatgaactactaccaatatatagatgttgtttacacaaatgagcacatcttaaaagcatactccgcacagtggtggccttttgggaatgaagcgacaattcctccttctaatgatgcatggaaacttatccctgacccaactacaattcgtgcg

SEQ ID NO: 32759 - DNA, 322 bp, Glycine max
  unsure (1)..(322): unsure at all n locations
agcttatattgggcttattagttacctacattttattcatgctcaaatattaatgtccaaaaccaacggtccaacaaatagaattaaggcaagttgatcacaagcttagggttgtgggccacaattggccaagccaagaaacatacatttgattcaagcttctaaaatgaagcacaagcttgatgaaagcctaacttttgttgaagctttatgcaactaagctaagatgggtccaaagtctaaaaagaccaaaagtaagaaacttctaaaaatntaaaactagaattangaaagcacttattttttaaattttcaaaacaag

SEQ ID NO: 32760 - DNA, 321 bp, Glycine max
gtgtgaggattaaatatttttgaagaatataggtcagatcatctaattcttctcatgaagaagatgatgagtctgaagaggatgaaggaggatggaggaataacaggtataacgagagaagaaatcatagatgatatggaggtagacaaacagaggaaagggttgagggagtgaatgtgaagatccttaattttaaagggacttgtgatccggaagtgtatcttgagcgagacgtgaaggtcgagcaagtctttgtatgctacaactacaatgaaaggaagaagatcaaattggcctccctggagtttgagagatatgcct

SEQ ID NO: 32761 - DNA, 317 bp, Glycine max
agcttgtataggtcccctttttatggttattttggagtaaattgtgtaaataaatcttgttttaaggctaatgctgtctctataacatttccattggatttaatgatgaaatctgtgcatctttaggtgaaaaaagggctaagttttgaattgcaaaaagtagcaattgggctaagctcaactgttgggctaagcgcatatccatcactaaacacagcttcagcgcgcttaacgcaaaggagaatctggcagagcattagcatcaaagccgcgcgctaagtgcgagatcagtacgctaagcgtagcaagtgccttca

SEQ ID NO: 32762 - DNA, 379 bp, Glycine max
ttaaaggagaaggaacaagggtttcttttgagtgtacttcaatcttagctctagagaggagatgaaactttgggaaggagaagaagtgagaaaataagtgagggaggaggaaacttgggaacttttaaaacacaaaaaggtattttgtagtgtgattttggcttttttcaccttctatgattttctacaaactacaccccttctctacccactaatgaatgcccaaacatcataatatcactatcaacacaaaaatcatataattgatttgccacattcattaatcaatttattcaaacaaaaaaataaatttatttcctcttgcattttaatcaacacacttataatccattatataaaaatcatagtatcacattaa

SEQ ID NO: 32763 - DNA, 313 bp, Glycine max
agcttatcacctgcccatcttttgttgttccttcaaataacttgcaaattatggttctagaattctataattttctataggttacagtctgctagctagctattagactgttggattctgaatagggtttatcccaaatttattgaattttttgtttctaggcaatgtccagtcatgcttctttaaaatctaattatttgaaaccacaaaatttacagcctgcactttttaatgtgtatatgaaattcttcggttttagctatacattatccttgcaatctcttatttcacatggtagttcaattcaaattaa

SEQ ID NO: 32764 - DNA, 375 bp, Glycine max
  unsure (1)..(375): unsure at all n locations
tggtccccaaggctttatgaagactctcccaaaatctataggtgaatctgggatctctatcagaaactatgctagaaagaacaccgggtaatctaactatctcactgacgtacaagctagtcaacctctctaaagaatatctgatgtttattgggatgaagagagcagatttggtcaacctgtctacaataacccaaatggaatctaaacctttgggggtcctaggtaaccccactacgaaatccatggagatgctatcccacttccactcaagtatctctaaaggttgcaacttccctgaaggcttctggtgttctatcttagctttctgacacactangcatgcaaggacaaactcattaacttctttcttca

SEQ ID NO: 32765 - DNA, 322 bp, Glycine max
agctttgcgggtttggtttttttcttgtaaggatcgatgtgggtctaaaaaaaggcaagtttattcaccctgcttggacgaatgagaaaactggggcgaatgatgatggtgaggatgaaagagaagcccgtgctgtgactgccattccaatacagacaagttttcaaccaacccaacaatgtcattactcagccaataacaaaccttctccttacccaccggccaattatacacaaaggccatccctaaaatcaaccacaaagcctacctaccacacttgcaatgacaaacaccacctttagcataaaccaaaacacctacc

SEQ ID NO: 32766 - DNA, 380 bp, Glycine max
taaaggagcactcaaatcgggtgtatttacccctattgcctaaactctgaagagtccgtcagggcctctccctcctgattcaggttcaacccatataagatgctagcacaaagactctatctatgaactgtacaaaacacacaactcctcaatttttctcaaaataattttatctcgtcgtgcttgtgattaaactcactgagtccccacagtggttcccattacaatactcgtcgcgtattaacttctcgtccttaaagggtcttataatcatgtgattgtacgattcataactctcaacttagtgcacacaacatctcaatgcacatatatattacaagtcaatacatactcaatttatcacatacaatcgggctcaa

SEQ ID NO: 32767 - DNA, 291 bp, Glycine max
agcttcaggctgttcatttttttcaggttgctgcatggaagggcaaaagtctgtatggtggtcagcagaggagcacaaaccacaaacccttgcgacaggtacagatttctgattcaaggccagctgggttaccaagttgaccaatgcatccagtttgccttcaagcttcttagtttcagatgatgcagatgggtttgtagctacctcatacactcctctaatgactatggcatcatttctggcgctaaactgctgggagttggaggccatcttctcaataaaatttctggc

SEQ ID NO: 32768 - DNA, 375 bp, Glycine max
tctataccaccccatttctctccccctttggcaacatcaaaaagccaaactgcgtggcaaccaacacaagatgatataactaaagtgtacataatcaatcataagtcacaaccaaatataagccaatcatccataagttaaaaccaaatataatccaagcataaataagtcataaccaaatataatccaagcataaaagactaagtgctaattatcaaaagataatgaaagtttagaaaatgataacgcaaaaagcatagccaaatacacggcttataataaaagataataacatcctaaaaactaagacggtgggggaaggtcaaagccccgacgaaaataaatgacatcctcttcaagctgggtgatgcgggt

SEQ ID NO: 32769 - DNA, 311 bp, Glycine max
agctttgcaaatttagaatctgtgcttcaaacaagctttaaaatttggcatctgaagtctgagagctctgggcagataagtctgctaaagctggaggtggggttgaagtagaatatgcatggatgccatctattggtgtaaaggaatagggaatatcagctgctctgagcttggtcttccttgcctctataaaattaactatttggacgttcgcattccaacagttccttatgatataagctcagtcaatggtcgatcttaagttttcataggaggtaagggcatcaaatgccactcccctcgatctacac

SEQ ID NO: 32770 - DNA, 375 bp, Glycine max
  unsure (1)..(375): unsure at all n locations
tgagatgaggaagtgtagaatggtgaacttcctgcttttatttgttgaccacagagtggtacctggagatatgtcgcggggggtcaggagaccttggggacgtcaggtggggtgctattgcccaaaaccaagcttgaccaatcccgacccaacccgggcatagtcggtcagtgagaacctgtgatggattaccaagcttagaaaggggactggaacattgtggaggcctctggtaatcgattactagcctatgtaatcgattacacagagggatgggtcactggtaatcgattaccaggtatgtgtaatcgattacacagcgcattnttgcatatntcatgttctgaggatgtgtaattcgagtttagcctctgg

SEQ ID NO: 32771 - DNA, 322 bp, Glycine max
agcttgtaggattatggggtactcattacatgtggtactaagtggcggtcgggcgatggtgcacaacaagttttccacatccacaatgcgcgcataaacccaccatcccctgttgcccacctccaactgagctcacgtactcccacgtagcccatatcctcgtttctctcaacaccgggtccccatcaatcctcccaagcttccccaacatcaaagtaatacaacattcaaacagcacaaactatcacagccaagaaaacagagcaaaggcagaaaactctgccaaaacaccaaccaaaatcacagcttttctcacttaaag

SEQ ID NO: 32772 - DNA, 389 bp, Glycine max
  unsure (1)..(389): unsure at all n locations
ntgtggatatggtcttcaccgatgaaaggatcaatgtgggtctaaaaagaggcaaatctgatcatcaggctttgataaatgcaaaaaaactggggcaaataaagagggtgagaatgagggagaaacccatgttgtgactgtcattcctatacagccaagtttcccaccgacccaacaatgtccttactcagccaataacaaaccttctccttacctaccgcccaattatccacaaaggccatccctaaatcaaccacaaagcctaactaccacacttccaatcacgaacaccatctttagcacgaaccaaaacaccaacgaaggaaggaatttcgcaacgaaaaaacctatagaattcaccctaattttggtgtcctatgatgacttgc

SEQ ID NO: 32773 - DNA, 304 bp, Glycine max
agcttgaagtgaggaagtgtggtaatgttatacttcctacttttattcattgaccacagagtggtacctggagatatgtcgcgggggtcaggagaccttggggacgacaggtggggtgctattgcccaaaaccaagcttgaccaatcccgacccaacccgggcatagtcagtcagtgagaacctgtgatgtacctaaacaggcgagctcctggcagtcaaccgataaaagaacaaagaccacaaagcaaggaggtttgtgtggtggctggccagctatggatcttgagtgatatttgggatatg

SEQ ID NO: 32774 - DNA, 384 bp, Glycine max
tgccgcccagctcacccaggctaagtgggcctggttgctatttgcaccccccctttttactaaatgcacccccttctattttttttgtaattctttttccgcaaggttacgaaactttgcgaatttcgtaacaatacttattttccttccgcaaggttacgaatccttacggattatgtatttactcttttttagctttcgaagaagttacggaaactcacggattgcgcaaaaacacctcttttcgacttctgccatattacggaatttcacggatcgcgcaagcctgcttccttttgatttttgagacgtctcgggacttcatttattgtgcaacaaaggacgccaagtatctcaaagcggctaaccaaaggttgcatgtca

SEQ ID NO: 32775 - DNA, 321 bp, Glycine max
agctttagttttgtttaagaagttatattcaatgcatagggagacagagataaagaattccattgccaatgcagttcatggtatggaagttggggagtttgctacatttatggcacttggtttgcacttcgtggtcttgcagcggcgagtaaaacttacactaattgtgctgccattcgcaaaaccattaaatttctactttcaacactgaaagaggatggtaggtggggagaaagctatctttcatgcccaaaacaggtttgtcattgaatggtcatggtaaacaggatactatatggtttattaaactgtattaaatat

SEQ ID NO: 32776 - DNA, 316 bp, Glycine max
  unsure (1)..(316): unsure at all n locations
ntacatggagctacatcatgtggtatcagagcatcttcatctatgtgatgttcttttgctccctctatcgtttgtgcagtaaattcactctgattccttaggctcatcatcttctccatggatctcctccattatctagtgattggggatcgtgtagaagtgcatcacaaaaataaacggactaaaacctagatttacacttgttcatgcataaactatggtgcacattctatagaatcactcttgaatcatgtctacgcgttgattttaggtgcgaacttttttcagaaattatcgttttgtgctgagcctttag

SEQ ID NO: 32777 - DNA, 320 bp, Glycine max
agcttctacttatgtggcagggtgggttttcttcactttcttgcctcaaccgcgagctttgaccaccgctctttcttcccgcgatgcttgtctttatatccgcctgagtggttttatagcctaaaccatacttcccacgatttcctttggcatttatcacgctagttatgccgccgttgtctttgcctaaacccattccgggttcgtaaccgttccccaacataacacgggccatcattactgctgcatcagacaagcaagcttgcccagagaaggagtccacggaggaaatgcttaccacctcaaacgactggaaagcg

SEQ ID NO: 32778 - DNA, 381 bp, Glycine max
ttgaatggaggctctggtctcttgttgaaatagcttgttttgcatattcatttgcctcaaaagttcttcaagggaaggttgtggaggggcctcaactgtttgctatttctgaggatgttgctgttgttgctgctggattggtggaggaacgtatagtctgcttgggccagcagcattttgaaaataaggctgttgttgttgctgctgctgttgtgaaggattcgatcatctaaggttgggatgattcctccatctgggattgtacctattgctggagaggtcataattattctgttgtggctgattttgctattgaagttgaggaggtttgttgtagatgtttgcagcataagcttcaggctattcaattgcttcagattg

SEQ ID NO: 32779 - DNA, 318 bp, Glycine max
agcttctcccccaattttctatttatagggggagaagtgaagttgaaaagggttcagccccttaagcacttctctctctttcgaatttgcttaggaaaattgtttccgtgaagaaaatccaagccgaggcgcttccgtaacgtttccgtaacgtttccgtgagtgatttcacgaaggtttttgaccgttcttcgacgttcttcattcgttcttcaccgctcttcagtcttcaacgggtaagtacctccaaccaagcttttcgattcattctatgtacccgtggtggtccacatttggtttcatgtatttttattctcg

SEQ ID NO: 32780 - DNA, 373 bp, Glycine max
tgtccatggttcagacatgattgattcatgatttatgacttgtaggattcaatttgggcaaaattggatgagggcaaatgtgatttctaaaatctgcactttatgcaaaattttgctgtcaaatatgtgcagcagaattttggctttgtgcagaaaatgttgtgtatttgctggttgtggaaagagtagtacagattggattctggatgttttctagaagatcccaatggtcacaatgtagacttatgtgctagagacttccagtaaaattttcgagtcgatccaacggttaacgaattgtaacgaagagaatgttactggggtatttaagtgagaaaagctgtgatattggtttgtgttgggcagagttttc

SEQ ID NO: 32781 - DNA, 270 bp, Glycine max
  unsure (1)..(270): unsure at all n locations
agcttgtaggaatatggggtactcattttatgtggnactaggtggcggccgggcgatggtgcacaacaagttttccacatccacaatgcgcgcataaacccaccatcccctgttgcccacctccaactgagctcacgtacttccacgtagcccatatgctcgattctctcaacaccgggtccccatcaatcctcccaagctttcacaacatccaagcaaaacaacattctaacagcccaagctttcttagccaaccaaaacagagcaaag

SEQ ID NO: 32782 - DNA, 371 bp, Glycine max
tgaaggcgtgtagcccaccatattttcatagtagtacactggtaatgtggctactatcatttttatcatttccttctctgtcattgggggcgtcacttgagcttccagatccctccacctttgggcgtattctttgaaagattcgtgcccctttttgcacatattttgtagctgcattctatccagagccatatcagaattgtactgatattgcctaatgaaagcaatcattaggtccttccaagaatggactcgggaaggttctagattagtgtactaggtgacggctgccctagtaagactttcttggaagaaatgcatcaataatttgtcatctttcgcatatgctcccattttcctacagtatacct

SEQ ID NO: 32783 - DNA, 318 bp, Glycine max
agcttggagtgagaaagtgtgttttagtcagtcttcctacttttatttgttgaccacagagtggtacctggagatatgtcgtgggggtcaggagaccttggggacgtcagggggtgctattgcccaaaaccaatcttgaccaatcccgacccaaccctggcatagtcagctagtgagaacctgtgatgcacctaaacaggcgagctcctgagcggtcgaccgataagaaaacactgaccacaatgcacggaggcttgtgtggtggctggccacctatggattttgagcgatatctggaatatggcctgtggtaatcga

SEQ ID NO: 32784 - DNA, 375 bp, Glycine max
tgaatcttgaaacttgattcttgattcttgaaatcaaatttcctcttgaaccttgaagtgttcttgattcaatcttgaactcattcttgatctttgagctttttgtcatcatcaaaacttctttgaattaatcttgattcatcatgaagcttgcttctacatatacttccataagaatataatttttttgttattagataagaaaaataaaaatgaacatactatttcataatagtggaatgtgtagaacacgtcaatatttgttgtgaattctcatacaatcttaatgtttttttttactacttttgtaaggcaagaggagaaatttaacaattataaattaaacttgactaatatgacaatttaaatgacatg

SEQ ID NO: 32785 - DNA, 318 bp, Glycine max
  unsure (1)..(318): unsure at all n locations
agcttggcatattgnaagagcttgtggttgtatatcnagtagttctatagatgcattgatgatctcttaaacctctgacagggtttagttagtgttgccgatattgttggattcagcggttcaaagacaatatccttaaaacctgatggtatgtgcttaatatttcacacttgtagacattggacatgtgaccgatgtttttcttgcgaaccagcattttctttcaagttcattactccaaaaaattaacatagtcaaggaattaatacagcatagaaccttattaagttataatgcttaaagcaaaagcttatttgg

SEQ ID NO: 32786 - DNA, 376 bp, Glycine max
tgctgaacttgccttgattgaccccaaacgtgcataaaggtttgctttatgatttctgggtacattgtttcttgttcattaattaggcaatatgctagttgtaaatgtcatgtcatgtttatcactattctcaatccgttgcatatttattacctcatttctagttcatgctgcttttgaccaaataggaaggaacttaggatttacaaaatatgctagaatatttttgttttagaaaatattctagaaatagaattacagattagttattgaagatctatttataacgggaaagtgcctccgtgatgagattcagaaacacaatagatgttatgataaaacttgagctgcaagaaatgagatgatgttgtataag

SEQ ID NO: 32787 - DNA, 322 bp, Glycine max
atcttaaaaattaatatttttttcattattgaccgctacgataatatcatgtcattccttaactggtcataacttaaagcaaaagttttaatatattaaggattcaaaagaataaaaatatttattaataatttaaaacaaaattcaatcatttatgagttatatttaagccttaaaactattaacaaatataagtttgaactataagtagtttcacccggttggagatatttatttagctctaaaacgttaagaaatttctctaaagaagattgttcattaagcaagaaaagtaatatgaaagagattgaaactcacaaat

SEQ ID NO: 32788 - DNA, 380 bp, Glycine max
tttgcagaaatcaacactatcgggttcgattggttccaattcttccttcatgggttcaattttcttctgaaaggttcgtaattcgttgatttttgcttctggatcgctatgctcaagcaaatcctcagcaagcttcctcggaagtcgttgaagcccgactcggacgagtcaccccgagtcgactcggctcgttccgccgattcgccacgtgctgccggcagaagcaacaagccacatggcggaagttcttccgccgccaagcgagcttcttcgtcggcggtgtttccggcgagcatggtgtccggaattgaacctttggtgccgtttaaggatgttcctaatgctgagaagatgaacctgtttgtgagcaaattgagcct

SEQ ID NO: 32789 - DNA, 317 bp, Glycine max
agctttgacacataaaatgcatttataatgccatgactcatgaggaattcagttgacaaaaaggatatagtttcataattagcagttatgggtgcaatgttaatgtcgctggaatggaatggaacaccatgattggacccagcaaccaacttaacaaataggcttattattgttactttctatatatctcataactcttgtcattttcattggtaccccattactattaagcacttctttgtccaatacacgggtcatatatatatgaagtatgagtttaatttagatcatactacgcaaaattagcagtatttaat

SEQ ID NO: 32790 - DNA, 376 bp, Glycine max
tatatgatttcaattccatttcatttcaatgtccgtgtaatccttttgatcataaaggaaaatggaaggcatgtttttttttaagatagccctttaattcgtataacgtgagattaatatgattcttcttcatttaatattgcagtcattgccagtgttcatatttgcaaatcaagctggccttgacatgttggaaacaaccctagttgccttacaagatatcacattggataaaatatttgatgaggctggacgcaaggcattgtgtacagactttgccaagttaatggagcaggtaataataacttctagtgatcacaaaattttcaagttacaactacattgtcattttgaaaattgctgaattgttttctgc

SEQ ID NO: 32791 - DNA, 371 bp, Glycine max
  unsure (1)..(371): unsure at all n locations
ttgatcgtttcgatgcattgcacgagcggatagagataatctgaaggcgagccggcggcatgacggcttaaggnattaatctcgagttgcgcaacagtaacgatacctctcatcctgcacaatcaacccccgatgggtgtagcttaagacaccaatagttaggattgcaggtggaacactatatccataacaatcggaccattgagctaagatacaacgtcttgcgaacttggtacatgtgacgagatgtattatgacgccgtccagatattctcacgtgagtaatgctatcaaacgattaaacactaaatggacctggcatgactttgaacctgttgcatatagtaacccgcaatgcaaaatatacttgg

SEQ ID NO: 32792 - DNA, 265 bp, Glycine max
ttgagaaaaatcaaacgacttttacttttgactttgatgtccgattgagtcccgtaatatatcgagacgctcgtaattgaaaacagaaggtctgagcaaaatcacacgacaagaacttttgactcggatgtgcgactgagtcccgtaatatattgagacgctcgtgattgaaaacagaagctctgagaaatatctaacgacaataacttttgactcggatgttcgattgagtcccgtattctatcgacacgctcggaatttaaaa

SEQ ID NO: 32793 - DNA, 325 bp, Glycine max
  unsure (1)..(325): unsure at all n locations
agctntacagcagattttagtaatgacccacttacttagaattaaaataacttaatgccattaatctagggaattaaaaaaacttaatggctgagtgtaactgaaattgtggcaaccaaaagtcacccccaacagccaacaagtcagccaccatttggtctcccaaaaggctgatgcctaggttgccaattgggcccttattacaacttgaactaaacctactaaagcccttttagttgattaacccaaaacatatttttggtcagccaactttacaaggattgggccattatttagacaaactaaacactctaaaattgagaca

SEQ ID NO: 32794 - DNA, 299 bp, Glycine max
cgacactctagaaactccaagctttcaagaaattcgaatggttataacttttcacattaatgtcctattctgggacataactcatctttacgctcgaaattgagcaacgcaagctctcgagaaattcgaatggtcataacatttcgcacaaatgtccaattctgggacataatatatcaagacgctcgaaattgaatatcggaagctctcgggaaattcaaatgggcataacttttcacatggatgtccgatttgggaaaataatatatttatatgctccagattgaacaacgaaagct

SEQ ID NO: 32795 - DNA, 323 bp, Glycine max
agcttgtttcataaccacctgttttatattatccatttacagtctataaaaacttcaggatttttcctgcacattatgttataatggtctcatgtgtcattttagaggggctattctccattcagcatcatggcacacatagagttgctttcttgtttgctccagttgttgcaacatggcttttgtgtattagcagtattggtatatacaacatattccactggaacccaaaagtataccgtgcactttctccaatctacatggcgaagttcatcaaaacaactgggattgaaggatggttgtcattaggaggagtggtgctt

SEQ ID NO: 32796 - DNA, 377 bp, Glycine max
gctctactcagggcgggcgggcttcttcatttttgtctttacgcgagctctgaccactgttttttcttcccgcgatgcttcttttcatgtccgcccgagtgggcttatagcctaaaccatacttcccacgatttccttgggtttttatcaggctagttatgccgccattgtctttgcctaaacccatcccgggttcgtaaccgttccccaacataactcgggccatcattaccgccgcatcggacagacaaggttgcccaaagagggagtccacggaggaaatgctgaccacctcaaaagactggaaagcgggttctaacgattcttctgcggcttccacataaggcatggaggatgggcagcttaccaagatatct

SEQ ID NO: 32797 - DNA, 321 bp, Glycine max
agcttttgatgctctagtttattcctttttttgaatgaatatgttcaaatacactctaattcctttcacaagctgaagcactataagtttggcttaaaacacgaatagccaatttttgcaattatggaacactacatccataacaatcccaccattgatctaggatacaacatataaagaaataaatcaatataatgaatatattatgactcgctaaaataaatcacaaatcagtaatgttatcaaagtatcaaacactaaatttacctggcatgactatgttccgttcacatattgcagctcgtcatgcaaaatatcctt

SEQ ID NO: 32798 - DNA, 387 bp, Glycine max
aagtggatgtgatcattaatagttgctttgtgttttgctaaaaaacaactgatacattctattataaatatttaatttaaattttacataaaaataattatgatagttaaaaacacttataaagagatgattaataaaattgtaaaaaactaaaagaaaatatttaataccatacaagaataataaaatataatatatatatatatatatatatatatatatatatatatatatatatatatatatatatatatatatactgtgtatatataatcaactaatgtgattagctcattcaaatttaataataactataacatttgagctgtgaattcttttgctttcttatgtgatttatgtattctttattctaaattaaacaaggcg

SEQ ID NO: 32799 - DNA, 312 bp, Glycine max
agctcggtcttgatttctccttttttttgtaacaagcttaaaacaataaacttggccttctcttaattgtctttgggcttggcgaccgcgatcaacaaagtactttcggcacctactatatgttgacttgaccaacgctgttattggaatgctgcgacaatctttcaacaccttattcacacattctgataggttggttgtcatgtgaccatatcgtcgtccagatgtatcgtaagccatgctccatttttcctttgaaatgcgatcaatccatcttgctatggctggactcaattgacgaaatttttctaa

SEQ ID NO: 32800 - DNA, 382 bp, Glycine max
tttagttcctcctattaggttcctgaaataggggttcggagcgttcacgctacgtgccatttccttgatattgccatgcatatctttatgatatcatgtttgtgtgcgtctttcctatgctttctatgttgttatgtcatttcgccatcatttgattgtgttaccatgcttgttcgtctggtatgtttcttttcatcaaccatgtactctcacgcatgtatgcccatactgtgtcatcactcatgcattgcatttgtctcgtcattttgtcacgggaagtcggaaggtccgcatcaccttcttaaatgcatgcatggggcaccatggtaatgactatgaatgaaccatgaggcccaatgcttgtgagtaagaggagacgatc

SEQ ID NO: 32801 - DNA, 324 bp, Glycine max
agctttagcttaactctgcatgtagatctacatgagcaacattctaaaaaataaatacatgtgaaattttaacgtattataacaaatttaatataataataatactaacaatgaatatttattcctttaaaaaaacattgagtattaatttatgatttattaaataaactagcctcttgaatgacctaagacctaatttgtttaactaaataggttttaataaaaccttttatttggtctaatttgagtctgatgtaaaataatgacgattctgtaaaataaaataaaattactatgcacttttatatagacagcacatccgta

SEQ ID NO: 32802 - DNA, 399 bp, Glycine max
aactcaagcttgttcaatgttacaagctattacaataaattatatttgatattcttattcaaaagtttgatgaatatctgtgtcatgcgcttaattagcgcttgatatttcaaaggtaaggaaagcattaaaaggcttcgatagattgaaaatatttgaatttaatttcttaaaatttcaaattgaattttatatgttgcaagaaaaaattgattaaatctattttataattgaacgagcacgtcaaatatttaaaaactgttaattaaaatctaaaacgtgctagtcacactcactaacatgaaaaattatatcctgatcttgagacattcactaaacagaatcttaaaatatatgattctcataaataatagttaatcagtatgtacatttttttta

SEQ ID NO: 32803 - DNA, 321 bp, Glycine max
agcttgtaattgaaatgtcttttatcatccacagctgcagtatagatatgtttaaacacttgtgacctgatattattttagctacatcaggatgtgtgatgaaaaattttgcttctacatttggaagccaaaatttagtcgccttccatgggagttccactggattctggtacacgtcataaaatatcttcatcaattatcccaatggatcctctacaacacctgcattgcacccatcaacacgtcttaccggattcagcacattatgatctgaatcctatatggttaaataaaataacaattacatttattttgtcaagt

SEQ ID NO: 32804 - DNA, 380 bp, Glycine max
tagtgagacaccagattcagcactttacaaaatcttctttttcacctgaaatagaattgaaatttacattaattacaagtggaacattataatgagtaatgatcaatttattaaccaaaagtatttacaatcctacaaaaagaactgcaacttggaggaattctatataattatcaaaagtttctatacaaaagtttgtcgtataaaatgactaacaccaaaccatagctaaaattcactaatcataattagtgaaattttggctccataaattcaagtgaaatttgaatagaaattcaaatttccctccaattttttgtgacacttaggctataaatagaggtcatgtgtgtgcatttttcaactttgataatttgaga

SEQ ID NO: 32805 - DNA, 321 bp, Glycine max
agcttgtaggattatggggtatccatcacatgtggtactaggtggcggtcaggcgatggtgcacaacaagttttccacatccacaaagcgcgcataaacccaccatcccctgttgcccacctccatctgagctcacgtactcccacgtagcccatatcctcgtttctctcaacaccgggtccccatcaatcctcccaagcttccacaacatccaagcaaaacaacattcaaacagcacaagctatcacagccaagcaaaacagagcaaaggcagaaaactctgccaaaacaccaaccaaatcacagcttttctcacttaaa

SEQ ID NO: 32806 - DNA, 380 bp, Glycine max
caacaagactagaagcctatgatgtgtttcctgattgtgcaatagatgatgatggtgaattggttcatctagcactaatgggagaagcagaatctgccaccttccaagaagcaattaaaaaggaagtatggttagaagctatgagagaagagttgaaagccatagagaggaacaagacatgggagctagctagtctaccaaatggcaaaatagctatagaggttaaatgggttttcaagaaaaaactcaaaccagatgggagtattgctaaacacaaagccaggctagtggcaaagggctttatgcagaaagaaggttatgattacaaagaagtttttgcagtactggctaagtttgaaactgtgagggtgatagtttct

SEQ ID NO: 32807 - DNA, 315 bp, Glycine max
agcttgatgcccttagttttttgttttggtttgataatttttcaatgcctaacatgtttaataaatgacgcatttgttttgaatgttttatactacgcatgtgtgcgatatatgcttagttttttccctgcttactgattgatcacatctgaagtggatgaactattcttattctctaagtttcttaacaacttacttctactaggaatttggctagcagcctcgaattaatcagattgcctcatttggtaatctaatgcccactgtcgttactatagaacgaacgacctatggcttactgtaatcaattacccc

SEQ ID NO: 32808 - DNA, 376 bp, Glycine max
tggcgcaatggtcattgttttaaattgtggttgtggttatgccttacattttataagtaataatagcatggtattgtgtattccatatgcaaatttttgttttttaaatcattcgattatatgtagaaagagtagtatgaaaaagagggtatttacaattttatctgatctatcaggaacctagtttaattttattgacccagactttttttttttcataccagaaaacttttaacaatttttatttgaattagaagaaaacataactgacaaaaaagaaactgatctttgatatatatatatatatacacacacacatatggccacaattgcagttacaatgtggttgccccagggttttaaatagcactgatat

SEQ ID NO: 32809 - DNA, 317 bp, Glycine max
agcttctttctctagcttaatttataggggttcgaaaactttttttttttttgtactatgtgaagcttaagtcatgattcatagtatgggaagttgttaagtctttggaaacgtgtcaagtaagttaagaggtatgtgtgtgacttaatgcatgcataatgtgaaaagattatgaaactgtgtgtgacttagtgcatgcagaaagggaaaagattgtgaattatagatttctaattaatttaactggaaagaatttaaataacaaagttaatgaatctttgtacgattcatgcgaatggtttgttgatttacaccat

SEQ ID NO: 32810 - DNA, 378 bp, Glycine max
tcacaggtcaaaacaaccgatcacttaattgagttactagaccttcaatcaggtgcaactcatacttactccttataactagcaaaggagaaactctataggttaagcgacctacccccatactggttgacaagacctgtaacgagaggcaagtgaaacatactccttatgagcattatgggagaagctccacaaagcagaagcaagcctaaatagatgggtgagaagacctttaaccaggtagaactcaaacctgagattatatcgtgtcatccaccttttacaacgccaccacagctcttcctctacatccacaaggccttggttcctgtgccatccaagattccacactcacaatggcctattcatattaccaca

SEQ ID NO: 32811 - DNA, 344 bp, Glycine max
  unsure (1)..(344): unsure at all n locations
agagccgacccgcggcatgctaacgtatacgcgannatttaatttttatttcggcgaaaatggccaacataacttatgcgaaacgcttatatgactgtcgcctcatagaacaagaactatgggcctgtgtgggtgaataactaaacttagcgtttttggtcaaatgcttattatatacgctgttcatgtatcatgatgcgccatagccaaacatataatgtctgacattgttcagatcagttctacgcggttttactaaactgtcctaaagagtttattgcacaacgcgggggaaaagactgcttgtgaacagaacataagctctccaaaacacaagaacttgc

SEQ ID NO: 32812 - DNA, 384 bp, Glycine max
  unsure (1)..(384): unsure at all n locations
ntactcaagaatttcgacaatatgatgaacgagcttattgtataggtatacatcaaacaatattgttgatcgggactagcctggtttaaaaaaggaccaaaagaaataaacaatcgaagagtattatttttatcatatatttacttaattttctacatctcttgctatttaatgagcaattttatcatatcactttctgttctttttacctgtattctctaatccatccacccactgaaaattaccacgcgtgctttaaaatttaaacgggcaaagccgaagtatagtctgctcactcagtgcttacatttcccatctttcaaagtcaaaggattaacagagaaaaaggctgcgacaaattaaactttattttatgtgcaaaac

SEQ ID NO: 32813 - DNA, 314 bp, Glycine max
agcttttaactgtatttgcaacgttctaattgctttttaaatggtgtaatccattacaatatattggtgatcgattaccagtgtatctgaacgatgaaattcaaattcaattgtgaagagtcacatcttttcataaaatgctttgtgtaatcgattacgtggttttggtaatcgattaccagagacaagttttgaataaaaatcacgagatgttactcttccaatggttttctcaagattttctcgcggttataactattgcaatgggtttcttgactagacatgacgagtctataaaagcgagaccttgactt

SEQ ID NO: 32814 - DNA, 375 bp, Glycine max
tcctcttattagtgcatagctcctttaagaattctgcatatcttggaatttgctttattgcatccagcagaggtatgtttacctctacttttctgaatgtttccaagatctttttctctgcctcttccatttttttgttggaaactgctcttggagggaatggaagaggagggatgtgttgcttctgcaaatcagaattaccagtggaagattcacctgcacataaattgttaggtaaatttttgtcattacctttttctgggttagagtgaagttgggcaggttcatttgcagatgaggaaggtgctacgggttgaggtccttgacactgctttcccgacctcaatgaaatggcactgacatttttgggatttt

SEQ ID NO: 32815 - DNA, 313 bp, Glycine max
agcttgttagaggttttgagttttggggaagaaatggggtgaaaatggcttcacccctcccctttttaaatattcacgtcagacacgctcgctcaagcgagctaaacatttttttgttgtttttgcaaaaacctttgcaaaattgtgatgctcattgctatatatatgatgtaaaaatcctataattgcatatacacttaggcaaatgcacgatataattcaagaaaatgaaccagtatgaaacaggagcttaaaaagccaagttagagatactaggatgcctcctaagagtgcttgttcagcgtgtttaacc

SEQ ID NO: 32816 - DNA, 371 bp, Glycine max
ttgatatttcaacggcggcgtcaccattattttttaattatattttaagagtattaggaccttgattttcaaccctggattttgggtatattattataggatttgaacaatttactatttccttatttgcatggtatgggtgaacaagtatggtatttgactatggggaatgtataggtaatctatttatgaatggtacttcatgaatcttgcttcatgggttgggtgatatttttcatgaaaattggatggatggttaagttatatctgtatactttaatggttgatacgcactttggctttttgctgaagccaaagggggagagaaatgggattaaataaaaaattcacatgagtaatccacttaattt

SEQ ID NO: 32817 - DNA, 321 bp, Glycine max
agcttcattctacacctgaaaaatatgtatgagatagttgcacaaaagagaaagcttcctaacaaaaaatttcatgtaggtggaccttcttctagtaattctgacatacaacagcctcttatccctcttccattcccacctagagcaattccaaacaaaaatatggaagaagcggaaaaggagatcttggagaccttcagaaaagtagaggtgaacatacctctgctagatgccatcaagcagattccaagatatgccaagtttctaaaggagttgtgcacccacaaaaggaagttcaagggcaatgaaaggattagcata

SEQ ID NO: 32818 - DNA, 369 bp, Glycine max
tggttcgaggtacttacccgttgaagatcgaagatcgatgaagaacgattgaagaacgtcgaagatctgttgaaacctttgcgaaattcttcacggaaaacgttacagaaacgtttcggaagcgcctcggcttatattttcttcacggaaacaatttttccaagcaaattctaaagagagagaagtgcctaaggggctgaacccttttcttcttcacttcctaccctatttatagcaaaatatgggaggtgcttgccgcccaactcgcccaggcgagccagggtgcttcctccagaagcaacagccttctggaggaatcttctggagggcgcaagtgggcctgtgtgctatttgcacccccattggtac

SEQ ID NO: 32819 - DNA, 321 bp, Glycine max
cagcttttccacctatcaagctttttgtttggtcttaccatgagagaatttggtgactcttaccagctacggagtctgaagttctaagttgttcgctgagaccttcctatgatgacgcggactacactgccctaaaggggtgttgtactgaaaattacatacactgaatgggtctttgtattggaagcactgtgaccacattggctgcatgcttatggcgtttaacgtaatcattgcactttatcctctattgattgcagttccatgtgacggggcaacttttacttatttagactattgctaaaatgctttgattttaca

SEQ ID NO: 32820 - DNA, 360 bp, Glycine max
actcaagcttaacttgattgaattggcactctaaaggactttcttcatttatatcgacgaacccgttcttatcgccaaatgttaaatgttaattgtcagtagtgagatgtgaactcacgacctcatctcactcccttataactcttgttcatattgatattgatatcttaattggtaatgcggtcttgtgtgctggaattgcaactggagaaattcatcactcacacagttccattctcagagattaacaaggcttttgattacatgctgtaaggggagtccatcagatgcatccttcgaatgggggagtaaatctatatcacaccaatgatgacatgaccttgtccctgttgggggact

SEQ ID NO: 32821 - DNA, 319 bp, Glycine max
agcttcaagaataatggcctcaacatttttcttattcccagaaggaaatacaataaataggcctcctatttttaatggagagggttaccactactgcaaaacccgaatgcaaattttcattgaggcaataaacttaaatatttgggaagccatagaagcttatgtacccaccatggcggctggaaatacaacaatagataaacctatagaagagtggtctgaacaataaagaatattagcgcagtacaatttaaaggctaaaaaaatcattacttctgccttaagaatggatgaatattttacggtttcaaattgtaag

SEQ ID NO: 32822 - DNA, 297 bp, Glycine max
aaaatgtgcaagttatgaaaagttctctcagtgtatccgtggacatatgtacatacatggtgtgttgaaccatgtgtaaaactagcccggcttctctgttttattcttataccattcgcaccatcttattgctccatactaacagcgtagccaacaaatctctagaaacgtgactaggaagaggatacttgctacaattcaccattgaccacctcaagatgtcgaaagtgggactggtatattccaaagcctccaagagatacgaagacacttatttttattcatactctcattaag

SEQ ID NO: 32823 - DNA, 259 bp, Glycine max
gatcttctttgttagacctacattcgttttttttccaggccgaggccgaccgtcattttcttcgatccctttgcgtgagtgatatttttttgccaacatgcgctgatgtgctcctggtcggatactgggaaaatgcccgaccctggcgaaacgaaaagacggtcggggtcgtccactcgggggtagccgaccaactttttacttcgtatgtgcaccatcctagcacgaaaacttcccgggcgcgaaggaaaacgcaaga

SEQ ID NO: 32824 - DNA, 348 bp, Glycine max
tcaccggatgacgccgatcgaacatttcctaactttcgtcatgcatatttcgttcagggattgaattgaaaactcgttaggcgacatctgtcgcgaagtagcgaccgatatttttcagccgacattgcacaattctttttagaaaagctcgctggtcgataatggtctttttacggcagagtaagttttcttgtttcggtgttgcataaaaaagatacaatgtacttcggctaggtgtttcgtgcgagttcaaccgacattttgtttcggccaggaaaacattaccccacctgttgaaaaaaaatatttgctagccgtcttcgtgcatgtttaattcaacgattgaat

SEQ ID NO: 32825 - DNA, 323 bp, Glycine max
agcttaatgaagacgttatcatatatgtacgagaagccgtcagcaaccaacaaagtatacttgatgcgtcgattgttctgttggatcaagtggcctcggaataattaagaaggggggttgaattaattatgaacgtgtcttgactaattaaaaatttatccttcttaatgttactagattcaattaggctttactactaagttatgagaaagtaaagaacagaaacaataacttagacaaaagtgaagcggaaataaaagtacacagcggaaagataaagagtgtttgaaagaagaagacaaacacaagatttatactagttc

SEQ ID NO: 32826 - DNA, 399 bp, Glycine max
  unsure (1)..(399): unsure at all n locations
tactcaagctntagaagaaagtgatgaggtacaagccttaaaggttaagcttgttatagccagggtagtcaaacagaagttcaagtccatagccatcaaagtctgaagagagtatgatgaactaagggacgtcaatatggccaccgatgaagccttggaatgagaaaccaagaaggcccgaaaggaagaacacgaccaaaacaagttttgaggggctttatagggcagcaatagtgagctcaaactccgaagaggtgaaaggaatcatcacgggtcaaaggcatgatctggaaggacgagctaaaggcttgccttatgtcgaaaagaaatttgtcccaacagttaaagcgagactgaagggaatatgtgggctatcatcgatgagtgcaaagagaagct

SEQ ID NO: 32827 - DNA, 318 bp, Glycine max
agctttacaacaggaactttattttcatgatctatgaccatttttctgacagtctggtctccgtgttgttgttctcgatctttatcattttctaccttctccctatccttcacaacttctttctgtctttcacgtctttccttttcaacttctttctccttttcacgtctatccttttcaacttctttctccctttctcgtctatccttttcaacttctttctccctttctcgtctatccttttcaacttctttatccctttcacgtgtatccttttcaacttctttctcccttgcacgcctatccttttctcttacc

SEQ ID NO: 32828 - DNA, 353 bp, Glycine max
  unsure (1)..(353): unsure at all n locations
cttgatttatctaaattgggctattaccctttctcaaccccacaaaaccaacttgttaggtgaggattgtctaaactttataagtactatttaagncatatctctaggtggtgcgagactaaacatgcccccttaagactacaattaaagccacccatagagaccacaattaagggctaaggagggctagggcctatgggttatcacaattaaggcaactttacaacacatccagacacgcccgaagctattggcctgtagcatggcaatgcaaataacccacaaatgggtctaggataaactttgataacatcttagatttttagctgacggcctaactcaaaaatcttact

SEQ ID NO: 32829 - DNA, 315 bp, Glycine max
  unsure (1)..(315): unsure at all n locations
agcttgagatgaggaagtgtttttggttaaactncctgcttttattgttgaccacatagtggtacctggagatatgttgcgggggtcaagagaccttggggacgtcaggtggggtgctattgcccaaaaccaagcttgaccaatccccacccagcccgggcataatcggtcagtgagaacctgtgatgtacctaaacaggcgagctcctggcagtcaacagataagaggaactatgaccacaaagcatggaggcttgtggtggctggccaactgtgaattttgtgtgatatgtggattatggcctctggtaatcg

SEQ ID NO: 32830 - DNA, 319 bp, Glycine max
ctgatttcctttgttccggaaacctttcttttcttatgttctcccaaacccaatctccgggttcgaagacaaccttctttctccctttgttggcttgtttagcatagcttttatttttcctctcaatttgatctttgactctctcatgaagcttcttcacatagtccgcctttgcttgaccttctttatgcttaaaaacagaaacattatgcataggcaaaagatcaagaggagttagtgggttaaaaccataaacatcttccaaaggagaacaattagtggcgctttgaacagctctattgtaagcaaattcaacatg

SEQ ID NO: 32831 - DNA, 319 bp, Glycine max
agcttccacaacatccatgcatttcaacattccaacagcgcaagctatcacagccaagcaaaacagagcaaaggcagaaaactctgctcaaacaccaaccaaaatcacagcttttctcacttaaagaccccagtaacaattccttcgattcaattcgttaaccgtcggatcgactctaaaattttactggaagtctaaagtacataagcctacattgtgaccgttgggatctactagcaaaagtccagaactcattctgtactactctttcccacagcctaccacacacaagcatttttctgcataagccaaaattctg

SEQ ID NO: 32832 - DNA, 370 bp, Glycine max
tctacaagaagagatggccaaaaggtataaggatttactactcatcaaaggaaaggaaggaaaaaatcacagggagctgaattagagcacgttaaagattgttgaacaacactctcgggcttagcatgtgcaattaggcttagcgcgagctgtctagcttagtgtacaccttcaatgggcttagcaccagctgtctggcttagcacacaccttcagtggcttagcgcaagctatctagcttatcccaatgccaaaccaaagagaaattgggcttagcatacacctttagcgtgtgtcacaacctaccctatggaggggttgcgaaaaggccaaaatgacaggatgaagcgtttgtctctgaaggagaaaa

SEQ ID NO: 32833 - DNA, 317 bp, Glycine max
agctttccgcaagacttacggtttgatcttagagctgaccatagcagaagtgtccatagaagccattgcatcactcacccaatactacgaccagcctttgagatgcttcacattcggagacttgcaattagtaccaaccattgaagaatttgaagaaattctaggatgtcctctcgggggaagaaaaccatatctttcctccggatgtctcccctccttgagcagaattgcaactgtggtcaaggattccgcaagaggtttggaccgcataaaacagactcggaacggcatagcgggcctaccacagaagtacctag

SEQ ID NO: 32834 - DNA, 367 bp, Glycine max
tctacaccccatttttctccccttttggcaacatttaaaatccaaagaacttgggaatcaaaatagataataatgaagtggataccgatcaattacaaagtataagtcataaccaaccaaaatcagaaataagacataaccaaactagaatccaaacaattcaaaattcaaaaagacatagtatcaaagcataaaagtctaaaattcaaatactaaaagataaagtactgaaaataataatctaagtagcatagccaaaatacacagcttataagagacatagaatgataaactaaattctaagaaggtggagatggtggtggaagatcgaaactctgacgaatgtaacccacatcttcttcaagct

SEQ ID NO: 32835 - DNA, 324 bp, Glycine max
agcttaacaaagtaacatatattaaagttgaatcatgtatatagtaccagcattgttcctccggatcctgcagataaaataagtacttaataataataaaacaccaccaattgctgcaacggtggaagcaactatcgcttttgtgttcttcttgtgttctggagaattataacagataaataaaaggctaagctaagaatgatattagacttttcaaagctgcaattgaaatgagaagattaaaaagttaatggtggttacctaattctgaagcgggcatgctgatatatagatcttgtccaccagtttgaagctgtttcatat

SEQ ID NO: 32836 - DNA, 374 bp, Glycine max
ctgtcaagctcagagcagagattagttgctgttttaagtgcagagaaattcactacaacccaggtgattgggtgttgctcagattgagaccacgacgtcaaacatcggcgaagggttctctgacgagttctgggaaattagccaaacgatattatgggccattccaggttatagaacgggtcggagaagttgcttaccgtctccagctaccggcagaggaaaaaattcattcagtgttccactgttcttgtcttaaaccatttcacaggtcaccggagcaggttgacacatcgcctttaccacagcaattcgtgggagatcaacccatggttactcctttagctatcctggattatagacgctctccggtagac

SEQ ID NO: 32837 - DNA, 315 bp, Glycine max
agctttaaagggtcttttaaatttattttgagcattttataaataaaggaaatattatttatgcaaaagtttaaattacataaaatatctaacaagtgtttaactcaagataataaaaaaccttacatgaattctaattagatacatactgttaatgaaatataaatttctttaaacttgatatcttataaaaaaaattaaaatatctaaacgtgagaaacatgtcgatatcttaatccaatttatagattaaaagataatcgtaagaacctctacatcactgcccctattattttgcatcattctcatttctcc

SEQ ID NO: 32838 - DNA, 373 bp, Glycine max
tcaccttcacaacctgattaatgttctaaattcttctctatacaaggcaactaatcactgacttcctttttaacacagtcaagtgacttcttacttttctcttcttcgaccctgtgatatttttcaataataaacagaaataaaagatagcgtatagtattactatatgatatcttcataacatgttagcataacttctttcctttctacctcggaactgtttctttgttgtacatggaaaatgagtcctagtttttagatctttatggttttgtagtagcctaggacacacggatcaagttgactgagaacttgtaacaatttcataccccaaattgtaagataagccctatagtgttttttaaaaatacaa

SEQ ID NO: 32839 - DNA, 145 bp, Glycine max
agctgggacattttggttcttttagacaaggccatcgcaggaactatcttcgatgccgttgtttaccttccccgctttttgagcgctgttctccaacggtgcttattgggcatacttggatggtcgcttctcctggagcgacgcg

SEQ ID NO: 32840 - DNA, 268 bp, Glycine max
aaaggtaatggcgtttaaatttgctgggagcttttggttttcatttctaaccgctcgaattattacgggactaaatccgacctccgagttaaaaggtattggcgtttgaatttgcttccagccatctttttcaattacgaacggctcgatatactatgggacaccatcgcacatccgagtaaaaagatatcgtcatcagaattttctcaaaacttttggtaccaattatgagcatctcgatatgttacgggacaccatcggacatttt

SEQ ID NO: 32841 - DNA, 321 bp, Glycine max
agctttaacctcatcgtcccttatagtctttatatttgggagccaatccaatccttgtgttcggactctcagccacttatgatagccgccgatgatcctattactgcttcccctaagctctctgtcctttcttcacgccgcatcccatgccttgcgaactccttggagtaccctcgcgttgtggtcactaaaaccctgtgcgatgaaaggcgtgatgctttcgtctaatggcgctcctctcatggggtagccaagctgtcttatggcgagaacgggattataattaatacaaccccttgttcccatcaagggaacatttgg

SEQ ID NO: 32842 - DNA, 382 bp, Glycine max
  unsure (1)..(382): unsure at all n locations
ntaatattagtgtttttagcatcctcttctaaagtctccatgtgcaattattaaaacactgcagatttcgactttttcattgctagcttcacgagaatcataaatggaagccatgtgctagcttcatgagtgctaaacactgttgttttcaactttttcattgatacacattggttgaacaacgcactacattaaacaagcttcatgtaaaaccaaaatggtgcagtattattcagcattttgcagcactttagctgcattctctgcaactaatgttgctgcattaaacaacatttctgcattcttcaatcaaaacgtgcgaaatggtaacgaatgcagctggaggtgcaataaaaacatgcatgttgaaatcgagaataat

SEQ ID NO: 32843 - DNA, 322 bp, Glycine max
agcttataagaacaaaattgctttaatcatttccaaatatgcatgtgaattaggacgcatcaacaagaatcaagccaaggatattgtgcaagcaatcaatggggcaaaacacaccaaatgattatgatgatggatggctgaaattctcacaaaggtaaactcatcactttcaaattgagctttcaaaactatcatgacatgtagagaagaacattagtaacataaggaaaaacattagtaacaacaaaaggaccaatccacttagatctcaacttaccactcatgagtccaagcctagaattatacaataacactttttgcc

SEQ ID NO: 32844 - DNA, 390 bp, Glycine max
ttgacccaaaatcctgactcaccataaaccttgattccaggtgttaatgtcaatccttaccctcggtagcaaaaaaaagaagggaaggaaaatttccaatcaaaggaaaaaagagaggaaaggaaattcccaatcaaagaatgggagaaagcaaaaagagaggaaaggaaattcccaatcaaagaatgggagaaagcaaaaagaaaagaaagaaaattcccaatcaaagaatgggagaaagaaaaaaatagagaacgagaagaaggaaagaaagctcctgatcaaagatcgaaagaaaacagaagaaatgtgcagagaggtctttggaccagacaatatctgaacaatacggaattgtcaccaaatgaacaaaagaaagaaaaggaaacc

SEQ ID NO: 32845 - DNA, 324 bp, Glycine max
agcttctcccccaattttctatttatatggggagaagtgaagtgaaaaagggttcagccccttaggcacttctctctctttcgaatttgcttggaaaaattgtttccgtgaagaaaatctaagccgaggcgcttccgaaacgtttccgtaaggaatttcgcgaaggtttcgaccgttcttcgacgttcttcattcattcttcatcgttcttcgatcttcaacgggtaagtacctcgaaccaagcttttcgattcattctatgtacccgtggtgatccacattgtgtttcgtgtatttttattctcgtttcatttactttttata

SEQ ID NO: 32846 - DNA, 383 bp, Glycine max
  unsure (1)..(383): unsure at all n locations
ntgtgaagacatcgngtgtaaaggagcggctcatgttaatgcatatctgttttctttaaatatggtgaaggtttctatttacgcagccaagcttacactggtatacctattttcacaactgcataattaaatttagtcaaatatactttagaattttgcgtaaagtactccagttttgtttatagtttaaatggctcacataaacttcattttttatattttcaaaatttactttaaatgctctaataaatggcgaaaaacttaaatggctcttaaaatgtgggtttgagcctcttaacctcaaaagttaacttatagggtgaggcttgtccttcacttatatactcattctatgttggacttatatctaaccgatatgagac

SEQ ID NO: 32847 - DNA, 324 bp, Glycine max
gagcttttggagataaaaaaggtttctttataagaaacaataaacatgcagtgaaagaaaaaagcacatggagagggaagacgaacctcattcatggagtttggaaatctaacctcgaaactttaagacaaaaacatggtaggtttataaaaaacaacgaacatgctgtgaaaaaaatcgaaaaaaatcacctggagagggagactgaaacacattcttggagtttggagataaaaatccaagctttttgatatagaagtggtcgctttctaagaaacaatcttcatgttgtgagaagaatcgaagcacagcacatggagaggg

SEQ ID NO: 32848 - DNA, 346 bp, Glycine max
tggactcatgagtggtaagttgatgtctaagtggattggtccttttgttgttactaaagtttttccttatggtacaattgagatcaaaagagactccacaaacaagagcttcaaggtcaatggacaccgacttaagccatttctcacaaacccttgtttagtggacgtaatggtggaagagacttccttactccaccatgacttagggagtctttcttttcctatctccttctttacttctattacatttgtgcgactctattagaaggtgttaattgcttttagtctttaaattgtgccacattaacgacaatgtgttgttgaagtatcgggggagggttctttg

SEQ ID NO: 32849 - DNA, 323 bp, Glycine max
agctttaagttcaaggaaaagtttgtttaaggtttgaagaagttttggcttttacatgcccaactcccttgagtggcatttgtattggttgttatcttggttgttccatcatagtacatttgatatttgaattgcatcatgcatcatcatggtttgtgtgaaaaaagtttataagtcagaaaagtttctttagagacaaaaattctctattttaatcgattacttgtagaagcaaatgactttggtgttttgatgatgatcatgatgatttgatgcaaatgatgcaaatgggcttttcaagtttaaattcaagactatgattc

SEQ ID NO: 32850 - DNA, 383 bp, Glycine max
gagttaaggatgaatcacagtagttttgatgatgttttaatagcccaaaagaatgattttaagatgagtcgacaggttcaagatcaagattaatttcaagattcattagaagaaatcaggaagattcacgattcaagagtagatgatttcacgattctagagtcgacatcaagaagaatcaagattcaaagaaaagaaatcaagaagcaacaagtcaagacttcacaagggaagtattaaagaggatttttttcaaaaaccaaacatagcacagtcttgttttacaaaagagttttctcaaatttttctaagttaccagagtgtttactctctggtgatcgattaccagcttcctttaattggttaccagtgataaaatttgg

SEQ ID NO: 32851 - DNA, 303 bp, Glycine max
ttttgttttactaaggcttaggattcatttttcctatttaaaatcaatccagtgttttcaaaagaggctcttttatcaatttatgcatgtaacgacccggctcgtcgctacgatatcacactttaataactagagaattaaattatttttctttctttgatgaaaactccattattttgcttatgaaaatcatagtaaatttgaatgtcacacacacacacacacacacagacacacacacacacacacacacacacacacacacacacacacactagtgtttaaccgtatacgtgtatgttg

SEQ ID NO: 32852 - DNA, 381 bp, Glycine max
tgaagtgagaaagtgtggaagagtctgtcttcctacttttattcgttgaccacagagtggtacctggagatatgtcgcgggggtcaggagaccttggggacgtcaggtggggtgctattgcccaaaaccaagcttgaccaatcccgacccaacccgggcatagtcagtcagtgagaacctgtgacgtacctaaacaggcgagctcctggcagtcaaacgattaaagaacaaagaccacaaagcaaggaggcttgtgtggtggctggccagctatgaatcttgagtgatatttagaatatggcctctagtaatcgattaccaagggtgtgtaatcgattacaaggcttaacaatgaagacaggaagttaagatgacctctgg

SEQ ID NO: 32853 - DNA, 205 bp, Glycine max
aacacaccttatgattccgatcatgggtggctgagattcttacaaacgcattctcctcactgcaccaatgctgtttccaatctattatgacgtgtccagaacatcatttgtacatatagatacacattggcaacatcttggggacctccccacttagatctcacgctccacttctagaggcatgactggacatgtacaatgactc

SEQ ID NO: 32854 - DNA, 379 bp, Glycine max
tgaacacctctaataggggaaacccttattctctttcattccccccttcctttcgtctaaacatccagccccttctttcatccacattagcccctgaagagtaaagtctctcatggctatgagaggctaaaccccctttgttaggagcctggcaagtcaactcttgtaatgtaactctatctattatctatttaatgcaatattgtttctattattcttctctgtgcctttctgtttattatggcctgatcatacatataacagctagagtggaatgcattgaaaaataattattttctgaagaactgggaagggatatctaaagaaattcgttgctagaaatagactgatattggctatgcccaatttttgcatcttt

SEQ ID NO: 32855 - DNA, 319 bp, Glycine max
agcttaaataggaatctttctttggggggacttattattttaaaaaaatgcataagtatataattgttttacttgttatttcagttttcttgtataaacttctaagctatttttaaaattttaagattataaatgttttaaatttattctgtttcttaatgttaatcatgatcaactattacttaaagtgaaagcattttttaaataaatttaatctttgcctacaatcataagctagaagtttaaaaatgttattaaaaaacatcaaatttactccaaagataattagagaagcaatttgttgcaaaaatcatatatt

SEQ ID NO: 32856 - DNA, 379 bp, Glycine max
tgaagcctcatcctcctcacagcgacaaacttgttgtgtggaacttgatgaaggaggaggagtactagagtaacagttatccatgtgcaccgtgtgctatgtttttgtgaagagtagtgtatgtgtgtaagagaacggaaagagagaggggagaatgaatgaatatgaaaaaatgtggtgagggatatgtgagaatgggaagtgtagtgtgtgaagatcgagcttatggacacaacaccactgtccaatggcattgtggtcctggtacgatctgactcacacagtggtcctccccacactcagttctgggttctggattcagtggattggcccgtgggaaaccaaggatctacttggattggaatggatgatgcacaaa

SEQ ID NO: 32857 - DNA, 317 bp, Glycine max
agcttgagcttcgacattctattattatgtataataatttctctttttttgttaacatttgattttattctaatatatccctatcgtcaccacgtcatgatactagcaaaattgatgaatcctatagctagcaaggtatatgtaacactattatctttctttattttatgtagttagatttgagcttttcttattgttagttaacttatttattaattatattagttaatttctttcttctctttcttgttgagaacaataactcttgaggttacttgcacataaaggaggtaaattgcacaaaaaggttaaagagt

SEQ ID NO: 32858 - DNA, 373 bp, Glycine max
tatagggagaccagtcagggtcacgatgttttgctagaatgttccaaccatatgggatcagcataggcttaaaagagcactcaaacccggtgacccccaaggcctacactccgaagagtccgtcagggcctctgcctcctgatttaggtccaacccctaaaatcattttatcacacagacactgctagtgaattatacaatacccatgacctcacactcgtgtcttaaacacatacaacatattgcgctacaatctaacactggttcctaaataggaacctacactgtctctttaacactggttcctaaataggaaacctacactttctctttaacactgcgcgtatacacttttctcaagataacactggtc

SEQ ID NO: 32859 - DNA, 160 bp, Glycine max
  unsure (1)..(160): unsure at all n locations
caagcataaaattttattctttttgaccgccaccaagatatctgctcaatacttaaccggtcattccttaaaagcagagctttaaaaatactgatgaggcacaagacttctgctgttcattaatacatttaagacgngagatctatttgaatagagaatg

SEQ ID NO: 32860 - DNA, 401 bp, Glycine max
  unsure (1)..(401): unsure at all n locations
ntgcccttgatcgtcatgacgcaggaacaaaaaccagctgaatatcgtttcttttaccatttcatttgattgacaacgctttatacccgccctataaagngggtcaatcttgagcacacgtttagcactcgcatgcttatttaattacattacacaacctcatactggtattacacccaaaatattgtcgaactaacattagacttctcgactccgtgcacaaatctacaactggcttgtggcttcactatggttacttgtagcaaaatcttgtacagcgcatagctcctcatgggaacaaatgatttttcgcgctcatacagataccattcacctgctccatcccattgacgaaactccctgcgataacgttgtaagccttgtgtgccacactcctgatt

SEQ ID NO: 32861 - DNA, 308 bp, Glycine max
agcttctaaattttttgtgtttttataataaataggtggtaatcgattaaaacaaaaaatttttgcactgaaaatgtttcttgccttaaaaataatcttcctacttctacttgatgatgcatgatgcacacctggatagattaagacttaccagcagccatcaatactgatgccattcaataataagttgggcatgtaaaaagacaaaactctttaaagcctgatcttcatgtttctcccctatctctaacacacctaatgccattttaaagttacaggttgagattgacgcaagaaaaaatgtcatg

SEQ ID NO: 32862 - DNA, 374 bp, Glycine max
tgcagcttggcacgtctacattaaataagcttcttctacatgatgagaggaaaatggctaccaagaactaagggtgatcatggattggatttaaaatccatatccacttaattggataaaagtggtttggattttttttgaaacctgtttaaaatggttttaaaatcggtttatagttcaaaatcattttagttttaaatcataaataaaatttttgacctactttggctagggctgcttttagctaacatccatcacaactttttttggttgacttcaactaaggttattttcagttgatgttgactggggctatttttggctgaggtcgaaactattttttggtcgaggtcgatttggacttttcggtcaat

SEQ ID NO: 32863 - DNA, 253 bp, Glycine max
agcttggagaattgctatactttatacatgacagggtttggtttggttcacagataaaagggatgccccatattcttatcatgacccaaatgcgaaactgatgattagggaacattattgtaaactggtcatgcttgctcctactcagacactcaagtgtcaaatgtttatggacatgagatgctctggctgaggattcatttactttataataatcaacccaaagtttccaaaatatgttcttgtataaaac

SEQ ID NO: 32864 - DNA, 370 bp, Glycine max
tcttttggacattgaacaagcaactaattcctcttttagaaccatgctatgtgctcgcgactggtccctctcttcccttcgcagcttgagttcactattgctatcccatagagctccgcgaaatttattccggccatactcttccttgcgagccctcttggtctcttgttcaagggctcttgcgataattgcattctcttcccgtaacccggcacactccttccgaatgtgtgtagtggccaacttgaacttctccttggcaagtttcgcctttcctaactcgcttttgagagcttggacttcttcgtcctcttccggtgcttcaaaactctcttcgctgacgacttttaacttggcgagccaatctaaa

SEQ ID NO: 32865 - DNA, 320 bp, Glycine max
agcttctctctacctataaattctacttcaagaattgaagaatgatgacaaacaagggcagaaaaaaagagtagtgaatcaagaaatgagagaaaagaaaagtattagttgagaaatacactaagcttaagagagttcattctttataatacacaaagtacttgtgagacattataactttattgtatattcactcattgagtattgtaaagaatctttgattctacatcaaacttttgtttgtgaaattcaagagtgacttagtgaaaaaacaatacgtaggtgttcttagattcaagtggagtctacaggttgtgcca

SEQ ID NO: 32866 - DNA, 302 bp, Glycine max
  unsure (1)..(302): unsure at all n locations
ngctctaaatttacattgatgtttgtatttatggtttagaggttgtatgccatttttgcttgaagagtagtgtcccactggttaaactaactctccaaatgtttgccttcgcacgaaaaggcccttaggaagctagcctcacagaggtccaggaaagacaacgcatccgaatgaactacttccgctccggagtatgacagtcaccgctttaggagcgctgtacaccatgagctctatcaggccatcaagggatggtcgtttatacaggagcgactcgttcagctcagggacgaccagtgtgc

SEQ ID NO: 32867 - DNA, 321 bp, Glycine max
agcttccttaagaaaattccttttgattctagagcttagcaacacacacatctctaatagctaagctcacctccttgagatgagaagctagagcttagctacacaccccctataatagctaagctcacccccatgacaaaaaaaagatgaaaatacaaaaaaaaaagtccttactacaaagactactcaaaatgccccgaaatacaaggctaaaaccctatactactagaatggccaaaatacaaggcccaaacgaaggaaaaacctattctaatatttacaaagataagcgggctcatacttagcccatgggctcaaaat

SEQ ID NO: 32868 - DNA, 305 bp, Glycine max
actcggtatattatgcacctgaatcagacctccgtttgacaagttatgaccatttgaatttctcgatagcttgcgttgttcaatttcgagcgtctctatattttatgcgcttgaatcggaccttcgagtgaaaagttaggaccctttgaatttctcagaagcatccactatacaatctctaccggctcgatttcttatacgcctgaattggacctacgagtgaaaagttgtgaccatgtgaatttctcgagagatacaggtgttaaactactagcgtgatgatattctatgtgctttgctctgac

SEQ ID NO: 32869 - DNA, 320 bp, Glycine max
  unsure (1)..(320): unsure at all n locations
agcttgtaggattatggggnactccatttcatgtggtactaggaggcggacgggcgatggtgcataacaagtgctccacatacactaatcatgtacaacccaccattccctgttgcccacctccaactgagctcacgtactcccacgtagcccttatcctcgttcctctcaacgccgagtccccatcaatccttccaagcttccacaacatccaagtaattgacacatccagtcatcatggactagcaaaatcaagcagaacagggcaaatgcaaaaaactctgcgcaaaatacaactcaaattcacagcttttcacatg

SEQ ID NO: 32870 - DNA, 285 bp, Glycine max
atgctatgagcagacctgcacgcatgcaagcttggggaaattatgaaatttctttttctcggcaatcaaacatgctgaaattgtgtgattttttgttatgatccaccaattcattgggagaatatgcttctaaaaccaaacagagtataaactcctgctctttgatgggctaaaggaataggccatgggtttcaattttgataatgggaactgtacaccaaaaattgggttaagggtaaaaattttggatttttattttttagaaatttgtaaccagccttctgc

SEQ ID NO: 32871 - DNA, 333 bp, Glycine max
acccgtgcgcgcttaaccaaggaacttatattttaattttaaacatgtatatagaaccagcattgttcctgcggatcctgcctatctgaaaaagtgtggggctgagtgaagacagagaaaagctttttggttttaaataaaacggttttctctttctctattattttatttgagcaatgccacatgtctccatttgagtggagcaaacagggcccacttttcctttttgactgtgacccatactcaatcacaaaagtgaggaaaatctgacctttgaaacgctaaaatcctgcctcggtttgcgtgctgtttctctggttccagctcctcgtg

SEQ ID NO: 32872 - DNA, 374 bp, Glycine max
taaagtatgcccgagtcatttatccctatgttatgttgttgaagtattggcgatcagaattgccattccttggattatagggttgaaccaagctcatgcttttacaaaaaggttcatcatgtcaagttgaaatatggaagtaaccgtcttgcaaaattggggcaaaagatgaatcgagtcacatcactgcttcgtctactgccaaacatatttaggattattgatgtccttgttacttccagtttcaccttgacaaagatgtcatacaccatgtggaaaatgtaaattgattcaaccccatatcctgcacaatacttgaactgtacatcattcgcatacatccatgcttttcattggttgcattgctcattgca

SEQ ID NO: 32873 - DNA, 315 bp, Glycine max
agcttgtcaaaatgaccttattttattcctccattaactgtacaaactccaataaaccttgtgacacttgtcattttgccaaacaaaagaggctaccttttcctgatagcattattgtttcttctcagaggtttgatttgctgcacatggatatctggggcccttatgcttatccttcattacttgggcacaaatattttcttactattgctgatgataaaagtagatatacatggatcatttttctaaaactaaaatcaaaagttgcaaatcatatcaaacaatttgtatctatgattgaaactcatttttctg

SEQ ID NO: 32874 - DNA, 397 bp, Glycine max
ggacatctatgaaactcagctttcaggttctatccctccttccctgtgaaactgtttaatgcttcagtccctggatattagcaacaattccctcagtggtaaaatccctcctagtttagcaagatcttctaggatattcaggatcaatttgagcttcaactcactttccggatccattcctagtagtctcactatgtctccttctctaaccattcttgcacttcaacacaacaatctctctggttttatcccagattcttggggtggaactggaaagaagaaagcttcccagcttcaagttttgacccttgatcacaatcttatttctggaaccattcctgtttctctagggaagcttgctttgcttgaaaatgtttctttgagtcataaccagatt

SEQ ID NO: 32875 - DNA, 315 bp, Glycine max
agcttgaagcctgaaaccttttttgacaacaatgttgaacccatcccaagaatgatttggattccaagattcccaccattggaaccaacccaaagcttcccctccatcgcgatcatcaccgcttccagcttgtcctcttccctaactgctcgtaaccaaaaatattgctcaatcttggtccaccagtccattggatcctcaccgttgaatatgggcaattctaaattcctccaccggttggcgttgtgccctgccgtaccttcattcccttcgatcgataattgtgcccggccaacctttggatcatcccttcga

SEQ ID NO: 32876 - DNA, 377 bp, Glycine max
  unsure (1)..(377): unsure at all n locations
tcttatccaaggtaattcttggtggtgaagctccttcttccttgtcttattccatagtggatggtgcctcccctctcctcttctcctttgccttccgctgcatctccagggtgtaaaatcaccattaaaggacctcattgaagctcaaagatccagcctccatagaagctctacaagcaagcttccatcacaatatatataaattatcatccgggaaatcatcccgaatgggtaagtcctcatcagacacatgttcgatccgactcaaatgatcagcaactaaattttatgctctgctcctatcacggatctccaagtcaaattcttggagccaaagcatccatcagatcaacctaggctntgaatcagccttctgc

SEQ ID NO: 32877 - DNA, 318 bp, Glycine max
agctttttggagtagaatcatggtaccaactcattttatttcaaaaaaaaggttgtatctagtcaaggtctgagagaccatacaagtttcctagcgatttctaattatgtgggccattaagtctatcatatgttgacaatagccgagaagcccatgaatctcttcgggggcggagtaggtgtccgccatcgccttggccttggctaacaagcggggaagttcttgactcccgttcaaggtaagagcaaaccgatccatccacatggttgcctcttggtgtaaagagtcgatcacccttcctctagcctctttttccgc

SEQ ID NO: 32878 - DNA, 297 bp, Glycine max
agcttgcttccttgctttctttttttggttccttgcttcctttgcatctttggttatctgctgcttgcaacttcttggtaagtttattttaattgataataaatccgatgcatgtttaagttataaattctaagtgttatgagttaaatatgtttaggttaactgtgttttatatgttaatgttatatatgtataagtgctatttataaattttaagttgccatttgaaatattgatattatttatattgtatgtatatgttataattttagatagtgggtacagatttgtattata

SEQ ID NO: 32879 - DNA, 300 bp, Glycine max
  unsure (1)..(300): unsure at all n locations
tctaaactntgtacaagaatgaagctctgatacctcttgttgaacaagtggcctcagatatctcaagaatgggaggttgaattaagatatcacacactattccgccattggaaattctactttgattgtaacccacgtcccacgattccttttaaaatgaattcttatataataattcaaattaaacttattgaatagaaacagtaagcaacatgacataatagagtttaagggaagagaaattgcttacacagtttttatactatgacggcaaagtccgatgcctacggccaatcccca

SEQ ID NO: 32880 - DNA, 318 bp, Glycine max
agcttgaaggtttactatatgtattggttaacctggtaacctaactggccatgaataaaaaatctgcacctgtcgccagacttcgtggtttatgctcctctgtcgaccaccacacagacctttgcccttctatgcaacaatctaaagcaattgaacagcctgaagcttatcctgcaaacatctacaatagacctcctcaacctcagcagcaaaatcagccacaacagaacaattatgacctttctagcaacaggtacaatcccaggtggaggaatcatcccaaccttagatggttgagtcttccacaatagcagcaac

SEQ ID NO: 32881 - DNA, 376 bp, Glycine max
ttaaaatttgaattaaaacgttcagaaactgttggtaatcgattaccatatatgtgtaatcgattacacagggcaaattttgaattcaaattttaatagctgttgtaaatcagttttggccactggtaatcgattacatcctctggtaatcaattactagagagtaaattcttggccaaactttttgctacttcaattggaattcccttcctatttaatataccctttctaagactctatagactgtcttgatcatccatcttgaatatctttaattgctttgtcttgaataaagctttgagacgcatgtgatattttggcatcatcaaaacatcagcttgatcctttgtctacacctttatcatttaggaacaac

SEQ ID NO: 32882 - DNA, 233 bp, Glycine max
ccatgaacgaattgcagtgcgcgagacacacccttggatatgaccccacgattcccattggttgacaacctcaccgcgtacaatttggtgtctatgataactggtcgctgcgaaaaatatggcgatatgttggggcaccattgcatcgtgtgcatcacgttgaatgtgggcgatgttgaatatctgcacgggcagtggatgagcgcttgcgtaccttggttcgctacgatcga

SEQ ID NO: 32883 - DNA, 295 bp, Glycine max
cgctgctgagtgctgagcataaatttataacctttcctttgagtgcatttgcaccccggggggtgaactgccgacagatcataaaggacacgtattttatttccaaccacttaacatttgcggctaaagagcatactgtgccagagctaaatctgtccaggattggaggatttgagcgggcaccattcaagctgtattataattcttttccacctaaggtttaagacaggggtggacttatctattaatctcatggcttctaataactggaccttgaaatgattcttatgaattc

SEQ ID NO: 32884 - DNA, 268 bp, Glycine max
agcttttgcttttgtttctcttgtatggtgcccaagtggcatagacaagaagggattggagcctctacttcactgtctccatgtgaagggtatatctacctctactggcattatgtgacaaatcccaatggtggaaaggtgcataaatgaattccaaaggtggtttataagttttagaactatccaaaggttagcgattctgcaaccataattttactatgataggtttgagcttatgcatgttttggaaatgaagaacaaaaaatga

SEQ ID NO: 32885 - DNA, 363 bp, Glycine max
taaaggagcactcaaatgagtgtgttttaccccttatgattagactccgaagagtacgtcagggctttccctactgattcaggtccaacccacaaaacattttaacatgtagactttatctatgaactatacaaaacacatgactcctcaattgctctcaaaataattttaactcgtcgggttcccatagtgtatcccatcacaatacctgtcgtacattaacttgtcactcttaaagggtcttacagccgtgtgattgtatgactcatagctcacaactcaatggacacaacatctcaatacacgtgcgagctcacaatttaacacatactctacttgtcacttacacacagctcatgacac

SEQ ID NO: 32886 - DNA, 114 bp, Glycine max
ctcttactggctgagggctatcagtgaagcttgagaagagatgcttgtgtgggagatctcaattacctggcacttataaagaataacccttgagatcaaagtgattaactcaaa

SEQ ID NO: 32887 - DNA, 262 bp, Glycine max
ctgcactactaaatgccgggacacaatctgcagtggagaacggaatagctacacatcccttgcgatggctatgggcgttggacactttaactcattcaattgccaccacattaatatatcaaagtctgaacttgctgaccaaactggctggcctagataatgatctaactgcgaactcatatgtgaggtacctgcccttttctttctattagtggatctatcataatcacacacttgactctttccatcactgaccacatct

SEQ ID NO: 32888 - DNA, 294 bp, Glycine max
  unsure (1)..(294): unsure at all n locations
tggtactctaaaatgtgggaatgtgctcaaatatgtggggcaattttggtttgttttcttgcttgattgggttggattgggggtttgtatgggatggccctangcctataatgcattntgaaacaatgggacatgccacattgtccccgttctcttgctattgatacctaaacgcgcgcccaccacgtgttcggtgaaatgcctcaatggcattagcgcgtgacttttgtaaggaaacaacccatggggcattttggtttgcacatattttctattttttgggacatgcattca

SEQ ID NO: 32889 - DNA, 330 bp, Glycine max
  unsure (1)..(330): unsure at all n locations
taagctccgatccgttggaccagctatgagactaatatnactgtcagtttatcttctcactgaaaatccttcgtcctccccgacaatattatgtgggatcaaatacacgttcatctctcacaaattgagtatgtattgacaattgagttacacctatcagattttgagataggaatatctaacaactaatagaatgctgttcactaattacccaatgacatttctctggagaataactagcttaccgatagaactcagccttcgttattatgccctctattttttaagcgctttcaaacgaaaatgctactccatcctttttataaacac

SEQ ID NO: 32890 - DNA, 300 bp, Glycine max
  unsure (1)..(300): unsure at all n locations
tcattctttggtctgctgagggatctccattgtttttattattttgttaaaagggttgcacgttttaaattacagtaaatntggctagtgccttaattagactggactgcttcgagaagctntgatagttgtttagttcgttagtttcaaaatttaatctccctgttctcaaatacgattaacccaatactacttaacatattctgtttggaaggcacganagtagaagaatagaaagggagagaagganaacaatcaattttatttactttttttcatagtttaatttggtatatcact

SEQ ID NO: 32891 - DNA, 454 bp, Glycine max
  unsure (1)..(454): unsure at all n locations
taagctcggatacaaattggaaaagaaaaagataaaatatgttctcgaaatgctattttattagatgaatgattttttttttttctctaaacacacgaactcatgaagcacaagcacagctcagcatcttgtgtttgaatgtgtgtatagtgacattattttgttacgggggaagggttaacagatgaactntgcgatatttttttcttcttattggggttgtccgataaaatggtaattttaaaaccatcccttcaaactttaagaacatgaagtaatgatcttttaagaaattattgaatcttttatcttgttaaatttaatttaaagacaatattgtattttatcatttaatgttaaaaaataaaaatatcttccatatataggagagactcatggaaaaaaatatgagaaaaaatcatttattgttatttttatgttttaaattaaatga

SEQ ID NO: 32892 - DNA, 448 bp, Glycine max
  unsure (1)..(448): unsure at all n locations
ttaagcacctgggctgcagcttaaccgaccataattagttttattctattgatcaacataacataatcatgtcgatgatcattaagtaacaggtgttttgcatacctcggtacccggagcccaccacaggattctatttgattattggtttatgtcagtagatgtttgtgcattgttatttatcaattgaatttggttagtggaatatgttaaacaagagccaaatggtacattagccagctcatacgtcagctgcgtggaaccatcctcacgtgcaagtgaaggtaagagcgacaatagggggtgttgagggtcctagaaaatggatgatccatgctngacatttcctagctgaggatatttttggaaggttctgatattttaaaatcagtcctttgttcaacatgaaaaaataggttgattattaacttcatcactaaattatttt

SEQ ID NO: 32893 - DNA, 297 bp, Glycine max
  unsure (1)..(297): unsure at all n locations
ctataaaactaagctatcagaatttctgatcattttcttcatctctgtatgtgtttttgttcaatactttctcttccaagaaaagttcattgttcaaaaacttttgctactcttcttcttcatttacttctccctttgccaaaagaatagaaaaactaaccgcctgaattctnttgngtctcccttctctctttccaagagaactcaaaggacttaccgcctgagaattcttttgattcttcccttccccttaaacaaaagactttaaaggactaaccgcctgagatatcttttgtt

SEQ ID NO: 32894 - DNA, 401 bp, Glycine max
tgtcgatgtttgaaatttcttgtttggtgttgtagatttaattattaacggtttagtgaacttggaatgttgttgtaactaggttgttgtgcaaatgttgccttgccctaacaaagtattgtttgaatgtatgcgtttaggaacccattaagataatgtttctgtgtttatgctccctagtttggtttggttttaatcttgaccatgtctcgaacctgaaaccatttacatggtaaaatggaacaatatatactctacaaatattttactgttctatactcttttatatgaggggacaatggctcattgagaggggtagcattcatgatgaagaacatcattacaacaacttcgatccctattgaaaaggagagtatgtatgagaccattcttccacaaca

SEQ ID NO: 32895 - DNA, 167 bp, Glycine max
tgcggtctgtccggccctctaaccaattgtaatggtcggacaactatcatctacattctgctatcttccgcttattatacttattacgggaacaaaaagcggtaatggcccattaactgctataaaattaccccagcctaccacatttattatggtaaatcatttcg

SEQ ID NO: 32896 - DNA, 368 bp, Glycine max
  unsure (1)..(368): unsure at all n locations
ggatccttaagncacctgcggcatgcaagcttctatataagctgaacttttttatttataacacaagnngagttntattcagaaaattagagtttatctcttttatcttagtgagagtgattctcctaaattcttgagtgattcaagaacaccttggctgtatcaaaggactttcacaacctttgtgtgttgccctcgctggaaagagtgattctttccttcctttcatcatcacccttgttctttcaaaccacaattccagaaaatccacctctgcccagaattatctcgtggccataactcccattttatgcactcaaattaagtgattcttgagcctaaattgaatntcaaaacgagacctttca

SEQ ID NO: 32897 - DNA, 441 bp, Glycine max
  unsure (1)..(441): unsure at all n locations
tcaaaccacagcaacacataatctaggtgtttctaaatccctcaattcaatggattttctaggtttgaaaagcgaaatttagaatgaggtaaatttgaagcaaactctcacctcacaccagtccataacatctatttagacttgttcaaactggatttacacctaaaatctcaccgaatcaaaanttggcccttcgacacccaaatttgccctagaaatggctctttattcactttgatcatttgtttttctctctagcacagtccaagctttctcccaagtcctaaatgacatttcaagctagtattaactcactttaacctccatttaccacagaattcagacttagcctttccactctcaaagcctcactctttttccactcataacaccacattctcactgtccaaccctatggtaactttatatttcatctctaac

SEQ ID NO: 32898 - DNA, 350 bp, Glycine max
  unsure (1)..(350): unsure at all n locations
agctttcatcataaggtttgtttatttgttttcnaagcacaagaaatcaagagagttacttggattatgtaatgcagagtgtgaagaagcaagggatgcagaggggctgataagcacatattagaaacagaaatatgctcagagatgagagagtgcagaggtttgggtgccaaggtagcaacccaagtgcctctgcctctactttttaaaaagtgaaatttgtatggtgcgcttagcgcgcagctgcgcttagcgtgccaacatgacatttgagtttaaaacactggcgcttagcctagcctcgcgctaagcccaactcgaagttgtaacttctagtaagcatttggggc

SEQ ID NO: 32899 - DNA, 339 bp, Glycine max
tgacactataaatctcagcttcgagaagtgagaggtcaagcttatatgtcttgattgaaagagcccgggtggtcgaagagaagttcaagtccatagccatcaaagtctgaaaagagtatgatgaactaagggacgtcaatatggccaccgctgaagccttggaacgagaaaccaataaggcccgaatggaagaacactaccaaagctaagttttgaggggctttatagggcagcaatagtgagctcaagctccaaagaggtgaaaggaatcatcactggtcaaaggcttgatctagaaggattagctaaaggcttgccttatgtcgaaaagaaatttgt

SEQ ID NO: 32900 - DNA, 303 bp, Glycine max
  unsure (1)..(303): unsure at all n locations
aaacatatattatacatcggcatgcttgtaatatggacaaatgaattataccaaagcagttcatttacatgattaaacgagctcaatcatataatatgtcttgccattntaaacaattttaattaataactaccaacagaatgagtataatgatataatgtatatttgaaaaatacttgttaaacattaaatataacattttccattaatattaactctttaaggaaaattaaatacttctaaaaatgttaagatgctagatatttatgcttttatttgaataatattttttttactttctta

SEQ ID NO: 32901 - DNA, 256 bp, Glycine max
gttgtcatttgtgttcctttatgaatggcacaatattagtggttgtgcagatgtttctcaacgtggaagggaaaatggaaactttgactctagtgctagagtttatcataaagtcactcccaagaaattaggggctttgggttccaatgaaggagctgcttaccatctgggattgcatcacaaacagctatatgtgtactgtctggtacaagtgttctaaatgctagaccacgtagtgctacttcgtctggactac

SEQ ID NO: 32902 - DNA, 450 bp, Glycine max
  unsure (1)..(450): unsure at all n locations
gtcacctgcggcatgcaagcttgccaccaagctcgcctaaggttggttgccaagcacctcacaaggattgtgcatcaataccttcttttgatttccggcatgtcccggaacttcacaaattgcctaatgatgggtgccaagcacctcacaaggaccaaacaaaagttgcatgccaccaagcaaaggtccccggacgaaattagggtacggcagttgcccctctttacttgtcttttattggagataaaagggaagtaaagataagacactaatttcgttcctctcggttgacgagagtcgcgggtgaccataacatcttcgcatgcaaatgacttgtgttccccggnggaacaaaaggtgcagaagacgatgtcagtctctgcatgctatcaagcgttctgtcttacagatagcanaagaaatgttatacngataaccactctggtattt

SEQ ID NO: 32903 - DNA, 443 bp, Glycine max
  unsure (1)..(443): unsure at all n locations
tcatgatgaatcaagaatgattcaaagatgtnttgattctattatatatgatgacaaaggtgatgacaaaaagctcaaaggtcaatcaaagaatgagttcaagatgttcaagaaagaatcaagaacacttcaagattcaagaggaaagttgatttcaagaatcaagactcaagattcaagaatcaagagaagacttaatcaagataagtatgaaaaggttttttcaaaaactgagtagcacatggatttttctaaaaaaatgtttaccaaagagtttttactctctagtaatcgattaccagattattgtaatcgattactagtagcaaaatggatttgaaaaagttttcaactgaatttacaacgttccaattgatttcaaaaagctgtaatcgattacaatgttttggtaatcgattaccagtgcctttgaacgttgaaat

SEQ ID NO: 32904 - DNA, 313 bp, Glycine max
gctggtgaagaagaatgtggcatttacctgcggtgaaaaacaagagcaagcctttgctttgctcaaagaaaagcttactaaggcacctgttctagctcttcctgactttttctaaaactttgagctagaatgtgatgcctctggagtgcgagttggagctgtattgttacaaggtgggcaccctattgcttattttagtgaaaaacttcatagtgccaccctcaactaccccacctatgataaagagctttatgccttaataagagccctccaaacttgggaacattacctctgttccaaggaatttgtcatt

SEQ ID NO: 32905 - DNA, 87 bp, Glycine max
  unsure (1)..(87): unsure at all n locations
ggacaggcgcgacaaagagagggtcaaccgaagaagcgcagagccaccagacggaaaagagagcgccnacacaaaagacccgaccca

SEQ ID NO: 32906 - DNA, 433 bp, Glycine max
  unsure (1)..(433): unsure at all n locations
atgtgaattttacattaatcctatacacttttattatggtctcgtggcatatcttaagatattttaaatttgcatatccccatgtttgtgtcttgtcatatctgtgtcaagttgtgttcaagctttctaggtcagtggtctagaaatgatccttggttatatttggctgctaaactattcatgttgtttcaaccttgtcagtttttctcttttgattgtatttgctttgtggaggactagaagcttttgattgacagttcttgggccaattaacaccatgagcttgcatttaaacagggaaaccactttaggaaaacatatttggttggtgtttgaaccttggtgactatggttggagtactagatttatcaccattgtccagagtttatcatatgctngtatgttactatgttgtaattgatgggggtatct

SEQ ID NO: 32907 - DNA, 395 bp, Glycine max
cctttgcatcctagaaaaccatgattggttgctttccatcctcattacaagcctagtaaagtctttcggattcagtttgtgtgttcttgactatatgatatgagatgaagtgcaaagattgagacttatgttggttgttgattgatggataacctagacacttgtgcttgagtgaaacagtgaccgtgaggctttgggtgatgatccttccttgatatctgtcattcttactagcttatttcagctgtgtttcttaataatcatgttcatatcttttaaaagttgcatgtcttgtgagaagctgttgattgaagcattgtatgtcattcatgtcatgtgattgaattctttggaataaaaaccttgtgaataaccactgtgattttgtcacttga

SEQ ID NO: 32908 - DNA, 461 bp, Glycine max
  unsure (1)..(461): unsure at all n locations
tctggtgggacatcttgacttgctttccaatttgacatcncttcacagattctgccttcttctattttcagattgggaatgcctctaacagcacctttgtcaatgattttcttcatgcctcttaagtgcagatgtccaaacctttgatgccatattctgacttcatcctctttggaggatagacatgtggaggagtaactggtttcttgaggtgtccataggtaacagttgtcctttgatctgctgcccttcaatagaacttcactcttctcatttgtcaccaagcattctgactttgtgaagtttacattgaatccttcatcacacagctgactgatgctgatcaagttggcagtcagtcccttcaccagcagtactttgtccagactaggaagtccatcatggactagctttcccattccagtgatctttcctttagagccatacttcaatgtcacata

SEQ ID NO: 32909 - DNA, 463 bp, Glycine max
  unsure (1)..(463): unsure at all n locations
tgcttgagaagcttttatggaggctggatcctcgagtactcaatgagggtccttcaatgggtgattttcaactcgtggagttggagtgggaaaatgaagggagaagaggtgccatacactagagaataagccatagaaggaggagcttcaccaccaagtgagtgtcttggataagaagcttaaagagggagcttcaatggaggaagaatataagagagagaaagtggcatggaaaattgaaggaagaaagggcgagaagttgaactttgaagtgtgtctcacaagactctcattcatcaaagttgtgacatgtgttacacatgtntctatttatagcctaggtcactaactaaatgaagttcactttcatgtgaatctaaaaagaatattctaaggatatgccaaaggcatcttagcatattctaaaaatatgtcacaggtatcttagcatattccaagaata

SEQ ID NO: 32910 - DNA, 344 bp, Glycine max
  unsure (1)..(344): unsure at all n locations
ccactcaattcctcctaattgccttgcaatcaagtattatgttgagctgaagaagtataatattaaaaacaacataaaatatcattattattgagttatataataagtagaataaaacaatcaaggaaagtttgatcatttgacctttcaccactaaccacacaaacaacacaagagtagccgatcacaaagaanagagatattcgtaggtcaggcacaaagtagcttatcacaaggaaaggaggagacaaatcacaagattaaacttacctttacaccatcatgtgtacatttcttctttatctcctctccaaaaatatcctttcttataccatatatgtaac

SEQ ID NO: 32911 - DNA, 278 bp, Glycine max
ctcgaagggctacccggggtacagcttgcaaactaagaaactcgccattagtcgagatgctgaagtcgatgagtacgcttccaggaaatgggactaataaaacgcggagaagcacgttcttatacccgctcgactaccttactacgaagctgaggtagataacccaggggaaccaacttcacctccaccacttcagctggagcgcgaactatcatcaccagagtctatatcgagacgagtaagatccttggtggacatgccaaactatcccgagagtt

SEQ ID NO: 32912 - DNA, 148 bp, Glycine max
cacacggaggtccgcacccggcggacagtacatcgagaagctcggaattgaacaacgaacgctgtcgagaaaactaaacggccacaactcgtcacacggaagcccgatgcacgcgcagaaataccgagacggtcaaaatgaacaacgg

SEQ ID NO: 32913 - DNA, 103 bp, Glycine max
  unsure (1)..(103): unsure at all n locations
aacaacggaagctgacgcgaaactaaaatggtcataacatnncacacggaagaccgagacaggcgcanaacacaccccgacgcccgaaacagaacaacggaag

SEQ ID NO: 32914 - DNA, 265 bp, Glycine max
agtggacctggaatatgagcggggtcagaaaccttgaggagtatgtggggtgctattgccagaaccaagcttgaccaatgccgaccatcccgggcatagtcggtcatgagaacccgtgatgtacctaacaggcgagctcctggagtcaacagataaaaggaacaaagaccacaaagcccgaggcttgggtggctggcagctataaacgtgattgattggagatatggctctggtaatcgataccaagggggtatcgagacaagct

SEQ ID NO: 32915 - DNA, 353 bp, Glycine max
  unsure (1)..(353): unsure at all n locations
agcttatgcgcatattttcttacattcgttctctngcacaagacattctattatccgaaaaaatgcacccatatacaatcaaggaagcttcgttacctagattatntacacgtacttccaaggtgtatttgttacttacatcccacacatctccttggctaaattcacatacatgcatactccaagcantttggggtaccaaaaattgcacatgtgcacatcttggtatttctaatacctatacatacacaaacttcatgatgaatcttgactatctacacaataaggtgccacatttcatgccttttttttcaagtttgtgctacctaaagccgcatgcaaattcaagcata

SEQ ID NO: 32916 - DNA, 451 bp, Glycine max
  unsure (1)..(451): unsure at all n locations
cttatccaaggctcatcttggtggttatagctcctttttcatgccttattcccttgtggatggcgcctcctctcacctcttctcctttgtcttccgctgcatctccatggtggaaaatcaccattaaaggacctcattgaagctcaaagatccagcctccatagaagccccacaagcaagcttccatcagattgataagttgccttgggtgatctactacgcttccagaactttggttgttgctcaagcaaattacactaccacagagaaggagctattagcaatagtgtttgctcttgagaaatttcgttcatatttacttggtactcttgttattgtttatactgaccatgcaactcttaagtacctgttgaagaaggctgaatcaaagcctagatngatcaggtggatgctntggctctaagagtttgatttggagatccatgatccg

SEQ ID NO: 32917 - DNA, 492 bp, Glycine max
  unsure (1)..(492): unsure at all n locations
cgtttttgctcttgagaacggaggtccnnaagnccccggcngcangcagccnctacaagacnannaaagattaatttcttctaacggccncgaagccgggaagaattggtaagagtgaccaaccgcaccaaccaaatgagatatcaattgaacttcatcaacggaatgcatcaaagcatggactcattctcagtcaacatcagatgactattctcatgattcttccgaatgcccactagaaagggccatcagaatgtggaccctcaaatggctctgtctgctattacatcatgacagctggaaagagaacctacttgctctacaagtgtataagttggacggagcccactacaatgattttcttgggagctctaagaggcattatcgaaagctatgggagacaacgtagaagcattctaaaactacaacacactatgcgtagatctctgagtgagaaatctccagtntagcatcaaccctccctctgacacn

SEQ ID NO: 32918 - DNA, 438 bp, Glycine max
cgagaagctctctgtgaaatgagatgatcgattactttatcctccatttgattacctcaattctggaaatgaggaacaaagagggatttgaacgaattaattgattatcatatttgataatcgattaaatcaatattaggtatttaaattataaatatcctcacttgttctttctcgttagtaactcttgatacattcctatcttttagaaaagacattctaagagtcatctaagggaattactttacatttcttcaagagattcaagttgataaagattcattcattcttcatcatgaattgataattgaaggaagagcttgaagatggtgtgatatacacatgtaggtgtattcaatccaattctgatttctctctattttcttaatcttgcgtaggggtaccaagggatttttgagttgatagggtgtcaactct

SEQ ID NO: 32919 - DNA, 79 bp, Glycine max
gacccgtgatatctgactttgagacaatgtttcagaggaggatgataaatctgaattggcaatcagctaaagccagtga

SEQ ID NO: 32920 - DNA, 463 bp, Glycine max
  unsure (1)..(463): unsure at all n locations
actaagcttcttataagctgaaccattttatcaataaacacaatctgtttccttttcagaaaantagagcggatctcttttatcttagtgagagtgattctcctaaattcttgagtgattcaagaacaccctggctgtatcaaaggacttttcacaacctttgtgtgttgccctcgctggaaagagtgattctttccttcctttcatcttcacccttgttctttcaaaccacaattccagaaaatccacctctgcccagaattatctcgtggccataacttccattttacgcattcaaattaagtgattcttgagcctaaattgaatttcaaaacgagacctctcacctcgttttggaatcacctcatttggatccctgtagcttcaataattgccatgtctatatttctgtccagccaccacttaacctacggtttaccatcccattcattcattttatgcc

SEQ ID NO: 32921 - DNA, 331 bp, Glycine max
  unsure (1)..(331): unsure at all n locations
tgacatctcaaacaaacaaatcaaacgtaacaagacaattatagttgctggttgaatacctcacccactcaagtgtatcacacaattatggcttttctctaatgaaacactcttgccttttaccactctaattccccttgagttcttaagcaattcaagagattatggccacaacaaagaacaattcaccaatatgtgtaaggtaaggctagacaaggaaaaggttaaccaagaaaaaggctaacaatgtttntaggcacaaatgaaggaaataaaattcagaatttatgaattcaagtaacaatccttcatgcaaccaatatattacctt

SEQ ID NO: 32922 - DNA, 215 bp, Glycine max
  unsure (1)..(215): unsure at all n locations
tactaagcttgagcaattaaacgacaatacttttactcgtttgctgattgagtcccgnaatatatcgagacgctcgttattgaaaacagaagctctgagcaaattcaaacgacaataactcttgactcagatgtccgattgtgtcccgtagtacatcgagacgctcgtaattgaaaacggaagctcttagaaaatccaaccaacattacctttta

SEQ ID NO: 32923 - DNA, 316 bp, Glycine max
acaaaaaaaaacataacacactttctataataggctaaacaagacttcaatatataaccttggctcaatttttaatctcacattaacttaggtgggagtcctacacgggtgttaataatataaactgaaatgatgtataataatccaaatcaagcaggaacctgatacttgagggagcatcattcaggtccatataaccagcatatgaattattataaacaaagaataacacttacatcttcattccagttgaacagaactggtgcatacggcaggagtcattcctaaattacgcatgagtcaatgaaatcttatg

SEQ ID NO: 32924 - DNA, 297 bp, Glycine max
cttgttaaacttttatccttggacattatatgtagacttgtagggtcacaaaattcaaataccaacaacacccccgatcttaagataaaactggcaacatccttaagttcaggtaatgaacataatatccttattatctttatctatacaacatcctataaatttgaaacataacaaaaattcttaagaactagattattcattttcaagctgcagacatctaggtatttcaacattattgtcattaaactagattattctttctaagtatatattgacatgaggtaatcaacactg

SEQ ID NO: 32925 - DNA, 380 bp, Glycine max
  unsure (1)..(380): unsure at all n locations
nntaataattttagcagagcacttngnnnttattgccttttaatgtatnnngctgntttactagcccactaagtttgcccattaactcattcaatctatcattgctgggtaagtggaaatggaacctgtttcatagccaaggagagctgtgggctagggtactagaatcgaagtatgtgggctggaggggtttaagcgaaataactagagggaagggtgaatcggtatggtggagggatctaaagctcgtgcttaatcactcgcatcatggagcgataatgaagaatacaacagcatggagggttggttgtggggataagtttaaattttgggaggacgtatggatggggggagaggagtctntacttgcaagattccct

SEQ ID NO: 32926 - DNA, 390 bp, Glycine max
  unsure (1)..(390): unsure at all n locations
tgcagactaagtgctcactaacacntagaaataatccttctttttgtaccacgnaaacctcttcttctagatcaccattcaggaacgtcgatttcacatctatttgatgcaactcaagatcaaaatgagctactaatgccaaaattactcgaagagagtctttcttagatacaggggaaaaggtctctctgtaatcgactccttctctctgagtgaatcctttagcaacaaatcttgccttatgtctctcaatgatgccttctgagtctntctttgctttgaagacccatctacatccgatggctgttacaccatgaggaaactcaacgagatcccaaacttggttagatgccatggaatccattctattcctcataggcatataccaca

SEQ ID NO: 32927 - DNA, 455 bp, Glycine max
  unsure (1)..(455): unsure at all n locations
tctatataagctgaaccattttatcaataaattcacctctgtgttttattcagaaaattagagtttatctcttttatcttagtgagagtgattctcctaaattcttgagtgattcaagaacacccaggctgtatcaaaggactttcacaacctttgtgtgttgccctcaccggaaacagtgattctttccttcctttcatcttcaaccttgttctttcaaaccacaattccagaaaatccacttctacccagaattatctcgtggccataactcccgttttaagcactcaaattaagtgattcttgagcctaaattgaatttcaagatgagacctttcacctcgttttggaatcacctcatttggagccctgtagcttgagtttntgccatttctatatttctgtccagccaccacttaacctacgttttctcatctcattattccattttatgc

SEQ ID NO: 32928 - DNA, 491 bp, Glycine max
  unsure (1)..(491): unsure at all n locations
gtcacgcgaataatgcataaatttnatatatcantnatttataaataaacannnannnagannaaaaaaggatgactcgtgcatagcatgcagncgaanaagaaacncagccngaagaagggangaagcagagagaaatcagatcatattcaagaaagagcgcagaagagcgacaagggaaggaaacgaaagacagaaagaaggggccaggacaacaccagcacggagagggaacaacaggaaaagaaacacaggcgagacaccaaaaggcaacgaggaccaaagaggaaagaccaaaccaggagaggcaaacacgaaagacgagngaaaaaaacacgcaaggaaaaagggggcagaccgaccgggggggaaacaaggcaacagacgggaagggaacacgccaagcggagcaggaccaaaggaaggagaaagaccaaggcccaacggggcaacacgagaagggaggcgaaacaaacaacacaaggacggcg

SEQ ID NO: 32929 - DNA, 314 bp, Glycine max
  unsure (1)..(314): unsure at all n locations
ctgcagctatggtccttgcaaaatttcttgttcatcaacactacaaatacaaggcaaaaggtcttaattaataaaaatcatcaatcacaataattctagacaacgtctatatatatgatgccaatggtacaaggattaatgtttttacataccaccatctttttctttggctgccacacagaaatcttgcagaggactangatcataggcagagacaagagaggatgtcaaagccaagatggcaacaaggaagtacacaactttcattgtttttccttagtaatacactcttaaacaattgtgctatatgtaat

SEQ ID NO: 32930 - DNA, 424 bp, Glycine max
  unsure (1)..(424): unsure at all n locations
ntttgtgcgcatgagataaccaggttttcaactcaattatcatcaatgacttagacattataaaaaaattttgtggtttactgtctttttagtctctaaactttttaggatttctatttgtaatacctgaactttttcttactagtcaatgttccttaattttttatcagggactagaataaaaaatcctaaaaattttagtgattaaaaatataatatgtgcccattttgtcctattcgacgaaaacgtttgaaaaaccaaaaaagggggtctgggaatttggaaaagaagggtttgggagttgttttcgcacaggaaaggtatacacacccgtcacaatggacgacaacctttaatcgagtgtacataatgtaacttcaaaattatgttggtttcttttttatgtgtccttatttttttggg

SEQ ID NO: 32931 - DNA, 341 bp, Glycine max
  unsure (1)..(341): unsure at all n locations
agcttatccaaaattttcttgaatactattctttcccctgtgtcaacttccaatccatcacttaagcggaggtctatatcatccatcacaaaagtgcccgatgaggctccaagtttatgagtagtcctaacagggagatcctagcaggggttttattgagttgttcaattaccttgaactcactctgctggatgatgcgtangaactcagttgcttcatcaacggatattccttttttgctaaagtcctattcttccttaaaaattggctcgccttgcttccctcttccacactcacctttgccttcccctttaggtctatagctcgcaccgngagctcgg

SEQ ID NO: 32932 - DNA, 400 bp, Glycine max
  unsure (1)..(400): unsure at all n locations
ctatgaaactcagctataccgcccatccnccaatanttttattttagtctggaactccctctcgactcaagtaaaaggaccacccgcagcagaaagagtgccggcccaacgcacagccccacccgcaccccggccagttaataatatagcccctggcgcgacctataaatatgcacagcacccaaaagacaacttccctcctattccgatggcatactccgagctatggccttcattattggagaatcatttggtggtggccatacctgggaaggttctccagccaccctaccccaagtgctatgactcgggtgccaagtgtgtgtaccatagtggagttcccggacacaatattgactcctacatcccgttcaagtataaggtgcagcacctgattagt

SEQ ID NO: 32933 - DNA, 325 bp, Glycine max
  unsure (1)..(325): unsure at all n locations
tctccttcttggaagtaccacaggatatggtacttccgcaccttcgttcacagctttttctcttttcttctctctagctagntcacttctactcctcttttcatctttttctttttctacttctttttctttntcttggtcatttaattctttttttcttgatcattatttgtttttctttntcctgattgctttcacctctcacatcatctttcttttcaccagtacctttctttcaacagctttcttcttggaacgacactatcctcatcctccgactccacaaacctcttacttcttgtcatcacagctttgcaatcctcct

SEQ ID NO: 32934 - DNA, 448 bp, Glycine max
  unsure (1)..(448): unsure at all n locations
tctcccncaattntctataaataggggtgagattgatgtataaaagggttcagccccttaggcacttctctctctttcgaatttgcttaggaaaattgtttccgtgaagaaaatccaagccgaggtgcttccgtaacgcttccgagatgtttccgtaagcaaatccgtgaaggttttcgtccgttcttcatcatttttcatccgttcttcgttcttcaacgggtaagttttcgaatccgagactctcaattcatttcttgtttttttaagctttcatctttatttggttcattttcgatttcttttcttccgtctataacgcgctattaccgtttatttaagccattttctcacctaataaatgataaaatgaatttcaaccgatcatttgtgttcgaatctcacttaatcacttttaaaacgatatctaaccgatcgttcacgctat

SEQ ID NO: 32935 - DNA, 297 bp, Glycine max
  unsure (1)..(297): unsure at all n locations
attcttctgatctctatatgggaggcttgttgcttgatgaaagcttgcccttcaatatatctacacaaaacacggtcatgttgtttaattgctcttataatatccttcagtctccattgaattgttcttcaaatagtatttgcaggcaatttgaggaaaaggtggaagaaggaactgggtgtatggacaccctntgttgccattacttaaaggactcagccatgaattcccacaagattanggtaaaggttgggagttgcactgcttatacttgtttggttggtttcaagcctaatg

SEQ ID NO: 32936 - DNA, 424 bp, Glycine max
atcatgtcaatgtgctcaagcaactctgggcaattgcatttcttctttcatttttcccaagagcgaaccgtgctctcggcttattttacctgcacgcaccggatcataccaaaggtcttccttactcagctggaatgataacatatccaacctcaccttcaatttttcccactgccaccacaaaacttctgatcaagttctacgaaacagacaataaaaatttggaactaaaacaaagaccaatcagtactaattaactaaagcatgcttaataattaagaggaaaaaaagtattttacatgtaaacggcgtttgatcaagtgaatagattgagctatggcggtggcatgactcttccaatcgccgtcgttttcgtcgagaatgttccaattattggccagaattccttggaccgtgagcccat

SEQ ID NO: 32937 - DNA, 224 bp, Glycine max
  unsure (1)..(224): unsure at all n locations
acaaatcgcgcataaaacccaccatcccttgttgcccacctccaactgagctcacgtactcccacgtagcccatatccncgtttctctcaacaccgggtccncatcaatcctctcaagcttccncaacatccaagtaaaacaacattcanacagcacanactatcacagccaagaaaacagagcagaggcagaaatactctgcanaacaccaaccnanatcaca

SEQ ID NO: 32938 - DNA, 554 bp, Glycine max
  unsure (1)..(554): unsure at all n locations
aggactgatactgcatgcggnacactatannaaantcacgctcagcacataggggcggctctgatatggacgtcaagcgttaacctcaatttgcaaacaagggcgaagagatatagtaaaatcaacatctcattcatcacagtaactgtcactaccgaaacaatggagaaacaactacggggaacgccaacagacagatcaatgcaagctcagggcaaaggaacaatctatcttcgtgggggatctaggctgagtctgttacatctcaacctctactcctctgtccatgcccagcaccgaatgagcggtactgcaccgcatctcatactagatgagcacctggtctccgccatgtacacaatcgcgcggtctgtggcattcttaatcctctccatagacagacacccgtcccgctgcttccaataggagacacccccctccccacccgtgccagtggtgcaacaagcgtcactccttcagaatggcaccacccacgtaacaacacacccacctgcaacgtgtttaatacacaccctatcggtcaatatgtgtcg

SEQ ID NO: 32939 - DNA, 395 bp, Glycine max
  unsure (1)..(395): unsure at all n locations
taaaaaattaattatattntttataaaatacttcaagataaatctttattccaacctaacaaaataacttacaaaaaatgtgtgatactacataaatttcgaaaatcacctaacaaaataacttacaaaaaatatgtgatcttccaaaaccatctaacaaaataacttacaaaaaaaattgatatcccagaaattatcaaacccacgaaagcaaaaacgaaagcaactgcaacagccaaaacaactgaaaaaaaatggtgaatgagggctgtatttaaagaccctaaaacgccaacaccatttgcgcttcctccctgctcctggtctgccaaagctgttgtgcttgctgcaaacctaanacgccattttgactggcgcccctggtctccatgcac

SEQ ID NO: 32940 - DNA, 379 bp, Glycine max
attctaattattccagtatagataattgtactcatctgttatttccaaaatgtattatggcttttgcagacaggaatagagccagcatttgtcttattttttgattgccctgacgaagacatggagacgcgacttcttagtatgaaccagtgtggatgcgtttctctttttaataatctgtatttacttgtgctactcatcacttgagacttttttgtccatcataattaagggttctgaggatgacgctcttgctacagattggaagcggtttaaggttttctcggagactagtcttcccgtgatcaattattatgatgccatgggaaaagttctctagcgtactgatgcatgtgattctaccatgttgatcacatat

SEQ ID NO: 32941 - DNA, 376 bp, Glycine max
  unsure (1)..(376): unsure at all n locations
ctgacattcaccacagattctgccttcttctattntcagattgggaatgcctctaacagcacctttgtcaatgattntcttcatgcctcttaagtgcagatgtccaaatctttgatgccatattttgacttcatcttctttggaggatagacatgtggaggagtaactggtttcttgaggtgtccataggtaacagttgtcctttgatctgctgcccttcattagaacttcactcttctcatttgtcaccaagcattctgactntgtgaagtttacattgaatccttcatcacacaactgactgatgctgatcaagtttgcagtcagtcccttcaccagcagtactttgttcagactangaangtcatcatggact

SEQ ID NO: 32942 - DNA, 336 bp, Glycine max
tcggagatctgatgcacgcgcataatacatctagatgcttgcatatgcacaacgaaagctctcgagatatggtcttgctacgaatctttaacattgcggtctgatttaagcgcataatctatcaagacgctccccattgaacggctgaagctctctaggaatcgaaatggacatagctattgactacggggatccattacgagcatgacatatcgagacgctcatgatagagctctaggagctctgcacaaactcatgaggtcgtatcctttaacttggatgcccgagataagctccatagttttcgagacagacgtacacatatagtggaagctc

SEQ ID NO: 32943 - DNA, 369 bp, Glycine max
  unsure (1)..(369): unsure at all n locations
tgagagatgcagagggtagattcaagaaatgcacaaattatttaactctgcaaattaaatgtcctagattctggagttagcaaagctaaatctagcaactctcaagtattgattcaattttgcaggggatccaaacttaatcttggagggagaagaactccacgatcctgctttcatggatggagaagaagaatgtgggcgtggttcttgatgacaggctggcttcgtcggatttaatgggcaatttttatttgtttcatgaaagtggctaattaagtgtcacatgttggtcaattnttacaaaatgttaaccaagaatagaatcacattcttgtattttntttaagttagagatcatgtatgtctttt

SEQ ID NO: 32944 - DNA, 469 bp, Glycine max
gacacttgaaactaagctttaagaataagaatttagggtcaacctttgattttgccaaacttcataaggaaattagaaccttaaaaactacattagccaaatttgtcaatggaatagataatcttaacaaactattagggcactatacaagttcctcaaacaaatctagaaatggatatgatgggaagatctatgttcataataagaatactattatttgttatttttgtggtaagactggacacatgacgcccaagtgtagagatcgacctaagaagggtacaaccaatacctctatggctaacacaaaaagacccaaaaagatttgggtacctaagaaaaagattattcctattgcagatgtccttgatagcagaaagtagatgcctatcatggtacttggacagtggctgctaacgacacatgacaagagaagggtgtatgttccaatgccttactccttatcatg

SEQ ID NO: 32945 - DNA, 287 bp, Glycine max
ctatgatagaaattctactaatgattcccctacaagaggggaaacttacttccttttcctttcgaactcttccaaagcctgattgacctactcttcagataaaggaggactcacctttggtgttcctattgaagctcccatcatcatgatatgcatctattcgatataattagccgggatgtggaatggatcagtatccactttctttggtttttcttcgaatatcaatcttccttcatctatcaccttctggaccatatctttgaaatgtagacaactattagtcc

SEQ ID NO: 32946 - DNA, 251 bp, Glycine max
ctatgctgcaaacatctacaacagacctccttattctttgcttgcaaatcagccacaatagaataattatgaccctttcagccacaggtacaatcccgaatggaggaatcattccaaccttagatggttgaatctttcacaacagcagtagcaacaacaacaaccttattttcaaaatgctgctggcccaagcagaccatactttccttcaccaatccagcagcaacaacaacaacagccccagaaacagc

SEQ ID NO: 32947 - DNA, 205 bp, Glycine max
ccaacccgggcatagtcggtcagtgagaacctgtgatgtacctaagcaggcgagctcctggcagtcaacagataaaaggaacaaataccacaaagcaaggaggcttgtggtggctggccagctgtgaaacttgatagatatgtgagatatggtctctcgtaatcgattaccaagggtgggtgatcgattacaatgctttaaaatg

SEQ ID NO: 32948 - DNA, 416 bp, Glycine max
tcaagaaaatgatggcctcagcaaattccttttttttgtgcataaccatagaaaaacctagagatagatggtctgaagaggatagaaaacgagtacaatacaacttaaaagacaaaaacataataacatctgccctaggaatggatgaatatttcagggtttcaaattgtaagagtgctaaggaaatgtgggacactcttcgattaacacatgaaggaactacagatgttaaagatctaggataaatgcactaactcatgagtatgaattatttagaatgaatgcaaatgaaaatattcagagtatgcaaaagagatttacacatatagtaaatcatctagcagccttatgcaaagaatttcaaaatgaggatcttataaacaaggtgttaagatgtttaagtagagaatggcaac

SEQ ID NO: 32949 - DNA, 391 bp, Glycine max
  unsure (1)..(391): unsure at all n locations
gcgcacttacactcttttccttttgttcctcaatggttgtatttntgtgttgggctaagcgccagttgcacgctaagcctaataagcttactgttcttttttgttgtcaattgggctacantttggttaacttttatagttaacacattttgaggcatgttttggttgaattgattgcatgaccgagacattgtgtactggttattaatgttgtgaaatttctgatttttgagtgagcacgcgttgttgttgggtgatggttttgtgaattaaatgcgtgtgagtgagttggttagcttgcatgacaggaaattgtggatgaaaaactaaatgcttcacattaccgtgtgagttgtgtgcaccttaatggcatgagaacaactgatttcat

SEQ ID NO: 32950 - DNA, 371 bp, Glycine max
tgtagaattatggggtacccatcacatgtggtactatgtgtctgtcgggcgatggtgcacaacaagctttccacatccacaatgcgcgcataaacccaccatcccctgttgcccacctccaactgagctcacgtactcccacgtagcccatctcctcgtttctctcaacaccgggtccccatcaatcctctcaagcttccacaacatccaagcaaaacaacgttcaaacagcacaagctatcacagccaagcaaaacagagcaaaggcagaaaactctgctcaacacatcaaccaaaatcacagcttttctcacgtaaagaccacagtaacaatttcttcgatccaagtcgttaaccgatggatcgactcc

SEQ ID NO: 32951 - DNA, 260 bp, Glycine max
ccaactattgcacttaaaaaagttcaaccgttacgttgctaatcaagaattataatatatgcactttgatcttgtcgggaaaaacttctctaacaacacttcttagaaaacaaaatttttataggctaatttatatgaggtcaatgcacttatattagctgctgtaaacgaaattataacttgcgataaattaatgtaacgtataaaaagttagataatctttcttctttagagacgcgtcgggcttatgatagatattt

SEQ ID NO: 32952 - DNA, 328 bp, Glycine max
  unsure (1)..(328): unsure at all n locations
agcttntacacacaaatttatgngttggtggtctcttggagactcccaatacacccctgaagaatgtccaaatccaaggaattgcaatagaaaaaattcaacactcaattgttatattacaataaatttaacaaagcaattaaggtcttcaaatttgtcttcaatgcttgtttattttctgaagtgtttcactcaaactttggtgattctttggttgcttcaaatccaatggtgctcctaggatggttaacctccaaaacttaaaaatctttcttcaagcaatgcaccaatttcctctttcaatccttatggtaggcaacacgtaaac

SEQ ID NO: 32953 - DNA, 304 bp, Glycine max
cagatcccggtgggatccaaatgccctaaattatacgcggctaaatcctttttatcatatgcacgcaatttaaccttctatcactttatctaagtgttcgaggatacaatgacaaatcttttgtatccttaaaaaatacatacctgtaatattgattatgcaaatgctaactacaacaaagattaacgaactaaaaggaaaaaagaccttgttattgggacatgtaaaattgcatagtatatgagcatgtagcgctcttctattatatatgtcaataaatccttgtttcatattaattaagcac

SEQ ID NO: 32954 - DNA, 414 bp, Glycine max
ctatattctagggtgagggattgttcttaatgttgatttgagctctctctggaagctcttgaggaaggatctgatgatgttggcccatacctggagtgtgctatcatattctaaccttgcccccacttctcatacctctgatctgaacatggatcgggcgaggttagtttatagactcgtgatgaagatggacatggacgtgggctttctcatttcacaccagatctcatagatggcccaatccaactcctctaagcttggtttttcggcattgatttcagcattgtgcatagccagaggagtcatctcagattctctgactttcgagtctctcaatccagccattaatttggcatacattaagaagaactgctggacctggacgatcccacgatcgaattttcaaggatctgc

SEQ ID NO: 32955 - DNA, 434 bp, Glycine max
  unsure (1)..(434): unsure at all n locations
ctcagctctatagcgtgggtatgggagacagaggtcaagngttccttatattttaagatgatgttccgagtactttggatttggtacgaccatgccctcctgatttccagctgggaaattggcgagtggaggaacgccccggcatttacgcaacgagcataatgtaaacctttacggttttaaaagctttatagttgggcctaggctttagagtctttccttttgttaaggctttgtgtcttttgcttttgaatatataatacaaggatctttcttcatttgttcctggtctctacccattctcattcatttgcatgtttacatctttttctgaaacggatgatccgatgacgagtccccctaaggtactaatacctgggacccgtctatcgacttcgagcaagatatgtatcaaacggaagatgaatgaaatg

SEQ ID NO: 32956 - DNA, 325 bp, Glycine max
gcaacagccttttggaggaatcttctggagggcccaagtgggcctagttgctatttgcactcccctttttactaaatgcacccccttctatattgttggtaattctttttccggaatgttacgaaactttacgaatttcgtaacgatacttatttttcttccgcaaggttacgaatccttacggattatgtatttactcttttttagctttcgaagaagttacggaaacttacggattgcgcaaaacacctcttttcgatttccgtcacattatggaatttcacggattgcgcagcctgcttccttttgatttccgacacgtctc

SEQ ID NO: 32957 - DNA, 449 bp, Glycine max
ctcttgagaaaacttccttgagaagcttctttgagtttactttcttgagaagctagagcttagctacacacacccctctcataactaagctcacctccttgagaagcttccttaagaagattcctaaagatgcttgagcttagctacacatacctctctaatagctaagctcacctccttgagatgagaagctagagcttagctacacaccccctataatagctaagctcacccctatgacaaaaaacatgaaaatacaaaaaaaaaaagtccttactacaaagactactcaaaatgccccgaaatacaaggctaaaaccctatactactagaatggccaaaatacaaggcccagacaaaggaaataactattctaatatttacaaagataagcgggctcatacttagtccatgggctagaaatctaccctaaggctcatgagaaccct

SEQ ID NO: 32958 - DNA, 350 bp, Glycine max
tgcatgtgaattaggaagcatcaacaagaatcaagccactgctatcgtgcaagcaatcaatggggcaaaacacaccataagattatgacgatggatggctcgaattatcacaaaggtaaatgtatcactttcacattgagctatcaaaactatcatgacatgtaaaggaaaaacaacgatttcaagtcacaaaatgtcaagggacttttattttctgaacaattacccattacttgaacatatcctataattcaaagacaatcatgcgaatctaacacaacaaaactaacataattaaactacaacccaacaaaactaacaaaattaaactaagaccccacagaactaac

SEQ ID NO: 32959 - DNA, 337 bp, Glycine max
  unsure (1)..(337): unsure at all n locations
cggacgcacatcgatcgcgtgtatgatatccactcctaactcnttaanagaggagagctccaaccctataacgcaacgnggcagacaaaagcgggcagnnaacaangaanggccgacatcgacaatgcaaaatgtattctgcgcttcactatccatgatcacacattattgcagcttgtggtaaagtgagcatgaactactaccaatatatagatgttgttgatacaaaccaccacattttaaaagcttactccgcacaatggaggcctcttaagaacgaagcaactattcctccttctgatgacgcatggacactcatccctgacccacactacaa

SEQ ID NO: 32960 - DNA, 405 bp, Glycine max
ttgagccaaaatcctgactcaccataaaccctgacctcgttgagaacgtctatccttacgctctgtagcaaaaaaagaatagaggggaaatttccaatcaaagaaaaagagaaggaaaatttccaatgaaagcaaaaaaagaaaagaaggaaaattccccaatcaaagagtgggagaaagcaaaaaaagaatagaaggaaaattccccaatcaaagagtgggagaaagcaaaaagaaaagaaaggaaaattcccaatcaaagaatgagagatagtaaaaaaggaagaagaagaaggaaagaaagctcctgatcatggatcgaaggaaaaacagaagaaatgtgcagagaggtctctggaccggacaatatatgaaccatacagaattgtcaccaaatgtacataa

SEQ ID NO: 32961 - DNA, 251 bp, Glycine max
  unsure (1)..(251): unsure at all n locations
atgataacttctacagaacggccagggcacagaattgcagagcagctgtttggatttcggcaagtgcaccggatcgcacaactagtataaaacagtaagaaccgagtatcgaactctcggtgaacttgtgttatttggtaagctatttcagcanattgatgtctagtgtgtaaagataagtgtgaatatgaacatgtgtaaacactatctatgcaaaaagaaagaaatcacgcgagagaaatgatgtgtaa

SEQ ID NO: 32962 - DNA, 450 bp, Glycine max
  unsure (1)..(450): unsure at all n locations
gcttgaggtgcgtgccaccatttccctatttaatactttaatgngnctactatcattgtcatcgttttatcgtcattgaggtgccacttgagctgccaggttctccacctttgggcgtattctttgaaagatccgtgcccccttttttgcacatgttttgtagttgcatcttatccgaagccattataccgaccctacctaacgaaggcaaccattatgtcctcccacgaatggactcgggaaggttccaagttagtgtaccaggtaacaactaccccagtaagactttcttggaaggaatgtatcaacaattcctcatcttttgcgtatgcccccatcttccgacaatacatctttatatggttcttgtggcaagtaatccctttgtacttgtcatagtccagcaccttgaacttgggaggggtgatgatattgtgtactatgaacaac

SEQ ID NO: 32963 - DNA, 262 bp, Glycine max
gcttctggtgggacatcttgtcttgttttcctatctgacattcaccattagattttcaacttatacatgaaattacgaatgaaaatgtataccacttaattttaagatggacccgtcccaataaacaagaattagttggatgtaaaactcacaacctcaattagtacattccgcatccaatatgattctccaacatttaaagatgtggcagctagtaagtgtggtagcacaaagtgtttatgtttttatgttcttctctctc

SEQ ID NO: 32964 - DNA, 450 bp, Glycine max
  unsure (1)..(450): unsure at all n locations
nttaagagagttgattcatgacaatcctaattggtgttgaagacagcaatagcttttggtttaaggtaaaataaaataaaggacatattaaacccaatgatagaccaaagttgagacaagaaagaaagataaggctatgctttggagaataatgtatttggccaatagttgtccagggaaccataaatggcgctaaaatatgtatttaagtagaacagaagttgtagacaattgaactactcgatataaaaactgccaaaagcctgatctgcaaccagatataaaaactgaaattcaataacttttttataagactatttgattgaaggtgagatattgcccaattgcaactatgaaattccaatagcagctcatacagaatgcaactcagacaagtaaaacttagggtgaagggaaatataatatgaaataccggcttacactggtgga

SEQ ID NO: 32965 - DNA, 88 bp, Glycine max
aaaaacccccaacgacaggaataccttcaaccccgagcacaaaagagccccgcaacaaggacaggggacagacgaacgagaggaagag

SEQ ID NO: 32966 - DNA, 494 bp, Glycine max
  unsure (1)..(494): unsure at all n locations
cacgattgttcattcgactagcatcgacngtcanaatananaccaactaagctnggaagagggttaaagcccagccgaaagcgtccgctcactcaagcaanaaagccgggacaataagccnccaccaacccgcgcgcaaccaaaaaaccgggagaaagacagaaaacagaggcagccatacacccgaagaaccatccccagcggcaagcatatgaccatgaccgggggggacgacccaagncccggaaaacgacagctatacaaaatatcgccgggtaaaaggactagcgaagtgaggatacatggaaccttcacagggccaacaaccacagatcaaaaagtactaattatggaataatcaaacaggtaaattacgacagctcggcatgacgtcaatcacatgaggagccagggaactcatatctagtcggattcctgttggcaccagaaaatgtaagaaataggtgtatcaatgtgattggacatcatcaacc

SEQ ID NO: 32967 - DNA, 387 bp, Glycine max
  unsure (1)..(387): unsure at all n locations
agcttgagaatgaatctttgattattaatatataactntaacctcttcttaacgaatggcattaaaatcttattggcacacactacgtaattattagttattatcataatattatgcaacacaaaggaggtctaggaactcggttgggattagaaaggtcttttggtgatatattccacaaaggaggtaaatcgatgctattggcttggctagcaaatcagcattgttttcggatattagagagatgagaatgatgcgtgactntggttangtttgtagggtggactnggagcangtttttgtgttggggagagttttagttcaactgctacacanaggtacacttgttgttcactacatattaagaatgaggttcataatctatat

SEQ ID NO: 32968 - DNA, 482 bp, Glycine max
cgatgatcctcgatcctgcatcaggacctatgaactaaactctatcgctacgtagtctgatgcctgttatgtttaatctgatggccctggccctctatgcaaggaagaatatctactggaacacacctctataggtcgacccatctcaagatgtacctgtgagcaaggaattatagccaaacctttgccactttctacaacataatgatgaaaagcctttataaagacatgatcttattggctctatggggctgcatggagcaacaagcagtatggaactccttaagatgttgattatgatcttcacctgctagaccatgaaacttgtgcatcagatgtaattctacaccattgatatcatatggaacaccctcatcatgatgcgtattcacagcaatcatattgaaatctgggcaacatcttcctaagaaacttaacaggtggccgtgagacactgttaatataaaaatatagtgaaggct

SEQ ID NO: 32969 - DNA, 402 bp, Glycine max
ggctgcagcttgagccaaattctgctttttattaccttgacccagggtgaaaatgccaatccttaccctcgggagcaaaaaagaagagaaggaaaatttccaatcaaagaagaagagaaggaaaatttccaatcaaagaaaaaaaggaagcaaagaaattcccaatcaaagagtgggagaaagaaaaagaaaaaaagaaaagaaagaaaattcccaatcaaagagtgggagaaagaaaaagaaaaaaagataagaaagaaaattcccaatcaaagaatgggagaaagtaaaaaggaagaagaagaaggaaagaaagctcctgatcaaggatcaaaagaaaccagaagaaatgtgcagagagggtcttggaccggacaatatctgaacaatacagaattttca

SEQ ID NO: 32970 - DNA, 446 bp, Glycine max
  unsure (1)..(446): unsure at all n locations
tattattgttaggtttcgtctataatgtctgtctattcaccctngnnggggatttctaatgaacatctaatgtaattaatttcatatctaattgattttgtttcttgtgttcaatgcttctttagtgcttaaattttgtatgctcttggtctgatcaaccatttgtgtgtgttcggcttccggcaagtgcaccggatcgcacaagtagtataaaatggtaagaaccgaatatcgaacactcggggaacttgtgttatttggtaagctatttcaacaaatangcgtctagtgtgtaaaagtaagtgtgaatatgaacaactgtataaactatctgtggaaaaagaaagataatcacgcgagagaaatgatgtgtaaaacaagtagagaacacgttggtctttctaataggtgcctcatgcttaaaagatattctctatctaacaatg

SEQ ID NO: 32971 - DNA, 333 bp, Glycine max
  unsure (1)..(333): unsure at all n locations
tgtaaaaggcatgaatattacgacatgnttgagagggttttattaaaatttaaatttggcttgcccatgaggaataccttgcacctangtagcatggaaaatacctttcaatggtatgtatatatgtgaatatatatggcataaaaatatgttgcaaagtgtgtgaatatatggcataaaaataccttgcanagtgtgaatgtatagcaaataatgcatttcaaaaatttgtatatgtggcgtccctaaattaatgactggtttaatagtaataatttaaataacacanacccatggnaantnntntttcttctttttcttttcatttcttct

SEQ ID NO: 32972 - DNA, 432 bp, Glycine max
  unsure (1)..(432): unsure at all n locations
ctttggagtagaaacatgggaccaactcattntattttagatagtcgtatctagtctagatctgagagaccatacaagtttcctagcggtttctaattatatgggccattaagtctatcatatactgacaatagccgagaagcccatgaatttcttcgggggcagagtaggtgtctaccattgccttggccttggctaacaatcggggaagttcttaactcccgttcaaggtaagagcaaaccgatccatccacatggttgcctcttggtgtaaagagtcgatcacccttcctctagcctctttttccgcgtatacttgggcatactcgtccgcgaccctatgctcgtgggccgtggctagacttaactcttcttggtacttggtgatgatagctagcatgttggtctacgtctcgcataaacgctgagaca

SEQ ID NO: 32973 - DNA, 440 bp, Glycine max
  unsure (1)..(440): unsure at all n locations
gaggaagaaacctgttagcttcctccatccattctcttactgggaaagggaatcagcatcgttgattatattgtgtgccacgagtttggcagtggaagaatccaaatttgagaggccatgattaacagtaactgaaggtggttgagaaagggagttggggttaaactgaaaagccaaaacagaaacagaatctggagaaggattcaactcacgagaattttcatctaaaaagttgtggttgctgttgttgctgctgttgctggtggtgggagtggtttcagcttggggactgataacaaggggatgttgattgngggaaagaggtatgttgccattgagagcgttgtttaatgatttctctgtaacttgcaagttgagtgaatcatataatggcatctgttcaacgttgtcttccatgaggatttgtgttatgaactttg

SEQ ID NO: 32974 - DNA, 297 bp, Glycine max
  unsure (1)..(297): unsure at all n locations
aaccgtgagagcaaaaaattgaggggggatgggtttgtaagaaaaaggagaaggggtaattttgtggcttcacaaatcacattatttgaaaaaagctagagtgagaatagcaactctcgattactttgctttccaaggcccanattgtgttgagataaacaaatttgccttgtgaattgaccgagccctcctctacctgcagttccaattccatggtcattgtaatagtatcctccattagatatttccaattccatgcttcatatcttcctttgaaatgtcctactcgatagtgca

SEQ ID NO: 32975 - DNA, 337 bp, Glycine max
cattaaaagataacatctatatgtctgttatatccataaacaaaaatattaattttggataaagaaaaaatacttagtaaattttacttgtcttaaaaaaatagcattatctaatttttatgttcacgtttcattatactttctttcttctctttattttatttcattttttacaagtaaatgtctattaaatagttaataaactttaaaatacttcaaaaatatatttgataaattagaataatcaagttataaatgagtaacaagctaaatttaaaactttttatttgtataacttcgtttatttaaattaattgaacttcaacataatatctta

SEQ ID NO: 32976 - DNA, 377 bp, Glycine max
  unsure (1)..(377): unsure at all n locations
caccttnccacgagngaatgtgcgcaaattgcaaggaaatttttcaattaggacgcaactgttacttttgagctatatgcagccaattattgacttcagaaaaatacaagatgacttggttcatcgtcaaggcaataaaatgaatgtttgttttacccgcaataaaggcaaataatattctcaattgaccactctcaatacatgtcacaggttataggattaagatggcttcagagaaatgacaacaaagacaatgtcaattggatgaacaatatattggataattacgaaccaatagttaagtaggaaaatgacaagaaatataaacctcttgattctaattaaattgtagcaatagcatctccagcagggacaat

SEQ ID NO: 32977 - DNA, 388 bp, Glycine max
tactcagctgttagtgtcttttctttctttttcttctggagttgtgcttattccctaaagccaaaacattgtcagagtcttttcttcatttttcttttagggttgagcttaagccacaaagcttaagccttggatgcccaatttcttcatttttcttttcttgagcttaagttatagatcttaagccttgtgagcacattttcttcatttttcttctaggattaagcttaagtcttgtcaaggtattttcttaatttttcttcttgggtcaagcttaagccttgtaagcctattttcttcactattcttcaaggagatagcttaggctatagagcttaagccttgtcaaaatcttttcttcattattgttctagggtcaagcttaaac

SEQ ID NO: 32978 - DNA, 353 bp, Glycine max
  unsure (1)..(353): unsure at all n locations
gacgccccggatccttaagtcacctgcngctgcagcttgagactaattgctttgtcttcctataagcagtagtcagtagtgcactctcacccatctccattacaagcctttcttcttcctgaacacacatggtcattaattcattgatagaccatttatctttatgtgtgttgtaggaaatcttaaatggcccatattcatgcggaagggtgttcaaaatgaaatgcactangaaggactcagacatatcaacctctagtttcttaagttgagctgaaatatctcgcattttcatgatgtactcacgcacacctttcacactggtgagccgaagagaagaaaacttcatgatc

SEQ ID NO: 32979 - DNA, 413 bp, Glycine max
cagggtccctataatcaacaatgacattggatgactcaccatggcaaccagttcaacaaagaccagagtgggccttcaaacaggctaatccaacaagggcctaacatattctagaggactactaagctggaggagaccttgactcagtttatgctggtaacaatgtcaaatcataaaagcaccgagtcagcactgaagaaccttgaggtccagatgggacaactggctaagcagatagctgataagtcatcctacaattttgtggcaaatatagaacaaaatcccaaggaggaatgcaaagctgtgatgacaaggagtaagaggtttgtggaagctgaggttgaagaaaatgtagtgcacaaggagaaagcaactgaaaagaaaggtactgaaattaagaaaaatgatgtgag

SEQ ID NO: 32980 - DNA, 356 bp, Glycine max
  unsure (1)..(356): unsure at all n locations
ctagtttaggagacgccctctctccctcgcgggagactctctctctctcctctctctcttctanttttcggttttaggtntagtctctcttctctttctcttttattntcggtntttttacaattccagttcagacttttagttntatcaataaaatttcattctctatttgattaatggaaggctaagtccgcagcgttgttttcccttgaggatcaagcacagttctctttgaggttctattattactgggtaaatttggttagttnttcctcttcactaattactttgaattggtgcttttaattcatgcatggctagtgctnggttaattgtctctgcgctttattacgtca

SEQ ID NO: 32981 - DNA, 361 bp, Glycine max
tcatcgtaacctgcgaactccactctccgctttccttctacctttctcttctttttcctttgtgttctctcaaccttcacttaaacgaataacctagaagacaagttaaaaaaaaaaaactaaaaccttcgatctttgttgttgttgttgttgtttttgaatttcgaccaccgcgtgcgccaccgtgcgcggcctgcgatgttgccggcgccaccgggagctacaacaacaaccgtcgtggtgagaatctcgcgctacagatcgcgcggcgagcattgataaagaagaaaaaaaccacgtgggtcccacaccgatggaagctcagaagaaaacccaaacccaaaccaaactcacccgaacc

SEQ ID NO: 32982 - DNA, 130 bp, Glycine max
tcctcaaaacttatgctggctctgaatgatttttatatgtatctccattacccccctgcgaaaggcctttggttatgaaacattatttgaaattagtatgacagagttagcataatgagggatgatcttc

SEQ ID NO: 32983 - DNA, 369 bp, Glycine max
  unsure (1)..(369): unsure at all n locations
catgcattatagtcctataaaaggantattttactgaatctttttcnnacaaaaaagaggcggttttttattcttttaaatcccacactcatcgattttagttctatagaatcaacataatttgatgttggtttcaataaaatatttttgtttgggttaaatggctccaaaatttaaaatcactattgtggttcccctaatctaaagtttttttttttatcaaaacctaaaccttaaattttaagggagataaatcacattataagaatccagattttttataagggtttacatatgggcattataccttagacaccagtgattgaataccaatatctttctatttaaatactgaaattaaaatttgat

SEQ ID NO: 32984 - DNA, 418 bp, Glycine max
  unsure (1)..(418): unsure at all n locations
atcttaagtcacctgaggcatgcaagctngaatgtatctttgctatcatttatttctctaatcatatcaaaactccgagacatctcctacaactaaactttaatgaacaatatgatcacaaaatgccacttcaaacacaacaacaataacataccttcttcattcaatgagtcacttcaaacacaacaatactagcataccttctttattcaacatgtcatatggatcatgaaaaaacaacaaattcatttaacaatcatgtcacactaaacattacagaacaacaaaagccaacctaaaatcctagaaagtaaacctaaaacccagtctgtgaatggactaaccaaatcatcagaaattactcgccaatctagggaatcaaaacatanaanattaatctaaattagtaggcaccatt

SEQ ID NO: 32985 - DNA, 436 bp, Glycine max
ccagctggcttagtgcgcgactttcaacaaaaaattttcttagttacccaagcttagcgaatcagcctcgcttatccacaggaatcccagcaagaggatgagtgtgcgtccttaaaagatgaacttgcttagcgcagtatgcgcgcttagcgagttctttcgaaaacacatatattcaatgaatactgatgaactcgcttagcccagcaaactcgcctaacgagttcatcacattttccagaaaaaatgcattttgttttcttgcactttttttagcctctaaaaggaaaatcaaacatgcaaaccaaccaaaatggcttctacagtacagacatatataaagttctaatcttttacttctttctaaaacattaaaaccttaagaatctaaagctaaatttaagggtttctaaccaaaggtttaatggaataaaag

SEQ ID NO: 32986 - DNA, 382 bp, Glycine max
  unsure (1)..(382): unsure at all n locations
atactacactcgaaggaggtggtccgctattgttgagactaaggtaaactgagtctgatccgcctatccctcctgttagactacactccacgcaatgggcttactgaagcttagcctaatttagcctaagcttgactcggcgatccctcgtgctagactacgcctagactatgcaacattattgttacggcacacttgacaccatcacttatctgacgcattcctcgtgtggtgctaagttccggtgctgctcctatcaagtattgacgaacagtatatgattcacgctagagcacctcgctggcacacgcatggtggcacacccaagctacaacatcancattggggatgcttgactcgaagctatcactaggagtgcggg

SEQ ID NO: 32987 - DNA, 366 bp, Glycine max
  unsure (1)..(366): unsure at all n locations
acagctttactngaaactaagaaatttaactatttcatgttctgatttatggccaccttgctctccccctctggcggcgagacaaagccaaagtgcgtcttgagacatcaaatcttacctgctctcatgatcattcaaacaaggaggacaatcatgcatacacacactaagctgggatgataacatcacatacgctaactataacataacgccagatgatttacagcaccatcctagatcacccaattaaaacatctaaattagaactcagcatactgctaagtgttttacgatcatagtcatcagacatcattatgtgagacaggtcgattgtctgagtcactgtcatctacaaggcctaaatct

SEQ ID NO: 32988 - DNA, 332 bp, Glycine max
  unsure (1)..(332): unsure at all n locations
agctngttnngaantccatttttagtattgaaggnacgagacagacaccatatcatacgtacacatacccacctacaagatcgatgtagctagggctataagtatatatagtgcactctaaatcactaataatagtgtntatatatatgtgtgtgtttcctacgtgtccatatgaatgagcctactggtatacgtggtccgttatgggtaactagctaggcataaatacatgactacatatattatattataagtaattaaatatatttataaataaacccaagaattatttagtgtttgatgcaagattctcttgactttttttaacattt

SEQ ID NO: 32989 - DNA, 442 bp, Glycine max
  unsure (1)..(442): unsure at all n locations
ctctgtctctgtgctagggtnncaaatttcctttcctgtatctcncncncncnatanangcccccacattatgtatcacaatcccaatctccattctcctttctctggctgtcgggaagagtaccttttcatgcctctcttctctttctttattattcatcctactcatcattttccttgcacaggtctatagagtggtccgaatgttctcgtccaaaggaggcgcggggcccgcctcngaggcgccgccccccatgccgatcatgcggacgcagactgcggggaacttgggagaatccgtgattgacagtgaggtggtgccttcctcttctgtcgagattgcgcccattcttcgtgtccttaccaagttgaaagactcatcccagggtggtatctctgatgttcattctctcttcacttcgacccaattggtgctatttta

SEQ ID NO: 32990 - DNA, 500 bp, Glycine max
  unsure (1)..(500): unsure at all n locations
aggactgctgctgcagtgctggacanacanaaanncaagcaaacnccancnctnnangctccaactgaccatcgnnttttctcttcgtctagcaacgngancgacgcacacgagcatcgncagaagacagagccacatctcctccgacaccacacgaagggacgaggggtctaaacctgcataaacaagagaatgcaatcacgaatcgcacactgagagaactaaacatggccagggaaactcatagataactcgagcatcgtgacaacaccgcgcctcgactacacagtgaagacacccaaaccacaagtgagaacacggaacacagcaagaggatctggtaatgccaacctcacgagcaaccacatgagcttggccgatacacacacaagagcaacctcctgagccagctcgacagacacaaagagaagtgaggacgaagatcaagaagagacgatggccagaccncatccagcccatgagaacacgaacatggcccg

SEQ ID NO: 32991 - DNA, 292 bp, Glycine max
  unsure (1)..(292): unsure at all n locations
agacatgtagggtggcaagtgagctgtacatgctgagaggtgaagcacattgtggcagtaagtggaggtgcatctgatggaagatggaaggtctttcatgaatacgtcagtcaggttctttatgaattgaccaattgccagagttcagntattggatactttatcggaattgttaatggcaatgggaacctgaagtggatttattcacacttcacagtggtggccaaagtgattcatgatcagagaggggttctcaataccaacttcaccctctatattctttaattacttg

SEQ ID NO: 32992 - DNA, 433 bp, Glycine max
  unsure (1)..(433): unsure at all n locations
cccaactgctattactaatataagatgtcctctatttaggaagagggcaagaatacagagggcaagaaagatcgtttttagagaagaaaaatgagtttggcggcgtctaagctcaaggactgcattttgtttttctcttcatcaaatcctttgattcccatagctatgagtaactaattccatgtctgttgggtttggtgtaattagactaccttcatctaattcctgctttttttattcaataaagcaattgttattgttcttcttttgtgcctattgcctttgattgatcacctaattacttgattcattgtgttcaattgtatttggaaaaatctatttgaactgtgaattgaagaagacaatgaataatttttatgcctagggatagtgtaacaaggattngtcattcgtaaaacccttatccttaatg

SEQ ID NO: 32993 - DNA, 127 bp, Glycine max
  unsure (1)..(127): unsure at all n locations
aactacacacaacccctataatagctaaactcaccccatgccaaaaatacaagaaaatacaaaaaagtccctactacaaacactacttanaatgccctgaaatacaaggctaanaccctatactact

SEQ ID NO: 32994 - DNA, 450 bp, Glycine max
  unsure (1)..(450): unsure at all n locations
tgtatggtagaaggtgtaggacacctctatgttggttagatcccagagaaaaaacctcatcttaggacctgaagtggtacagcaactgccgagaaggtgaagttgatccaagaaaggatgaggactgctcagagtagacagaanagttatcaggataaaaggaggaaagacttggaattcgaggttgatgatcatgtattcttgagagtcactccgtggactggggttggtcgagcattgaaatcccgaaaactcacacctcgttatatcggtcctttccaaattcttaaaagagtcggtcctgtggcataccaaattgcattacccccatcactttctaatcttcacaatgtctttcatgtgtctcaactccgtaagtatatccatgatccatctcatgntgatcaaatggatgacgtacaagtaaaagagaacttaacatatgaaaca

SEQ ID NO: 32995 - DNA, 163 bp, Glycine max
  unsure (1)..(163): unsure at all n locations
tataaggagaacgtaaacctagctgctattcatgggcagagactagaggatgagcatgcagaggtgtcgactctacanattgaaggggtagcaagagagaggctgatagaatcattgcacacagaagctatgaaatggatggataggttcgctctcactccga

SEQ ID NO: 32996 - DNA, 376 bp, Glycine max
  unsure (1)..(376): unsure at all n locations
gctcagaaggtcggtgggatagttgcatgttgttancttgtttgtgaaggatgtgataataatggttgaccacttaagattgtgggggagacatggatctttgtgtgatatattgatgaactcatgttgtttaatctactatcgtccgataccattgatgaagaagcccacacaaaccaaatgacaatctcgatgggggaaggtccttaaggagtcagtccttagagattggatatgggggatggataactaactcgttatctcttaggggtacggcgttgagtttgtggctgcatttccacagtgccgacttggaaccctaagaaattcgagacttaaccattggaccatcgtgagggtgtactcccaacagtca

SEQ ID NO: 32997 - DNA, 398 bp, Glycine max
  unsure (1)..(398): unsure at all n locations
ttcaaattgaaatatgtagntagtattattctgactgatattgcaggagctccgttttatcataagtgcagttccaatatttaactcgtctgcttcaattgcttctaacagaatgtaagttctcctaatgagtattgtgtaggtctgtcaaaactaattgggttccatttgtattttctgaaattattgcattgtgtaatcttatatactaaaatacaactgataatggatattatgggaaagcatgtagttgagattttgaaatacgaatgaatgtgcacatatccttccttgtttctatggcattagtatgcattctttctcatatgattttggattatgaaccacatttgtaacttatttaatgtatgtcaacctatgttgtggcttcaagaatg

SEQ ID NO: 32998 - DNA, 270 bp, Glycine max
  unsure (1)..(270): unsure at all n locations
aatagaagtagacattaaagtggntaactacaatctcgaactaaagatttattcatttggtaattatctaaacatggacaatactaaatttcctattcattttatctcatttcatttcatttcagcctcccttccaaacaaaggcaagtaaaaaagggggtttgacatcctaactggataatcgtaacgacaaacaccgcgagtatttacagcttgactggtgtacgtgcttgaaaagtgcacaacgtttatacaaaaaacaaataaaat

SEQ ID NO: 32999 - DNA, 343 bp, Glycine max
  unsure (1)..(343): unsure at all n locations
acagtggagctntgcaagggatgaactcnactaaatcaggnggnggctgcatccaagggcactaagccatgctnngngacgcacangnacaaggcaangnangaaaagcaaaggcataggcngnggaagaagncagnaccatcaacttgtatggaacaaaccttgaagacggaagagagcttgagttttattatcacacagatcaaaagttgtaagatgatgttccaatgagacaagggcgatgcataccaaaggttgcaagaaactctcgctggcaagtggacataacatgcttcatgataactacgcattgggaccctcccaaataatcaaccatcgaacg

SEQ ID NO: 33000 - DNA, 323 bp, Glycine max
  unsure (1)..(323): unsure at all n locations
cattcttcatctagctngaagacggcttctttattcagcaagttgctcaatggtctagcgattntgaagaagtccttgatgaacctccgatagaagcctgtgtgtccgaggaaactcctgatacccttagcatttactagtggtggtaacttctcaatgacgtctatttcggttttgtccacctcaatcccttggttgaaaccttatggcctaatattatcccttcctggaccatgaattgacacttcttccagttcaacaccaattttgctttaacacatcttcgcaacatgagctttagattggtcgagcatcagtcaaag

SEQ ID NO: 33001 - DNA, 454 bp, Glycine max
actaagctttacctgcttacaaaatcagagcctatcagtcttttaaacatggtaccagctggagagttaatcgaaaaattaatgatgcatctttgtttctgatcagtccatgcatcggacataatagtacaaccatacttgacccattgctccctatggcctttcatcaaattttcagtatattcaacttccttcttcaagagtggaactctgatgtcatgatagctaggaatgggcaaatgtggcccatattgaccaatggctgcaaccatgttctcaaagcttttcaatttaatgaggttgaatgaaaaacctgcttggtaccaaaagcgagcaatatgtagatgcaccttcaatacttcattcttatccattgactctcttatgttcatttgcctcagcatctccatttttctccgattgattgcattatctggattcttacaaaatttgt

SEQ ID NO: 33002 - DNA, 336 bp, Glycine max
  unsure (1)..(336): unsure at all n locations
tctcaaactggagtntatgtattcaaataaacaaatgagcttgatcgagcatttaaagagttgagctcgagtagttcacgaataactcggatcatttacaccccaagttgagccaatggcatttgactgatgggaaaaaagataagatgtttcctagctaatataagaaaatagtagtagaaaatctaggaaacaagttcatcatttcatcacaagcgaacaactcaatagttcaattgattnntttgaaaagaataaagcctatcagatatcatacctttaattcattgggtgtcatatntaatatttgtgaaggctccaactctccactcaata

SEQ ID NO: 33003 - DNA, 447 bp, Glycine max
  unsure (1)..(447): unsure at all n locations
tatatatactctngagctttngaactttgtttcgttagcttggcgcanaaagntaaaaaattcaggagatcctttattctggaatttggacatgacacatggagcgtagttaatactgtttttagtaagctaaataaattatatgataaaatgtgattttcctctcttgaaatattttggaatgttactgtaaatttttttttggaatgttgattttaatccctttaaaaaattaatacatttttaattacctataaacatgtatttcactatccgtgacgaagaactaaaatctattacttttgataaatgcaaagactaaaaatatgttaaatttttataaaaactaaatctaatatcacaaaacaatttgagaggcaatacttatttaattttatcctanaatatattatgaatagttgactaactttactactctactcttta

SEQ ID NO: 33004 - DNA, 256 bp, Glycine max
acaattgaattggatatgtattatgtcatcgataggcatggagatgttggggtaaaagaaccaccttcttccattgctttctttatactttctagctctttctcttctcttttttctttctcttcaccatcacccatcaccttctctatagcctccttaacattttccctattcacttgaacacattcacccatctcagctacttgcacagtaaacttctcattgtataacggatcagcaaacataagaaatggtt

SEQ ID NO: 33005 - DNA, 420 bp, Glycine max
  unsure (1)..(420): unsure at all n locations
tatgtatatttcaataagataaaaaattcaaatttactatgtataaanaaagnacnggcnaacggtaatatttctttatctttttatcttttaaccaattttctctctctttcttcatctttatctctgatcaaacataatgtgaagtttagataaatgcatcgttgtacggactaaatttcacaaaatattacagttcgattttgtgttataaaaattgtgataagtttatctaggcaacacttccaacagaagagagtctcgtcttgcccagattgcaaggcataaagcatagaatattctccctcatatgccaataacctgtttgatgatcttgtggctaagctaagaaaggaatttgatgcaatcttactttgtgatgaaatcttctgctttagtctcctttgtatgaataatttc

SEQ ID NO: 33006 - DNA, 304 bp, Glycine max
  unsure (1)..(304): unsure at all n locations
tcgccaactgtcgcaacctacccttcggcgggagggcgacgcgagactcgcgggatgcgtgttccacgaaaggaatacgcgcggagtcgccaccaacgtttatttgaggaaaacgtcgganaaacaggaaaagacgcgatctacgaactnttaagtgaaaggttcgggagttgtatctacgcacggtgaaggtattagcaccccacacgcccgtcccaagggacggcagcctntaattgaatgtgcaaacatgactntgatnntttgtcccttttatgtcttatatnncttatacncttttata

SEQ ID NO: 33007 - DNA, 447 bp, Glycine max
  unsure (1)..(447): unsure at all n locations
tataagaacaaaattgccttaatcatttccattattttgtgaattaggacgcatcaacaagaatcaagccaaggctattgtgcaagcaatcaatggggcaaaacacaccaaatgattataatgatggatggctcaaattctcacaaaggtaaaatcatcactttcaaattgagctttcaaaactatcatgacatgtagagaagaatcaaggatttcaagtcacaaaatgtcaagaacttntattttcaaaacaattacccatttcttgaacatatcctataattcaaagaaaaacatgcaaagtcgtacgtgcacacaaaattgacccaaaatattaaactgaaaatccgacgatactaacaacattaacaaattaacacaactaacaaatttacaaaaccaacataactagtcaaaccaaagaacacttcgcccccccncatactt

SEQ ID NO: 33008 - DNA, 334 bp, Glycine max
  unsure (1)..(334): unsure at all n locations
gctttctagcttttcattggtgtatttttatctccttttggtactctaaaatgtgggaatgtgctcaaatatgtggggcaattttggtttgttttcttgcttgattgggttggattgggggtttgtatgggatggccctangcctataatgcattttgaaacaatgggacatgccacattgtccccgttctcttgctattgatacctaaacgcgcgcccaccacgtgttcggtgaaatgcctcaatggcattagcgcgtgacttttgtaaggaaacaacccatggngcattttggtttgcacatattttctattttttgggacatgcattcatt

SEQ ID NO: 33009 - DNA, 415 bp, Glycine max
  unsure (1)..(415): unsure at all n locations
gaggattgatggngacccggtgttgagagaaactatgatttgttctacgtgggagtacgtgagctcagttggaggtgggcaacaggggatggtgggtttatgcgcgcattgtggatgtggaaagcttgttgtgcaccatcgcccgaccgccacctagtaccacatgtgatgggtaccccataattctacaagcttgagatgaggaagtgttgaagggtgaaacttcctgcttttattgttgaccacagagtggtacctggagatatgtcgcgggggtcaggagaccttggggacgtcaggtggggtgctattgcccaaaaccaagcttgaccaatcccgacccaacccgggcatagtcggtcagtgagaacctgtgatgtacctaaacaggcgagctcctggcagtcaacagata

SEQ ID NO: 33010 - DNA, 340 bp, Glycine max
  unsure (1)..(340): unsure at all n locations
agtaccgataatgggcctaccatcacgattatcgtctccctttccattattgggggtaccacctgggccgccagatccctccatcttttgggcgtgttctttgaaagatccatccccctttttgcacatgttctgtagttgcatcctatccagaaccatatcaaaattgtactgatactgcctaacaaaggcaaccattatgtccttccaaaaatggactcgggaaggttccaagttagtgtaccangtaacagctaccccagtaaaactttcttggaaggaatgtatcagcaattcctcatcttgtgcgtattcccccatcttctgacaatacatcttt

SEQ ID NO: 33011 - DNA, 458 bp, Glycine max
  unsure (1)..(458): unsure at all n locations
gggactcaaggaganacatagaatggctctagagttttgtatattttaaaactataaaaaaaagactcaacaaacctctagcnttggcccttgtttttcacactaattttcaattgaaatttaggaactaagattggtataaaataggcaccaattatagaataaattntgagccaaaacaacaagcatacttccctttcacttttttttcctggatactgatttttctgccaaattgtgtgatgtttagtattttttccttttatccaaatcacttggttctttttttataaatnttttctagatgtgtagcaaattcagtaaaaatttcagctcaaaattcgaagtaaccaattctcagtaatttttacaactttgtatgtccaagctgccaacaccagcgaattttttaagcatggtatattgattgcattgggcttactttcaaccttcctatg

SEQ ID NO: 33012 - DNA, 491 bp, Glycine max
  unsure (1)..(491): unsure at all n locations
aaagtacgattctttgcactgcngnnacactatannaaannccagctcaaagggaacagcaaacacacaaccagaagagcggtctcgncttatgggaccgagnggggcagagcccagaggcaacaagacacgcaacgccacaaagaggagaaggggacaaggaacgagcggcacacgagacggaaggaaaagaaacaatcagagaaagaagcncagacccgcagacaaaaaaaggagaaacatgccaagaggggggaagcatgcatagagaagacttgatgaaggagcaccaacgaagaacagagagcgagaggtaaacggccaccgctgcacacaatccatgcagcggacccgacccaggggagaaaagccaagcatgacgctggaaaaccgacacgggatgaacataacccctggggaaggcacaatggtaaccgaaacacggacagaacatgaattggaaaagctaagctcacatcaagaaatgcgcg

SEQ ID NO: 33013 - DNA, 371 bp, Glycine max
  unsure (1)..(371): unsure at all n locations
agctngataatngagttctttattttttcacttgagagatgcagaggttagattcaagaaatgcacaaattatttaactctgcaaattaaatgtcctagattctggagttagcaaagctaaatctagcaactctcaagtattgattcaattttgcaggggatccaaacttaatcttggagggagaagaactccacgatcctgctttcatggatggngaagaagaatgtgggcgtggttcttgatgacaggctggcttcgtcggatttaatgggcaatttttatttgtttcatgaaagtggctaattaagtgtcacatgttggtcaattnttacaaaatgttaaccaagaatagaatcacattcttgtattt

SEQ ID NO: 33014 - DNA, 402 bp, Glycine max
tctgcttgaagacttttgtcaccatgtctggtctctcatcagatcgtaaatacaagatcttgacatttctttcaatttcaggccaatttggattacatgtaaatgtcaagaacaaatcaggaaatccaagctgtccacaaatagtcattacatcaaagtagagctgctccatatatctacgtgatccaacaaaagattatggcaatataataatctttcctctctgattgccttgagtttgagcatgatctatagattgactcaaattcatatgtttgtcaacccttaaatcttgttgatgatctctcacaatagttagtctttgggattcaatcatggtgtagccatctactacaaattggtggagcaatctccctgatcttagaataggttgagcctcat

SEQ ID NO: 33015 - DNA, 421 bp, Glycine max
  unsure (1)..(421): unsure at all n locations
ntcataaaacgtcgatgccaaggggatantgttttctcccttgtntcagnnatacgtagctggtctcttcttcacagataaggcatgcacgatggcccttaacattgtatccactcaaattcccatatgctagaaagtcattaatggtaaaaaaatagcaatgcacacaacttgaatgtctcattttgatacccatcaaacatagcaaccccctcaccccacaactttgttaagtcttcaatcaagggactcagataagcatcaatgtcatttcttggttgtcttgggcctaataccatcacaaacaacatcatgtattttcacttcatgcacaaccaaggaggcaagttgttaattactagtaatataggccacatactgtgctgagtgcttaaactgccatagggattcattccataag

SEQ ID NO: 33016 - DNA, 301 bp, Glycine max
  unsure (1)..(301): unsure at all n locations
accacagagnnggacctggagatatgtcgcacgggncaagagaccttggggacgtcaggtggtgtgctattgcccaaaaccaagcttgaccaatcccgacccaacccgggcatagtcggtcagtgagaacctgngatgtacctaagcatgcgagctcctggcagtcaacagataaaaggaaaacaaaaccacaaagcaaggaggcttgtggtggctggccagctgagaatattgtgtaatatgtggattggggcctctggtaatcaattactaagggtgggtaatcgattacaaggcttaa

SEQ ID NO: 33017 - DNA, 194 bp, Glycine max
  unsure (1)..(194): unsure at all n locations
actaagctgcatttggatcgcgaagcccactccatatnatgcctgtcccgcatctcaacaaacaatcaacgtacaagacagctataggagctgttgaatacctacccactcggtgttcacacatttggcttccttatgaaacactcgtggctttaccactctaagtccgtgagttcttggaataaagagattat

SEQ ID NO: 33018 - DNA, 342 bp, Glycine max
  unsure (1)..(342): unsure at all n locations
cattaggattagtacctgacatctcanacaaacaaatcaaacgtaacaagacaattatagttgctgtttgaatacctcacccactcaagtgtatcacacaattatggcttttctctaatgaaacactcttgccttntaccactctaattccccttgagttcttaggcaattcaagagattatggccacaacaaagaacaattcaccaatatgtgtaagggaaggctagacaaggaanaggttaaccaagaaaaaggctaacaatggttttatgcacaaatgaagganataaaattcagaatttatgaattcaagtaacaatccttcatgcaaccaatatatt

SEQ ID NO: 33019 - DNA, 424 bp, Glycine max
  unsure (1)..(424): unsure at all n locations
ntacagcagaatttagtaatgacccactatttagttcttaaataacttaatgccattaacctagggaattaaaacaaacttaatggctgagtgtaactgaaattgtggcaaccaaaagtcacccccaacagccaacaagtcagccaccatttggtctcccaaaaggctgatgcctaggttgccaattgggcccttattacaacttgaactaaagcccttttagttgattaacccaaaacatatttttggccagccaactttacaaggattgggccattatttagacaaactaaacactctaaaattgaaataaagtggtgtcatttagtcctcctccatttgggccatgatacaactcacaaccttggacttttctccttgaaacttgggcttgtattcaaatagtatggacaacacttgttga

SEQ ID NO: 33020 - DNA, 499 bp, Glycine max
  unsure (1)..(499): unsure at all n locations
acgaatgaccgatagcattgatngaccgncacantanagacaacacaagcccaagaacagagatagaactccacgagaacctttnctctaatggaagccaccgggagaggagagccaaaggccaacgaaaaccccccactccaaccccatacagacaaggtgagaacaaagagccacaccaagcaacaggagccaaacatcaaaccgtgcaccgagatcgcggcatccacacaagccaggggagcacgaaatacaaaacacagcaacgcggaagacaccaaccgtcaatacgagcagaaacgcagccgaaaagcacgagaccgaacgaacagagcgttgggagaaccaccacacacaagcaagccaccggagacgggagcacaaagccacacagaacacacataaaaaaccccggagacgaaagagggacgcaagacccaaacccggaaccagacccaaacgaaagcaaggggaggggggagcaacaaagaacagaacn

SEQ ID NO: 33021 - DNA, 418 bp, Glycine max
  unsure (1)..(418): unsure at all n locations
tgcagctgattgccaatgtgcttttcatttgttccagcgccccagtattggctcgcagatacaaataagtcgccttaaagtacaattgaatttgattgtgaattcaatgtattcatttgaaattcacttagttttaccgacttctttaagcatctctactggatgatatttcattgttgcattcatataaatcaaatttatcattnttctgaatgttggtttttgaaatatttacagttgaaaatcctatntaccttagccatctgtcatgttttcttattgcagagacacttgttcattctacactggaaccctgtgatgatgcggatttcacttttactgtctttttcaatttgaaagagtacacagtatatgtaaaacagaggccttatctccacgcattcttggagagagtatc

SEQ ID NO: 33022 - DNA, 421 bp, Glycine max
  unsure (1)..(421): unsure at all n locations
ngatcaaaacaattatctaatcattccatctactctaatcatacaattgctcattcaaatcattctcaaacactcatttcattattaaattcaatggaaatattctagagacaactctaaccataaaacaagatttatttacacaatcactacaaaatgaccataaattgggggaactatacaagttttggaaaatgttttctatacaaaagttagtcgtgtaagatgactaacagtgggattatccatgtttccttcacatagtcaacaaacattggccaaagtgaacaaaccctttcaaacttcttcaggcactcatcaaactgctgctccgaaggacaatcaaccagagttccctaggcatccatgacatactcccaagcatttctttgaccaataatgattacatttggccttgaca

SEQ ID NO: 33023 - DNA, 374 bp, Glycine max
  unsure (1)..(374): unsure at all n locations
agcttccatcatanaggtgtctatttttttattattttcagagngccactcacccaagttactgagattacttcatcttgaaggaaccaactcgctngggcaagtatcacttgcctgggcgagttggtttgacacctcttggaccatttcatttaaaagccatgcataatcacaaaccaggaggtgtggagtggagaaaccagagaagaatagcacaaacaagtagtagagagaagacaaaaaagtggagctggagctacaaagatgtgagcatggattgtatccttcattggttcttttggtgatcttgtgatctacacaatgatcgactagtttctctgaaggagtggatgtaatcctcatatccctatgta

SEQ ID NO: 33024 - DNA, 447 bp, Glycine max
  unsure (1)..(447): unsure at all n locations
tctctaatgagtttgaagacaacataattgttaagtatctggtgtgaaacttgntagatcaaggccagtgtctaacgctgatgaaagacaaattggcactactagaaagaatggttttaacatcactatgtaaacatcggttttatcaaaaattgatgttaacaaaaaccgatgttaatgtaatcatcttaacattcaaggcaagaaaaaggatggtttgaatactcatcaagatctaactgagatgggtatatgtgaacagttacatccaatgtttgatggtaacaaaatatacttgcctccagcttgtcatactttgtcaagaaaggagaagacaagtttttgtcagtgtatgctttgtgtcaaagtgtcacagggatactcttaaaatattaagaaccatgtgcaactgaaagatctgaaatagttggctaaagtctcatgatg

SEQ ID NO: 33025 - DNA, 646 bp, Glycine max
  unsure (1)..(646): unsure at all n locations
attgtagctagtaccgngatctctgagtcgcctgcnncccaagctggtagcctccgtcccataaacatgcaagaaaagtggttaagntattgaaaccatgtgttgatcggacannnacattatcgcattncanaaatgtanaaacaacctgattcatnagacataatgtgtgactngggctaatttaaatcacatttgagtcagcaaattttgtttgctttgatatgattntngaaccanagntaccatgagtcanaaatcacttttttatctaatttttcaanttgaacccaattggggatatatttgagttagtaacaatggaactactactaatantgtcattganggagttcttcaaaaccctataataggaataatctcacaattctctattgtatatattatcaggctaatactcaattgggcctcangtttattaaagtggtcaatgggctcatgttcaaaaaactccaactagctctcaattttaaatgataatgttcctttcggaatagatacatataaacatatatgtctattcactctttcttctgatacatcccactacctgccacaccagccctatgagcagacgagactcttgcgcctctctctgtgatacaatcgtagaagggtccttaan

SEQ ID NO: 33026 - DNA, 356 bp, Glycine max
tttattgattattaaaaatataatttaaaagaattgaaacaacaatcaacaatactcacttcttataactttttaccaacatccttgagtgatctctctaggtgaattatttggtctcgaagttcttcattttttgtcgtagcctacacaaataaaaaaaaatagaaaattatgtatgatattcaatccattaaaaaatgtaatgcaaatgagacataaatatatccgaaggtgaaggtgtttgtataagagataaaatctttgatatttgactaagtctaagtttgcaatcattagtgttccaaatcatataggatagttttaaggtcattttactagtttagtgtgtagttagc

SEQ ID NO: 33027 - DNA, 510 bp, Glycine max
  unsure (1)..(510): unsure at all n locations
tangcatacgatcttaatnactnnnccagctgtcaagcttatgaagacctccaaatcagaggtaaccgngatcttatcaagacatctagangacacgatgtatctactatctataacgtacagctagtcacctctctaagatattgatgtaattggatgaatgagcaaattatcacatgtcatataaccaatggatctaaccttgnggtctagtacccacacaaatcataaatgtatccacttcctcngatcttaaggtgcactcctaagctctgttgttatctacttttgccactagcccaagaaaactataactcttttataccgcataaacttgcaaggctgacattantgtccgtgatctaacactctatgctctcagacgttctagctggacctacttttctcatatgcttactggtacagatgtaactttactatgactctcaatacttgcttactccactatgcttcagactctcaagcttttaggctaagcactttactaag

SEQ ID NO: 33028 - DNA, 357 bp, Glycine max
ttgtgggaaaccaatggttagaaggcaaggttggatggtgaagttgatgtgtgggagtcataatcatgaattggcgaagtcattagttggacatccatacgttaggcgattgactaagaatgaaaagacaattatatctgatatgacaaagtcaatggtcaaaccaagaaacattatgctaacgttgaaggagcacaatggcaataattgtacaacaatcaaacaaatatacaatgcaagaagtgcatatcgttcttccattagaggaagtgataccgaaatgcaacatctaatgaagcttcttgaacgggatcaatatattcattggcatagattaaaggatgaagatgtggtacg

SEQ ID NO: 33029 - DNA, 540 bp, Glycine max
  unsure (1)..(540): unsure at all n locations
ataaagagccgtctcggatctnannannnanntgnnnaacaagctttnantngaantacaaccgttcagaaactgctgtaatcgatacctatatgtgaatcgatacacnggcannnattgaatcanatntaatagctgctgaaatcagtttgcaatggaatcgatacatctctgtaatcatacagaagaaattctgaaagactttaataatttcttgccaaccttngtacttanatgaattccttctattaatataccttctagacttataactgtctgatcatcatctgaatatcttaattgtttgcttaataaacttgaactatgtgacttggcatatcaaacatcactgatctttgctcagtntngagagaactggtgttggctttctcttgtatggggcggatacgcagcagatgacttatgcatcaaagagacacaaatggttcttgcgcacatactgcaaatattgctgaattctgttttttatgacgatatcgttctcgatcttatctcgactacgatctttcttttattttg

SEQ ID NO: 33030 - DNA, 311 bp, Glycine max
cttctggattttgttaagctactattatgggtggttgctgtatttataaatctatattgctgggcattgactccgtctttggggtggaggtcgccaagtgaactacaatacttggaaggacactgtataaaggtctgaagatgaatgcttcctaagcttctttgacatctaactcttacggtctgagattgtagacttgagttcaactgaggtattgttaaataaatgctgtgaagttgagtacaagattccaatgaatttgtaggtaggacctgaccatgtgcctgaagacttgaggactgcccaggtgg

SEQ ID NO: 33031 - DNA, 351 bp, Glycine max
ttatttggtcatcattcacatcaaccaaaatactagttgtgttcatgaagggtcttcccaaaataagtggcacttcagagtactcttccatgtccatcactacaaagtcgacaggaaaaatgaatttatccaccttgacaagtacatcttcaagaacaccatatggatacttaatggaacagtccactaattagagggttatctgtataggcttaagttcaagatcaccaatttttgctgataaagagataggcataagattgaggctagctccaaggtcaagtaaagctctccccaccttgagttttccaataattattggaatagtgaagctactagtatcttggagtt

SEQ ID NO: 33032 - DNA, 575 bp, Glycine max
  unsure (1)..(575): unsure at all n locations
aagctaggagcccaccactctctggatgaatgcccagtcatatattacaangtcgatcaatatacatcttncttggaggttngaanggcagacacaggtgatgttngatgctgtagctagtggaggaataattacacataagacactctaagaggcagcatagttgattgataacataacaaatgtataattgaccaacctcatcaataccatgattggngcaattcatcaagagtatcttgtacctctcaagcttcacacacatggtcattnttctgacaaaagctcatatatatttgtcntagcttgacttcttgntgcctttggaagaaatagtctataactcgcttgcatgtactccaatggaagactagatcacttgtatgaccacttanggatctctatgaagagaccaaaccctctataagatctctctcatctggcacctatgacacatatataaagcgccggtgtgatggctcatactactacaagcagtgccagagatatagctgcgagctctgtgcgtgtgtctgtcacatgtagaactctacaaaatgccgtcgaatcttcag

SEQ ID NO: 33033 - DNA, 351 bp, Glycine max
ttaaacttgcctcttagtaatgccttagtcatcatatcagcatcattatcattagtatgaatttcggctgactctaacagcttagcatccaaagcatctcgtatccaatgatacctcacatcaatatgcttagaccttgaatgaaaggttgagttcttaccaagatgaataacactccgactatccacaaatagtagatatttatcctaaacaaaaccaagctcctggaagaatttcttcacccatagcaactccttgcatgcttcagtaatggcaatgaattctgcctctgtagtagacaaagctacacacttctacagcttggactgccaagtcacaactccccctgca

SEQ ID NO: 33034 - DNA, 325 bp, Glycine max
tttatccgtggcgttctatggtggtgagctttttcttgactcatcttctccttaaaggggcaaatccaatcatcggacttccttttccattgcgctggcattgatcttcaagaaccaaaggactccattgatgaagaagatccagggcctacaaactccacatggagttacatcaatgtctataggggagatgacatcacaagggtacaaatatgttgcttcacagtggggacgcaaagtgtataaatggaaacacttggtgttgcatggacagataaataaaggctaccttagctattcggatggtcaagtttcgaagaggaac

SEQ ID NO: 33035 - DNA, 243 bp, Glycine max
atcttttatctaggaaggatctctaatcttgaggatcaaacacctgctgttcaaagacttacaacttggtgtgcctcctgaagaggatcttcttctatattcacctgtcttcaacacattcaaaatcaccttgccaatattggactactccataacctcataggatctgactaatgattcaaacagacttactcgttgaaccctattgacctgacttcgttgcatttattttgcacccactac

SEQ ID NO: 33036 - DNA, 339 bp, Glycine max
tctagatgagttatgtctgcgaatcggacattctgtgaaaagttatgaccatttgaatttctcgagtgcttccgttgtttaatttcaagcgtctcgatattttatgtcctcaaatcagacatcggagcgaaatgttatgaccattcgaatttgtcgagagcttccgtttttcaatttcgagcgtctagatgagttatgtcaccgaatcacacatctgagtgaaatgttatgaccattcgaatgtgtcgagagcttccgatgttcaatttcaagcgtctatgatgagttatgtcaccgaatcggacatccgtgtgaaaagttatgacgattcggctttgt

SEQ ID NO: 33037 - DNA, 680 bp, Glycine max
  unsure (1)..(680): unsure at all n locations
ataancccctttgngggaccnnnnnatcacctgcangtgcaagcttcaagaaantgatggcctcagcatatttctttatttctggaagcatatctcatagaaaacctagagatagatgggctgaagaggatagannacgagtacaatacaacttataagacanatacataataacatctgccctaagaatggatgaatatttcacggttcatattgtaagagtgctaagganatgtcggacactcttcgattaacacatgaangaactacagatgttaaagatctatgataaatgcactaactcatgagtatgaattacttataatgaatgcagatgatcatattcagagtattgcaaagagacttacacatatagtatatcatctagcagccttacgcaaagaatntcagaatgaggatcttatanacactgtgtatagaatgttaagtagagaatggcacccacagtacggctatttctgaatcaagagaattgtctaacatgtctcttcgcacntctatttgtatgtngtacgacacgagattgactatctagattgaccataatgagacnatgacagaaaagaaagactgctctctacatcatctcattcagaagaaggatcggatatgatcccatatgatatgactatgctctcgtaaagattaccagttctaac

SEQ ID NO: 33038 - DNA, 327 bp, Glycine max
  unsure (1)..(327): unsure at all n locations
tgagatgaggaagtgttgaagggtgaaacttcctgcttttattgttgaccacagagtggtacctggagatatgtcgcgggggtcaggagaccttggggacgtcaggtggggtgctattgcccaaaaccaagcttgaccaatcccgacccaacccgggcatagtcggtcagtgagaacctgtgatgtacctaagcaggcgagctcctggcagtcaacagataaaaggaacaaagaccacaaagcaaggaggcttgtggtggctggccagctgtgaaacttgattgatatgtgagatatggtntntggtaatncattaccaaggtgggt

SEQ ID NO: 33039 - DNA, 62 bp, Glycine max
  unsure (1)..(62): unsure at all n locations
catagtcagtcagtgagaacctgtgatgtacctaagcangcgagcctcctgcagtcaacaga

SEQ ID NO: 33040 - DNA, 337 bp, Glycine max
tgtagagttatgtctcgtatcgatttatttacaaaagttgtcatttacacaattgtttttagacaatgattggtttattcaggagtctctactttaatcgattaccatgtgatataatcgattacttctctttctataagtgtttcaaaagtaaacaataaaactttaatcgattactttgagtatctaatgaattaccttgttcttgaattgtttccaggttttgggaagaacactttaatcaattaaaaagataatctaatcaattacttcattgaattaattgattaccttgtagatttaatcaatcacaggtggttataactgttttctctat

SEQ ID NO: 33041 - DNA, 478 bp, Glycine max
  unsure (1)..(478): unsure at all n locations
ctcccccccaactcccnctctctttaacttgactccttcctctnacccacccnncatcaaacacaaannnagtttgaaccttgganacttgagaccttgagacctccagcactagagacccataagaaacccgagctntgacgttaatcccgacacctttagaaccttgacccaggtgaaaatgtctaaccttgcccaccaaagatagcactacaagaaagataaattcctctatcgaagaggtgcagacaagcgcacaaaaggacgaacatttccgatctacgatcgaaagaaaacaaaataaatatgccaaaaggtgtttggggcagacaatatctgaacaaaccataattggtccccgatagaaccgagaaaagggaaccaccgacctaaaggcgaccctccctataaatgctgtgccaacctaaccccttggcggagggccaccccgggaccacccgaaaacctggtacccacc

SEQ ID NO: 33042 - DNA, 192 bp, Glycine max
tgtggggcttaaatgcaaatgtgccttttattcctatccaaagcttcgctatacaaaagttaaaggctcctaatatccttaagcattcaatgtcctatttctaagttctaaaaaatattttttgccactctttgccaatttcttcaattgcctccaattccaatggagttcgatccttaaaaatctacaact

SEQ ID NO: 33043 - DNA, 195 bp, Glycine max
aactctcttaatacatagaagtgtttcatcatttgctctaggcaaagacactatgcaatatcaaagatctttaatcagaaaagcttggagcatctcttgagaacctacacagctgctgatttaagtgctatgactttgtctaaaccatacacatgcttgccatagacttcaggtcactcgttttgtgatattatc

SEQ ID NO: 33044 - DNA, 354 bp, Glycine max
tgtaaaagcccaattgaaccttccttcttctggtatttttgtcactttaggttatgcagttcggatttaattatctcactctcaaataagatatcttactcctgtatgatatgttctctctctctctctctctcacacacacacacacacacacatatatatatacatataatcttttccgatttggttttattaaattatgtttaaagcaataaattcaattagtatctttacaattcgttgattgatttggtttttaaaatgatgttttgaaagcccatatatatatatatatatatatatatatatatatatatataatagcctcgtctttaaaatagaaaaattaagact

SEQ ID NO: 33045 - DNA, 313 bp, Glycine max
  unsure (1)..(313): unsure at all n locations
gactgtacatgtgatatcacttgataccatgttcgaaatccatgaattaaacatcaagaanatatatactaatagatatgaatatccataataattgacctcacttcatatgttgatgtacagattgaacatactacactatattcatatatacaaaccctacacatggctggaaattgatccatatatccatattgtattgaagttatggtgtgtcgcatattgtatatccacatgtcgtgtgtgccacatgcatacaatatgctgatagataatatgtgatgataatactcgaatattatgtggtattata

SEQ ID NO: 33046 - DNA, 356 bp, Glycine max
tgaggtaccattgttgaatgttgaaactcctttactaggtggcacatggataccaatcttctattcgatcccacagaggttaatggttctgtttctcgaagcccattggatctccttgttgtcctttttgggccatctgtggtatggcccgttttgttgctaaacttaatcaagaagaataaaaaataataaaagaattattttattccttaataactttttggagaaaaaaaaaagcacagttaaaatttttatatatgtaaacctttcattcgatcttacattttttgttttaaaatgagtccatgatattaatttttttttcatttgttttcagtaaatgccacttatatata

SEQ ID NO: 33047 - DNA, 479 bp, Glycine max
  unsure (1)..(479): unsure at all n locations
cttaacccgtgtggacanctgatcactgnnaacagctcaaagtctgatggctcgaacaagcccgatgagtggtcattatgttatgagttatgancactcaggatcanagatgtacatgaccatgctgcttgtaaaaaatactatagtatgtatccttgtggatgtgatacatgtgatgcngactatatggaagatacaggtgagcacagtggagaaactttaatgatgacttggcactaacaatcttgatgaatctaaacaatacaagaattaactgctagaaattatcacatgtgcagttacttgaatctaacagaacccttggactattgagttaaaacatttgcgcaataaaaaagtctgtaatccttgctccgtggattgagtcttgggacaactctaccatctggatgtgagtctatatccagactggaggaaggttcatttagctcaatttgctaaagatattcggattatat

SEQ ID NO: 33048 - DNA, 437 bp, Glycine max
  unsure (1)..(437): unsure at all n locations
tcgcttctcctanccccactgggctgcctactctaatttaatgtgatctagtctactactgtgacttttagtgagtttactatcctgttactaagacaaacgtcaataaactcctttttgggatgtgatctgagaatgccttatcaatgtattataatacgggcccggaacttctcttctaatcacgtttgagcgaagtgccacggtgtttaaaagataactaccttcgtgttgtaagaagggatagacaaaccggctatgctttcacagccacacagatgtcttatacatcttcaattagcaatgtcatgcctatctggagggaaatgtttgacgagcacagttatgtatccacggctattctttgcttaagtatcctgagacatgccgtgctctcacttgttaaaaaattatagtatgacacatcgacttgtcaa

SEQ ID NO: 33049 - DNA, 348 bp, Glycine max
tttaggatgtgctcgtttgtataaacaacatctatatattggtagtagttcatgctcatataaccacaagctgcaataatgtgtgaacatggatagtgaagcgcagaataccttccgcattgacaatgacaaccattcaagtttactgcccacttttgtccgccacgttgcgttatagggttgaagctctcctctacttcaaaccttgtggagtggatatcatacacgcgaacgatgtgcgtacaagcttgttcttgatttttccccagttctttaacaagctttgaacaatatacttggccttcatttaactgtctttgggcttggaggccacgctcaacaaagtac

SEQ ID NO: 33050 - DNA, 635 bp, Glycine max
  unsure (1)..(635): unsure at all n locations
aagcttggaaatctancgataataactntaactcggatgtctgatcgtagcctgtatatataagatgctcgannattgaaacggaagctctaagaaaagtcatacgacaataactntngacttggatgtccgattgtgtcccgtaggatatcgagatgctcgtaattgataacgaaagctcggagaanaatcaacgacaataactgtggactcggatgtcagattgagccctgtaatatatcgagacgctcgatattgaataccgaagctctatgaaaagttanacgacactatcttttgactcggatgtctgatatagtctcngtatatatcnagactgctcgaattgagaacagaagctctgagacaaatcacactgaccatgactnttgacttgggatgtcagattgagtccngtatgacatctatactcttgtaagtgagaacggaagctctataagaatcaacgaccatagtttaactcgatgtcgntgagcgcgtaatatcgaacgctcaatggaaacgaactctagcaattcacaacatattctactcgatgtcgatgagtccgngatttagatctccattgaaacgagcttataaatcaacacataggttactcgtgtcatgatctg

SEQ ID NO: 33051 - DNA, 350 bp, Glycine max
tcaagaattatggcctcatcaaactacttgtttcccgagggaaattttataaatagacctcccatctttaatggagtgggttaccactactgaaaaacccgcatgcaaatctttatagaggcaatagatttaaatatttgggaagccatagaacaaggaccttatgttccctctataatagtcggaagtgaaacaatagaaaaacctagagcagattggactgaggaagaaagaagattactacaatataatttaaaggccaaaaatattattacatctgccttaggaatagatgaatactttagggtttcaaattgtaaaagtgctaaggatatgtgggatacactaca

SEQ ID NO: 33052 - DNA, 614 bp, Glycine max
  unsure (1)..(614): unsure at all n locations
gccattacaggacatcatagcgnnnnnnnncgagcgangcacctgctctaccgaggacagccatcgaagcatatctaactcatgtcatgcatatttcgttcanggatngaataganaacctcgtaggcgacatctgacgtgaagttcgaccgatatctttcagccgacattgcacaattctttntacaanagctcgctcgtcgataatgtgcttattacggcagagtaagatntactggtttcggtgtngcataataaagttacaatgtacttcggctaggttattcgtgcgagttcaaccgacatcttgttntncgcaggataacattagcccacctcctgcaaaaatatatatggctaaccgtcctcatgcatcattcattcaacgatggaatagaanactcatatccgacactgtcggataagtctactgtattntcactcgcttgccatttcttataaacctcctgcgagatgttcttaccacagaagttctgatgtatgataaaatacatgacgcgctagttttgtcactcacactatgttcgcaactgctgtattgctgaacaagcactcgcaaattatgcgatgatcaaaaacgcactcgagataat

SEQ ID NO: 33053 - DNA, 334 bp, Glycine max
ttgatgcaacatttttagaggttaatgaaatttcgagatgatgcgctccatgagaggttggatcaaatggagaatagagatcataatgaagaagaaaggaggagaagagagaatgatggtgttcctagacaaaaccgaattgatggtattaaactcaacattcctccatttaaaggaaagaatgatccggaggcctacttggagtgggagatgaaaatagagcatgttttctcatgcaacaactatgaggaggaccaaaaggtgaagcttgccgccacggagttttccgactatgctcttgtgtggtggaacaagctactaaaggagagagcaa

SEQ ID NO: 33054 - DNA, 626 bp, Glycine max
  unsure (1)..(626): unsure at all n locations
gttttncccatatnnccattgannggctcnnnacacctgaggccaagcttatctgtgtagatatctagaagatccttattaccttgtatcaacttacagtgatctttggggtaanggctaaacactcacatctaaatgaatgaaagcagaaatattacgtcttcttcctctccatagntcataaggaatctntcttatcaatggtcttatgaatattctctnttaaacatagcaagttgtggttagtaattcttctcacaagagtgtacgaagtgagtgtctgctaacatggncctagtcatctaatgcataantctggttctccttcaactatccctcttttaaggggtnctcggngaagagacgtngtgnaacatacaactnctctcacanaatgagtaaactcaacattctcatactcaatacatgatactgttgaagaagaaaacaaaacatttctaattgacttgctcaaatattcaagacttgaagctatgttatggcaggaagaatcatgatatctgatatatcactatacaagctattctactcatactcaattgatgtcaatgatattcatagtgatgacatatagacacactaattaagaagttgattgtctgtcn

SEQ ID NO: 33055 - DNA, 339 bp, Glycine max
atgatgatatggtcttcaccgacgaaaggatcttagtggttctaaaaagaggcaaatctgatcatcatgctttgataaatgcttaaaaaaaactagggcaaatgaagagggtgagaatgagggataaacccatgttgggactgccattcctatacagacaagtttcccaccaacccaacaatgtcattactcatccaataacaaaccttgttcttgcccaccgaccaattatccataaaggcaatccctgaatcaaccacaaagtctgtctattgcacttccaataacgaacaccacctttttcacaaaccaaaaacaccagccagaaagtgaattttg

SEQ ID NO: 33056 - DNA, 217 bp, Glycine max
tcaagcttgaggaggtgctcatatgattaatcaatatttgattactggtaatttttcttgcttaaacgaccacaaggtgcaattatgggtggacatggatagtgaaccgcataataccttcccctttggcaatgaccaccataaaggtttactgcccatttttgtccgccacgtggagttgcatggtagaaacacacctcaacttgaaactgtgtgg

SEQ ID NO: 33057 - DNA, 338 bp, Glycine max
tgtaggattatggggtacccatcacatgtggtactaggtggcggtcgggcgatggtgcacaacaagctttccacatccacaatgcgcgcataaacccaccatcccctgttgcccacctccaactgagctcacgtactcccacgtagcccatatcctcgtttctctcaacaccgggtccccatcaatcctctcaagcttccacaacatccaagcaaaacaacattcaaacagcgcaagctatcacagccaagcaaaacagagcaaaggcagaaaactctgctcaacacatcaaccaaaatcacagtttttcccactcaaagaccccggtaacaattcct

SEQ ID NO: 33058 - DNA, 167 bp, Glycine max
  unsure (1)..(167): unsure at all n locations
gtcatctaagtattagtacataaatagataaagtannaatatgttagataatcattacagtttacaaacaattagaatataaatatatntataanagaaattaagtgtntcttaaaccaaaaaaattattctacatattanacatacacatanacatagtggtcata

SEQ ID NO: 33059 - DNA, 339 bp, Glycine max
tgacaaaaaaaattttaattaaacaaattattcagtagtcaaatcctactaaagtaaaaaaaaaaaaagcaagtacaaattgggtaatagtaggttacccgatcaaaatcgggattttttatccaaagaggaatctcgggaaacattcgttgcagagtctcttgctcttgctccgccaatggcttgatttcaggatcctgtccaagccacagttattaaattcaaacacaaagacaacaatgcttaaagaatcatatgcagcagcatatagctgctacacacaaacatacgtacctcaacattggtgggttggaagtagatgaagagaaagtagccagc

SEQ ID NO: 33060 - DNA, 215 bp, Glycine max
  unsure (1)..(215): unsure at all n locations
tcttagactgcgctcactgtacaaaaaaggctagctgtactcgttaggggaaacatgnaggtcataacctgttatgtttacatgtgatggctgtgagaatgtgaccttcaattttcgttgatataccaactacaatagtaattaacttgtatgataaggagatacgtctgaaatggactataataatctgtaaaaaatcatcatgaatatagtga

SEQ ID NO: 33061 - DNA, 324 bp, Glycine max
tatggatcaacttgatccgaaaagtgtgtatacaaagctttcggatcaagttgatccgtaagccttttcgaatcatgttgattcgaaagaagcttatggatcaacttgatccgtaacttccaatgctgcaaacgacgtcggcgaactcagcgtaacgatgcttacctcgacaatgccgatgcgcggaggcggcaacaccaccgtcaacttggctgggatggtcaacacccatggtagcgcggtcacacaacgaaacgccgacaaagaagacggagatgcagaacaaatgggctgcgcctgatgacgatcatgggtcaagctttt

SEQ ID NO: 33062 - DNA, 450 bp, Glycine max
  unsure (1)..(450): unsure at all n locations
aatgnncccattacgnatcctgtagagcatctgangnacagcttgtgctatatacgaagcaccatataatatgtgatgctactattgaatatagcattgccatcatgatctagctgagagatagaactatgatatagtcactcatagtagaaacacaaaacttagggctgctacttagtaattacgtttatgtatcatttattagactgatttctgactcaaagatcttgagctatgttgtatttactaacatgatttgctgagtgtcaagtgattttatactaatgtgactctatgactgaatgaactcctattatataaaattgctaccttgttagctttctgagtctaatcatttggacaaattttaacttgactatatcaccctctgcaaacttattatagaagtatggggatgcctctagcgcctctatgatgtggtctacgcat

SEQ ID NO: 33063 - DNA, 356 bp, Glycine max
tggagaggatgcttcaatggaggaaaagaatgtagggagagaaagagagaggggggagcacgaaattgaaggaagaaaaagggagagaagttgaactttgagttgtgtctcacaagactctcattcatcaaagttacaacaagtgttacacatgcttctatttatagactaggtagcttccttgagaagctttcttgagaaaacttccttgagaaacttctttgagcaaaacttccttgagaagctagagcttagctacacacacccctctaataactaagctcacctccttgagaagcttccttgagaagattcctaaagaagctagagcttagctacacacaccccctataata

SEQ ID NO: 33064 - DNA, 486 bp, Glycine max
  unsure (1)..(486): unsure at all n locations
gcccttgatcaccatgtcagngaccccnnnccacgcttgaggcgacagatcctctcgatcttcaatggcancacaatgtgatctaactttgatattcaatgtctgagcacccttttcaatcactaattggttcttactctggtctcacatcactcatctggtgtgagtggagatcttggaaactcactctgatcattctcatgagagcttccgctctcatgctgagttacctttatttctgcctctgatcttcaaatgcttcttctcagtgggattgcattttaagtgctataccctgggattagaacgttgatccttttaacttgagaacacggttagacctgcctggtctgtccgtctacattattcattgaacctaacttattactgctcacaatttcccgacgggtgtatcactctgtgctatagttcttgtatctttcaacgatcccaaccttgtgtatcatcactcagtgtacaacaccc

SEQ ID NO: 33065 - DNA, 352 bp, Glycine max
tagatatacttttttatataaataatacatatattcactaatataattaatatttttttcctaaaagaatatttgttattactactttgggtgatatatactttaggtgatatactttggatgagtatcataatttgtatttctttccaatcattttttattaataatttctttctcattgctcctctaacattttcaccatctttggaattaatgttttttagaattacaaaattataacttagagaacttttattgagataagggcgtagttaatatattaatttaaacttttataatgacaaatgaaaacaatttgctaaccaaaaccatagatacaagaaaaggatag

SEQ ID NO: 33066 - DNA, 609 bp, Glycine max
  unsure (1)..(609): unsure at all n locations
acagcctgtactatcatacatgacgcttattgcacaatcaagttctttctagcaactngaaatntaatagaaacactaggatagtngcccaaataagttgtctattgctcaaccttcgtactcttctgtntngcagggtacagggtgtaccatctgtggcgaggctcatcaaacangccaatgtattccactgaagaaacactncaganattcttatatgggaaataatagagacannggatactcaaggaggatntcatgcttcagcatggtccctatataacaatgacagggatgacacaccttgcatctagtcaacatataccagagtgggccttcaaacaggcccaatccaccaggacctaacatattccatagactactantgctgaggaccttgctatgttatcangtacaatgtaaacataaagcctatgtcacactgaaacttgtgtcaagtggacactgcctacagatactgcagtcatcacagttnttgcaatacagacatatccnatgtgaatgcagctggatacatcagtaaatgttgttaggtatgatatgatatgtgtcataaacaatggagagtggactactgcactcgatccg

SEQ ID NO: 33067 - DNA, 348 bp, Glycine max
tggttttgggcaatagcaccccacctgacgttcccaaggtctcctgacccccgcgacatatctccaggtaccactctgtggtcaacaataaaagtaggaagtttcacccttcaacacttcctcatctcaagcttgtaggattatggggtacccatcacatgtggtactaggtggcggtcgggcgatggtgcacaacaagttttccacatccacaatgcgcgcataaacccaccatcccctgttgcccacctccatctgagctcacgtattcccacgtagcccatatcctcgtttctctcaacaccgggtccccatcaatcctcccaagcttccacaacatccaatcaa

SEQ ID NO: 33068 - DNA, 161 bp, Glycine max
  unsure (1)..(161): unsure at all n locations
tcttttcaataccaatagcttactcactagcctttcactttaattntctttngaccttattacaacagcacacattntctttgattgctctntnttntcaacatacaacttatntattgtgtgtgctgatgctctacattntactntacatcctaatcaac

SEQ ID NO: 33069 - DNA, 349 bp, Glycine max
tgaccaatcccgacccaacccgggcatagtcggtcagtgagaacctgtgatgtacctaaacaggcgagctcctggcagtcaacagataaaaggaacaaagaccacaaagcaaggaggcttgtgtggtggctggccaactgtgaatcttgtgtgatataagggttatggcctttggtaatcgattaccaagggtgggtaatcgattacaaggcttaaaaatgaagataggaggctaaaatggtctctggtaatcgattaccaaggggtgtaatcgattaccaggcttgaaaacgaggtcaggaagctaggggagcttctggtaatcgattaccaggggatgtaatcgatt

SEQ ID NO: 33070 - DNA, 217 bp, Glycine max
  unsure (1)..(217): unsure at all n locations
tcaaatcataatattcagaatcactagcaacagaatactcaatatgcacaatatgatcatgatgcacactatgcctaactaatctatgagagggtctatctatttcangaataaatgggtgtaaatcacctcggattgcccctagtcatgcactatatgcagcaaataatgtgtgtctcaacangcacctaacaacgggggtaaactacaactatac

SEQ ID NO: 33071 - DNA, 356 bp, Glycine max
acttgcttgtggagcttctatggaggctggatctttgagcttcaatggggtcctttaatggtgattttccaccatggagatgcagcggaagacaaaggaaaataggtgagaggaggcgccatccattaaggaataagccatggaagaaggagcttcaccaccaagatgagccttggataagaagcttggagaggatgcttcaatggaggaaaagaaagagggagagaaagagagaggggggagcacgaaattgaaggaataaaagaggtatagaagtggaactttgaagtatgtctcacaagactctcattcatcaaagttacaacaagtgttacatatgcttctatttatagact

SEQ ID NO: 33072 - DNA, 601 bp, Glycine max
  unsure (1)..(601): unsure at all n locations
taagcctttgtnactctatangnatntnnnacgacctgcggcgcagcatctgccaatggactaccntgaataattctttgtagccctttgagccttgtntcctntccttgtgtngaagctcactacaagccttaagtgaaacaccatgatatcaccatatccttaaggaagtttggagccttggaatcgtattgggaattagtgtggtgagtatttgttcagtggactatatgtattgttggctatgcttcatgatgtatttggagcatacttgatgacatngtatattggtaaatgttgacatgctgacgtaatagtgtctctcactgctcttatgtaataagaatattgatataagatcattttgtggaccgaatatacctcatttgacatgatgataactccgttcacttcatgtttaagctatnttcttctttatcgtgattgtcttaaagactatctccttggctattctcgtgttagcctaattctattttcttcttgcctgtccatcaactttagaccttgattaagtgttgctatggttgtttcatgtacttcactatgttgcgacttagtgtagtgtgatctcatatatacg

SEQ ID NO: 33073 - DNA, 342 bp, Glycine max
ttatgcattcagttttgccaacacgattggcgaggacaagatcttcctcactgttgcatattattctccaaagttggttgaggacccttgaaaaatatatatgaattttgctgttggtctacaaaaaaaaataaaaatggggacacatatatagatgaaatgttgtgggggaatagaaataaagaccagaagttttcagtttacttgagttagctagtgaacgatatatgaagaagaaggtgtgaaggacgagaattcagatgacattggtcactacaaaaagctatagtagaagaaaggggcctatccgattctgctactgtctgttagagctactactaa

SEQ ID NO: 33074 - DNA, 230 bp, Glycine max
  unsure (1)..(230): unsure at all n locations
ctctacgcttaagcatgcatggcacataccntccatgtgttgctatnntgatgttagctacaagttgtagatgtatagcaccagtccaatgtaanagtatggtgtggtaatatcttctntgtagaggatcatntatngacttaatataaatttaaaatagttnntttagtgagctacttaattatactactgtgcatttgcgatatttcaacaatatagaaatgcatcta

SEQ ID NO: 33075 - DNA, 341 bp, Glycine max
tgcttctacaaggacaatagcatcatttcttgcactgaattgttgggagttggaagccatcttctcaatcaaattcctagcctcagcaggagtcatatcaccaagggctccaccactggtagcatcaatcatactcctctccatgttgctaagtccctcatagaaatattgaagaaggagttgctcagaaatctagtggtgagggcagcttgcacacaatttcttgaatctttcccaatactcatacaagttctctccactaagttgcctgatgcctgaaatgtcttttttgatggcagtggtcctagatgcagggaataatttgtccaagaacaccctct

SEQ ID NO: 33076 - DNA, 327 bp, Glycine max
tactgggggccattcctgcgaaggcaaacatacggagagtgagttttaccagtgggacgttactctgaaagcaaaaagggcatataacctactcccataaatacaaacatcaatgaaaaatcagaacaagcttatgcgcatatatccataaaaacgttctcttgcacaggacatgatattaaccgaaaaaaagagagcacccatatacaataaaggcaggatcgtaacctagattatttacacgaacttccaagggggatctgacacttacatcacacacatatccttggatagatccacatgcacgcatactcaaagcattgtggg

SEQ ID NO: 33077 - DNA, 290 bp, Glycine max
  unsure (1)..(290): unsure at all n locations
tacggctctcttcacttacttaanaataattcgctccgtcctgcactcatatcagatactgttgtatatcatgatcactctcgccgatctggatgtcatacatatcgtatgatgtactgtatctgcgctgtctctacacgctgctgtctaggtttatatntcgccatgttgacacgcgtgctagataatctctaatagtatctactatgtataatgtgtaaatactcatgtgtgcgtgtangttaaactaatctatctacnctcaggacgcaggatgagttatgcgtccg

SEQ ID NO: 33078 - DNA, 258 bp, Glycine max
  unsure (1)..(258): unsure at all n locations
ctccactggcccttcttccttccaactgagttactattgtacccatagactccgcganattattccgccatactcttcttgcgagcnctcttggctcttgtcaagactctgcggaattgattctctccgaacccgcacactccttcaatgtggtgcggcacttgaactttcttgcaattcgcttctaactgtttgaagctgacttttctctcttcgtgcttaaacttcttgtgacacttacttgggagcaactaactc

SEQ ID NO: 33079 - DNA, 340 bp, Glycine max
tgaagctttagtcgttcagaataatccaaaaatgtcaaagaattgagtgttgaaaaagcataacaagactttctgtgattggtttaaagatacaatctttgcatatgagaatgcttcagaaacattaagatagctagcagatgggcctaaaagaaatgttataacctggcaaggatacgacataaacaagtattcattttacacaaaagcacaagataacaaaagtacaatgcagaacagcggggtcaccctaagggctgaatctcaacacttcgcaagtgtcaatgacgccaatccctgtgtagcttccatcccttactttgggttcattgatgaaatt

SEQ ID NO: 33080 - DNA, 545 bp, Glycine max
  unsure (1)..(545): unsure at all n locations
atgnccctccggacttannnnnntnnnnaccttgagcctgccgctgcagctttaacttatcaagatgaacttgtaccactgtaacagtggctcnatatctaagaagggggggtgaagtaagatattccacactacttncnncaattaaaaattatttcactttcttttcaagctatagattcccttaacaatgaacttcttnatatattaattanatannaacaattgaatatgaatgtaagcataataacaacgagataacggagagaaaggcaactcaattatactggtcgcacaccttgtgcacgtcagtcccagcaaccgcttggagttcactatttgaatctttacaagttaacccaggacatcctcttgtgttaaatcttacacagaaccacagctctatcctaagatgatgagagagaagattttaaagaaggatttaatgacctaatatcctatagtgatgatgccngacttaagaaacattgtttaaatacctgtgttcaaattgaatctgtagaactattcttatcatataccan

SEQ ID NO: 33081 - DNA, 334 bp, Glycine max
tccttttagtgcgtcacgtttaaaaccgagctcgatggtggtacgagcctttgatggaactcggcgggaagtgatgggggaaatcgacatccccattcagataggcccccacacttgcaatgtggtgtttcaagtgatggacataaatcccgcctatagctgtctcttggggagaccatggattcatgcgctgggagtggtcccttcaatgctccaccagaaattgaagttcgcagtgggtggacttttggtgatagtatcgggtgaagaggatatgttggtgagctgcccctcctccgcaccatacgtagaagcggcggaagaatcattggaa

SEQ ID NO: 33082 - DNA, 550 bp, Glycine max
  unsure (1)..(550): unsure at all n locations
accttaagtacctccgctgcagctgtcgctatatgctgcgttactctnagtaccagaagaatgtcaanntgtgggagtgctngaatgaagagcgtggtgttgtgtttcatcatgacttagctgggcccccatttgtggatacatagcatgttgtggtagtagtaaaaggtactcttgtttacgtgttgaaggtggaatcatacgtgactctctcttctacgttgtaatagataggtgcgtcgagtattctacgnttctttccattattatctatctgtcggttgtgtgattgtatgaatgatttgattgtgatattgaatggcacgcaccgtggattctgtcgatgactcgtggcatcatactttttgcttcatgntgacatttgataataatgcattacataacctgatccccttctctgtgctgatcttgcagaaatgcaaacactgctaaactataaattctgtagtattttctcttaaccgagatgaattcctctagaaactctttctaactattactacaaataatagatgtacgctgccgacct

SEQ ID NO: 33083 - DNA, 330 bp, Glycine max
tatgcagatgtaattttgacaatggaaggaataaaaattgtatattgtatacaaaataaataaataaacaaaataatgcatatgaattatgaaagaccatgggcaaagagcattttatatgcaccttgatgccaagtggattagcaactcctctcaagaattcaacatgagcaccatcaagttggcgggtacgttccccaacccatagcatgtgagctgagcaatcataatgaagcccagtagtagaatcctccctagtaagtgcttgctcataagggagaagcaaacactcatgggaggtccaaaagtctgttgtactcatgatgggat

SEQ ID NO: 33084 - DNA, 355 bp, Glycine max
ttgatgatatggtcttcaccgacgaaaggatcgatgtgggtctaaaaagaggcaaatttagtcatcctgcttggacgaatgagaaaactggggcaaatgaagagggtgaggatgaaggagaagcccgtgctgtgactgccattccaatacagccaagtttcccaccaacacaacaatgtcattactcaggcaataacaaaccttctccttacccaccgcccagttatccacaaaggccatccctaaaatcaaccacaaagcctacctaccgcacttccaatgacaaacaccacctttagcgtaaaccaaaacaccaaccaagaaatgaattttgcagcgagaaagcctgagaatt

SEQ ID NO: 33085 - DNA, 695 bp, Glycine max
  unsure (1)..(695): unsure at all n locations
ataaagcattanggtccttaagtnantgannccacgcttatactagttacctggtgcctgaatgtctttctgtggtagtggcctagatgttggaagaattctncagaacaccctcttaanggtcatccagatggtaatggacctgngagcaaggtagtacaaccaatctttcgccacttccttcagagaatgtggaaaaagctttagaaagatatgatncttctggacatcangnnggttcatggtggaacagacaatatggaactccttaagatgcttatgaggatcttcacctgcaagaccatganactngtgcagcanatgtattagtcaatcttgagacatatggaacattctcatcangatattgaatgcacaagctntcatangtgaaatcaggtgcaaccatctccctaagagtcctctcatganggtgangggtgagccatgtctcagctatgaaaataatangttgaatgcttannatcacgatggtcacgntcactagccacagaatactcagaaatgctcaaatggctcaaatgcacannatgatcaggatgcacactatgcctaagtaatctatgaagggtctatctatttaggatcanagggtnganatcacctgatttccttantcatgcctatatgcacanatatgntgtctcaacaacatcaggganggtanactcacn

SEQ ID NO: 33086 - DNA, 349 bp, Glycine max
tgaaggtgtgtagtccaccatcttttcatagttgaatactggtaatgagtctactatcattatcattttttctccgtcattgaggtgccacttgagctgccaggtctctccacctttgggcgtattctttgaaagattcgtgcccacttttttgcacatattttgtagttgcatcctatccgaagccattataccgacactgcctaacgaaggcaaccattaggtcctcccaggaatggactcaggaaggttccaagttagtgtaccaggtagcaactaccccagcaagactttcttggaaggaatgtatcaaaaattcctcatcttttgcgtatgcccccatcttccg

SEQ ID NO: 33087 - DNA, 214 bp, Glycine max
  unsure (1)..(214): unsure at all n locations
ctcacttgtgtcttccccacccaccacannnacagttatctccttngtcctctnnntctcactttcaccanactcaattcaatcacaatcattgattcataagtcattgcccctacataaccttccanaacctgacacatgtattncattatcacctaccncaccacacttcagcctgaaacccgataaccaaccaacatatccttgctttcat

SEQ ID NO: 33088 - DNA, 351 bp, Glycine max
tgctaagcgagatttacatattataaatacgttcttcagcgtgaaaaacacgattttccccctctcctcctctcccaacacccacccaaaccctaacaccttcttctccaccacctacgaccaccagtggccaccacaagccgccattgcttgccgccgaacctccacaccaagaagaatgttgtaatcggagcagaatcctcagaatccttctcaaggattcggtggagaaaactcccccaatccttcatttcatagcttctctgtggtaatcttgacttctaagtctttctcctagttagtttgagtttctcatagtatctctcgtgttgggtactgtaatagggtgtt

SEQ ID NO: 33089 - DNA, 109 bp, Glycine max
  unsure (1)..(109): unsure at all n locations
gcattaaccaagcanaactgcccatcatatctcccaaagccccatacncacganaatcaagtgagaaagaagtctaaccaaacctganatttcgaagtcccacacgtag

SEQ ID NO: 33090 - DNA, 350 bp, Glycine max
ttgatgtgaaggaccttaatttccctgattttgtatccaatcaaggtgaggaaacaagggaaaaaagtgattccacaatgcaaatgctggtcatgctcacttctcttagcacatcaacaaccaacactagcttttgttcattaatcattggagggtgcatggtggttgtttaactcttcatacccttctttaaccacttcaatgtttctttctctagtttcttcctatagcaattgtaggctgtgaatttttcctcaattcctggaacaccaatgcttgctttacacaaagtaaattgaagttcttggaggtgttcttttactagcaagagaacatctgatggaagcttg

SEQ ID NO: 33091 - DNA, 601 bp, Glycine max
  unsure (1)..(601): unsure at all n locations
aacagctcaggactgtaattgagtaatcaatcaagagtantataggaatgttntgantanggtacatgcaagtangngtatatttccgtctatcaatatccgatttggcgaaatttgacagatcannatntataanatacatccgatgtantnnganggtgaattggggtgtccagtcaattcaatgtattatatctntanagagaatatatnagtttnttgaataattatgtatagcanacanagggtactgtagtatttcacataacataatactatatntataantcatttatttattttaaatatatattaaacctangntaagntntatatataattttnnttatggggatgattaactntacactatgataaccaagtgacagacacaggtattaatgtgtannataaaatanatattatattcaattaatcttgcaganaattactatcttcttagtgatntgaatagtagaaattttctttataatanagatgaattanaaacttccatgtgaatgttctaaatcatatngatgtatnggaaggatngctnatcttatctatgttccacatgtatataagtatactattggtt

SEQ ID NO: 33092 - DNA, 353 bp, Glycine max
tgagaagttgttgtgcttgaaatagttgggatgaagatctctagcaaattctgggggcctcctcacaacaaatgtagtttcatcatcaccccaagacacaatgtggtcagtgcgagggtcatcaacaagttggtatgtctttgtcagaaagggagcaggcactgacttgtgagattccatagtgaacaccatgctatcttcacacctgtctagtgtgaaagccatcactgaattaccaaatagtgctagctgcttccaatattattctttgatggtactctccttttcattcactttttgcacaccaccaagttttaaagaacctctctcactctctatcatattataatttg

SEQ ID NO: 33093 - DNA, 127 bp, Glycine max
ttctatctattcttctgtataacatacatcacacggccattaataatatgtgctgtgtctttctatctttttgaaattacacctttgatgtattttctttttattcaaactttatcaccaacatcct

SEQ ID NO: 33094 - DNA, 338 bp, Glycine max
tcgtaaatgcggctattatgttgacacctgtagcaatgaaatcaggcttcaatacctctggtgttattgggtttgggccccgagagctaaatgctgcaacaactggcgacggctcaattccaacctttgttccctcaaacataagcctagatgttggttttcgagcatcttgtaagtacaacttgatgagtttcccagccttgaaacccactgcagttgttggtaaaagatgggcatctgccaccaattcctctccgtcggattccgaatttgctaacaccatgcccacaccgccggcagatttcaccacaagtcctttctctaccctagaactattt

SEQ ID NO: 33095 - DNA, 609 bp, Glycine max
  unsure (1)..(609): unsure at all n locations
atgaagcctttacngngatccccnnccgacctgaggctcaagctgtgagcacactcanacgacantaactgtaactctggtgtccgattgtgtcncgttntatatcgagacgctcganactgaagacagaagcacatagcatattcatacgacactactctttactcggatgtccgatcgagtccctgaatatatcgagacgctcgtattgtaaaacagaagctctcagcatattcagacgacaataactttttactcggatgtcaatcgagtcccgtatatatcgagacgctcgcaattgataacagaagctctgagcacattcatacgacaactactttttactccgatgtccgagtgagttccgtatatatcgagagctcgtagtgataactgatctctgagacaatcaacgacataactnttactcggtgtcgatgtgtccgagatatcagacgctcgattgaacagacctctgataatcaacacataacttactcgtgccatgagccgaatatcgacccgatgaacgacttacaattcatgcatatttctcgttgcgatggcttttttcgcctcgatgaacgacctaccattacacaactctcc

SEQ ID NO: 33096 - DNA, 350 bp, Glycine max
cctatgaatactcagcttcactcgaccctttcgggtgctggatctacttcatatggatttgatggggcctatgcaggttgaaagtcttggaggaaagaggtatgcctatgttgttgtggatgatttctccagatttacctgggtaaattttatcagagagaaatcagaaacatttgaagtattcaaagagttgagtctaagacttcaaagagagaaagactgtgtcatcaagagaatcacgagtgaccatggcagataatttgaaaacagcaggctcactgaattctgcacatctgaaggcatcactcatgagttctctgcagccattacaccacaacacaatgggatag

SEQ ID NO: 33097 - DNA, 122 bp, Glycine max
  unsure (1)..(122): unsure at all n locations
tctatgcagntaacatgatccttanggatgcagatgcatgcaacctttgtcgtgaaacattggtaatgcggacttcatatgatacaatgcaatgtaatggaaagntgtacaatgttcatgac

SEQ ID NO: 33098 - DNA, 335 bp, Glycine max
tcgcacttgataatggagacacatgaacagtgctaggcaacgacattcatggcgctccgaacaaaggtggagtatggaggattgccttgagggtccgcacttaggcaatcatgaaactaagctccaaactcgaaagtggaggacacatgaacaaccctaagcaataatattcatgtggctccgaaaaaggatgagaatggaggattgccttgagggtcctctcttaggcaatcatggaacacagctccaaactcgaaaacggaggacacatgaatgaaaccgcaattcattcacgtggctccggaacaggatgagaatggaggattgccttgagg

SEQ ID NO: 33099 - DNA, 108 bp, Glycine max
  unsure (1)..(108): unsure at all n locations
catcttcttgtactttctctttctcatgcatatattctntcttcgtggtgaaagcctactcgtgcttcttctccttttgcatgaaggaatataaagattaatatggat

SEQ ID NO: 33100 - DNA, 334 bp, Glycine max
tctagcgtacccgctattggtgctcagaaattcccaaatacagatccctcttattactagctattttgaattctttaattcctgaatgtacaactctcaaattgttgctcgtccccctctttgttttatgcaataaatgaaatcaatatcaaacaaaacatgcatacaattgtcatcgatattgctacttgaaccataaggaataccatctaaagaagtacttcaaaacgttaatttattttttttggcattatctgaattacaatctgacttcaatatctaattttttaatgtacttaggtggaggatgttgacgaagagaacgagaaggaat

SEQ ID NO: 33101 - DNA, 73 bp, Glycine max
  unsure (1)..(73): unsure at all n locations
caccactctaacattctgattaactccttctgcangtggagctgatattgaggaggaggaactatacagattg

SEQ ID NO: 33102 - DNA, 338 bp, Glycine max
tccattgttcaatttcgagtgtctcgatatattatgcgcctgaatcggacctccgaatgaaaagttatgaccatttgaatttctcgagagctacctttgttcaatttcgtgcgtctcgatatattatgcgcctgaatcggacctccgagtgaaaagatatgaccattggaatttctcgagagcttccgttgttcaattttgagagtctcgatatattatgcgcatgaatctgacctccgagttaaaagttatgaccatttgaatttcttgagagcttccgttgttcaattttgagcgtctcgatatattatgcgcctgaatcggacctccgagtgaaa

SEQ ID NO: 33103 - DNA, 301 bp, Glycine max
ttatcacttttcattcttgagctgattgactatcttgccgtgtttgagatgcttggatgattttcatgacggccttcactctttaactctttacgtgttggatgttacccattcttttcattccttgagattcattgagaaatatgtaattgttgttgtgtttgtttgtttctctttaatgtctctggatttgtcccttgctttgttttttattttgcccaggagtgcaaaagcctaagtgtgaggggatttgatgtgtcatcattttctcctaattcttaaccctttttgtcaccatttt

SEQ ID NO: 33104 - DNA, 174 bp, Glycine max
  unsure (1)..(174): unsure at all n locations
tggtgctatttgcaccccatttactaagacacccctgcctttttgggatttttttcgtaagtatggaactacaattcgtacgaactgtttctntcatatgtacggaacttgggatacataatcatcctcttgactacggatgtacaaactcctaatgccaacatgcttcatgtg

SEQ ID NO: 33105 - DNA, 323 bp, Glycine max
tttcataaggcacattggccattggtaatttattaatcttctggtaatcgattaccagagagaaatctttaaaataaaaagttttgaaagaaaatcctcttggtctaacctttgtgctttcaaatctaacttgtagatgtaacttgtatttcttggattgcttgaagatcacttgaattatccatgaagaacacttgattgttggcatcatcaaaatctcttgtagacttgcttctacattgtcctcccttttaaaacacagtctccaacataccctcattttgagaaattacactctcatcacttgagtaattaatatgcaa

SEQ ID NO: 33106 - DNA, 484 bp, Glycine max
  unsure (1)..(484): unsure at all n locations
tgncccttcggactgtannnnnnnnnccagctgtgtccttgagcaaagcttactagaaaacacagcttggagaaggtatagctataagacaaatgacgcttgtgaggtgattattgcgaaggatacaccatggtagccatgggcatggtaaaaacactggaatggaatggctggtacccacctcacaaggtgtccatgagctaccttgttacatgacgactagtgagggctgtggtcagggctagttctaatgctactagcttaatcaatagatgtttaccaccaaaaaacacattgcatgataggctattttctataggaatgactttgagcatctctataaggctgcacaacctgacagagctcaagatgacaagtgtgaaatctaggttatatctagaattgacttggcagtggcctatttgctaaatagtttatttgctgatagtctagagagacctaagagattactgttagccacagt

SEQ ID NO: 33107 - DNA, 335 bp, Glycine max
ttgatgatatggtcttcaccgacgaaaggatcgatgtgggtctaaaaagaggcaaatttagtcatcctgcttggacgaatgagaaaactggggcaaatgaagagggtgaggatgaaggagaagcccgtgctgtgactgccattccaatacagccaagtttcccaccaacacaacaatgtcattactcaggcaataacaaaccttctccttacccaccgcccagttatccacaaaggccatccctaaaatcaaccacaaagcctacctaccgcacttccaatgacaaacaccacctttagcgtaaaccaaaacaccaaccaagaaatgaattttgc

SEQ ID NO: 33108 - DNA, 570 bp, Glycine max
  unsure (1)..(570): unsure at all n locations
cactcgaatccccctgaatattgaataatagatttgatcaagatgttaattctggnnggtgaggacaatgttgcgaaccgtcaaagtgaaacagatatctatcaagagacattcaagctcccttcagactatatttacaagagcatcaattnttgaatgaatggcataactattacttactctgctgagcaatactcgacgtggaaattatgactagatactgcacattncgtagttgagtgttgcttcatcagactacacagatgaatattgactcttccatctactgtctcagcaatatatcatagctcaaaatagagaataatggagttcaggtatgtgagagccactgtctgtacaatagccgtgtaatggctgcgatacacgatatcaatctttctattaactgcaagatatatctattcttattatatttatcaatattatcantgtctactgtagatgaatatgctcagacatgatcaaatcagaacaatgctacaaacccatatctaccacaacacaatagtatgcattngctgtgagcctgtaaaggcatagctttccccn

SEQ ID NO: 33109 - DNA, 334 bp, Glycine max
cgtagaaccaaaatcagcacatggttacaagttaacacaccattttcttttcttatgccaaacttcttcttctagtgctccattaattaggagtttgattcctgaaaggtgcagacacacctgcaggctacccctgcaagccacctgctaatagaacattgatgactttgtgtacactaggttatagctgaagctgcaaatgtcataaacataatgaatgatgttgtgaccccagcttttgtggctagatcccatgtcttaattatttttttttgaactgcaaaaataatttatattaaaagataaagagtacaggggtactatataaacacac

SEQ ID NO: 33110 - DNA, 337 bp, Glycine max
ctcgaccgtttaacatcatcgtcgtcttcgttcttagcttaacgggtagtacctaaccaactttaattatcttgtccgggggccacatttgtcatgattttatctcattatttgttttatcccctttgacggctaagcattattaagcattctgctaattacaataataattcaccacgttgaatggcatccgtaattgtaaatgatcgaccgtcgcggccgaccctgaaatcaaaaggtatatattatatcaaattctttataagaaggacatcatgggttctttgatctatctatgatgctaactaggactagtaacactccttaaccgccaaaa

SEQ ID NO: 33111 - DNA, 349 bp, Glycine max
ttaacctcatcgtctctcacagtctttagatttgggagccaatccaatccttgtgttcggactctcagccacttatgatagccgccgatgatcccattacggcttcccctaagctctctgtcctttcttcacgccgcatcccatgccttgcgaactccttggagtaccctcgcgttgtggtcactgaaaccccgtgcgatgaaaggcgtgatgctttcgtctgatggcactcctctcatgaggtagccaagctgtcttatggcgaggacgggattataattaatacaaccccttgttccatcaagggaacctttagacatccttcgtatgaagatagaatcccgattct

SEQ ID NO: 33112 - DNA, 96 bp, Glycine max
  unsure (1)..(96): unsure at all n locations
ctgttcaggagatggatcactctcttgagatagagaaattcactaanatgttcattacaactgcactgcctaagctccacatcatgttgataaaac

SEQ ID NO: 33113 - DNA, 351 bp, Glycine max
  unsure (1)..(351): unsure at all n locations
taagagaaaaaaaaatgcggtatcttattatttatttcgnttttttgtacatgacaaaagaaaacaaagagaaaagaacaaaataaagcacaaggaaatggaacatctatagcatcaacatgtaggagggagaatgtttggggtgggagaaatccttgaaggtataccattcttagctagaaatactcagtacgaaagttttcttcttttaagagtgtagtggaggtgaataacacaatctagctaattggagatcttgaataatcttaacgacagttgcatttatttcacttaatattatatgcctcacaataaaactaacaaaaggtataaaaatgaggaaattaaact

SEQ ID NO: 33114 - DNA, 649 bp, Glycine max
  unsure (1)..(649): unsure at all n locations
attaaagccgtctaggactnttaccgngactctnnacgagctgctgcgcgagcttctactgagctaatataaaaactaaacaagaaatatttacantcctatctnanagaaccatagatggggagaaatatatacattnntgataacttttctatacnaaaagtagtcataanagatgactaacaatgccttactttggagtaactgaacaaatctatgagcttgattatagttgaattagagtgccnntgtgtagtcgtcttatacgtctaactttngtatagaannactttacaaaatgtatatattttctncaatntatgggtctttttctangattgtaaataanntttctttgttttatttgtactcagtagaagccttgtgtatggaataatgtcaattctcttcaattacgcanaatgagttntntgaaaagtgctaagtgatgctcgccagcagctcatgcgctagcagtgcatctgtagtgagcatcacgcctatcgatngaggatctgangggattgtaccaggcaccgctacgcgtatcactcgtcacgagctttgtacttcangctacgcagttggngctgacacaatactactcggcatcgcgtatcaggcaggagcctttaagctgatagtggcg

SEQ ID NO: 33115 - DNA, 340 bp, Glycine max
ttataagagataactatccataatagaaggtctgtatggaaacgtacatctagtccactcaatataggctctagctaatcatcatgaatggagatatatgttagacaagtggccttagatatcttaagaaggggggagagattgaattaagatattccaaactacttccccaaataaaaatctatttcactttttattcaagttataaattcccttaacaatgaacttcttaaatattgattcaaataaaacaatttgaatatgaatgtaaagcaataataaataaaggagtttaagggaagagaaagtgcaaactcagatttatactggttcggccaca

SEQ ID NO: 33116 - DNA, 700 bp, Glycine max
  unsure (1)..(700): unsure at all n locations
attaagaccgattgaanngacnnnnnncgacctgcngcgcaagcttctggtctagtgaantccanagatanagctattcatgaaccttatgtggtaatgactaatgaacacacacatcagtataacacatgggatagtaagaatgcagcaacanaagacatttgtgataactgatgatgactaagttaattctaaaaaaaagaatgcagaactttcatganagttggttctggataacatttagaaatctcacctttttgctcacaactcatgaccaaatngatatcatttcatatgcgaagtcaaactacttctttagaaagtacattccattcctgaagntctaactttctcctcagaanactatgacacgactaanattcaggggggtacaagaccaagccattcttacccttgagagtannttgtgaatncctttcattaaatacgatntcgcatgcccccactgtgaatgacagccatcttgcgattctgcaatgattccctgtgtacanananacagcgagtatgtactttcagctcacttctatctacatacttctgcagttctagcangagacttctttctacgataagtcatgaccacatccagactctgattattattnatttattanataataaacaaacacacactgctgaatatagaatgctgctgacntatatgatgagcctaccg

SEQ ID NO: 33117 - DNA, 339 bp, Glycine max
ttcaatgttcttaatcaaaagctaactaatgtcccccattcttgcgttgccaaactttcaaaaatcttttgaaattgagtgtgatgcttcaaatgttgggattggggctgcgttgatgcaagaaggccatccaattgcttattttagtgaaaagttaagtggtcctacccttaactattcaacttatgataaggagttgtatgccttagtacgggctttgaaaacatggcaacactacctttatcccaaggaatttgtcattcatagtgaccatgagtccctcaaatatatcaaggggcaaggcaagcttaacaaaaggcatgcgaagtgggtggaatt

SEQ ID NO: 33118 - DNA, 175 bp, Glycine max
  unsure (1)..(175): unsure at all n locations
actcggatgtctgaatgagtcccgtaatatatcngaaagctcgaatgtgaatgtataagctctgagcatattcanacgacaataactntntactcggatgtctgattggtcccgaatatatcgagatgctcganatggaataccgaagctctgagcanattcaaacaataataac

SEQ ID NO: 33119 - DNA, 336 bp, Glycine max
tctacattcaatttcaagcttttcgatatattacgggactcaatcggacatccgagtaaaaagttattgtagtttgaatttgctcagggcttcggtattccatttcgagcgtctcgatatattacgggactcaatcggacatcagagtaaaaagttattgttgtttgaatttgctcagagcttcggtattccatttcgagcatctcgatatattacgggactcaatcagacatccgagtaaaaagttattgtcgtttgaatttgctcagagcttcggtattccatttcgagcgtctcgatatattaccagactcaatcagacatccgagtaaaaag

SEQ ID NO: 33120 - DNA, 224 bp, Glycine max
  unsure (1)..(224): unsure at all n locations
ttcacagagaagctcgaagaacacanctatagcttcgatttttaattttataagtacgggtgcggttatattgttgctctatcaaagctntatgatgctgctntgcttannactatctngcatgttctttggttgcagagaagggtgaagaacacactacaactctgattttatctctanagcggtgattttatcacaacagatgtgtttctttgtagtcttca

SEQ ID NO: 33121 - DNA, 337 bp, Glycine max
cgcgtgatgattgacatttttgcgatgatttttttttcattattttttttaatgtttcacaatattatttatatttttttttctttttcatccatattatttccttcaaatcatcattcttattttgctgataacacaaaactctatgttgtaatagtagtaatcgttctctcatccatatgacaaaaatatacaaaacacgtattactccattttcaattaattttgctcaaaaaccgcacatatcaattttgctctttattgattatttggacttaaaaaatataaatatgatactaaaaaaatgtatatctacgctatctattaatataaattg

SEQ ID NO: 33122 - DNA, 203 bp, Glycine max
  unsure (1)..(203): unsure at all n locations
gcatgtgtctctgaacanatgtatggcaccaatattgtgtgtgcangcaataacattattgttcctcatcacttggacatgacattagcatcgtacttggataaccattatcangtctttgactccaaacggtcagctttggatctagaagaaatggattattgaatactcgggcattatgggattggatgtctgccattaac

SEQ ID NO: 33123 - DNA, 336 bp, Glycine max
ttgaattatactctataatatctaattcgattatgttgtccttacttgatctatttgatggagattttgtccggatcttttgcccccttcgcatcccaatgcattgtttagcatttgtttctattcaatattttttatttttaaatctttaacaaatatcttaagaagttaagagagaattcattagccaatgctttcatttattacttattttctttaagtaattagaattttgcaataaagtgtataaggaaaatattggtaacacattatctaatatattttcaaagacaatttttaattcttgattaaaattcattagaaatttcaaaaaac

SEQ ID NO: 33124 - DNA, 333 bp, Glycine max
  unsure (1)..(333): unsure at all n locations
gctgctgtcaagtttatgtctgtcagtaattattgactttataangatgacatttgattgtcagttccatctaatctataagatatctgctttagagaaacacaagaccctcctgttctgatatcactatcttgtgaagagaaatatatgtcatgcaccaataactatgtcaataatggctgacaattgacactttttaacttaagtttagtgtcataaactcttcaaggttagttcttgacaaattggacagcttcttaactttatctccttgagtttagtttacacttcatcaggttatcatggatatttacaatgtttaaaagactcatt

SEQ ID NO: 33125 - DNA, 330 bp, Glycine max
tatacgacctaagatgtggttttgtgagtatattcaatttagacacaagtcttgcacttgccacattggtacaactccttccatcaatgatcaccatgcaaactttgccattgatcaaacatctagtgtggaaaatgttttctctttgactttcctccattgacttcaattgatggccaagtaaccgcctaatcatcaacaattctccctccggtgttttctccacttcctcctcactctcttctcccttttcaacttcggactcactaatttactctccatctctaagaatcatggctttcttgttagggcactcatatgcataatgtc

SEQ ID NO: 33126 - DNA, 329 bp, Glycine max
ttttaactaacaaaagaaattattattcataattttagaaactattcctcatctgtttattttttaatgactattactctttttttttccttaaggaatggattttttttgttataaccaattattccttttaagcacttaaattttttacatcaattttttttctctaatgatcttgatttcataacatcacaattattgattaattattacataaaaatttaacggatcttatttttattgcagaaaaattctgataaaaaaagacgataaaaagaattaaccgtctaaccaatttagtctctcaagggaaactcatacctgattaa

SEQ ID NO: 33127 - DNA, 582 bp, Glycine max
  unsure (1)..(582): unsure at all n locations
ttanccttcggtcttagnnttgnacgcttatgaaacgcgctgttttcatacaatccgtgctcgtgcaaacattatgtgtatgacttggctaagccctaagagcaaagaanaaaaattggtttgggtagtgcatcaagtggaattcatctntatactacctagtggaagaacaacacattcaaagttanggatcttctaccaactntagatgaactcagttgtaatataacccatgggagtgacttanatgagttgcttanagttacanagttgantatatgggatgaagcaccaatggtgcacanattctgtnttgagcactnaaccaaaccttaatgatatatgannatagtgatgaagtgcactgtttcgaggaaaatagtggttttgtanggacttngcnatctacctggattcgaggaacccgttgactagacatgcacttaatgctctactttgagcaggcatgctgaactatagatgtccttgagcaatcaacctccatcactgagtcaacttgaatgatctcaatgaatggcttagcagcacatgtatgcataaatcaagatgttctatcctgcn

SEQ ID NO: 33128 - DNA, 352 bp, Glycine max
gtaataaattcctatagaaaagatgtggtagtttttatatcttttaattaactattgtttagctgatgggatttctgttttatttttagtgttagaaggaaccttatatcaccttcatattttgaattagtttgttagacttatatcacattaggcggcttcaacttaagtttaaacaacaaaaccaattcataattaaaagaccgaaatttattgattcagttataaattaatatgaatttttgaaacagtcattgtaagcattgaggacaaaattttggttacatagtccaatcataatagtcgttgtaaagtactaatagtatattcaatacctatacatcctttaatt

SEQ ID NO: 33129 - DNA, 679 bp, Glycine max
  unsure (1)..(679): unsure at all n locations
ttgangccgtctcggatctntgantnnnntnnnnnccaagcttggagcgtgcttncactggangggaaaganagagagaggggngagctctatattgaggattgaaaggggagagaagttgaactttgagtggtgtctcataagactctcattatcanagtacagcaagtgtacacatgcttctatntatagactangtagctttcttgagaaactntcttgagaaaaacttcttgagaangcttcttgagaanacttncttgagaagctagagcttagctacacacacncctctaataactaagctcacctccttgagaaagcttcttgagaagaatnnctanagaagctagagcttaactacacacacctctctaatagctaagctcaccttcttgagatgagaagctagagcttagctacacacccnctattatagctaagctcaccccccatgacaaatacatganaatacanannagtccctactacanagacctactcaaatgtctcgaatacanggcaanaccctatctactagaatgccaaatacanggccaatgagganacctatatatattacaagatagcggctctacttaccanggctcganatacctanggtctgagacctatggccctccttgtctntgccatctactgagctctatcatacctg

SEQ ID NO: 33130 - DNA, 349 bp, Glycine max
tctcccccaattttctataaatagggggagatgtgaagtgaaaaagggttcagccccttaggcacttctctctctttcgaatttgcttggaaaaattgtttccgtgaagaaaatccaagccgaggcacttccgaaacatttccgtgaggaatttcgcgaaggtttcgaccgttcttcgacgttcttccttcgttcttcatcgttcttcgatcttcaacgggtaagtacctcgaaccaagcttttcgattcattctatgtacccgtggtggtccacattgtgtttcgtgtatttttattctcgtttcatttgctttttatacccccttttgacgtgcttaagccatttta

SEQ ID NO: 33131 - DNA, 126 bp, Glycine max
  unsure (1)..(126): unsure at all n locations
tttactacagagcctctatcctcttcattccaccntagagcaattcanacatatagatggaagaagcatgacaagagatcttggagaccttcagtaaaagtagaggtgaacatacctctactagat

SEQ ID NO: 33132 - DNA, 347 bp, Glycine max
tagcaccactatcgcgcttagcgcgagtaaatggatttggacttggcgccaatgttgcactgagcctagcaagagatggacgactcgcttagcgagctgatctcgcgcttagggcgctgcttcgattcaggtgctcttccagattcctttttcacgctaagtgcactgaagccgtgcttagtgacggatacgcactaagcccactgagttcgcttagtgcgacaaccactttggcacttcaagaaattagctcctttttacctgaaattgtacagattttaacattaattccaataaaagagaccccaatgacagagatcaaaacacatcaaagtttatttacaatt

SEQ ID NO: 33133 - DNA, 347 bp, Glycine max
tcaacctagaggagacggaccattccaagtgttggagaagatcaacgacaatgcctacaagattgacttgcctagtgagtataatgtaagtgccactttcaatgtgtctggtctatctctttttgatgcagatggaggagccttggatttgaggacaaatccttttcaagaaggagggagtgatgaggacatttgataaaatttggtgagagtttctctctgggttccttgttgaaccaattatcagacttatcaaggtaatccttgtggcgtctacccagacttatcttccttcattggaagtggcgtctacccggacttatcttccttcaccggaagtggcgtct

SEQ ID NO: 33134 - DNA, 502 bp, Glycine max
  unsure (1)..(502): unsure at all n locations
attgaacacctttcggaatacctttgagnacnttacgactacncacgagactcgttganagggctntatgctctgttaccttggaactgtgtgtctnagacatcatctttttctggtgcgctcctacccgactatcgaagagtgggtcttgcgtaatcttctctagtgacaatttttgttctccttatagtatttatcaaggactgtctgatcgctgcgcatgaatttcaccaacatataatttactatgactttcattcacaaccttttggcaccatggtaaatttcaaattagacaatatttccttctttgggcttgaatcacctcaatcttggttagcattttcaggcagtactttatgtagaagatggaaagcaatattagcatgccatggtgaatacaccaagtttttatgtttattgtttaataccggtttgacattataatagccccggattatttttaggattaaaaaattgatacttttttatttcccccctg

SEQ ID NO: 33135 - DNA, 115 bp, Glycine max
  unsure (1)..(115): unsure at all n locations
acattatntccatgacacanatgcananatgataaattggaaactttatgcanaactggtcatgcatgcacctatgtggacactcaagtgtcnaatttttatggcatgtgatgct

SEQ ID NO: 33136 - DNA, 339 bp, Glycine max
tgacactacaatgttttagctggatgagtcttttgcataaatgaaaatagaaaatattgttaagtctgctgctgcaactagtcaagatgagtttgtgtccaactgtcataccctaatttcgtccggggacctttgcttgatgacatgcgaccattctttggtcctcgtgaggtgcttggcacccatcattaagcgatttgtgaaattccaggacatgccgaaaaaccaaaaaaatattgatgcagaatccgtaagtttccgtgacacaccggagatcaaatggaagcatcgttgcataattaagtgaggttccgtaacattccgtaagttaaaaagggg

SEQ ID NO: 33137 - DNA, 190 bp, Glycine max
  unsure (1)..(190): unsure at all n locations
tcttatctaatcntcacatcttaaatgagaatataatagatcttatactttatcatcttatgtcttatcatcttatctcctatcaatcatntgtcacacgctctatanatgtagtntgtggtatcaagagcaattgacaattccctcaataactttctctgtacgtatgatatgattagctgttggaatg

SEQ ID NO: 33138 - DNA, 339 bp, Glycine max
tgtaatggtgggatattttggtaagcatgatctacccttcataacaaaaagagttggagataactctaaaatttgaattaatttgatcgttaattttggttcaaaatattataatttcttgttaaaaatattataattttttcactttatcattatttttaatgaaataataaataaattaatatctttgtagttttttttattaacataagtcaaaagaagaagatttaagtgatttcgaaaaaaatcgatatagagatttgaaaaaaaaaactagaaaaagttgaagattgagatagatcgtccaatgcaaagaacacccatgaaaagtccaaaggc

SEQ ID NO: 33139 - DNA, 291 bp, Glycine max
cgtccgcgagtccgctttatgatgggcctatatcagcagctgatggggacgaattgcttacctgcttaatgaccgtcctgattacaatgctaggttccaccgatcatctagctggacaccataccttaatttgagttccaaagggacttcttcgtgcattttggaccctccttatggaggcactttccgacattgttattctgctagggaccctgaatttggatgtgtattgactatgatgccatccctacctagaccacatgcactgtatgctactactgattccccaag

SEQ ID NO: 33140 - DNA, 629 bp, Glycine max
  unsure (1)..(629): unsure at all n locations
atcaactgaggtgcaacgctntaatcaatatatgtttctgtagtgtggtaataacatctangattgcgtgcttgaagtcaactctcatattagaacttagaagaagctgtagaaatgcatgaaggtaaatgaaacagctatatatgcagacacaaatgagtggatcagtcgtcacagccattatagttaaattatgcattatacatataaccaaaagtagtacactacacatgaagaacaaggaaggtccaataatataaatgtngagtatatattgaagaataattntatacttcatatagcatttacgaatttgaagtatatggtcccaagatatcatgctactacaagtgcctttaatttatcatcatacactcgtagaacaccgctcagtgatcaatgttaacttacatgagccanagaagtaagaagtttatcagtaatgtgatcactacaagtnggacctcaaccaataaccttnntattgatgctantatggggnggnnataattattattatataatattatattattatatttattatattacggggagaaactgcgatatantggatgattatctantactgcngtgacggaagaactctgactatactatcccgattt

SEQ ID NO: 33141 - DNA, 332 bp, Glycine max
tcaccatctgatgtggaaaaccaaaatcaatcaagctagacttaataaagtccaatctacattgtcataggctttcttcgtctatcttaaagcagcatctctatgcttccttttggatatgtacatgttatgtaaaatttccttgagaacaatggaattaccaatgttcctcttcccggtaaacaaaaactattttggaagcatccaatgatatcattcgataaaggccttaatcaattaacaatgtctttgtaataattttatagattgtattacagaggccgatagacctaaactccttgagagtatctagattatccgcctttggtgtt

SEQ ID NO: 33142 - DNA, 641 bp, Glycine max
  unsure (1)..(641): unsure at all n locations
cacctgaggtcaagctcngtactactgtctcgccgagagggaactcagttcagntacagtttattatgacgctntntataagcntattaataggagtcaacaatttatattagaatactanattcacatgttccatctaaaacttatatttnttacgaattaanatagatatttatcctctttattatatcagtaaaggccacantatactttngctgatttatctcggcttttaatataacttggtacttattntagtttnnntgtaataaatatcaatagatcaatattgacggatntaaataatatatatggagtcataaatgaatgtctagatttcaacacatacatgtgttatgttanatccnagtctacanaatgagtgtttgtacatgcattcttgaactcaatncttcttcatcngaatgaaacatatnttgaatgtatntgcatgacagaagcacatatatcgtcaatcttngtgaacgtgactcaatcgatgaccccgtgccacatttggcatcttccttttactttatagtntaaatgtatatagcaataaaatcgcattgggtatacgctgcaaactatcaacacagagattgtgatatgatttaactcatatgtagatatacacgtat

SEQ ID NO: 33143 - DNA, 338 bp, Glycine max
acattataggatcgtggtgtaagacttcgtgtaatggataaaatgatattgtgataaggagacaattgtctataggaaagaacagaattaagaggatagagacaagtacctgcaaaataactagctacagttaaagataggtatgaaatatggaagtctttatacttgctaggtctatgtctatctcagagatcttttggttatattagatgactgcgctaaagtcaaaggatcagaatcaatattatttgacacatgcatgatatgatcaactggtaattctaatgagacaccatcaaattgatcaatggaatgagaaggaggaatatgaaggacag

SEQ ID NO: 33144 - DNA, 608 bp, Glycine max
  unsure (1)..(608): unsure at all n locations
taaactttgncttggnnnttnnaatcttaagcctgcggctcagcttactaacccttcaggtgtggactcttacatgacttgtggngcctatgcagttgaagccttggagganagangtatgcctatngttgtgtgatgaattctncagaattacctgngtcaactntatcagagagaaatcagacacctttgaagtattcaaagagttgagtctaagacttcatagagaaaaagactgtgtcatcaagagaattatgagtgaccatggcagagagtnntgaaacggcangtttactgaattctgcacatctgaaggcatcactcatgagttctctgcacgcatcacaccacaaccaaaatggcatagttgaangggaaaacaggactttgcatgaagctgccagggcatgcttatgccaagaacttcctatatctctgggctgagcatgacacagatgcttattccacagagccactagagaggactcacccactgatgaatctggaaggagagccactgcagccttccatcttgagtcatgtcatttgtattaagcaggaagatgtcacaggtctgattctggtctccaacgcactttagtttatcc

SEQ ID NO: 33145 - DNA, 334 bp, Glycine max
tgttaaaaacggaagaaaagaaaaccgaatttgaacgaaatgaagatgaaagctaaaaaaataagaaatgaattgaaagtctcggattcaaaaacttacccgttgaagaacgaagaacggtgaagaacgacggaaaaccttcacggatttgctcacagaaacgtcttggaaacacctcagcttggattttcttcatggaaacaattttttttcacccaaaacagctgaaatgcatagccaaaggggttagggatattaggaacaacctcccttcgcctatttataggaaaaagggggaggacgttgccgcccagctcgcccaggcgatctgggg

SEQ ID NO: 33146 - DNA, 319 bp, Glycine max
ttgctatatgaaccagattcgatgttgcattacagactaaagcacactgaacgaagtaatatgatacacaccatgttcgttgcattatatgaatctgcttgtatgtggcattatatactaactttgcaatatgaatctgtaagtatgtagcattatatactagacttccttgtaaatatatgacaagcttgcagaaaaccagacacaccatgggattagatacgtaggatataacatatcacatctgagtgttgtatataagaaaatacgaaggacacgaataaataattgcgcaaagtgtgcgcaaaaaatcttgtta

SEQ ID NO: 33147 - DNA, 626 bp, Glycine max
  unsure (1)..(626): unsure at all n locations
atganaccgtaacggaccttagancacctcnnnccaagcttgaacagacatcgccctctgatactgtggtntaagcgtaaactatatgctcaatttcatcccttctctttcgagagatcttctctgctgtcagtcctatctgcagccaaagtggagatggcatggatatgaaatagttatctattatataacttgcaggactcttctntatcatntctcttgtccctttgaagtnttcactnntttctatctgatgagtattgataacagaacttgaacaattatgtgattattattggtggacatgatgtgctcccttctgctgtangaaagtctttatattctagtataaatgtaatngatcccttacagtancttgactggtgaatggngatntgaggcanggtctntgtacgcgaacacgttatacacttgatngattcagtttctgctaacctatgagagctgattgcgtactgacatggatacatctggctttacattgctgaatnatttgacctagtgtgctaatgacatgactactgaatcttttactgacatagtctaggattgaatacacactatataatatcatacctgatactgatctatctgtacaaacagtn

SEQ ID NO: 33148 - DNA, 352 bp, Glycine max
ttagaacagttattgagaggtggtccacacatttgagagtttccaacaaaagaagtgtatggataattgttgatggaatttggaattgagccattcaagttgttatagctcaaattcaaatacttgagacttgtaaggtttttaaagtcagggatagctccagagattgaattgttttggagatacaaccaggtgagtctactaagattctgaaaggtagttggaatactgccagagaagttgttagaggaaatatccaatgctatgagttttggtgagatagaggaagggattaggcctgagaagttattctgctgcaggtttacatattggagtgaaggaatggagagaa

SEQ ID NO: 33149 - DNA, 671 bp, Glycine max
  unsure (1)..(671): unsure at all n locations
ttgaacctctcggtctntaatnactgcnnacagctgagaggaagtgagaaggtagacttctgctttattcgttgaccacanagtggtacctggagatatgtcgcgggggtcaggagacctttgggatgtcangtggngtgctatngcccanaaccaagcttgaccaatctcgacccaacccgggcatagtcagtcagtgagaacctgtgatgtacctcaacaggcgaagctctggcagtcaacagataanaggaacanagaccattaaagcaggaggcttgtgtggtggctggcagctgtgaactctgattgtatatgggatatggcctctggtaatcgattaccangggtggggtaatcgatacaaggcttannaatgaagacaggaggctaagatggtctctgggtaatcgataccaatggagtgtaatcgattaccanngcttgaaacgaggtcaggaagctaggaaagcctctggggtatcgatcnagtngttgggaggcctctggtatcgataccangctgtgtatcgatacacagaggacatgccatgggtatcgattcnagtttagcctttgtaatcgatatcaaggtgtgtatcgatacanagataaaagctaanataccctctacttgatgagtgtatagancatgtgtgngctantaatcg

SEQ ID NO: 33150 - DNA, 352 bp, Glycine max
ttccacgaagaggtctagaaaggaggccgcatgagaaggctccagtaccgccttggaatttgataatcaccggttttggagcaccgagcaccaccagcgcttcgaggtcatcaaaggatggtcgttccatagagagaggtgcatccagctcagggaggatgagtatacggactttcaggaggagatagctcgcagacgttggacgtcgctggtgactcccatggctaagtttgagcctgagatagtcatagagttctacgctaatgcttagcccacaaaggagggagtgcgagacatgcgttcatgggtgaggggtcagtggattccctttgacgcagatgccctcagccag

SEQ ID NO: 33151 - DNA, 171 bp, Glycine max
gatgattatcttgcaccattgactgatgatatgatgatgacctgactatcggtatctctgacttgctagtgagaagctctcctggagcggtcaagcaatgccaattgggagatatacgtattgtcaatttggagctggaataaggaagaaactccccttttgtttggaaaa

SEQ ID NO: 33152 - DNA, 349 bp, Glycine max
taagcttgatccatcatacaattgttaactgtatcaggtatttaaagcctacacaaatgctgagttgcaatgaagttgtaattgcaagttgagagacagactaagtaagagtgagttaatgatatacaaatgctaatatatcaattatggtcaataattcatctttagtcctttaaaagtgaaaatactataatatagtagatgtatcttgttgtcccttaaatttatacaaatcaaacagattctaattgtcttattcttgctggtttctaaactttatttaggtttgtggttgcattcagagaggaatttaataagttgtactttccgactttgggtgacatcaagg

SEQ ID NO: 33153 - DNA, 172 bp, Glycine max
  unsure (1)..(172): unsure at all n locations
tcttttatttacaggtcttccctcgtgtcctcttaacaaaggtgtctcctactcgacgtgtgaagtttangagcccacttangtcacatncatctngatatgntcctagctctgaatttagaaagtagcaacacattatcgacctgtgaaaaatcanaatgaatttagaaag

SEQ ID NO: 33154 - DNA, 350 bp, Glycine max
tgcctaataaatctgaaattgagagaaaattattattaaacacacaaaatggaagtactaagtatttattacctatacttaacagaaaatacttataacactacaaaataaccataaaattggaagagtttgataaaatttacacaagttttatacaaaaaaagttagtcatattcaccgactaacaataagcaaacacaaattgtaactatccaagccttaagaaccataaatactactcttgatttctaggttgaaattgctggttctggcagcttgaacatacgaacttgtataaatttctgagaattgataactacgagttttaagctgaaggttttactgaattt

SEQ ID NO: 33155 - DNA, 363 bp, Glycine max
  unsure (1)..(363): unsure at all n locations
cattgctgcgtgcgagacatgaagctattttctagttatggtcgtatatataaaatggaggatcatcggcttatattgattattatgcgttcattcaaatatggctggacattcgccatgctggcatacgtgctacatgagagttctatcatggatggctcataacgcgatactacaccgtgctancgaacaagtgcgtaagccactacaagggcatatcactcgtcactatatatggagtcagcctcgagaataccatcggagtagacactttatcctctatgctagacgctctaggcaggttctgtttcagactctgtcctatcatcgtttgcatcattagacttcatgatgccatgttcg

SEQ ID NO: 33156 - DNA, 277 bp, Glycine max
agcttctgttagctctatcagcctcttgtggagctcttttatgtatcctagggggccctcttaccttttcttatttcgtgcattcatgggacatacctgaagactatgaactaagatagctctaaacttcagcacttcatatttacactgtaatgaatcttactggctgtcctgcctagtagcctacatacatatgctagttagtagtaagaggatcatctacttatattactatcctgatacttctattagtcaagagtaagtgcatgagaatctc

SEQ ID NO: 33157 - DNA, 338 bp, Glycine max
tgcacttcttcgctttcctcagggactttatcttctttcccacttaggccttttagctttaggagccaagttatcccttgcgtccaagacttcaaccacttgtgatagccgtcgatgacgccattgctacttcccttaagctccttatctttcctttccactgtattccacgctttatgaattctttgaagtatcttcgcattggcttcatcgatacctcacgcgatgaaaggcgcgatgatctcctccgatggcgcacctctcatagggtagcctagttgtcttatggccaacatgggattattataattatacaacccctcattcccatcaagggg

SEQ ID NO: 33158 - DNA, 638 bp, Glycine max
  unsure (1)..(638): unsure at all n locations
catattangacccgtanacggnnnnnnnatcacctgaggtgcaagcttatangttngctcatatggaaagtccgtgacttatttttttcactacttgtccaagatagaggctcttatctaatcctctcaacacttcaattcanaatcgtgtgaagntcaccagaattttgcatggaatagatctcgaatgtgaacttgtgtcctncgtcacggtgcttggaacgaatntcaatttggagtacaagggtctccatcttaattngtttcattgtggcaaatatgggcataaggattctcaatgccccttttgcctccttacttctggaaccactcatcaactangtgctttctctggtgcttggacgaantnctaattggagtacagggtctccatctattctgttcattgtggccatatggcataagattctcatgccctttgctccttacttctggaccactcatcactangtgcttggaacgnnattcattggagacaaggggtctcatctattgtntcattgtgcaatatggcataggatctcatgcctttgcttctactctgatactatacatgtgctcttgacatatacagggggangatctatgtgcatgataacatatgatcttcaagtggt

SEQ ID NO: 33159 - DNA, 339 bp, Glycine max
ttaatcaaggaaagtaacccaaaaatgacctttaattgggtgttgaaagagcataataagacttttctaaattggtttaaagatacaatctttggtgacgataatgcttctgaaacgttaagaaagttagaatatgagcctaaaagaaatgttataaattggcaaggatacgatatcaacaagtattagttttaaacgaaattacaagatgacaagagtacaatgcaaaatagtgaggttagtctaagggctgaatctcaacactttgctacggtacatgatgacaatccctgtttggtgtccatgccttactttggagtcattgaagaaacttaagag

SEQ ID NO: 33160 - DNA, 602 bp, Glycine max
  unsure (1)..(602): unsure at all n locations
tcacctgaggagcaagcttngtacccaagctatntaanttcannactaagttgtgtgtgatgttcttctctgtgcattgattggcatgaactcagcgctcatgagccagcacataanagttngtgttacatgctatnggtatgacactaanacttntcattttacttgtgtaagatggtaagagaaacactcatgnnntatttgaattatcttgtactatttntatttggatntaacatgcacaactctcngttgtgtttggtcaggcgccattttcanatttctcttaatacctattacttaacttgcttgccccctccatgcctttgtgggctctctcttcatttacatttcaatggatcatatagaagatnnttttttatgtctgttttangtcctaagatggatattgatgagctcagtcttgtgcctgtaaagcatatctcattttatatcatttaggtggacattacattatnngttctagatgttcatttctctttggctcttatcatngtatnttaggacatttgatgctagtaacacatttatgagtggtgaccttccatctatctctgaatgacagataatgactgttgtat

SEQ ID NO: 33161 - DNA, 337 bp, Glycine max
tttggaaaaaataatttctaaaaatattatcattcaagctaattatcataagttatatccgtaaagaatttgcctagaaaaaaataggaagaaaaaacttaaatgaaccagacatagacaatttgaggctgatgtcttataatctttcttgactgaaccaaacacaaatacttaaaattaattaaaataatgatagtttagtgtactccttgaagggaaattaataaagttgaaactttaatgggtgcaatttcctcggcaagtgtaaaggagaatatgaagatgatgatgatgatgacgaccttggattccattggaagctagtgtagttgcacaa

SEQ ID NO: 33162 - DNA, 638 bp, Glycine max
  unsure (1)..(638): unsure at all n locations
ctgatntannnnnnnnnacacctgcaggcgcagctctcacgctgccgttacaaggatgagctctacctagttgttgctcttctttataagtcntaatcagggcggtggcatttgttcgaaggttcttatcanantatngngtcantttgtccacttggctaaccatataaaagtatcaataagaaatgtanagtggggttcactttgttgtggcagtgattgtgcttacgtggtttcaagcttgcgagagtacacgccgagcataagttcatccttgccggtgatggtttacaacttgaaaggtaatnnttatntattggtntgngtntgattgngatgattatgcttgcccgtgatgcttaanntatttacttggnttgcgttcgattgcgatgatcattcgcgaaacattctatgagactaagaccgcgtgacttgtgaagccactgggtangatatctatccttgtctgagctgatctanngtagacagtgtctttctgtatccagttttgtcggttaagttcgatacagtcntgtcgtatgtggcgtgactttgtgctttattgagtgaaagacatattggaaatgtgtcgatcttgtactagttgtataaatcaacaacatatctatggctag

SEQ ID NO: 33163 - DNA, 335 bp, Glycine max
taatggccatggtgattgagaaggagacattcattatgggaatgcaaatcatgcttccattttgctttttagacatgactcttgcttcaataacatggtttgctagtcttgtaaccaccaacctagtaccattgcataacccttgtgattgatacatgttccttaaaagcattattggggtacccacctttagttttatcttatgattaggaagaccaaatgttctcaaactattgagaaattcacttgtgaccacttcaagtgcatttcattcaaccatttttgacttgtcaattgaataagaacttagatattccctttgatcacctgaaaac

SEQ ID NO: 33164 - DNA, 567 bp, Glycine max
  unsure (1)..(567): unsure at all n locations
accttaagtcctgccgcatgcagctgacanngaatattgatgggttggatgtgaatttggtgttcctggngcggagatgatggtacaganggtgaaccangagctgaagtntcttttggtgangtagccatggaagagcagaagcgttggaatgaattcgtaacttctgagaagctgtgggaatgcagaaacgagataacacgaaatataagttgaatgaggaatgtnagggacgtggaacaacggcgaattgctttggtcatagtgaacggctataatgtaagngattcgttgggccgttagatatcagtagtgctcaattctctacagacaatgccagcttgccctcagtttanactgtttgatcaatgccttggaaatattgtattgttctcatgcacatctcaggtatacttatatcacactcttatataggagttatgcatgtgctgtctgttgtgccagatttaaatatatacactaagtgacagaaatgctgactttgtcacatgactcttacattgtcatcaactgtggacagtgctctgtgatatattgtctgagaag

SEQ ID NO: 33165 - DNA, 333 bp, Glycine max
tagtctaagtgcattgacatgttcccggtcactggttaccctaaaccaagtacaatgtgaagctgaggagttccatgaaagagcactggtaggacccgtcaccgaagcttggaaggttagtagcacaccatctgagaaagaggttgcatggagtaattgaaaaaagagaaagagcaacatcatcgtggacaagaagaggaagagtcttgtgagaatcaacagaataacgaacacattaacttttttttcattttctaattttcaaacaaaaacgatgaacataaagacgaaaatgagaaaaaaaattgaataatttttttgtttagcgaaaaa

SEQ ID NO: 33166 - DNA, 312 bp, Glycine max
ttcgcgcattgctaaagtactgtaactcatgtacttaagactctggcatattgacatattggaattacattagcatcttgaactgaatcattatgcttagctcaaaatagggtgacctatctatgaacagacgaaaagaccgctatcatccaaggcatctgctgccctagcagactatgatgcaccaataacactctttagtggtcaataaacaacattacctgactaaaatatagatgatctgaacgctcacgaaagatattttaggttaacttaatatttttgtgactacaatacatattataaacccat

SEQ ID NO: 33167 - DNA, 128 bp, Glycine max
tggcttattactgcttggctggcgcacctcacaagacttcaccctatgacgtgattcccatgcggatggaatgtgcacatccttaaacttatgatcatttgaagtcgtgcatgtgctatgacgtctct

SEQ ID NO: 33168 - DNA, 327 bp, Glycine max
tatgctaactgcaaatagaatataatgagttaaatctcaccaatgccggtgtattcaatctgatggcaacagcttgttcctttattttttgctcccttacaagttcctctctctgtgcttcactttgttgtagcagtgctacaagctcttttagttgttctttcaaatccttaagttccatatttttttcccacaattcgcacctgttaaagatgatgcaagctaccattacatagaatataggaaacaaaaagcgtctaaaatttttcaaaacaactggcatttgatatagccaaaaaaagaacagataataaatagctaatgccc

SEQ ID NO: 33169 - DNA, 350 bp, Glycine max
tttaaggccaaaccttttcaaccattaagagattcatttaacaaataatggactaaagtgaatcttttctcttgatctcttgatcttgactttaacttataataaactttgaattgcttcaatctttggcatcatcaaaacctttatacaacatatgcaatcacagggtgtaggcgtctttgctgttaagggctggaagcctcagggcctctaagtggtaatgtccctggtgaaatggatcaccaaaggcttaggcttacttgggtttctatcaaccgacagcatgcatacctctccttcctccttctttgcgctgtggatttcaatttgccccctatttatcatcccct

SEQ ID NO: 33170 - DNA, 486 bp, Glycine max
  unsure (1)..(486): unsure at all n locations
ataggcttcctgtcttatccctgnaacagctgcttgaagatgatangggtgaatatantgnanaccagttggtgaagtgggcgcaccatatatggacttgggggttatatngccataatgaaaactattgttagaactactgaaggaataaaaggacattactggattggtgatggccataaagaacatggactgagctctatcaaggcgctatgaagagaacaaaaaggggggagggatagaaacgctctttcttgttacttctgcctcttgatgctagtagctatctgctcaactggtagggtaacgaaatgggagtgaacaacttatatacctactcccaacttntttatatataaggtattatcgattactttatgctgtacataatatattaatgagtatgctttatatattaaatatttaataattatatacgagatcatatatctttatgtgaagtgcatatgacatgactaaactgca

SEQ ID NO: 33171 - DNA, 348 bp, Glycine max
ttgaagggatgtatttgctggctataagaccactatccaatttctccttaatgaaatgttgatcaatctgtatgtgctttgttcgatcgtgttgaactagattgtgtgcaatgctaatggcagacttattatcacaaaccagtcccataagagcttcatattttattttgaggtcatcgagtatgaccttcatccataacaactcacaaacaccttgagccatagctatgaattctacttttgcacttgatcttgcaaccacattttgcttcttactcatccacgttactaaatttccacccaagaacatgcaatatcttgtggtagatctcctattaacaattgatc

SEQ ID NO: 33172 - DNA, 567 bp, Glycine max
  unsure (1)..(567): unsure at all n locations
ncagcttataacgagcactcgacactacacgacattacgtatggtcactatattantantgcatgtcattatatatatatatatatatatatatatatacatatagcggactttgggcttaccgtacaatggagactgatccacgggacaacgcatttctgaaacacttttctaattgagagatatataattcattctaaaaaattatatcaacctttntcagatacagatatatctaagtcagaaccgaagaacttccattcgtatnctaattgagaatctaacatgagtgtgtatttctataaatatctatcatcggaaagaggaagaaaaaggaatactgctaatacatacttggaaagtctgacctaacagtcaatattatataaatagtcctatttgaggaaaaaaaacaaactattacaatttctgctataatacagatgctagccagctagacaccaactatgaggtagctaacttttctctgatggtatatgtagaagacgtactgtttgctgaacagtcgtgaaccacctgtgatcagccagcattatgttctgcttg

SEQ ID NO: 33173 - DNA, 347 bp, Glycine max
tcaccaccaacagagtgccttggataagaatctgagagcagaagcttcaatagaggaagagaatgagggagagggagaaagagagagagtggcgtggaaattgaaggagaatatgaagtgatgcaatcctatcccccaagaagattggaccaaagatgcaagagaaggccctatgattctcataagccttagggtagattttgggcccatgggctaagcataagcccacttatctttgtacatattaaattaagatttcattatttttgggccttgtatttagggctccataatgtaggtcgggtaccctagaaatgtaggatttttcagcctttgtattttatggc

SEQ ID NO: 33174 - DNA, 257 bp, Glycine max
ttgtatgttctataacctatatcttacacagtaataatgggcaaaatccttttaacctttgagcttaactcgagtggcttcttacagatgccaaactagaagcatctgtccactatcatcttatgaaaccattatctaacattaaaaagactgctgaccaaatctagcctttcagtcaattaagacatcagactgtgtctctgctctcactactatacaacaaacctacgactgctatcttacaagtatgcttatat

SEQ ID NO: 33175 - DNA, 349 bp, Glycine max
taagggtttttttaaaaaagaaacatgattatcatttttggctcaaatagggtgcaagggataaattatcatcaaaggttggctttttggctaagtggttgaaaataagaagaaacatggccttgatcatttccacctcatgtaattaatcaaacagtctaagaatgatgcaaaagtgggaaattaaaaacagacgttctctcacaagtaagtttcacacaactcaccgggacaaaacaaagttgttggcttaccgcacatgatttcttcccgatggactaaccttttcctctctttgttgtgattcatactccactacttgaactgacatttgccttcatggaaccag

SEQ ID NO: 33176 - DNA, 169 bp, Glycine max
  unsure (1)..(169): unsure at all n locations
ttatatgctacgtatgttanggtacgcttggtttatattgtatatcttatngtatgttaggggggagntataaatcttaagtagtaatttgaaatattaatatttattgngctatatgtatatgttatacatttaagtagtatggtattatctgtattatangatatat

SEQ ID NO: 33177 - DNA, 327 bp, Glycine max
tctgtctacctaaatatgacatcaaggattgaagaacgatgaagaacaaaaatcgaaaaggaagataaaagaaaaacatttgttgagaaacacactgagttaagagagtccattcttcgtgatatacaaggtacttgtgagagattataacttcattgtaaatttactcgttgagtgttgtaaataatatttgattctatatcaaacttttgtttgtgaaagttaggagtggcctagtgacaaaacaatacttgagtattcttagattcagggggagtctaggtgttgtgctagtattggccttgagaatacttgtaagccaaaagt

SEQ ID NO: 33178 - DNA, 338 bp, Glycine max
tgcaaaggtgaaagctcaggtttctgaagttaagggtgtcatgatggagaatattgaaaaggtacagatgcactacttagttgcattaatttaagaggataatatcatagaaactgaagagaccagttggtactagaatcatttttgccaataaaataaatatgattgtgattgtttggtggaaaaagatggccaaggcaaggggaataggaacgaaaatcagaaaccaataagttctccattcacattttcatattgaacacagttcccttgtttgctgtctaggttttaagaatctgtgatggttttaataggctgagccaagctacaataaaaga

SEQ ID NO: 33179 - DNA, 644 bp, Glycine max
  unsure (1)..(644): unsure at all n locations
taagngacctgtccngngatcnnnnnacgacctgcnggtgcaagctcgccatcagcatatagttttaataagaatgttnntgtttgaanagtgagttcgaatatataatatccatgaatcaacatanatctaattaagtctacagtcactttaatttcacggagaatcagaattgagcttctaatanactcaagttacaggatttcttttggattttttctgctgtgaatgattatgatatagcatgtcaactcaagtgtataagcgaaatgaattgttttgttctgccacagttgttgtatgtgatgagtatgactatngcttacaacaattgaactgagtggactcacattgaatttctttgtttcataccttatggntagtagtttctttntttttggtgggtaattggccaatgtgattgactttgagttgaggtaatatggcacaatcatgatatgatatgggcatgaaggtanttcacttgtacccccttgccttgccatgaacangtagaatgagaatgangaagttgaggtacattctgttgatgaatattanagcnactaatgaggagagtgcngaatgagatagttgtatgagtgggaagctctaagctgggctcatctctgtatagtgtgatg

SEQ ID NO: 33180 - DNA, 320 bp, Glycine max
tctcctcctagcgtcgtttgctttccttggaggttcgtttgccgcgcattgggtggttcgttgtcggcattgaggacctacagctctgttttgctcttccaccatcgaggtaagcttcacatcttcgttaatggatgcattttcgtattttgttttgtgcgttcgtacaaatcaacatgattcataagtattacatgatccgtataacgcatatggatcaacttgatccgtaatactcatacggatcaacttgatccgtatgacccttttaattaaaaaaaataggtatttatgtttttgaaaaatgtttttaacatatg

SEQ ID NO: 33181 - DNA, 253 bp, Glycine max
tttttaaaacaatctagttatgttttacaccataaatcacttttcttagaaaaagaacaactgactaatgatagctatcaaagagctttattaagaaatttgtctttacgctgatttaaagtgacaacctgaaacaaatttatattgtaaaaaatgttttgcaaaagcgatgacaccattctctcttctgacaatatgatgcctgtgcgtgtcattttgctaaaacacacagcccctggcgcattacttttta

SEQ ID NO: 33182 - DNA, 337 bp, Glycine max
tgtcacttaatgacaaatagtattgggttctcattccaagaatgcaccagttacctcaccatgttggccatcgacatcgacattgggttcctcttcgatatcttcaaatgcaagagttactataccatgtcaacatggagaaatgggttactatattagatctttttgtacgatagtttcctcactttattgaccaacacaactgggttccaaccctaaatctttgtcactatacgtatactttattattctgagattgcgtgcttgtgcaaagaactaagcaatgccatggtagatcccttttgaaaagaaattttgcgtcaggacaatttgtctt

SEQ ID NO: 33183 - DNA, 325 bp, Glycine max
tgtgagaggctctcttaactggttgcctgttcgctggtaaactgatgctggcaatccgttggtgagttttacatatgagctttactaaagagacataattgtttgtccttgcccccggggagcctgtgtctttatcatggtctggatcaatgtaaaacacgtgttgtagtttacttacagagggaacttggagttgaaaactctcggactccagtctttgcacattggcgattattgactgtgccttatgtgtgtctgtttgaaaaagaggacgccatgttgctggccatctatacacgctcccaatacatactctacgatgggc

SEQ ID NO: 33184 - DNA, 57 bp, Glycine max
  unsure (1)..(57): unsure at all n locations
ttcaattctagaatggatatggngcttagctcaggacagcgcgcttagcgctgctac

SEQ ID NO: 33185 - DNA, 331 bp, Glycine max
tgcatgctataccttcgaccaaacactgccgtgtttctgtctcggcccagatttaaggcgggctgcagcaccggctccgcttccctaactgtactggaggcggatgccgtggctttatcctctatagttttctggagttttaacatgacctccgagatggaagccatttgatcttttaaggccgatagatcagccttcatctattcctgcacgcccacttcattatccatttttctggatcgagtgttataggggtgcctttgtgctttcttagttatgatgaaattcctaaagaaataaacaacggtgagtatgccaccaaaacatgaat

SEQ ID NO: 33186 - DNA, 363 bp, Glycine max
tccttattgactatcataatttcctagtatctttcatattcatcaaacattacaccaagatataagatggaatgtggtttctgcatgaacatatatgagttctttaatggctataagcctattaatgtactgcaggtaacgttcgccaagatttgaaagagatattataagtctacattttcaaattatttctttacaccctttgtgaggtttatgcaaaatatgtaatcatctataaaatattaatctttttagctacccagacgtctatgaatacttaatttctattgatgattgaagtttaatgtgaagctatctataggaaaagagctgtgttaatatctacatacaactatactctca

SEQ ID NO: 33187 - DNA, 295 bp, Glycine max
tcaaaccacagcaacacaaaatctaggtgtttaaaacccctcaattcaatggcttttctaggtttgaaaggtggaatttagaatgaggtaaatttggagcaaattctcacctcacacaagtctataacatcaatctaaacttgctcaaactggatttacacctaaatttccaccgaatcaaaatttgactcctcaacacccaattttgccctagaaatggctcttggttcactttggtcatttgtttttctctctagctcagcctaacctttctcacatgtcctaaatgacattt

SEQ ID NO: 33188 - DNA, 229 bp, Glycine max
  unsure (1)..(229): unsure at all n locations
tgtatgctctggcgcacacccttttctctacatccccctctcttgtggtgncttctcttgtgcccactaaaacactcttctctgcaagatgctcaagacggctggggaattctcgacccaatgtcctaagctctatatggagatangggttgagagatcctgaaaaccctaccatactgccctctcgctcgccaatactgccttttgatcacaccctgactcgtttggc

SEQ ID NO: 33189 - DNA, 331 bp, Glycine max
ttgtatttccagtagatgaagatgaatcagtggccacctcatggactcctctaaggacaatagcatcatttcttgcactgaattgttgggagtttgaagccatcttctcaatcaaattcctagcctcagcaggggtcatatcaccaagagctccaccattggcaacatcaatcatactcctctccatgttgctaagtccctgatagaaatattgaacaaaaagttgctcagaaatctggtggtgaggacagcttgcacacaatttcttgaatctttcctagtactcatacaagctctctccactaagttgcctgatgcctgaaatgtcttt

SEQ ID NO: 33190 - DNA, 512 bp, Glycine max
agcttcataaagtaatgaaagatctttttttgtttccaaaaacataaaaacatatgtcatttaacttgatctctgacattaagctcagcaacacaaccttggtagctcaaaaatgatatataagtgacattcttttatacgagaaaataaatgaaaaaaccttcaatttcatctctaaagtattactctttctcctatatggttcctaaagtaaaaacattatataagtaattccccaagtattaaaatcatgggtagtagtatttgaagtattaaaaatctatgacattgttagtaaaatatatcaatttaggaactagatcaatggatattcaatatttcaagaattacttatataattttattattttaaggactatattaaaaaaagtaatacttggcggattaaattgattgtttatttaaataaatattaaatttcttgggtagtatctaacctaaatttttaagcttttttttttttttaaaaagaaaaaaattgggtcaaacat

SEQ ID NO: 33191 - DNA, 958 bp, Glycine max
  unsure (1)..(958): unsure at all n locations
catttgacatgatacacgaatatagtattttttcntattgtatntttgtttttatatagaaaaattaattanntaataaagnnnaagacgtnnncctgaggcgtgataggcgcaccataaaacccaccttccggttcaggttgggcaaattccgggttacatttnggcccctatatatttccccctttggggagacacctgtggggaaaatatcttatcactttgctgtccgggggaggatagaagggaccaaaggcgccttccttttatttttattttggggtagaggcggggtaataaaacacttttcccccctttttttttcccccattccaaagaggctccgtaaaaatctaaaaattgctggtggcaaagttttttttttgcgcggtttatcaccacaaccccccttaaaattattttttcccccgaggaaaatattcccgaaattttgttgtttaagcttgggccctcctccgggtgggaattgaagtgactaatcaaaaccacacccccttggggggttagggggaggctccccccccacccaacctcaaagggggttctgtcttaacaaaaaatagttggacaatggtggatattaaacccccattgtaaactgttcaccccacattagttaggtgtcccttctcctgagcattgataaaccatttcctaattgtgcgatctttctttcggcacccattttgttgtggggaaatgcgactgtaagtgtcactaaatgacttcttcctcccaaactcttaaacccgcgagaggggactttttgcgcgacactttctaatactttatttggtttcccctctgattctaccaaggcgcctaactcttttaatacccaaaacctcttatttttttttatataaattcccctgtgtttctataaaaccctaatgaaaggacaactcctcgtgttctacgtggatcccacccaccg

SEQ ID NO: 33192 - DNA, 995 bp, Glycine max
  unsure (1)..(995): unsure at all n locations
acaacacgaaggaaacgatgaacacaatcaagacgatgaagcaaggcatacgaagtgcacggagcggacactaacaaccaacncaacccagagcccccttgatggaatcggtcagcacacgcccccaggggaaaaaaaaaaagaccgagagcaagccaggccaaactagggaaagaaagcacttttgtttatggtaaaaagaagagagaagaggaatcgagaggacggtggaagggctaacaaaacaaagaaacgaacacgaaggagtaaaaaggaaggagaaacaaaggaaaaatggacctgagagaaaaaaaaagctctcacaaaagggaaactataggggaaggaataaagaaaaacgcaaagaaatgaaagaaaaagacaccaacaaagccaaggaaaggaaacgacaatggggcagaaaaaaacacgaaagaaaaaaacaacggcaaaaaaaaaacagcgcgataaaaaaaagaaaaaagacggaaaaatggaaaaaagcccagaaacagaaacgtagaaaacacaaccctgagagacaaaaactaagtaaaacgcgaaaagcaaacacagcgaaaaacagataggccaatgacaagaacaaaacattcgcgaaagaagaagacaaccaaaaaacctaaagcaaagtaggaaaaaacaagaaaggtagaaaagaaaaaccgaaaccagccagaaaaaccggagggaaaaaaaataatgtggcgggacacgaaataaaaagccagcaaagacggaggaaaaaaaacaatagcctagaaagaaatataaaaaaaagggaaaaagagagagaagaaggaaagaccacatggctgctccataaccgaagagggtagaaaacacaccggaagaaaaaagagagacacctcaaggggcagcgaagaaaaacctaaacacacttaagggaaagaaggcgaaatcaaaccgacggaggaaatacgacagggaagcgcaacaggagcagagacaaaaag

SEQ ID NO: 33193 - DNA, 842 bp, Glycine max
cgggaaatgaattagtgcatgcgaagcaaaactaagtgctctgaggaaccgggagcacccacgaatctagcaatttttgattactgaagcacgctgcaatagctagagggtgggctaccacttctacatggtggctgcaggagcaaactaattcaaacatatgtggaggagctgctgtcaaaactcaaagacgaccacattgctttgcaggatttcatgggcaacaccgcctttccttcactgttgatctgggaacatggaaattgttaaattattgatggatagaattcccacttgccacaaaaaggggtggaaatgattatccccctttcttttcttgattcaaggaaatagaacttggacggttatatcaatgtgccaaggatttttcacacaagggacaataaatgtgtttttccctgttaaacaccggcctttccttggcttttttgttaaacacctctttaatccctctctttgaattttaataaaatctttagcccacattttggcgactttttttttattatgcctaaagtacttctgatatttatagcataatttgcttttatacgtttaaaatacctcttttcttttttttgtttcaggaaaatttatttaatcttttttttcttataggcgccaacccaaaaatacttgtgtttaataagtgttctttaataaaatggctctccaagatatttttttacccttaaaaattaaaaaattaaaatttacccccccatttaaaatgaactctttggttgttaatttaagaagatgtttttttatatatacctccttaccccccccaccgtattttttgggccaaaaactgggcg

SEQ ID NO: 33194 - DNA, 586 bp, Glycine max
agctttaatttatttatactattctctctttgaaacagcttctagtcaaagctatatttaatattctcttcttaatagatttgaggttctttcttcatgaaatgaaaacttggtcttctgtcctgatcttgttccctttgcattttctcttttaatatttctttttctggtcacatacagcaggtctttgttttcatttaattcttgctaatcaaaatttcaatcttttttggctgaaaacgctcattacaactttatatcttttgatgggtatctcttcataggctagtgaaattcaatgtgccccattctacaattaatttttaaatatttttattttctgattaagatttgtgactgtctatgcatttgttggagacttggagaccctcctgaggtcttgcataccccaagagccatgcatatgaaagtcccatactttaattgggaaccgatgggctcaaatttgggtatacctgccccttgtcccttgctaataaacaaggtgcccttacttttgaaggaccaagggttttaaaaattctggcatcctggttttttatttttcgaattggttaataaaaac

SEQ ID NO: 33195 - DNA, 275 bp, Glycine max
ttatgaataagtttaattagtttgtcatatgaaaactttactgcttttgttctcaactagttgtgcatttcttgttctcaataacaaaaagttcacagagatttataactttttttctgcattgctgtatttaattagagattttttctgtaatgtaacagagctatttaattaggtactttcaacatgtaacacagtacctcattgatgtatttgggttggacagccctaataatctatattaacttcatcaatatatttttctcttattaaaa

SEQ ID NO: 33196 - DNA, 435 bp, Glycine max
agctagttataagtcgtgatgttaatttcatgaaagaccaaatcattgaaggcattgataaggtggagaaatctacacccaaggaagacaatggtgtggctgattttgaaccaactcatcagcctattcagaatctgaatattgatgttcaaaatgatgttggtgtccaacaacctaaagatgaagtatatgttcctgttgatgatgaagaagaggagcatgacatgtcacaagatgaaaatcttggtgatgctactgaaccacctcaagttcaactcaggaggtccaacaaggagagacaaccttctatgaagtattcttttaatgagtatgtgatcctaatagatgaaggagaacctgattactttagagaggccatggaaagtgaagaatagaaaaagtagctagatgtaatcaagtttgaagcttgttggg

SEQ ID NO: 33197 - DNA, 501 bp, Glycine max
  unsure (1)..(501): unsure at all n locations
tactgaaatgcagactaggcaagatacaattaggtgaccaatattgtatttatattattggctaaattgttagagatttatgttgattgattgagagactgatgcgttatgtctcaagattatggtgcccaatgtatgtcattttgtcacatttactgtcttttgtatattttagatctacaatgatttaaacactaccaataccataatccattactatctcagcatagatttctaattaagatattaattattattttgatcaataatgttttagaaatttcatgattcattttaataagtactcagaaaaaaagaaaaaaaaaagcaaataatcaaatttattttataagttaaaatcattttatgtacctcaactctagaaaaagttagataaaaaaaaacttctctaacagtggaagtacttatgttaaggtaaaattgcacttggatccctaatntatttcatttcggattagtctccctatatttaattacaat

SEQ ID NO: 33198 - DNA, 228 bp, Glycine max
agcttcccatgagtctccttacattaaaagatcttcctcttctgggggaagaaaaccatcatcctccacttcactagaggaactatgagaactcttagatgactcactatccacctctccattctccaacataatcatggtccttttgttaggacattgggatgcaatatgaccccttttccaaacaattaaagcctttaatgggaactattgtattggggaagggtt

SEQ ID NO: 33199 - DNA, 558 bp, Glycine max
tagaagaatagaaaaatactaaattacaaatgctcatggtaggtgttatggtgaatttgcccgagatcattttctattgaatggaggccttcaaggataggttcaaccctaagatgaagaagaatcatatttctaatggaatgttcttcattgagattctaaggctagctagagtggaggtttccttgatgtagccatcatctagagccactcaactaaaagaggaaacctttgtgaagatgaggattattgaaaaattcctaaaggatgtgcaaaagcacataaagaagaaagtgaagaaggaggtgattgagactcctctatctgatgcacatcatattgtaggaacttaagctaatcctttggatcttgagtttggagaatcttttcaacagacgtagggggaacaagccaaggcaagtcaacctagacacaagttacccaccaaaagataagacctcccttcatatgttgacaccaaaaccccaacctcaaccaaaaaaccaaaaaccaacctctatttaccccataaagagaaagggtcatactctaactatg

SEQ ID NO: 33200 - DNA, 540 bp, Glycine max
agcttcttatccaaggctcatcttggtggtaaagctccttcttccatggcttattccctagtggacggcgcctcctctcacctcttctcctttgtcttccgctgcatctccatggtgtaaaatcaccattaaaggacctcattgaagctcaaagatccagcctccatagaagccccacaagcaagcttccataaaaaagcaagagaaaagagtaaagaaatagcttcagatgagggaaaagaagtgtcataccctttggtaccttccaagaaagataaggaacgccacctggcgagattcctagatattttcaggaaactggaaataactatgccatttggagaagctttgcaacaaatggcactctactcaaagtttttaaaagacatgttgacaaggaagcacaagtacattcaccaagaaaatataattgtggagggtaattgcagtgctgtgattcaaaaaattcttccaccaaagcacaaagaccctgtgagtgtgaccattccttgctcaataggtgaaatcacagtgggaaag

SEQ ID NO: 33201 - DNA, 929 bp, Glycine max
  unsure (1)..(929): unsure at all n locations
ctcgacatggtatctggtctnatattntaatacaaactaatttngacacttatacttaatcttatttacaaaaaataacggggnnaagcggnnnnatgacgtcctgctttgccacagcanatanananactcagccccaggaatgcgagtacaccggccaatggtggaaaatgctcacaactttgcagctctgataccaggaagagcggccccctaaagagtagggtcccgagaagaaaactcaatcagaggaccgcccagcacgctctggcatccaccaaacacgggagaacctttgcgaagcacagcatattctggaagtccccctcttagaacccaggggattcatctaaacacccacccgagaagatcatcccccgggtgggcgcaaaaagggacggaaaactcctaccgcaatggcgaacactagcatggggacaataaagcgcccctgaaactctgacaccccaagcaaatagggaaacatccgattcacccacaaacactaaaccctggggcgtccgtagagacacccatgaaacgtaaaaatgaggggactaaccacataacagaccacgggcgaactcacaaccactccaaaaatacctggaggggacacaaaacattaatgctcacacaacagcaaccacaacgacacttatgggcacagtaccctaccaccacactgacatgatggataacaaaacaatctatgagtgaatacactagacgacctacacatcagaagaatgcaacaaactctgacccacacattataactaataatagtgaaaccaatcgactatatgggccgaaccactaaataacaccaagatatatgttcctcgtcaacaataccccaacgcatctacaaaacaactaatgcagacaccccactctcggaacttcaaggggaacaccacacagcg

SEQ ID NO: 33202 - DNA, 479 bp, Glycine max
agcttggaaagatgcttcaatggttgaaaagaaagagggagagaaagagagagggggagcacgaaattgaaggaataaaagagggagagaagtggaactttgaagtatgtctcacaagactctcattcatcaaagttacaacaagtgttacacatgcttctatttatagactaggtagcttccttgagaagctttcttgagaaaacttccttgaaaagcttctttgagaaaacttccttgagaagctagagcttagctacacacacccagctaataactaagctcacctccttgagaagcttccttgagaagattcctaaagaagctagagcttagctacacacaccccctataatagctaagctcacccccatgcaaaaatacatgaaaatataaaaaaaaagtccctattacaaagactactcaaaatgccctgaaatacaaggctaaaaccctatactactagaatggccaaaata

SEQ ID NO: 33203 - DNA, 304 bp, Glycine max
actaaattcaatttatacacaagtcttgcactttccatattggtacaactctctccatcaatgatcaccatgaaaactttgccattgatcaaacatctagtgtggaaatttttttctcattgactttcctccatagacttcaatagatggccaagtaaccgccaaatcatcaacaattctccctccagtgttttcttcacttcctcctcataatcctcactctcttctccctttttaacttcagactcactaatgtactctccatctctaagaattatggctttcttgttagggcactcatatg

SEQ ID NO: 33204 - DNA, 446 bp, Glycine max
agcttcattggagcttgtatgcctatgatcttcttcatcaatggattcctttgcttcttggaagatgaatggcaacggaatggagagggaagggagagaggagacgccacttcaaggagaagatgagtttagaaaaagctcagcaccataggaggctatggataagagctttgaggaagaaggaggtgaatgaagggagaggaagagaagagcacaaaattttgtgctctaaaagagctttgaaatctgaagtttaattttcaaatgatcaaagttcaaaaaatgcacacacatggcctctatttatagcctaagtgtcacacaaaattggagggaaatttgaatttctatttcaaatttcacttgaaattgaaattgaatttgtggagccaaattttggagccaaaatttcactaattatgattagtgaattttaactattgttc

SEQ ID NO: 33205 - DNA, 778 bp, Glycine max
tgatgctcatacaggacataaactcgctgttacaaatgatttagacacatatatatgacttcacattattgaatactgatatcctccagatcaaatcttttagttgcaggactggttccatattaatgtgaatcaccctatgcagcataaccctaaaaggtttaaattcttatatggggaccatcgttttttccaatcacgggatcaacgagaaccagtgttctctataccccatctggtataatacccaacgataagagccgtggtgcttttcttgtcttcttcaacgaagagggagaaggtgttgctaactcaagaggaggaggggagtctgttttttcaacccctctccttctaccccaacttctaaacatgccctatgtaagactactctctcagaggggctcgtcctatcaccagtaaaaacactcccacgcccccactacatcatctaatcgtattgtcctcgcctactaatacaccaacgctaccaccccttttatacccctccaacatcatctacaccattcatacgacacgcaactctacttcctctcgcacctttctctcgcgcttcatgatcactatctaccacacaatattctccaaaaatctacatctcccccccttctctatccctccccataccccccactatatatccttccagacattctctctcactttaatattaacacactctcctttctttctcttttagctaccatacctctctcatcaatcataaatgccaactcctcaaatcctacgtaacccg

SEQ ID NO: 33206 - DNA, 359 bp, Glycine max
agctttacatggtttttattttgtgaagcctacattcagattttgatcatctacgtgatcaagtccttgttggtgatcaagtttcgtcaatggactctctagttactagacttcttcgtgtgcccatgtgttgaaagatgaaaacttaattgaagtcatggaaacatcagccatggttgcacctcgtggaagaggaggaagtcgtaacaacagaggaggccacggtggaaggagttgacgtcctcaatgcacctagtgcaagaggatgggtcatactcaagaaaattgttactccttacatggcttttctgaccaggtagcccatgtatctaaatccgaaaaatgagagaataagtttt

SEQ ID NO: 33207 - DNA, 495 bp, Glycine max
ttaacaggcaatagatacataatcaagtcatagtagtcgtgaatgataagacattcaatataaaactgattttgtgtatatgccattatgaataataactttctgaagacaatcaaacaaaaagcatctcataatgtaaactagagaaactagagaatttaggcactaccatggaaggaagcgtatcctgatgtcaccatccccagttgcagaacatgcaccaacttcatcaacaacatatgctgaggatccaacaatgggaccatcacctaccctgtcatcaaagaaaaaaaaaattcaaagaaaattataaaagacatcaagagaacatactaagagtaatcgatatatgttgcatcaacaatgtgcgttgtatatctgagtatatgtacttgggaattgataaaagcaatttgtgatgggctaaatggaaccactccagccagtgagatataaagataggacactctaattgcaaactcatccttctattct

SEQ ID NO: 33208 - DNA, 194 bp, Glycine max
cgcagcagcagctttgacaaacatgttggctcttgtccttgagctccgatgtgacaacgcatatgaataatgatccactgaacgaaatagctggtcagcattataaagtaaatatcttgcctgaaacatcaatttcaataagatgtactaagacatttttaaaggagttaaccataatcttgtgcttgcagtac

SEQ ID NO: 33209 - DNA, 891 bp, Glycine max
  unsure (1)..(891): unsure at all n locations
agaaaaataaaaactaattaatataataactagaaattataataatatgagtaggttgntttaataagtcagtgaaacgcgagatctcctaagtatggtcattgcaacaatgnntggattcanacccataaatntgaacatgaagttgataagactggggtagtccaatataacaccaattgggaacatacgaacttgcagacgtagaatacttatttatgaatcaaacgattggtcacagtctaccttggtgaagatataaagtggtcggtcataactagtcaggtcgaccgggcaatatcgccaaaaaccaattttgattttcctaagactcaggtaattatggcttctatttattttttntttacgattttaatcttcatataaaacaaaaattcacaatttaaattcagtcctcaatcaaataaaagaagaatatgtngataattatacaacatcttacttatcagataactgtgtctnttacaataaaaatttgatgaaattatcataatatatctaacacatgtataatatcatgaacaatgatacaaatgtttataactatatctngcatatgtttatttgctttatttctgacatttaattaattgaatatttttaattatacattattccccacatcatttataaattgatacgcatgttgttctgaaaaattagacattataaattttttgcatagtagacaattcagttaaacacaaaggtagaagtccaaccattttattgaatataaaatcttagtacaaatttggataagataattgaacattcggtcagaaaaaaaacttatttacctttaaaggctaaggaggagaattaataataaaaaatgagggcaagtggaagagggcaaataaattagag

SEQ ID NO: 33210 - DNA, 541 bp, Glycine max
ttttacaccttttttttatattaacatcttctaatgacggacaaaatttataaatacacattgccacagtgaagcaagtggggaaacattgaaactcctgactagattataggaaataagtcactatagagcatgtctaaatcaacttttgaaaaataattaatttgatggacaagggaatagtatttgaacatgaacaaatagccctatatatctgattcatttatttgactacaattttttggacaaacacatgaaaatgcagctactttatacctgctcaatagcactcacaaggagtcgacatattccttggtgacaatactgactgcaagttgcaattagaggcatctctcctactatagatccatgcaccctgtccagaaatgaaaaggcttgagaacaatgcaataaaaacatacatagtatttttacatattaaaaaagtaaaaatccaaccatttacaataaagtcagaaaccaggattttaaaaacatcaatttcttcccttaaattcgtgaagaaaaatattattttaaa

SEQ ID NO: 33211 - DNA, 783 bp, Glycine max
cccactgtctcatatgagcccatctttaggtgacctatgactctcagctcaagctttgtaatctcttataccccttaatgcttcctgtgtacattgggtcttcaccttcccaaccccgagtaataatacctccttggcccccttcctttacatatatcccatttccttttccccccttgggggaccttttttcacaaaaaaagaatttattctcttgttttaggcccgtggagcttgctttaggcaccacagtgtgtggtatcttctgcacactttatcttctttacccttacttttaaacccaggaggttgttcacaaacccctcctcttgcggggaccttgggagagggccgttctcctccctcttgtttggggccctcttttttgggagaaacctccccaccccctttggttttccccaactggggacacaccctgtgaaaacccccccccttttggaggccctaagaaccccctgtttatgtggcaccctctcggctttattccctgacccccttacacgggggaactggtggggaaaaaccgcaccaattgtttctttatactccactcccttctttgggctccaagtcttgtgcgagctcttgtcatcatggtcactcgccaaaagaaatgccaaccccttgcatctcttggctcccttttttatctttgcctgggcttgcccggatgtggcagctactgaactttttaacctcaaggcggtgcttttttttgtgtttacaagccaagtgcaacccctctgccccctttttccaatc

SEQ ID NO: 33212 - DNA, 207 bp, Glycine max
agcttcctccgtgccattcctgttaatgcaaacattcggaaagttagttgttgtgggacattactcttacagccaaaatggcatataacctcctcccataaatacaaacatcaatgtaaatttagagcaagcttatgcgcatgattccttacaaacgttcacttgaggaagatatcctattaaccgagagaatgcacccatatacaa

SEQ ID NO: 33213 - DNA, 521 bp, Glycine max
tgtcagggtgaggaggtgaatagcagtaaggatatgcatctattcttcaatgtaggtcattcaaatgagaggtctgtgggtagaaaggattgaggttgaggctgctcccacgtatgatatctaaaatggactaccataacatattcctgtgtcagagctacttatgtagaggagtattttacaaaactcaaacggtaaaaacaacattcagggggcaaatagacaaagctgatacaactggtatccacacatagaagaattcacacaccagtgcacatagactcagagagagaagaaggaaccagctattatgtattgattactgaaaatagagtctcagcactctcctctacaatgagtgtggccacaaaatacctctgcattatctactgcaccactatttataataattaactcctagctccctaactcctagcttcctattacttctagaattcagtgtagtactaggccccttattcctagcaaaagcatagcaagaaataaatcattaccatcta

SEQ ID NO: 33214 - DNA, 677 bp, Glycine max
  unsure (1)..(677): unsure at all n locations
cccacttgatacgtagcatcgccccgggatccttaagtcacctggcaggctgcagccttggccactaaaagcacttttttcttaaattccatatctccttgcccagaatcccttgacaacctttttactgcaatctcttgtccgttggaaagctgaccctgaaaaaaataaaaaaaataaaaaaaataaaatatatatatatatatatatatatatatatatatatatatatatatatatatatatatatatatatatatatatatatatatatatctgtcaaatatagtatcttaatacaccatgttttgatgaaaaggttatatttatctgaatgaaaagtgtcatcttactctgtaaacagctccaaacccgccttgtgcaattttattacactcagcaaattcatttgtagcaactcttatagtgtcaaagtcgaattgcaatgactcagcaaatgaaaattcatcctcattaatatcttctcttttttcaccctcataaggacccgggggaaaattgttagtcatttagatgcgagccataaaagataatattgagagatatattgacataatttcgccaaaaaatatcccaagaaagaggcgccnntgggttcccttttttttattttttttttaaaaaggaatggggaaaaccctctttttattttatta

SEQ ID NO: 33215 - DNA, 816 bp, Glycine max
  unsure (1)..(816): unsure at all n locations
ttatgatctttgtgccncttaatcaagtggcttaagccttattctgattcatattcctgctttattcttgacaccctttgacagcaattacctgttcattggaagagccgggcccctggaagcactatcatttcacatgattaattaaatctttgtttggacaaagttaccgtgatatatcatactttcctgaagaagtgatatttatctgaatggaaagtatatcttacgctgtaaccgctcccaaacccgcctttgcaaggttattagaatcatccgattcattttgagcaactcggatggtggcaaaattgaattggcatgactcatcaatggtaatttcatcttcttgactatcttttttcttttacctaacatggacgaggagtcgagaacccgggtacaattagcgagtatttaaattgaaaaagaatgcggaaaaaaaacattcagattaatttcaataaaatcaaaggaatttctaaatggtttcccctgttcctagctccagctaaaaggatttgcgccacacacgcctccgactaccggaatttatgacttttgctgcaaagaatcctttctcttttttaaaaagccctgcagggtgcaaagtcattgggattatgtatactttactggcctttaaatctagacatgtatataacatagacggtgattccagttgaaccataacttctttcctttttttgtgggattccccggggaaatgcgaaaaaccatccttaataacatgcaccgggattttttgtggtgatagtaggggggagctcttctggacttgggaaaaataaaatc

SEQ ID NO: 33216 - DNA, 308 bp, Glycine max
gcatcctaaaaaaacctgaattgtttgcagcccagcctcgttacaagcctacaaaagtccttcgaattcagtttgtgtgttcttgactgtatggcatgagatgaattgcaaagattgagacttttgttagttgtggattgttgaataagcctaaacacttgtgcttgagggaaacaatgactgtgaggatttggttaacgatccttccttgatatctgtcatgcttaccagcttatttcagctgggttccttaataatcatgttcacatctttgaaaagctgcatgtcttgtgagaatttgttgattg

SEQ ID NO: 33217 - DNA, 415 bp, Glycine max
aaatttttccaaagatgcagggcataaaatctatgaggtgcaccaggcatgacttcttgcaaagctggaataagtccctgaaaaaataaagtagtccataacttatgtcattaactgcaattaaatccctaacttatgataataattgcaaatcatttcatgtcataccttttgcatgtctgacatgaaattccacccattctgtacataatccccaagatctttatgcaacaaagttaaaaaacatttccaattttctttgttctccacgtctaccacaacataagcaataacaacgatgtggttattagcatcaaccccaacagtaaagagcaagtttcctccaaatgcactttttaggaaacatccatctagacctatgaatggtctacatccagcaacaaaccccttttta

SEQ ID NO: 33218 - DNA, 526 bp, Glycine max
  unsure (1)..(526): unsure at all n locations
agcttcctcggtgccattcctgctaaggcaaacatttggaaagttagtttttgtgggacattactcttaaagcaaaaatggcatataacctcctcccataaatacaaacatcaatgtaaatttagagcaagcttatgcgcatgtttccttacgaacgttcacttgcggaagatatcctattaaccgaaaaaatgcacccatatacaatcaaggcagctttgttacctagattatttacacgtacttccaaggtgtatttgttacttacatcacacacatctccttggctaaattcacatacatgcatactccaancatttggggtaccaaaaattgcacatgtgcacatnttggtatttctaataccctatactaccccaacttcatgatgaatcttgactatctacacaataaggtgctacatttcatgccctttttaagtttttgcttcctaaagccgcatgcaaattcaagcttattttcctttgctgactaaaaatggattcaaaatatatatatatttttt

SEQ ID NO: 33219 - DNA, 462 bp, Glycine max
  unsure (1)..(462): unsure at all n locations
ctcagcttgtggccttggatcttcttcatcaacggagtcctttgcttcttgaagttcaatggaagcggaatggagaaggaagaaagatgattggagatgccacttcaaggagaagatgagtcaagaacaagctcaccaccataagaagccatggataagagcttgaaggtaggagaagatgagtggagggagaaggagagaaggagcacgaaatttagttcctcaaatgaggtatgaactttgaagtgtaattctcaaatgatcaaagttcaaaaaatacacacatatggcctttatttatagcctaagtgtcacacaaaattgtagggaaatttgaatttctattcaaatttcacttgaatttgaaattgaatttgtggagccaaaatttcactaattatgattagtgaattntagttatggttcagcccactaatccaagatcaagtccaagattctcca

SEQ ID NO: 33220 - DNA, 534 bp, Glycine max
agctttgagccaaaatcctgactcactataaaccttgacccagggtgagaatgccaatccctaccctcggaagcaaaaaaagaatagaggggaaatttccaatcaaagaaaaagagaaggaaaatttccaatgaaagcaaaaaagaaatgaaggaaaattccccaatcaaagagtgggagaaagcaaaaaaaaggaaaagaaggaaaattccccaatcaaagagtgggagaaagcaaaaagaaaagaaaggaaaattcccaatcaaagaatgggagaaagtaaaaaaaggaagaagaagaaggaaagaaagctcctgatcaaggatcgaaagaaaccagaagaaatgtgcagagaggtctttggaccagacaatatctgaacagtacagaattgtcaccaaatgaacgaaaaaagaaggaaagggaaccacgacctaaaataagtctttctcctttggataccaaccaaaatcccgtgcgctagcgacttttttttctcgccccgcactagacaaaaaaaccgaaaaagaaaaa

SEQ ID NO: 33221 - DNA, 348 bp, Glycine max
atgcatgggatatcctgaagaccactcatgaatgaacctccatagtgaagatgttcatattgcgactattggccacggattttgaagatacgattatgaaggaggaagaatgtattcatgacttgcacatgaacattgttgaaattgacaatgcttgcactggctagtgagagaggatgacagatgactagctggtgacacatatccttagatacttgcctattagatttggcgtgagagtcactgcgatagatgaggcccaagacatttctacttgagagtggatgaactaattgtttccctactaacctttgagctaagaccctcggatggggctgaacacaagag

SEQ ID NO: 33222 - DNA, 492 bp, Glycine max
  unsure (1)..(492): unsure at all n locations
tgatttgtgagttgattttagctttagtttcactttggttattagtcaattcattcaaggaaacttccaaagaaaaaacgtccgatcgatnttttttattantttatttaaagatattttgattattttattattattttgcttttttttttgtttaaccgaggttacaatgtgaacgatcggttagattttgttttaacagtgattaaacaagattacaacgcanataatcggttgaaattcatttcatcatttattaggcgagaaaacagcttaaatgatcggttaaatctcattaaaaacggaagaaaaagaaaccgaaattgaacgaaataaagatgaaagccaaaaaaacaagaaatgaattaaaagtctcggatttgaaaacttacccgttgaagaacggagaacgaatgaagaacggacgaagaacggaggaaacccttcatgaatntgcttacggaaacatctcgaaagcgttacggaagcacc

SEQ ID NO: 33223 - DNA, 440 bp, Glycine max
cttcaggttttccatgttattgaaatgtcatatgaatttgaagaaaactttcatctcaacagaggacaacgtcaatgtcaatggataatagaatgacggcggaaatgaaaaaaaggtcagactttcaaagtgtaggtgtgttttttttattcttatgctgaatataaatgttattgctattgtcaattgattagatttcaacgtataagtgttatttgattccgaaagtaatatctatgttttttgcttctcataccctctctttaatttggagtatatgcatgcatttttttttctttattctgcatgttctatcattactcataatatacatgtttttgaataagtaggccctgcgatttatgtttcagagacttctaattctccatgtggactttgacaacaacaatgttgaatcatcatgaaaactgccttggaat

SEQ ID NO: 33224 - DNA, 735 bp, Glycine max
  unsure (1)..(735): unsure at all n locations
actgactcattgcatggcacngtcacactattaagactggcacgtgtggcgtcttacgtctgggatatgaatgtggcacgtagatctctatacccttagacgccttgctgatggcttcttcccgttccaagctttcgatggagaactgtcttttacaaacttagttggacatctgttgagtatgtcaacatcaatgtatactgcttcagcccacaatgtgttatgtagaccttctcctggcatcatttaacattccaaactggcgattttttttggacctccttttgtgggagaaatgcactgtgagtgtgaaaatgcctcatcctccaaaacttaaactttgagagggcttttgcgggaacatttttagtttatcctttcccagaattcaaacgccgtggttttgatcccccgccttgaagtttttttaaaagccctttggaaaaacacttcctagaggggaacccgggcccccgtttgcgcccaggcaaaaaaccgtaaaggggggaacataactggtctgccccttttgaaagaacgggtgttccaaaaaactcaaaccttttgtttctttgcggaaaaaaaaatggtttttttaaacctcccctttgttcaaaggaaaccaacctttctataatccacccccacctttagggggtggattaatttccctaagtttaccccaccctttttttgtttttttttcctttccatccccacctaaaaacgattaag

SEQ ID NO: 33225 - DNA, 217 bp, Glycine max
tttaatgaaccccttcgcttcccgaacatcaatggcaaccggaatggacaagggggaaaggcgattctagatgccacttcaaggagaagatgaatccagaacatgctcaccactataggagaccatggatcctagcttcaaggtcttgaaagatgaatagactgagagggagagaggggcgcaccttacttgagacttgacatacttaccaactttt

SEQ ID NO: 33226 - DNA, 800 bp, Glycine max
  unsure (1)..(800): unsure at all n locations
cttatcactccacccatatnntggcttgacattcaccagtcttattccaccgaacacaacgtcaacaaattcttgcacctcggattcaaaggtttctttgaatcatttggcaatgattcatccaaaggaccttgtgcttgcttgaaagactttgtgccaatttcacaaattatatcctccaagtgatctcacatttttacatcacacggttcaaattgagacccactctgcatgtgtgaaaattcaccacgcaatatccgtgtcgtataattcctgttaatcccatcacacaacagatgctcgcgtgtgatagcaattttgtcgccctctcgtgctcaaacaatttttgcgtggacaatatatcttcccggttttcctccggacaactttttctaaagacaattgtaagaactgttcctgccttcctattcgcggactcagcgattttattatcgactttgacctctaaatataccctggatctctgaactattcatgatgaatctcgtttttattaagggtggcccttccattaggaagaccttttttggagatcatgcgtcaggttatttattgttaattgatgaatttcgaagctttcgattggctcaagacccacatgaaacgggacattatttctgttatcagcatcgcctaaagaacaatggaatgcctgtgcccaattaattaaacaaacaaatttgtcaccttaggctggcctccctaacaatatggcttccccacctgcccaacggacataaaagatgaatatatttttttgctactggtagcggaatttg

SEQ ID NO: 33227 - DNA, 583 bp, Glycine max
agcttgatttgcgagttgattttatccttagtttcacttggttatttctcaactcatttgaaaagaacttttaaagtaaatgtccggttgaaatttgcctttttgatgattaatcgaggttacaacatgaacgatcggttgaattttaatttgaaggcgattaaacaagattaaaacacaaacgatcagttgaaattcattttaatattgattaagattacggtttaaatgattagtcgaaactcgcttaaaatgaagaaaaagaatattgaaagtagatgagatgaagatggaaacatacaaagcaagaatggaaccctaagggtgtatagaatgaattcaaagctttgaaatggaaaactaaccggttgaagatcgacaaacgatgaagaacggcgaaaaatgttcaaggaattgatcacggaaacgtcacagaaatgttacggaagcgcctcggcccatgatttctccttctttcttcttctcctcactaaatttaagtgaaatctgaatacacagggtgttgaacccctttcccttaaccccccacgtccatttttataaaaaatttgagaggagggtg

SEQ ID NO: 33228 - DNA, 863 bp, Glycine max
  unsure (1)..(863): unsure at all n locations
naaactgctcgtgcatgcataagcgacactataaatctacgcgtgatgcgctagcactgaggacttcccaaggtgtcttcctcggtgggnggngtgagccggccaagacatttaactcactttgctggataatgcggaggaactcgttggcctcctcccgtgatacctctttcttgccacagccctctcttttctctggaagatccttcctcggaacatcctcatcccccgcggggagcgctttgacattttgggccttccccatcctagctattcctttattgttagcggggtggatcagcaggctagggggtgtaattacaccacaactgtggctcattgccgtaaggccgtgagaattggcactctagggtgagattgaagccgaaatcagaatctttgttcctccaccgctctgagggggatacctgcaccgaaattgggggggggtgctcttatgaaacagaaagaaaaacccctcaccctcgcacgggtggggcaaacatttgggagcccccctccggcgaccaccataccaccggtttgggctttttgggggtgcctaactgcaacgccaccccccctaatgtacttggctcgttccctccccgcacaggctttattctgtgtcaccacacatcataccattattttgttggtgtgtggatcccccccactccaaccaaagtattcgcgggcacccccccgtaacaacccacttcttttgtttatactataacaataggggcttcaccgaaccctctgtctccctatctcatatatgacccgtttcgaatcctcctcctttcttactatcactccgcatctcttcgcaacgtcccggtatcgcaccgtctggtccc

SEQ ID NO: 33229 - DNA, 290 bp, Glycine max
tacctgctctttggtttagatgtgatttatacatgaattaggacttgtatgatccaattttggcgaaagagaatgacggcattagggatttctaaatctgcctaacttgagcaacagaaagctgtcgtattctgtgcatctgaataagactcttgctgcctcaatgggaactcatcgttcggtagaggaacggaattacatattggggtctggacatttataccacatcccgccgttcttcccgtagatggatgttctaaggatctcctttaaagttttcaactcgatcc

SEQ ID NO: 33230 - DNA, 92 bp, Glycine max
cgctctaaatttacattgatgtttgtatttatgggaggaggttatatgccatttttgctttaagagtaacgtcccactggtaaaactaactt

SEQ ID NO: 33231 - DNA, 437 bp, Glycine max
  unsure (1)..(437): unsure at all n locations
gcanntgcaagcttagggtaatgaaaggatgttgtttaagtttggattgaattttttggcagcccctcaacagaaaactacatataagatatgaaggcggaacaattagagaaactagcaaagctggaagattggtgtaagcaaattcttattattactttctcgataaggatatgcattttgccaatatttttaagtacatatttttttatactgaagaaaaaattaaaattgtaaattactgatttctttatattcgtaaatgtggttcaaagaccatatcagcattaagaacaaacatgggctttagcttcatttgacaatttacacttgaaaaatatttatcaacccaatatcccaattagaggaatgactaacatttcaaagtgggcatggactccaaatattgaatgttattactggaatattttagattg

SEQ ID NO: 33232 - DNA, 974 bp, Glycine max
  unsure (1)..(974): unsure at all n locations
caccataagaaccgatttanacaacaagaaagaaatcacaagacaatgcaacataaaaantaannnaaaagannananaagaggtatgactcatgacaagcgacactaanatacanaaactcgagcgggaggacagtcacagggggactgaaggggagcaccattcttttctaacatggcgaaagccacagaaacagaagacaacacaacaaaagcaggcaccaacacaacaacaccaggcagggaatccacacactcgcgcaatgtgcgacagaagacacgaggcgacagggagaaaaacacatcaaattggccagaacacggacaaaaagagagaacaaatgacccactaccatcgaaaatcaatgaaccaactctaaggcaagagcagcactaatataacgagagagctcgcaacaagaaacggagagaacaacgccacaggtgaaccaacaacacaaacaacccaaaaatgggggagggggaaaaacgggcggaaaggaaacatccacgcgggaaaaacagaaacggatcacaaaactggaacaaccaaaagagaccacacaggaatacgtaaaaagaaacaatagacaaccgcacagatacaacagacacaaggaatccgtaaggagagaaacacatacaaaacaaagaccatttcctcaaccatggatggaagaaagaaaaagcaaaaaacagcgagggttgacagatactaagacacccgaaaaagaagagcggaaaacgacaccgaaaaaacaaacataatagccgaacaacacacagaaacataaaangtacgcaagccaagccacaaaaataaaataaaaaaacaatggnatgggaaacaaacaaacgtactaaaaaagggaccaaaaaacaaacaagaatccaaacagccagaaaggacccccgcgagaacaaaaaaaaaaaagtgacaaaaaaacggactaaaacgaaaggggcgcaacgag

SEQ ID NO: 33233 - DNA, 549 bp, Glycine max
agcttgtctcagcgtttatgctatacagagaccaacatgttagctatcatcgccaagtacgaagaaaagttgggtctaaccacggcccacgagcatagaatcgcggatgagtatgcccaagtatatgcggaaaaagaggctagaggaagggtgatcgactctttacaccaagaggcaaccatgtggatggatcggtttgctcttaccttgaacgggagtcaagaacttccccgattgttagccaaggccaaggcgatggaagacacctactccacccccgaagagattcatgggcttctcggctattgtcagcatatgatagacttaatggcccacataattagaaatcgttaggaaacttgtatggtctcttaaaccttgactagatatgacttcctttttgaaataaaatgagttggtcccatgttcctactccaaaaaaaaagattgtgcaaatcaaatcactcctacatcttattcttagcatgcattttctttttttacccacttctcacggttgggttttttaaggaaaaacacctaactaaa

SEQ ID NO: 33234 - DNA, 980 bp, Glycine max
  unsure (1)..(980): unsure at all n locations
acactaccttacataatgtaatgtgaatgacttttctaanattggaattctaatcatatataatccnannnnatagaanannnannnnntttgattgatctccatgcatgccacaggaaaaanaaactccacatacgccgctaattgcttagacagcgcccaaattgttatatgtctgcgcggcggtcgacagaggagcacacaccgtagagactagtgacaagagcatactttcgattcatggccacatggattaccaggctaaccaaagcaactagtgtaccttcaagctaatatgtctcggctgatgaacatgaatttgtggctcctacatgcatacctgtaacgacaatagcatcactgctggcactaaatggctaggacttggaagccatctcctcaaaaaacttctcgcttagcaggggcattggtacaagggctcacccctagcaggatcaacaatacatcacccacgaaatggatgcctcataaaaacagtggaaaaaaacctgaccaaaaatctggaggggaggacaacctgccccaaaactcctgaatctcccccacatatttaaatagaccctctccccacggagaggcaaaacccccgaaatctttttaacgcgggcgggcgcccagaaacccgaatatattttaagaaaaacccccctcggggcgccacccacctgtggggggctggggcgaggggaagacactctctccccccccccccaaaaagaagggaaaactctctaatttttctccctcccatggaggggggggggctttgggaacaacaatattgtgcactataatatggggtggggctccccccccgcgaactgttataataacacaaatgatggtataacaaagttaatcactcgcacatatgtgccggcgggggcggaacaaacaagtataagtactacggtatactttccttcctcgtgcgctgcataggatgcgtggtcgaaacg

SEQ ID NO: 33235 - DNA, 344 bp, Glycine max
cagctttgatatattggggtgacttattttgtgattggggggaagataggatgtatctgtcgaatgagaaattctgatttcggtcttgtgttgtactatctggccggaccaccagagaaaaatggttgcatctgcttttggggaagaccatgctggcgcgtctggaactcgccttacagtagatgatctgaagtttcttttcatggtgtagactctaaaccactccttgcttggtcttccccatgatggatgatttgaagttttggtttgggtgggttggcatggagttaggatggttcttaaggaggagggtatgactgttttttgagtacctgctgacatcg

SEQ ID NO: 33236 - DNA, 146 bp, Glycine max
ctgaaaaacttaagctgtacttgtattaacattgcttttgttcaatgcagaagtaacaattttcttcagtcacatttgttgtttaggaaaatgaaagtttgtcttataaaacgtaaaatggggttcctaactaatttccaaacaca

SEQ ID NO: 33237 - DNA, 458 bp, Glycine max
agcttctctgttaattgaaagtttgatactatgcttattaagggagtatctgttaattgaaattctggcaagactattgttagcttcattgtagtgttgagttttggattctgttactaaattaagggagtatctattaattgaaatctctgttaattgaaagtttgaaacgatacttagtgttaaattctggcaacgctaaggtggtccctcgaacatggacaaattatctgttaattgaaattctggcttcatcaagggtgggtagtgggttttgttgctgccttttgagtagtgggttctattactagtacacttttaccctttgcagcttcatcaagggagggtagtggtgggttaacttgggtgttatcaatcagagttccaaatggctaaaatgaattcatccatgttcatggatcataagcctttttcattcttgcaataaaactcatcaa

SEQ ID NO: 33238 - DNA, 808 bp, Glycine max
  unsure (1)..(808): unsure at all n locations
aaaacaacacaanccaaaaaacaacgacaanacantaaaaacaaagaaaaannanaagatcagctgaaacaaaaaaannaagccgagagggcggggggaaaccccccacccctcagaaaaggggacaaacggggcaaacaggcggcagagggcggcccgcaccaccaacgaaaaacaaggaacccccagggaagaggggggcaatggagccaccccgggacaaagcagaggaaccccccacaggaccgagcgccccaaaaaaaaaaggaaagaaaaagaccggaaacagagggggggcgcggcgcgaaaacccaaaagcccaaaaacaaacagccccccacccggggggaaaaacaaaaaaaaacccaggggggggccgaccggaaaaaacaaaaccccaaggaccaacggaggcccgacaagaaaaacacccggcccccccagaaggaacccaaaaaggccccgcaagggggcagggggacaaaaaaaaacaaaaggggggcgccccggggggaaaaccgaaaaaaaacaacaccacgaaaagaacgggaccgccccgcggggggggggcgcccccacacgaggagagcgaaggcgcaccccggccccacacgagaaggaggggcgggggcgggcgtcgcgacacgcgcccgatataaaacgaacacaaaccgagccgaacgggagaggacagacaccggaaccgaaacggaccacaccacgacccacactcgacccacgacggcaagagaggcgaaaacgaaacagaagcgacacgcgacaggcaaccgagcacgggcgcgagacg

SEQ ID NO: 33239 - DNA, 824 bp, Glycine max
  unsure (1)..(824): unsure at all n locations
gcaccgcactgatacacgaacggtacgtacttaactaatcccgcaacgtaaacgtacgcgaactgacaacactggatccgagcacacactctantctcagcgcacacacgnnnntttgatgaatccgttggaaccccgggaacctataaaaacgacctgcaagcatgcaagcatgccttgccccttgatatattttatggacacatggccgctatgaaagacaaaatcattggaataaaatcagtggtgccatattttcaaaacccggactaaggcatacaacttcttatcataagttgaataaataaagggaggaacacttaactttacactaaaaaaagcaattggatggccttcttgcaacaaaacagacccaatcccaacatttgaagcattacaactcaatttcaaaagattattgaaaatttggcaacgcaaggaaagggggcattagttagcttttgcttaaagaataatgaaagcttctacttgttgccctccccatttgaaaccaacaattttcgtgagccacctcaatgaaaaggggctgccaaggtgctaaaaaccttcaaaaaaaaactacaaaaacttggtaacccaagaaaacctccccaccttgggcaaaaaaacttagggggagggacaaatcttgaaaaaaacccaaaaacttttcctcataaaaaatggactcccttttggaacttaacaaaaaaatcccgaaaaacccccaccatggggtgggaaacaaaaaaagccattttttcaaagaaagggcgtaaacaaactggctcttctcttaacccccccccaaaaacaaaatttcg

SEQ ID NO: 33240 - DNA, 344 bp, Glycine max
tttaatttgaccttctattaggaaaatggttatgaagaatgaaatttgaaattacaacattatagtgtaaaaaattgatgcaccaatatgcttctgtgtatgagtccagaagcaataggcagtaaaggatcaaagtggtggagagatatattttttttctcagaaaaatcaaatgtaggttttaagaaaaaaaatacttttcaaaatataagtttaggaaggtaggagatgaaggtgccaattttttctagcatgactattggggtaagagatggatgttaaaggataggtttagcgggttatttttggtggctaagaacaaattaaaagagctttagtgagaa

SEQ ID NO: 33241 - DNA, 223 bp, Glycine max
agcttctttgagaaaacttccttgggaaactagagcttagctacacacacccctctcataactaagctcaccttcttgaaaagcttccttaagaagatttctaaagaagctagagcttaactacacatacctctctaatagctaagctcacctccttgagatgagaagctagaacttagctacacaccccctataatagctaaactcacccccatgacacaaa

SEQ ID NO: 33242 - DNA, 319 bp, Glycine max
tcctttgatagccctttttagccttgttttcctttccttgttttgaagctcactacaagccttaagtgaaaaaccatgatattaccatattcttaaagaattttggagctttggaattgttttgggaataagtgtgggggggtttttgttcattggacaacttgttttgttggctatgcttcatgatgtattttgggccatacttgatggacattgtatattggttaaaagttggacatgcctaaagaaatggtggttctcaaaagctctttatgttaaaaaaaaaaaataaaaaaaaaaaaatttcgaaaaaaaaaat

SEQ ID NO: 33243 - DNA, 216 bp, Glycine max
agctttcggcagcttatgataatgtaattatccagatttgccttaatatgctacacacgtccacgtgttcgaggggtcacgatacaaatcaaattaagtccaatactatcaaattatcattcattaagaaaatggtatatccacaattatacactttcacaaatcaaattgccttagtataaagttgattccgagtggggtggaaaaatagtgggg

SEQ ID NO: 33244 - DNA, 335 bp, Glycine max
gtttggcggttgttctggagtggcagtgagtgttataattggaattggaagggttcgggcgagttcgagttcttcttcttctgaggaggaggaggaggcagtgagtgtgcagtcaaaagtgactcagaaagtatacttcgacgtgagtattggaaatccagttgggaagtttgtgggacggattgtgattggactgtacggcgacgatgtcccccaaacggctgagaacttccgtgccctttgtactggcgagaagggctttggatataagggttctaccgtccatcgtgtcatcaaggatttcatgattcaaggaggagactttgacaaaggaa

SEQ ID NO: 33245 - DNA, 394 bp, Glycine max
agcttgagtcgttgttgacgatttctttttttcataacgtgttccatgcattagactgacacatgtaaagccctattatgtcctctcccctcgggggggatttcctcttcaacgaaggtgaggtagatgttggctgtgatgttattgacgatccccccaaagccttctacggagatggcttgggctacgtaagcttcattcaagacttttaccagcaaaactcgatgaggcttatagctcatgagcagctatagaagggggactctagctggggttttcttgaattgattaatgactttgaactcgctttgttggaaaatgccgaggaacttccccgcctcctcgagtgatacctcttttttgccacaaccctttctcccttggaatgatcctt

SEQ ID NO: 33246 - DNA, 760 bp, Glycine max
tctgatcctgctatggcactcagaaactaagctcataggaaaacacggattcaaaggcgttgacgacaacaggtagatttcattatgatgacaagggaggaaccaaaggtctaagaacaagaacagcttcgcgaatcacagaacactcagtggatccaaaacaatcaaggaataacaactagattgaatttatactttggggcaccctgatatacgtataacctttttgggccttggtttcagctacaaagctcacactttatgccaatccccgctgtaatgatctgtcacctaccatcgaagcacaagcaactattggtaacactgtggccacctatggcatgccaatactcttcaaatcccctgcgtaacttgtgctatctcccaacaaaccccttggagatggaaatattcctttcagaccctcatagggcacacccctattctaattaactcgcgaccccttaccccattattgcggtgaattaaatatccacaaccaacacgccctacctattggagtccacacaacgctcacttttatgtaatacccccatccacccccacttgtctctctttccaccccaccactttattcccacaacatctacattattatccattataataaatatctctctgtgccggcccatcactatcctcacctataaactcacacttcgtctcaatcccatcccctggttgatcatatctacttccctccaccatcatccatcacctccacccttcctcaactaac

SEQ ID NO: 33247 - DNA, 490 bp, Glycine max
ctggtttatagagaaaacaattataatcggctgtagccaatgaaatctgcaaggtaatcgattaattcaatgaagtaatcgattagattatctttttaattgattaaagtgttcttcccaaaacctggaaacaactcaagaatagggtaatcgattagatactcaaagtaatcgattaaagtattcttgttcacttttgaaacacttaaagaaagataagtaatcaattatatcacatgggaatcgattaaagctgagactcctgaataaatcagtcattgtctccaaaacaactgtgtaatcaattacgataagactggaatcgattaaaccgatacgagatataattctgcaagcttaagaaaacttatgtaatctattaggataaggttgtaatcgattaaaatagaaatttatgccttttggaaaaaattttttaacttagaaactttcttcttacttactcatgatgaagctggaggcataaaag

SEQ ID NO: 33248 - DNA, 328 bp, Glycine max
tctagccaaatggacttaccttgaattaattcctttgatatcccttttgagccttgtttccctttccttgttttaaagctcactacaagccttaaatgaaaaaccatgatatcgccatatccttaaggaattttggagctttggaattgttttgggaataagtgtgggggtttttgtttcattggataacatgttttgttggcatatgcttcatgatatattttgggccatacttgatgtacattgtatatgggttaaatgttggacatgctgaatgagatgttgtttctcaaaggctacgtccgttaaaaaaaaaacaataaagttg

SEQ ID NO: 33249 - DNA, 466 bp, Glycine max
agcttgaaggtaaactagatgccttgtgatgtaagctccattggagcttgtaggcctaagatcttcttcatcaatggatttctttgcttcttggaagataaatggcagtggaatggagaaggaagagagagaggagacgctacttcaaggagaagatgagtctagaagaagctcaccaccataggaggccatggataagagcttggaggaagaaggagatgaatgaagggagagggagagaagagcacgaaattttgtgctctaaaagagctctgaaatctgaagttaatacttaaatgatcaaagttccaaaaaaattcacacacatgacctctatttatagcctaagtgtcacacaaaattagagggaaattcaaatttcacttgaatttgaaattgaatttgtggagccaaaatttcactaattatgattagtgaattttaattatggttcagccccactaat

SEQ ID NO: 33250 - DNA, 393 bp, Glycine max
  unsure (1)..(393): unsure at all n locations
acaacagtgtagactgcttcagcccagaatgtgttaggtagtcccttctccttgagtattgatctagccatttccataactgtgcgattctttctctcggacactccattttgttgagtagaatatgcgaatgtaagttgtcactcaatgccttcatcctcacaaaatctttcaaactcacgagaggtgtactctttgccgngatcacttcttagtacttttatccgttttccactttgattttcaataagggccttgaactttttgaatactccaaagacttctgatttttcttttagaaaatatacccatgtcattctagagaagtcatcaatgaagagtatgaagtacctgttgttctcatgtgatggcatactcattggtctacatgct

SEQ ID NO: 33251 - DNA, 199 bp, Glycine max
agcttgttgattgatattgtgcttgtgaaggatgatgttgggacataaatcttggaacatgcactggaggtacatttggttttgcatatgattgatgttggtgatgaccaagataatattgggattcaaatttacaaagttagaaattataaaaaataataatatccagaattttttaaaaattgtaaagttgatttaa

SEQ ID NO: 33252 - DNA, 335 bp, Glycine max
catcctaaatggatgaattcttttactcatgagtatgaattatttaggatgaagacaaatgaaagtataccagacatgcggaaaagattctcacatatagttaatcatcttgcatcattaggaagaacttttccaaacaaggatctcataaataaagtgttaagatgtctaagtagagagtggcgaccaaaggtaacagccatcacagaatctagagatttgtctattatgtcttttgctactctatttggaaaattaaaggaacatgagatggagttgcaaagactaattcaccatgaagaaaatgataggaagacgaagggaattgttcttaa

SEQ ID NO: 33253 - DNA, 230 bp, Glycine max
agctttaaaaaaaatcagcaattttttcagagaagaaatagagggaaagagagaaaaaaaatcatgacttggcatcatttgtatgcggcgtgttgctgcggcgattttcgaccgccgtatgcggcgggcttctttttaccgccagttgtctttgtctcccctctcttcctcgtttcctttgtgtcgatcctagcagcgtggccgctcgcatttctaccaccatctttttt

SEQ ID NO: 33254 - DNA, 319 bp, Glycine max
ggttgcagccagggcattgagaacatattggtacctacaggaagctgttattaagccaagagaaactggtacccaaatatgattctaatgtatttgactggtttaaagtaaggaaatgtgtgaagctataaagtgcgtatctactgttgattaaagtttgataagattacaaaactctgtaattcaaatcaatggtgaatgcattcttactttatcactttacacttttgttcacgttcaggaattatgtccaagtttaaatacatgaaagctcgacattttataaattaaaaaattgtgttcaaattattatagtata

SEQ ID NO: 33255 - DNA, 324 bp, Glycine max
agctttgatggtgtcaagtatttatctcatgtacgtcatcaatcaaaaagggggaaaatgtgaatgtatgtatacatgatttccatgaagtcaaagaagaatcttacaaggctgcttcagatgattagcacttgctttaagaataattcaagactgcttcatcaaactaaaacttgcttcaagattcactaaagaccaatccttgccttaaaacaaattgctgtcaaaacatgcaatgctctggtgatccattatcacgaaatgtaatcgatgtccccaaaacagggttaaaaaattcctattaataaaaggtctgaaatttga

SEQ ID NO: 33256 - DNA, 803 bp, Glycine max
  unsure (1)..(803): unsure at all n locations
ncacgctcacaaacaaaaaaaattatgggtatagctattgttacttctttaattaataatggctctaccaagcacaagaaaatgaccattttacccttatgagttttcctacaccccaacccttctctcttttcacaacaccctcaacccttcccccttcctaattcctttccctccttcgttcgacccattcgaggctaggtaagatttttgtttttttccaatggaatcatatgatttcattgtgtcaaagacaacgaaatcggttcaatcttgttttagctatttcccttgagatctttatcattaatgcaacctccattatgctcattcatgggggtgtatttagtacctctaagaaatatgattattcaccattagtcagtaatgtgggttggctggaataccaagtattgtgtgctatgagagcatctgctattggatgcgaaaaattgaacttcttctacaatgaatgtgtagaagcaaaaaatgccaacttcttaccctataaggtacggaatccgaccatagatggggggtgtcaatccttttgtgcttctgggtggtcttcttcccattggctaaatccccagttctgaaggtctgtattgaccctccttaacttttaccacctctctcctcggatagacacaaatttatttattatttttaaagtataaaatattgatttctcattctcatcctaacataactgaatttcgcgatctcttctgtaactggttataatcaataaaatttcctaggttttataactatggctgcttccctacttagaaggatcg

SEQ ID NO: 33257 - DNA, 776 bp, Glycine max
  unsure (1)..(776): unsure at all n locations
gacacaacacaagggaggaaataccaccagctacgatcagacgacaatcagtaaaaagagaggagaaatacacgacancaagcgacacagagncnnntttgatgtcgtcgccagtgacacggcccacggggtaacactaaaagcaagcaggcaggctgcgaaaaaaagacagaatttgtgcgactaagcccaatagggaaaagacaggatcccttagtaatgataacgaaccgaacaagcacaacgaggagaagcacaatgcacaacaacgcggagagataagacactaattcggtcccttaattgatagaaaaaaccaacaagaagatcgaacgaagcacgcgagcagggccaacacatttgaggaacatacataagaaaaaacggaagcagagaaacagacgggaactccaaggaagaaacagacaagcgacctagcaccgcaggatttgaaagaaatgtgacatcaaacgaagaagcgagaagacaatacaagaaaggggagggaaaagcgaaaccctaaataggaggcaggctggacaccaagaaaggtggtggaaaaaagggaaaactaatgggcaaatttgaagccgcaagaaggtcaacgtttggccggaaaaaggaaaagtgaaaacatgcaaaagcggaactggagaaaaaggtgcgctaacgaacggactaagatggaggcaaaaggaaagccagaaaaaacaaccaagggaaaactggggaaagggcggacaaaaaaatacaagcacgtcgaacttgaaaaaggc

SEQ ID NO: 33258 - DNA, 919 bp, Glycine max
  unsure (1)..(919): unsure at all n locations
tgggatgacntcagctgatacgccactcttataagccacactatataataggatagcttcaacagtgcatcactgacagctcgcttccgcatctgctttattatgtagcgagatccagtgatctatcatgccctggcattgggcgacgtgaccccataattgaactcacttatttatgaagaatcttactacccgcaactcacctgatgcttactaagcaaactgagaacatcacttctggccctaatctgtttatatgtcgcaccaactagggattgcatgggatggacattctcagcaaaattgaaagtttcaaccttgccctcgtcaaagacaaaagaaacgtaatccgcactcagaataagtgagatagaaagattaccgcttttgttgtttggcccaatgttaaacgctggtgactgagttgctactctccgccgatgagtgagatactccggcgaaccaggcatttattcagtgagatgggctcttggcgcaatgtctgatgtggtaacagggggagatgatgtgatatgagtgcacacgtttcggtcggctgagacaggagaacccacattacattagcagctgtcatgttacgggattgatttcatacctggagcgacgaatggacggatccttgcatactctacagggggagcattttggggacgcagacaatcatcacttctcatcggagcaccaaaacaacagggtgtttgatcattggtggtcaatacagtagtttaatttgattcctacaaaccttttaacttgtataatacttatattaaattgagagttctttcatttattgggggcaaacccttcacaacatactcgtggaaaaagacatattctcttatcgaaaccgctttattgatattatccatggcagagtagacctcataggtctccg

SEQ ID NO: 33259 - DNA, 1006 bp, Glycine max
  unsure (1)..(1006): unsure at all n locations
agcgaacgaaaggaaaaaaaagaaatagactacgagatagagaagagaagagaaataagagaaagaaaaaacacccaaagaaaggaacttgatatgagactcagaaacacnnaaaaacgaaagccgcaggagaacgaaggaaaaaaaaaaactaggattttaaaagaagagaagaggaaggaagggagggaagagataaagggaggtatggaaggaaaacaaccaatgccaaaaaaaacggaagaacaagatagggagtaagataagggaactacacgaaggggggctaagaagggaagggaaaataacaaaaaacggtacgaacatggaaagaaaccaagaagaaggaaagaaggcaaaggaagaataggggaaggaaggaaaaagagagggaaaaaaaaaagaagaggcagataggaaagaacgcaatgaataaaaaaaaaaaggacaggaagaggcaaaagaggaaatcagaaaagaaaccaaagaacaaaatataaaggagaagaaaaaaaggaaaagagggagggaaaagaggaaaaaaaaaaagaaagtgggaaagaaaaaaaagaaggaacagcacgatacagaatgaaaggatagcgggagaacggtaaacaataaaagacttagaaaggagaagagaacgaaatgagaaagaaagtgaaaggtaagagaaagaacaaggaaagcgagaggatagaanangcacaagaataaggaaatccgacacagacgacgatgacaaagagaggaaagaaaagagaaaaggggagccaggggagagaaagagatgaaaaaagaagaggacaaaagaaataaaaaaaagcaagaaaaagaccgaaaggtagtgacgggcaaagaaaagaaaaaaaactaaggaaaggaaggataaaagggaaagaagggaaaaagaggcgtaataagaaacgaaaagaggagagggggggaaagaaacgaggggaggaaaaaaaagtccgggaatgaaggagaggaaaaaaaaaag

SEQ ID NO: 33260 - DNA, 517 bp, Glycine max
agcttgtgaatcaagtttgttctgtgcgactatgtactattgtttttatttatttatttattagtaatgataaggaacctaacatgcagattgaggtgatgcacattgcacaagatctcgtcgacataagacactaattcttttcctttatttatagaaaagtcgaatttgaggatctaacgaatatgtgatatgcttttttttttcttctaaatatacataaataaaaattgaagttattttatatatgtagattccaattagtagttatactagctacttaacaccgaaagatatgaaaaaaatataaaataaaaggaaatagctagaagacaattcaatattgggtagcgaattttgtatccctatattgttgcttgcttgttcactcaacatgttgttctccagctggactactattggcattatttgaggttgcatgaagttcatgttttggctgatataagataagcttaagcatgcccatgttgaactgatgaagatgatcccctaacca

SEQ ID NO: 33261 - DNA, 328 bp, Glycine max
tctttggttcttctctctcacttttgacccgtggtcgcttccgcgttgttcgtcattggagcgagtactattcaactccctacgcgcgcaattaacgttgaaccaaattattgaaattaattaattaattaacttattaataacccaatttttattttattttacaaaaaaaaaaagatttaacactaagtgccgaaacggtatatatagcagaccaccaaggtaaggaaaggaaggtccagtcgcacaataattcaaaattacaaccttgccctcgtcaaagaaaaaagaagcagacccgcaacagagaaagagagagagaaaaaaa

SEQ ID NO: 33262 - DNA, 218 bp, Glycine max
cgctattgtatctaacaggaatgtgagttgcttctaatattgagtttgaataacgcatttattaatgtattgaatgcacattcactccttgttgatacaccactctacttatctttatcctatatcacgcccaacataaaggcgttcttcgtgcagtttctcatttaataaataagagtatattactattggcatgtttacatgataaataattaccc

SEQ ID NO: 33263 - DNA, 556 bp, Glycine max
  unsure (1)..(556): unsure at all n locations
tgcttccattttcagtcatcaaagtcacctcccctatgccaacaatcttgcttgtaacatggttgcccatcttcatcataccaaaatcccctttttgacatgacgagaaaaatccttcatgaggagtaacacggaaggatgcttcagagtcgattatccatatacaatcattaaatacaatatttaaataattttcattactgataagaaaaacattctcatcgtctgatgccacagcagtagtggttccaccttcattctttttctttgggtcaatttgattagcatggacagttccagccttctgatctctcttcaagaatctgcagttaaacttcttatggcccaactttgcagtagtagcaactcaagcctttgggacgagacttggatcttcctcgtgatttcccatggccttctttaccatggtgctcgctcctccctttattttcaacaacatttgcttcggagtgactactcaagcctctcttatttcgtctggactcttcatttagaaaactatntgtgacatttatccatgtaacctttccatctg

SEQ ID NO: 33264 - DNA, 205 bp, Glycine max
agctttgggaccataatctcttgtcgtgttaactatgtccagccaaagcagttaatagtgaaatgtagtgtggaggagccacatccaaaatcgttacagcagcatagcaggtcacacagtggctattggagtgaatacaacagctacattctttaactccttttttgttatttccaagactttgggaggagtataggtaggtaac

SEQ ID NO: 33265 - DNA, 401 bp, Glycine max
  unsure (1)..(401): unsure at all n locations
tgtagtgcataaagttcacattgcctaatgcattttggacaaagtatcaactctagcccaatcccacaagaacagctagactctcctacaattcaagatttgatgggtccatacataattccagtccttagcactgtttcacattgaatcaacttcatcaaacataataaattccattacttccttgaatgaagtcaagtgagaacacaatctttcttgcaatctacctgngtcgggttccacttttcaagtgagtggaacggagaggcccctccttctatttcttcttccatcatctgctgagctctgtcgtccgtgaggtctagtagcaggaccatatcgtctcccatgtaatttggcaatatgttagctccgatgtcccaaagtaaattgtcttcaac

SEQ ID NO: 33266 - DNA, 233 bp, Glycine max
acctgcccgctgcaagctatgctattttttaaaaattttttttttaacaataaggggttagagggtgactgtgtgcctaatgcaccatctaacggatctgcgcttattatcgaatttagcattctatatgcggagatcgaggggtgctaaaaagaggataactggcatcccgctcaaattttcagtttagaatttatttaacagagttgatactttcaaaaaagctattgcct

SEQ ID NO: 33267 - DNA, 929 bp, Glycine max
  unsure (1)..(929): unsure at all n locations
atgaactggtcgcattgcanaagccgaanatataaatactcaaggctggacccactatgtttcaataaacctgagaggttcccctgtcctctttactttggaatccctgtgtatagcactccaggaccagaccctagtactctgcaacttatgggacaacgtgagcattgtttaaacaaaccattcttcaacacaagtattattttaacaatagtcttaaccctcattctctcaaatctttaaaaacaaggttcaacccaaacaatactttaacaagccgccaagagcgactttcatatattgttaaaacaagctctgtaaggctttcgcccagtgtttactctcacacaaaataagccactgatatgatataaaaccactacctcctgtaaagagctatggtgtgaacctctattttaatgaaacccttgttgttgcaacattttagaatactgggttatactatacccacccactctattataaaaatataccccgttgtgttggcgggcaaaaaaaacactggtgagacaacatccttattgcccaagaatatttataattaaaaatattctgtggccgcggcgtgtttatattatatatatggcgcttggcccacagaacacagggcgctgggtgggtggacacattacttctcaataaaaaataanntggaaagaatacgggggcctttagaacacacccggggtaaagcctctcaaacaaaaccttttgagaatgggggggctctataataccacacggagaagggggccgggggctctctaacctaaatgggttgtgaaaaccaggaagaaggaatattttggggccctccgccacaaaaaatttaaaaaatcttaattaatccggggggttttatagggggggggccaccttttttgtttttatcttcttcccacccaccc

SEQ ID NO: 33268 - DNA, 589 bp, Glycine max
agcttcacaaacaagctttcatcagtaaacatctagtcacttcatatcatttcactcctgcaagacattcctacagttttcttaaccccctagagctaaggcaaacacacattattattgaaagaaattgaacacaaccatcctaagaaataatagaaaacacacaatgcaattaactaaaagagagataaagtaagaaatcttgggttgtttcccagtaagggcttctttaacatcactatcttgacaggtcagatgccttcaaggtggtatgaaggtcacatagaacacatcttccttgcattttctcttcttagctagagacttcatgaaactcatgtatccctgaaatgccttccatatcattgcaagagaagtgtcgatgatcaaggggagaatgacacttaaaaagatttatcactttctatgggcctttcttccttgccaattagttgaagaaggatattgacttacagaatgctttcttgttgaatttctacttgtgagcatttctcccactgttgttgggtctctcatctccttttttttttgaatcatactcttctacaaaaactttctcatgaagctt

SEQ ID NO: 33269 - DNA, 518 bp, Glycine max
  unsure (1)..(518): unsure at all n locations
actaagcttaatccatgccctcttcatggccatcagtattatgaaaaaatatatggcaataatgcgaatgaaatgcacttttgaaaatatgataaatggatagttgcaatttaagatcttggattaattagcctaaccaaaagggttcactaacacttccatcatctatactagcatgtattaaatagctattttgtgaccagaatcaagccgtttagatgattttagtgagaacattgtatctcattcaataaatacgaaggtagatatcttatggaaagccaataaatacgttgtcaatgaaaaaaagttatatatataacaaataaagtcataccaaattgaaaattgatataaacaatggatggcaatttggagtaacaaccgaaagagatacccctagctgcgtgttgtaacatagacatagtcaatataaatagaaggctataactaaggaaaatgaaagaantagagtccaagatattaccggaccaaacattntagccaccctcaaaaag

SEQ ID NO: 33270 - DNA, 325 bp, Glycine max
cctgcatgcctgcctgctggactaagataatcttattcctatatatagatatgtatatatatctataaatatacatagctatataagtaactaagtacatctatatggagatacgctctgcaaagggaatctgatacgcaatcaatgtagagctcgacttatgtgtgagccagagtagtaattgcgcactcgctgctaggtggggcgccgccctagttatgctaagccggcaccacccccaaaagagatgggggatccctggaagattgcaactgttaagtaaaagagtgtgcctacacacatggatgtgtgaaaagatatgacc

SEQ ID NO: 33271 - DNA, 391 bp, Glycine max
aaatcctgactcaccataaaccttgacccattgttgattgtcaatccttaccctcggaagcaaagaaaaaaggagagaaggaaaatttccaatcaaaggaaaaaaggagaggaaaggaaattcccaatcaaagagtgggagaaagcaaaaagaaaagaaagaaaattcccaatcaaagaatgggagaaagaaaaagagaaggagacgaaggaaggaaagctcctgatcaaggatcgaaagaaaacagaagaaatgtgcagaggggatctctggaccagacaatatctaaacaaatacagaattgtcaccaaatgaacaaaagagagaaaaggagaccataacctaaaagtggtcttctccctgtgattaccaaccaaaatcctgtgcgtcg

SEQ ID NO: 33272 - DNA, 486 bp, Glycine max
agcttatgagaccaaaatatgactaagaacgtttctaacaatctaattctcacgctaatctagtaaatcttgttcataaatcaaacgaattatacaaaaatgtttctcacaacatggggagtaaaacccctaaaacaatttcacatactcatatcaaaattaaaggaatcaaaatcataggttcaaaatacaaaaacaccaagagcactcaattttatcaaccaatttgcatcagggcatcaattggcctgtcaaacataagaatctcatgagtataatagtaaaggaagaattacaatatagtaaaaatcccaaaataaaccccaatttgatcctttaaggatccatatacatgttcattttaaccacaattgtgataagctcatcccttacctctaagcaggctcactgtgtaatttggcaatgatagcggtgtctctagcgattccctaagattcctcaagctttccctttggttgctctgct

SEQ ID NO: 33273 - DNA, 687 bp, Glycine max
tgtttgcgcgtcatagcgacatgatctcgctacagcgcttctagtgttacgccagactctgtggtgctctaaccccagtattttgcttacctctctccaggtggtcctaattttctccaggctttggtaatgtggtacctgaatttttaagttcaccgcttaacctgctttaagccaaataatttcttgggcaaaatttgtgttggcttaacccaaatgggggaagtagggccctgaggttttattggatttttggggggacccacattatttttaaaaataagtgagaacctaaatcaaggctgtcacttgaattcctaagcagttgtcgaactgccataattctatgtggcgaattatttcttgtcttgcaaaccagggcagaggttgaatatttgccttatttgttgggcaatttcttttattcccctaccggtccggcaaattttaaggttttgtgggaacctttttgaccttagggtcctttaaagggctttgggaaataaatttggggagaacccccccgaaagttctcctaaaaataataccacaacgtgggaaccccttggtgtcccccccagggtggtggaaggcccccgcgattttctccttctttaaaaaaaaaaaaacaggggggggggcgtgcgcgcccccctaaaaaaaaggggggtggttttttattggacg

SEQ ID NO: 33274 - DNA, 385 bp, Glycine max
agctttgtgaataatcttttgatctgttcaatgatcatcatgaaaaatgaccctattacacctgcaccataaaatataacaaccctccaaacagcaaagaccaatttatatcatgaactagatgggtcatagaaagatattaacttgcagccacatcttccaatcagcaatggaataaaattcattgccatcattccttcaaataaaaaattgccactgcacactagcatagtcacaatctcgaaaaagatgaaggagattctcttcttggttatcacaagccggacataaattgttgttagtcaaactcaatctcatccgccaaaagtttccaaataaaacatttagccctctctggacccttccaattagcaacaagtttgaa

SEQ ID NO: 33275 - DNA, 341 bp, Glycine max
agttttgaatatgcaaggaatgaacttcatgcacagctctagtttgatcgcagattttgcacattaattaccaaatataatatccaatactcctcgaagactcttttttttataaaattatttataccatttattttacgtattctctattaacatttttatctctcacctagtctttctcttgctgattatcttgtcgtttttatattattaaaaagaatgattcatattatagcggggattgtcaactctaacaaaaaataagccaccgacttgaatgtaaaacatacatttcataaaaaaatctaatgatagaaatttatattttaatgaaaacatta

SEQ ID NO: 33276 - DNA, 382 bp, Glycine max
agcttcactaaataggtgttgttattgaagaacatgcttcctgaacataataaattgccaaaaaatcactacgaggcgaaaaagattttatgtcctgtgggaatggagtaccagaagatccatgcatgccctaatgattgcatattgtgcaaaaattagtttgcaaaaatgcggcagcgccccacgtgtagggcatcacaatacaaagtgcaacatgatgaattaagtgatgatgcaactaccacaaattggggtcctgcaaaggtccactgatatcttcgcgtaataccacggtttaagcgattttttgctaatggacatgatgcaaaaaaccttacatgacatgcagatgaccgaaaaagtgatggattgctttatacat

SEQ ID NO: 33277 - DNA, 468 bp, Glycine max
tggcgggagtgactgacaccctatagaattggcaaaggcccgtgatcaaatctggaaaccccaatgcctgttggagttctctcggtccactgggtgtctatgaggcgtgatccctgcaaactgatatatagcatctgagatcaattgagccacatgggtactcacctaggtcaggatggcgtagaccagctgacaattcggcagggggaggttggaattatggttgctagggagaatgttgctaagcagcaacatcatccaaatctgtgtcatgatccgcacccgtctccctgccacacttcaggcaatgactcctcctgatgcaagctccattggagcttgtaggcctaggatcttcttcatcaatggattcctttgcttcttggaagatgaatggcagcggaatggagaaaggaagagagagaggagacgccacttcaaggagaagatgagtctagaagaagctca

SEQ ID NO: 33278 - DNA, 1118 bp, Glycine max
  unsure (1)..(1118): unsure at all n locations
tcctactactatgcanacactatntgaacttacactctgccaatctncaactctccagcactactatggcatctangcataatcatagtacataattatatactattaatattcagaccacaacaatncccctttgatgtcatcnntcgacacgcgcccagggtattacaagtaaagaactgacatgcgatgtcatagcataagcttcgcgatggatggtaagggagtatatatttatttaatgtgcatagacgtatatatgcttgatcgtattggaacacaggagtgtatactagattatacggaggatgcatacttgtagaaaacccctcatactaggctagcatagaggcaggaaagtaataatgcgtctatattcatcggaacgtgtgcagaaacataggttcagaaggcgttaggccatagtgtaaagaaagtggtctcatgaactaagacacagaacagaatcgcgtgagtactactaaaagtggatctcaatagacatgtctatttagaggcataatgactttcgcatagaatgcgcagagatgttcataataaggtagttgcaggatagaaaaagagacattttttatcagacaactgtagaacatacattctagagtccttaataattggagcacattaagggataaaaggcgattggagaggagatgcaaacggacatctgacgagtcatatgttgacaaaccgaggcggggaagcaatataaaaaagcaccacgttagaatgatagcattgaacgatgtattaccataacgaattttagccggccaaaagaaataacatgtggaaaaagggaacaaccttggcacgtaaggagagaaatcaatatataaacacgggagacaaaatctgtaaaagaaaaaatggctataaaactaacctggcaaatattaaaaaaataaaaatattcctagtttggaacaaaaataggaaagagaagtttccttctttaatatattgacggggagacacataatattgaaattgatttatacataaacaagccggaaagaatggcatgagatttaagaaaaaaaaggctccacgagagtattaaaaaaaatgataatggggatacaccaaaacgacac

SEQ ID NO: 33279 - DNA, 792 bp, Glycine max
  unsure (1)..(792): unsure at all n locations
atgactgattcattgaaagcaacnaaaaactaagctgttgtgtatcactgttccggcctaataccattccattgctcttatgtcttttttcagcaataactcgggctaccatcaaagaggcacccgaacaaacgtggtggattcggaggagaatcgacataagccgtggtctccattttgcaatgctaaaaagaaggtttctagcgactcctcacaggttcaacaaaaggcataaaagacggacaactcactagtatgttctctttgccggaccctataccagttgacccctcacataacttcaattctggtgcatgttatgggacaccctaacataatgatccatgtcgactaacacgcactttggccgggttatgtccatacttggatattatttgcgtggtgtggcccatttgatgggaaacgatttttctttccatatgagactcccttaaagcctttccacagggggttggcttatatacatccaaaagggaatttcccgtgtttttcggcggggaaaaaaaaacctttttataaaccccccctttgttgtccccccgggagggcggcccaaatatcctctccccctcttaagagttaaaaaaaacaaaggggtgttttggtgggttgggacaatcacaaaacatcccattgttttctctatttcccttatatattatctccccccctgctgggttgaaacaaacaattaataaaacgggtggtgtttctcactcatattttatatttttagtaatatatgtgcgcttcgaactaacttttcttgca

SEQ ID NO: 33280 - DNA, 344 bp, Glycine max
tgagcctgcaagcttggctttggattaaatgtgaatcatacatgatttaagacttgtaggatccaatttgggcaaaattggatgaaggcaagaaggatttcgaaatctgcctaatttgtgcagcaaaaagctgtcaaattttgtgcagcacaatttggctcttgtgcataaaatgtttgtgtattgctggttgtggaaagggtattacatattgggttctggacatttctagtagatcccaacggtcaaaatgtagatttatgtactagggatctccagtaaaattttcaagtcgatccaacggttaacgaatcggaacgaagaaaatgttactggggtatttt

SEQ ID NO: 33281 - DNA, 316 bp, Glycine max
agctttcacaatgattttttgtttttgtaccattgtatttttagggaccaaagtaactgattcgatcagtaaccaatttgcggactaaaataatgttaattaatagtctaatgatgtaagtatgtaacttcatctttctcttcttgccattgctcttccctcacttttttttttctctcctctatcttttctttctaaaagcaatatgttcataaatcttaattttaattttcttaaaatacacttcgggtataagttgttaataaagaaaaaaaggggatataccctaacaattcggcataaatgtgtgcctggg

SEQ ID NO: 33282 - DNA, 439 bp, Glycine max
  unsure (1)..(439): unsure at all n locations
tacccattctgttttggggtttttatgatgatgcttgtgttctgatatggctgatggaaaactgatagagatgaagggtagagttaacctatggttaaaaagtgagaatgtagtgatatgagtggaaaggtgtgatgctttgaggatttgaaaagccaaatctggatttagtggtaattggaggttagagtgagttaatcctttcatttaggactgtgggaaagcttgggctgtgcaaaggaggaaaatgagtgaccaaagtgaaggcaagaaccatttctagggtaaattgggtgttgaggagtcaaattttgattcggtagagttttcgtcgtaaaaccagtttgagcgagtttagattaatgttatagacttgtttgagatgggagtttgctccanagttaccccattctcattttcacttctcanaccttgaaaa

SEQ ID NO: 33283 - DNA, 564 bp, Glycine max
agcttccatcaagtggtaatcattatcacatgtagcttcaagtaagtgctccttaaacctccattaattttttgctttaccttctcttctatttttgtttcttcatttttctccatgtatctactcacatgtcttgtgctacatgtttttaacatgattctttagagtttccactgattaaacttgctatagaagctagatttgattttctatggttcaaatttcttgttcttgttcttgaaccataaattgtgttgagtttaggttcctttgagttttgtcttgttattttttgtggctgaaacctaaaccataaaattcttacaaaaatattaaagtaaaagaaaacttcaaaaatctagagtgacttgttcacctattgtagttttgtcataaaaatcatgtctagtcatgaaaactgtcacataagatttcttatgttgtgctgaattttattttcttgtttctttggccaactcatttgttcatgagtggattaaattcttttagcctattattttatttagtacaaatcttttatgttaataagtccttacatgttca

SEQ ID NO: 33284 - DNA, 554 bp, Glycine max
tgtatgtggataacatacttatttttggtacatgcaatgatatagtttttaaaactaaatatttattagcatctaaatttgatatgaaagacatgggtgaagcaagggttaatttcggagttaaaattaaaaggaagggagatagtatattactatcctatgagcattatgttgagaaacttctcaagaagtataaatattatgactttaagtcagtgagtaccccttatgatgctaactctcaattaaagaaaaacatatgaaaactaattgctgaaactcaatatgcccaaatcattaggagcttattgcatttgatgaacttttctagatctgatattgcatacgcaacaggcagattgagtagatatacccataatccaaatcagaaccattgggatgcacttgctagactcatgagatatctgggaggtaccatggattatgctattaatacagtggatttcccacagtactcgaagggtatagcgatgctaactgggtctctgattcagatgagagaagatccattagtgcttatgtgtttactcttg

SEQ ID NO: 33285 - DNA, 549 bp, Glycine max
agctttctaagacatttctaagacagtgcatacgtaagcactgtccttgaaagcaagctttctaagacgatgcttacgtaggcacagtcttggaaagcaaacattctaagacggtggttacgtaagcatgtcttagaaagcttactttctgagacggtacctacaaattaccgacttcgaaagttggctattttccaagacgatgtgttcttactcgtcgttgaaaggtaacactttcaatggtgttagcttctacgacggtcgacaatcgtctttgtatattattttggaccgtcgtagaaaaccattttttcagtagtggtttaaggaagggtgaaacttaattccaactcattcactaaaattagcttttggtctagcatttttgtgacttttttctccttaaaaggaaaaattatgccaaacacttattatttttcattcactaaccatgtgtttggaaggggggattaaaaatttctagaaaattcaattaccccgcattttgattgtcttggattaaattcccttcattttggaaatattttg

SEQ ID NO: 33286 - DNA, 532 bp, Glycine max
  unsure (1)..(532): unsure at all n locations
aagcttttctcggaccatgagcggcagctaactcctcttataagaccatgctatgttctcgtgattggcctctctcttcccttcgaagcttgagctcactgttgctgccccataaagctccacgaaatttgtctcggccatgctcttccttgcgagcccacttggtttcttgttcaagggctcttgcggtagctgcattttcttctcgtaacatgacacactctttccggacgtctatagcgactaacttgaatttttctttggcgagtcttgcttttcctagttctgtttttagagctcggacttcttcatcctcttccagagcttcgaagttctcctagttgataattttcaacttggagagccaatctaaccctcgtgtacgaactttcagccattcatgataaccaccgatgatgccattacggatgcccctaagttctttatctttccttaacgggctntcccacgccttgtggactctttgtataatcttgaaattttgcgcgccgatatctctcacaaggaaagg

SEQ ID NO: 33287 - DNA, 190 bp, Glycine max
agcttccatcaataatcttaccttttcttgtgaagggcttgtgagcagatgcacaagaagtgagtatgcttttagagagagtgcagagaaggaataagaatgcgcagagaagaggaaaaagagaaaaaatgatgacgctagaaatttaaagtactctgaagggagctgaggggtcaggcagtttcaaaaa

SEQ ID NO: 33288 - DNA, 631 bp, Glycine max
  unsure (1)..(631): unsure at all n locations
gaaattgtcatctccatttaccttgcttagattttaggagagcacatggttttaatacaattttgccccaaatttgggggagttggtttgatggataattttaaaggtaagaaacaacaacatatacggaaaattaataaaatgttttatgtgttaaaaaaggggggaaagaagagttcaaataagtgtgtgttgttaaaacaaagtcaagtgaaaggctagtgaatgggctaagtggattgaaaagacaaattgggtaagtctaggatttgtgctctcttagaattcaagcttttgcatcctagaaaaaccaatatttttttgtagccaagcctcactacaagcaaataaaagtccttctaattcaatttgtgcatttctaactttatggcatgagatgaagtacaaaaattggacctcttgttagttgttattgctaactagcttaaacacttgtgcgtgagtgatatagtggctgtgagaaattggttaagtatctttccatganatctatctcctgcctagcttcatttagttgtgtttgctgactaacatgttctttttctctgaanaattgcatgtcttgtgaaaagcaattgataaagcatttttgttcatttgtatcatgaat

SEQ ID NO: 33289 - DNA, 207 bp, Glycine max
agctttcaaaatatacaactacacatcctaatatcaaaatgcaacaaaaatgggtcttcagttttcttcatcagcaaccttcaaactcagcaaccttcaaaatgcaacaaaaaatgggtcttcagttttctttatactgcatcatctttatcagcaaccttcctttgtttggctcttgttatggttagcttattccttgctattggt

SEQ ID NO: 33290 - DNA, 558 bp, Glycine max
  unsure (1)..(558): unsure at all n locations
gcttgaggcatctacctcttgaagaggcagaggtaagggcatagggataagttttataggtagaggacggggagatcaaacactattagaaaatacactttcaacatcggttatttggggccttctacatcggttgtaaaaccgatgttgaaagcatcgatgttgaatgtattgttgttaacatcggttttaaaaactgatgttaacataaaaatattaacatcagttttataaataaccgatgttataaagaaagaagtacaacaaaataagtgtatgcgtgagggacgttggcatcagttttctgtaaaaaccgatgtgaatatgttatattaacatcagtttttagaggaaaccgatgtgaacgttcatcattcatgcacctattttgctatagtaatttatgtataacattggttatttataaataaccgatgttattgcatacagtttaacatcggttatntataaataatcgatgttaacctatgtacattaacatcggttggttataaataaccgatgttaacctatgtacattaacatcggctgtttata

SEQ ID NO: 33291 - DNA, 370 bp, Glycine max
agctttgggcatgttgtctgtgaaggcaacttgttacttccaaaagcctaggtaaaatgttgagtttctactttttaatatttattaaagatcaacttcatgctttcattattattatggaatatattggaggacattttggttccttattggtgccccttgcactctgcatgtgaattaataaaactggttttgttaatctacacattgtttgtttgaccgaagtcctatttttgaaaaaaaaaattactaccagattttgttgcctgaaaaagcacaattagtgcgttttgtgtttttgggtcagtcatagcagcaaacatttgtttggtaattgttttgctcaaaaatgttaatctgggtatatgtg

SEQ ID NO: 33292 - DNA, 732 bp, Glycine max
cagggaataacccatacatgcaacacagaaactaagctgacattgtgtttcactaaagctgcaagatgtgggctattatatcatatgaccttatcccaagctggttatttcaatacaagcccaataatataatatcaaagagaaaaaaaatacactgaataattgtagaaaactccagacaccatatatgaaaggtgccatattaattgaggacaaaatgaaaatgaaatgaggcccctattaatgatcccaaaacaatttacctaaaaaataacttttattgctgaaccaacaaaaagctttcaccaattactttataaaaatgaacccgggtaaaacacaactgagagccccaaatggttggcaaaatacatagcctatccaaatgttgccaaacacagttttggccaacccctatttgaaaaaaagataaaaatatttcctcatattggaaaaaaaaatatttatattttaaaaaaaaacctctattgctaataatcaataatttatattaataaaaacacctgggaaaaaatttttaaaataaaaccctttatcaaaaaaaaatatttttttttttatttatcaacaaaaaaaaaaaggtaaatattcattttatattttaaatcttattaaaattaaaacaaataacactctctaaaacaatatttttcttttaatcatttggtattttttttggtctgtaggtgggtctttatctaaaaaaaataa

SEQ ID NO: 33293 - DNA, 505 bp, Glycine max
tacttgaagtgagaaaactttgtttatcaatcttcctacttttatttgttgaccacaaagaggtacctataaatatgtcgcgggggtcaagagaccttggggacgtcaggtggggtgctattgcccaaaaccaagcttgatcaatcctgacccaactcgggcatagtcagtttgtgagaacctgtgacgtacctaaacaggcaagctcctgacagtcaaccaataaaagaacaaagaccacaaagcaaggaggcttgtgtggtggctggccagctatggatcttgagtggtatctggaatttggcctctggtaatcgattaccaagggtgtgtaatcgattacaatgcttaaaaatgaagacaggaagttaagatggcctctggtaatcgattacccaaggtgtgtaatcgatttacaggcttaaaaatgaagacaggaagttaaaaaggcctctgataatcgattaccaagggtgtgtaatcgattaacaggccttaaaaatgg

SEQ ID NO: 33294 - DNA, 416 bp, Glycine max
actaagcttaagaataatggcctcagcaaacttcttattccctgaaggaaattcattaaataggcctcctatttttaatggagagggttaccactactggaaaacccgaatgcaaattttcattaaggcaatagacttaaacattttggaagccatataagttggaccttacatacccaccatggtgactggaaatgcaacaatagagaaacctacagaagagtggactgaagatgaaagaagattattgtagtacaatttaaaggccaaaatcatcattacttctgccctaggaatggatgaatattttatggtttcaaataataggagtgctaaggatatgtgggacactctacaagttacacatgagggaacaactgatgtcaaacgatatacgatagatactttacctcatg

SEQ ID NO: 33295 - DNA, 793 bp, Glycine max
  unsure (1)..(793): unsure at all n locations
tctctcacctctacgattctaatctcgctcatctcacggtatcaatcgtaccgacgtgaatacgatcatatggacactacgcaccctagtacaagtaccnnccttgatgctgtctctagtctcgcccccgggaatctttaaagacgacctggcagcatgctagctttacaaaaagagatataggtttgacgctggggccgaacggacaagcaacccttccgagatccatagcccattatttcacaggcgctgaaccccacatcatttttgaacccttaagggaaggtcctttcaacgagagagaagccttccagccttaacggagcgactgagtcgtactagattatccacgaaggaatataacttcgaccagcgtgtggactccgcaagtcactcccatggcccaatttgagccggaaatataagaaagcgcgcggagcatgccgtcatgggtaaggggcccactggattcatttcgatgcagaccccctgagtcaaatgctggggataacccttatttttgcaggagggacagaacntgcaagttcagctagaaaaaggaaccgcgcccattgatttgacgaagaggccattgcccagctgctattgataccaagtcatgatcttgccccgaccgctgccgagaaaacgggtgcggatcatgcgcccccaccatgacttccttgacccacacatggaagaccttgctggttaaaaaacatctgcccaaagaaaataattccaaactccttttgggcaaaagccaagctggggtatggcaattcgaagccgc

SEQ ID NO: 33296 - DNA, 430 bp, Glycine max
tccttcgcaattcggtactttatctgttaatctctactcagagatatggtcttcggacatcaacaatcacaagtattccagagttcagtcaaaatttatcattctcatgtaccatcattataaattaagttatatcacaaactattattttttagaatgaaacctggattgcgcacaagaaatttcaacactcatttttttaaattatattttcttaattataaaatattatatgttaaagaggacaacatactatatacattattatattatcatccaatcataacccatcattgtaataagcttattgacttttacaagattaccttatagtcatacacactctgatttattattgggtgacgtcgacaacgtaatacaattttacattattaatgcatcaccattagatctgatattaaattaatct

SEQ ID NO: 33297 - DNA, 1020 bp, Glycine max
  unsure (1)..(1020): unsure at all n locations
ccccacccagaggaaaattgatntcgtcccaccccacccacacacagcaccacgctaaacgtgccctgactagccactcgcattccaccagcgcaacggcgacacgttgaaagcattgagcaggccaccggggaaacctataaaaatgcgacctacacgccattgcaagactctccacaagtaaacacacacctcttttttactgtaaaccacgctaagcgaaacaacgaagcgggccaataatcgttactattgcatccaccccactcaatcacacgcacaaccgaaactatgcacaagtggcactcaaacaaaagaggaccataacacactacgttcgatatacccctcacgaaatcttaactccgacgcaacgacgggaagcatgaagggacgcaagggcacaagcgcccaagcaagtaaccccatgcggtattagacagaggaaaccaacgaaccttggaaccggacagtcccggaggttcaaaagaagcccgtaccaggaaacaaatgcacctcggactaatcacacgaaggactgagcgaccactcaacaacggaggggtgaataaaccatgcgggcatacatctatagatggaacgccgccactgccgcacgcttgacactagcggggtcacacagtgagcgatcgcaccacgagaaacactagtagcccccgcccccccaggcagcgaccctcgaaagaagaaaggacctcacgatgcgaaactaagtaataatggaatgggaactaaaccatagggactcgcgaaaaggaggcgaaatatgttactacccattcgaatggcaaggcggccagtcctcccatataaattagcgcgactagcgagagcggacccaacactactaagtaccacgaactaacgaagcgactcgtacatacgggaaatagacggtcacctgtgaaatagtaacgcacgtgcagccatcgtcaaatcaacgttactagtatggacaagaatgtatccgccggagacagtcacggcaccttaaaaccg

SEQ ID NO: 33298 - DNA, 527 bp, Glycine max
  unsure (1)..(527): unsure at all n locations
tactaagcttgtcaaaaatgggtcaacaggtgaatggccatgatctatggatatgtaaacttctgtaaccgtgtaacaacctattgaagaatttttccaaagtaataaatctggttgttgatgcaccaagccatagtcttgtatcttctctttaaatttatccaccatagggagctccctagaaaccactctcttctccaatgtaacccccaactccaccttccatcttccctaacatccacatctaccccacagcatcatatttctcttcagaattcaaaaaattatgtcttactttgctgccaaagtatcctcacctccccatttattatgccaaaagttaattttctttccacactaaattattatcatacaacgatccttccttatcttttccacaaatgctaaccaagtccctccaccatagtgaatccaaattagatgagctactcaccttanattangatgagacaccatatctttacctcaaaattgaacactatggagcatccaccttatgagctatc

SEQ ID NO: 33299 - DNA, 175 bp, Glycine max
agcttcggtggcaaagattccttttttataataaaactcttcaaaatggtccgagctaaatttttttcgaaatctatgggggacgtttccatactggtgccatagttttgggatatagctcttgactccaataaccccttgcatattggagatagtggatgcgttcgaggaatga

SEQ ID NO: 33300 - DNA, 459 bp, Glycine max
  unsure (1)..(459): unsure at all n locations
tgcttcttttttaaaagttatccataaattttacatgccatttttgttcatctttcaacaacaaccaagcatgctcaacttcaatttttttacttgtatcctacatgaaaatcttacgtgcaaaatccataacattcttctctaaactcccacttctcttttggctgattgcttatttgtagtagtcgataaacttctgaattatagggtggattgattccattgaggttttaatgatgtatctctcccctctgaaaattggacatgcttatggtcgntgttatatgcctctttaattatggccaatattgggctaataacaggttaactcctatgattgcatcctttgacacattaagccatggtcgaataagaattatgtcctcttgcactgagaatggtttacaacatttttttcgagtcaaattttctcctccttcatctagttgaatagtatat

SEQ ID NO: 33301 - DNA, 318 bp, Glycine max
agctttccaacaaagcaatttcatttcaacggacaattataactcaagatatgatgtggtctatctagggttgtcatcataaaactatcactaagacaacttttcaagcattttaactataaaaagttaatctaatactcttataacaccaaatataatataatataataaatacaacaacaacaacaataataataacaataatatacacaaaatacacatgtgtatagaaacacactatcacaacacaagtcatgccttagacaaaactaataatataaaaataattaataaatatttacaaaaaatataacagaa

SEQ ID NO: 33302 - DNA, 513 bp, Glycine max
  unsure (1)..(513): unsure at all n locations
gcttgacaattttaacagtgcagttttcataaatatggaaactgattatataaatcgatacttatatgttaagcatgctactaatttcagattcacgtgagatatactggatttatacaatagttgtgaaaaagtccaggtgttacattgccacaattcagtcacaaaacaaaaccatatgatccgtttcagatgcaatcccacagaccaaactatggatccagtgagatcaataacttcaaccaatcttaagtttaattcatcaaacatcactctactattactaacttaagtaaaatacttcataacagtcaactaaatcaattcactaattatagttgaagtgcccatttgccaattgtattccaattatttaaactaattaaataaaagagactcacatttaaatacttattatacacaaatttgactaagatattagatggtacgatacangctgaattacaaactctggttctgataagtgattacttttcaataataaatcaatca

SEQ ID NO: 33303 - DNA, 668 bp, Glycine max
  unsure (1)..(668): unsure at all n locations
ttgatatgtagccgttactcgcacccgggatcctctanaggcgacctgccagcctgccaacttttaaaaatccatataatatcgatatgaatcataactaaaagttacgacatattataaaaagaagatctttcttttggttaaaaattaaaagaagagatgattacttatataataaaaagaagagaataacacttatatatatatatatatatagatatatatatatatatatatatatatatatatatatatatatcctatcaccgtagatatgtctatactctacttgtttaatttggacattatattatctcctttacgcattctttactgtgtgtatttctaactgagccacaatattatggaccgcggtggtatcctttgactaacacctttatgaagttaatgcgcacaaacgtatttgccactgaaaaagaaccaccgcattaatctatgcatttgggatatataaataaacctcttagttctgtggggtatacaatctcctaaatgagggggggccaccccctctttgggtgacacatcctctgtattaaaaaaagcctggaagggcttccttttttttatccaaaagggggactccctttccatgcataaaggggcgggccttccctggtacccaatgttaaaaaatactttttacc

SEQ ID NO: 33304 - DNA, 319 bp, Glycine max
  unsure (1)..(319): unsure at all n locations
tattctttntctaatgtctaagattctattaacaacatacattaacactttcttttttccacgttctgtgttattgtctactctaacttattatttcatcacaaatgtataagactaaagagtatactgctaatgacatgaaaaattattaaaaaaatatatttttatgtaaattttttatattagtagtattatttagtttacaaatattagtactacaatttttaagataattactatattaataaatttataattagtggaagtttgtagttacaaaatttacactattattgcatctattattatttcatatgaa

SEQ ID NO: 33305 - DNA, 190 bp, Glycine max
tgcagctttaagcaaagcctataatatatgtacagaaatggaacaaaatatattgtactgaaatggaacaaaattaacaggaacaaaatataataggcaattccgcaattagagaattaacaggaacataatataataggcaattagagaattaacaggaacataatataagaagcaattatgtggtggt

SEQ ID NO: 33306 - DNA, 535 bp, Glycine max
  unsure (1)..(535): unsure at all n locations
tctacttatgtggcagggcgggcttccttcaccttcttgtctccttcgcgaactttgaccattgttcttctttcccgcgatgcttctttccatgtccgcctgagtgggcttatagcctaaaccatacttcccacgatttccttgggtatttatcaggctagttatgccgccgttgttttttcctaaacccatcccgggttcataaccgttccccaacataactcgagccatcattaccgctgcatcggacagacaaggctgcccaaagagggagtccacggaggaaatgctgaccacctcaaaagactggaaagcagtttctaacgattcttctgcggcttccacatacggcatggaggatgggcagcttaccaagatatcttcctcgcctgacacgatgaccaagtgcccctccactacgaatntcagcttttggtggagtgtagaaggcacaactcccactgagtggatccacgggcgccccaacaggcagctgtaggggggggtaatatccattattttgaaggtgacttga

SEQ ID NO: 33307 - DNA, 489 bp, Glycine max
agcttctcatcaatatcatcattccacgaatcacgatatgtctccaagttgataaataagttcactacagctgatacacacagatctttcctccattcttgtaactttgggagtcctacattttctgcgtatttatcacaatactgcaaaataggctaaattgttatattatatgtcactaacatttgcatgccttagcatataccaatccacaaataaacttacatcaaagccttcaatttcatgggtataatgtttaggaatgccagcttcttcttttgaatgataaaactccttgatcgatttcatcatttcctcatatgatggcaaagcctttttcccagaaagcagttgagctacccattttccttgcgactcaaagaaagggagccccaggatctggaccactcatcaaccaatgttactgcacaaaaattggatgttctttgttaataccaaaataatttcaggtaacttactcttttgggg

SEQ ID NO: 33308 - DNA, 481 bp, Glycine max
tgtccctcaagtcatcaagttctttccgcacctacacaaaaaacatcttaattcttatctcattaaatacaaaaaaaaaaaaaaaaaaaaccattaaactaaaactcaaaaatgcaatcaaataaatacatacttcaacaagacgggctttgctagccttgtctttctctttctccagagcatgaagttccacttctagctgcattctcttcctttcaaggttatcaatttcctcaggctgactatcaagttgaaccctaacatttgcacaagcctcgtcaaccaaatcaattgccttgtcaggaagatgacgccctgaacaatcacaaaaaatataagcacacatcacactaacaaaaccacaagctttcaaaacaaacgcacacacaccaaaagagtacagattccataccagttatataccggttagacaattgagctgccataaccaaagcacggtcctgaattctaacaccgtgat

SEQ ID NO: 33309 - DNA, 479 bp, Glycine max
agcttgctctaaatttacattgatgtctgtatttatgggaagaagttgtatgtcatttttgttttaagaatagtatcccactggtaaaactaactttccaaatgtttgccttcgcaggaaatggccccgaggaagcttgcctcaaagaggtccaggaaggacaaggcagcagaaggaactagttccgctccggagtatgatagtcaccgctttaggagcgcggtacaccagcagcgcttcgaagccatcaaggggtggtcgtttctccgggagcgacgcgtccagctcagggacgacgagtatactgatttccaggaggaaatagggcgccggcggtgggcaccactggttactcccatggccaagtttgatccaaaaatagtccttgaattttatgccaatgcttggccaacagaagaaggcgtgcgtgacatgagatcctgggttaggggtcaatggatccccttcgatgccgacgc

SEQ ID NO: 33310 - DNA, 461 bp, Glycine max
ctaagcttgtcccaaaaaaaaagtcactaaaaaaggtttgaaagtttatcatctcagttttccttatcaagtaaatggatcatttttaaggtccaacgccttaaaatgatcacctttcaagtaaaaagaatcgcttgattcacgcttaagaaagaactacgtaggtttgatttcctcatcgatggagggtacgtaggagcaaaagccccgcttttgtcgacctcaaaaaataaaaagaaataaaagttaaggtaatacaatttccacaattctaaaaaataggttgttgtcctttgagacaaacgtgagaggtgctaataccttcctcaaacgtaaatacaactcccgaacttagaattttcattttgatcggttcccttcggtttttctgatgttttccacaaataaacgttggtggcgactccgcgcatctttcctcctttggaaagcgcacccgtgag

SEQ ID NO: 33311 - DNA, 206 bp, Glycine max
agcttgtataagccatcttctccaagagctccttgaagaagaactttatgtgaatcctgagatttaacacagcaataggaaggatgaaactcaaagaaacagttattatcgcgagtgaatttactaacactaagtaaatttttggtaagggaaggaactagcagtaaatttttaaaggagaaagtagtgtttggaaaataagggga

SEQ ID NO: 33312 - DNA, 568 bp, Glycine max
  unsure (1)..(568): unsure at all n locations
gagacttatcgactacgaaaattgtcggtgcggttgtcattgtgcaaaggttaacagtgtcatccatagtgaatttgttgtatgtgtgtgtgtgtctctctctctctctaacaattcaacaggaaaggccgagtttaggttttcgagattgatgggttaaggaagaggaaccttgtgaaggagatagtgcagagagagaaagagttagtaggtttggctcaacaaagagaaatgcaagtgagtggtgagggagaaaggtttgtgtgattggcagaaagctttgcacaaagacaagtgaaagtgaaagaggggggaaaagtttttatttgcccttcaacgactgttttcagtaagccatgtagaattatcagagcatcagttattaactaaaccgatactgattcaatgatgattttcaaatgctntatgctctcacaatttttttgtagaattaagagttgtgctntaatattgaaaatcttagcccaattcatcaactctaaacactcctatttattctctatntgagacgtgtgcatatctgcactgaatgtgatntcttcatctt

SEQ ID NO: 33313 - DNA, 187 bp, Glycine max
agcttgtctgaccttcaacagatgatttgaacacaatacttccatttccagatgctttaagaagaggataagcaagttggctcaaatggtatgcagaatccaagttagttgccattaattttgaatattcttcggctgtatactcaattgttggtttcctcacatttgttccaacattgtttaccta

SEQ ID NO: 33314 - DNA, 643 bp, Glycine max
  unsure (1)..(643): unsure at all n locations
ctaagctttgagaatgaaaggtaaaattcttatacttgaagcttctgtgatttgttatgttattataaaatctgggtatttgttaatcaagtagctgattcatttttcttccaatttgacaatttttctctctttatcttcacacagttgaagcaataggatgtaaagcttagttgtttttttcccattgaagtgcaattaggtgtaataaatatccatgcaagaaattgtagtgaggggtgcaaatcactgtatatttgtcatatgattattaatgtgtactctcgttaactaatgcaactaggataagtagcaactgggttactgtaaatatattatttggttattttatggagcacttattagtggcttgtacagggtacaacttttattttatatcacttgaaattgttatttgcatgtaactttacaaataaaattgaaattggttggataatgtattgacatgactactgttgaagaatangatatggngagatgacttcccttcaaaattttgactggattgatgtcaaagatagggtctttctattggatttcttaaatctggacaaaaatacgcttcagtgactggaaaaaaacanggtgaatgatcttatatgggttgagtgctctataatta

SEQ ID NO: 33315 - DNA, 167 bp, Glycine max
agcttatgtttcaaaaaagacttttttctatctttaacaaatttgattggaggaacatcttcatcattttcaatcaacaacttcttccctttttagcaattggccttctaatacaaaataggcttgctaatgactatctaaaattgggtctttagggtatccctgca

SEQ ID NO: 33316 - DNA, 661 bp, Glycine max
  unsure (1)..(661): unsure at all n locations
gctttggggcagtggaatggactacaacccttatggtgtggactacggtttatgttgtattttgtcatgaccaacatcgaaagctgccactattcagaagggatgtcatcatttttccatggtcgtactggttaccatagtcatgatgaatgtaccaagactatgatcaagtgacagagtctttaagtctttatattaaagtggatatttntactcttttcacttaatngagtagttatacttcagcaagacaaaactagcacccaaacacgagttttgctaagaaaatgcatgcaactggcataaaagctcacaaaatatcactgtaaatgtggtttatcaatcatcattcaaagatcttgtgtctggcattaattgatgatgactgaatcattgcaatggaagaagaacttcaccggttcaccaaaaatgatgcctggacacttgttcccaatcctgagaatanaagcattatntgaacaagatgagtattcaaaaataagctagatgaacangggtaggtagtaagaaacaaagctaggttagtagcttaagtctataaccaaccagaatctatnaagttcacagaaacctttgatccctatactagacttgaagatataagaatcgtgcttccctttgcttgcccataaaatataaa

SEQ ID NO: 33317 - DNA, 547 bp, Glycine max
attctatacagcctacctgcatgcatgcaagctttgtgaatacgttgtttttttaatcattgcgatttactaacatttcactacttttggcatttatttggctgcaacattaaactttatggtcttgtgtgatgccattttaatggataattattagtagtaccacatatctccacttttttattcagtcacagatggaaccttgatttctgatatttcttatcaagagcttatcaggttatatgaagattctgtcgattatatactgtaatgattaatatgttatttgacagtaaaacttggccattctttcattggggtcgaagagcctttttaggttcttactcctctcaattccaaccgctaaatgccaaataaaagctttaacgggttctttactaatgataagatgaagtgatttgaaaacataaaattcacctgttttactacatgaaattttaacttttttgagaaaaggaaacttatatctgatgattatattctaagaacgacatgtactctaaaattgtgttggattcaattggaa

SEQ ID NO: 33318 - DNA, 443 bp, Glycine max
gaaactctattcacaagacgattaaaatcagattgttcgatgttactcccctaacaagggaatacccaggtaatgtcccacggaagtaacttcagaaaagccactcatttggaccaactgtcttctactactatgactgacattctttgaaaagaatatcctagctttctcttggctaatatgctggcctaacatctctccaaacaaatgcatagtgtccaaagtacatttcatatgcttagtagaagcctgaccacacaataataagtcatccgcaaacatgaagtgcgagatgagggggccctttcttcccatacaaaaaggtttccaagcttccactgctttcaagataatgtgggagagtttgttcatacctaacacaaagaggtaaggtaatagcacatcacctttgcgcaaccccttattaggagcaaacatgggag

SEQ ID NO: 33319 - DNA, 565 bp, Glycine max
agcttgtaaagcaggttatgcgcacgcctaattataagtaatttttataaagacaaatgttataaaaagtgaggctgaattatgattttagaagaagaaagattgaagcctttttttgaggaaaaaaagttaacgtgttaaagaaaaactttgttagaaaaataataaatttttacaaaaacttgtttagacaatgaaaatagatttcgcaaaacataaaggattttcaagatgaaatgaaattcaaacccctatattaatttaaagcaaaagataaatacactaaagacatatgagatataaagaattatactagtttatctttaccactaaggctatgtttaagttttgattaatcactaagtttcactaacttatcacaaatacaaggtttacgtcacagtcatttctcgctctacagatcaagatttaccctaagtttgttacaactcaatattttttgtcccaaaaggttctatttgactctatgcaaatcagaaagatttgttgattggttacacgacgactaactcttatttcggcttaataaatggatctgtatttt

SEQ ID NO: 33320 - DNA, 543 bp, Glycine max
tcttgtataatttagttaaaaattggccttaaacgagtaatatgcttattgatattttcgcctggtaacatccatacttcataaaaactattttaataactcagaaaaaaaaatgtcactaaaaattatgttacttgtattaatggacgtcactatattcgttggtattaacacgaagcataatcactgaaacaaaccaagttaaattataatgacaccaaattacactcactaccatttggtggttgaattcataggcaacactatattctagtggttaaatttaatattcacacgtgtcaccttaccacaatattacaaaatattaaatgtaataaaccacatatacagtgctctacatgccaacacttgaaatattacaaattttctactaaaatattgcatggaaataaaccacgttgtattaagtgtataattttgtctttacataggtaataatcaaaagcattagtgtttccaaaaaaaacatcaaagatatatagtatccattatcccaaaaaaaaaaaaaactcatgcacaagt

SEQ ID NO: 33321 - DNA, 239 bp, Glycine max
agcttctttgagaaaactttcttgagaagctagagtttagctacgcacacccatctaaaaactaagctcacctccttgagaagcttccttgagaagctagagcttagctacacacacccatctaaaaactaagctcacctccttgagaagcttccttgagaagctagaggttagctacacacccctataatagctaagctgcaccccctggacaaaaaaactgcaaataacaaaaaaaa

SEQ ID NO: 33322 - DNA, 121 bp, Glycine max
  unsure (1)..(121): unsure at all n locations
aagtgttgaagggtgaaacttcctgctctactgttgtcacagagtggtacctggagatatgtcgcggnggtcaggagaccttgtggacgtcaggtggggtgctatcgctcaatacccacct

SEQ ID NO: 33323 - DNA, 212 bp, Glycine max
agcttgtcaagccaattgctattttctcgaaaattaccaacctgtatgcgactgcttttattcggaagtaaagttacattgcaccatgtatgtgtaaaggaaattaggatgataggttgcttattctgtataaatgtcattctataataatattgatcaactgtctctaatgctctatataacaagcctagtaaaaatttgtttggttttta

SEQ ID NO: 33324 - DNA, 455 bp, Glycine max
  unsure (1)..(455): unsure at all n locations
tagattctaagagagcacaaatcctagacttatcccagttgtttttctattttttagcttgctcactagcctttcactttaacttgtatttgaccttattacaacaacacnagttctttgattgtttgtttgtttttttttaacacgacttattttttttgtgttctgatgtgttttaccttccactttacatctcggttaactcccccaaatatggggcaaattgccttgaacggttttgtatgcttcaaaacatgcatactaactatccataaaaagcacaagtatatataatacgtaatcaaaattactaaaataaacaatgtactgaaactaatatagttatgatcattatgcaaaaagcaaaatcatcaagaatttaaaagtcctgagacagatcctgggtatcctgagtctgagccttctcctcacctattagatggaaaacaggggaa

SEQ ID NO: 33325 - DNA, 490 bp, Glycine max
agcttttggtagatgtcttttatgactcgtcagcgattttcaagtttatgccattattgtaaaccacagttacgatgctaaataaaatggataaatttgacatctttgtcccttatcctctcgtaattacatctttgcttccactaaaatatgggtgcaagccattggtttgtttgctcaagcgacccgcgctcctgagtttggacttccaagaccattcaataaaaaatttcccgtgctgcacatttggtgaggatgccgttaacaacgagtaaagcagaaaagttcaaaaaagaaaaattaaaaaagtatttgattgactgtgttttcaagtgaaaaatataacattcatgtgaccttattttatcattcctggaaaattgtctttttgagaaagaaagtgagttatcaagaataggagtcatttgacttaatccctcaattgaaaaatcctttcaactgttttttcgtacttgaaaatccttttttg

SEQ ID NO: 33326 - DNA, 549 bp, Glycine max
  unsure (1)..(549): unsure at all n locations
tgaagaacgacctatcaaatgtgtttttgttggatatggatcaactcataaaggttatcgggtttaccatccaccatcaaagaaattttatatctctatggatgtgacatttaatgagcacaatttcttttaatgttgattctacactttagggaggaaatganagtgaagtgcataatcatgatattagtatgtttgatatctcagatataaaattatattgtgaaaataaattatcgtgtgaggatcattctgcaagaagtgagctaaccccaaagatggaaaattcttttttggataatacagtgtcttttgatcataaccaattggctcaatcttttccacaagttcggcttgactcttcagaggtaccttctgatcctatctcttataatactaatgtagatgaaactcatcatgaaattgtttctcttgatcctacccttgataatactaatttagattaaactaatcatganattgatccttgtctgtgtgagaccaccaacacaccanacactgagtctactatagtccaatataatcttc

SEQ ID NO: 33327 - DNA, 395 bp, Glycine max
agctttatcaacagtttgctgcttttgcacctgcccattcttcaggcatgcccattataggatgcaacatctgtggtggggcccatgaatcaagcatgtgcatggaccaagacgatgtatccaaaaaagtaaactatatgaccaatccataccatcaagggttccatcaaggaagacctccatgatacaatcaggggggaatttctctcaaggccaaggttggagatcccacccctggaataacttcagcagaaatcaaggagtttcatttaatcggcctcccaatcaagggcccgagttatatgataaaatcactaatctacaagacactctgaatcaatatatgtaggattctctatcaaatcacaagagactgagtctgccattatgaatca

SEQ ID NO: 33328 - DNA, 363 bp, Glycine max
tgcggcacaccagactgcctcaaaacctcaatgtttggaaccaagttcattgtgtcaccatatgtaaaaccaaatcgggaatttgttatagctctaacaacttcctgatcatcaccaagtacacgtctgaggatctcataacgtgggatgaagaattttttcaagctcctgttcaaggtatggttagcaattaaaatcttacgcatatcagtgttggaaagcccaatagaacggaagaacttgagtttaggcaaaagggtattctctgcatccgcaacaagcaccaaagggtgtttctccacaagttttgcaagatgggttttggtgaagccatacttgttgagacgatcaataacagcattt

SEQ ID NO: 33329 - DNA, 995 bp, Glycine max
  unsure (1)..(995): unsure at all n locations
tacttctacaaagnacgacagaaacattgagcactcctacacagcacnacgccgcgcatatcaantgtattgcaacatacgtccactgcaccccgcctcactagtaaccacccgacncnnctttgattgttgtaccatcgtttaccaccgngnacccggnggaaagcccttaacaagtcgagacctggcagagcttggccaagcatgagggctctacagaatattatttcacatctacattcacgggggaaaaagaggaagaaaggggaccaaaactttcatggaaacgtgagttaagcaatagggccaccttacacacggaacaatgtacaccttgggaaaatcatggaaatacctaagcggacaatgagtaagggcctagccatttaatggcaaagcattaaagcgcgcattgggtctaaagcaaaaactggaaaccaaatgggcaaagggcataggtgaaaaagcaaacaaacggttagggcaaaagattacgacttaaaaaagaaaccaaccgataacaacgaaaatgaataagaaaccccaggtgtggaagcaagccccctaatttaaaaagaaaccagtggaaaaaaatgagagagcagaggccaaagtaacacaacccggcgcaaaaaaaaagaccggggggaaagaaacaaactagggttggggtgagcgaacctattaaagaaaaaaaacctaacacaaaagggggtccaataaggagaggggcaacaaccaagacgggaaaaaggcggcgaaaaaccccaagttgaccacgagaaaagataggtggggaagctgaacttaactaaacaccccaagacggcgggggaaacaaacccgcggggggggtaaaatgaaaaaaaaaaagaaacaaaaatcctggcgaggcttccagggggaaaaaaaaaaccgttcgccgtacaaaaaggcgggagaagaaacccgggggaattggggaaaaagagaataattcgcgaatagacaacccg

SEQ ID NO: 33330 - DNA, 607 bp, Glycine max
  unsure (1)..(607): unsure at all n locations
tcctagctggaagaaaatcaaaaaagcaaaaataaatatccgcattatatgatgaagaaagtaacatatggaagcaagtgaacaaaaaaaaaaaaaaaagtaaactatcactaggaaatagggatagcctctcgattctctccttggacagcaaacctgtaaatgagaaaaagaaatgggtgatcagtgcttgtaactctaatttacactatgatatttaattatatatacagctagcatggtgaaattaattagatagctaattatatatgcaagaagatatatatagattattacaattaccacatcaaatgatcaggaactctacgatgaatagggagacctggcactactggagtccctcggtgcattgcatcggtagcactccattctattggcgaagttatgctcgttgcatcctgacctgcaacattntattcacactccattaatatcattactactgttttatttttatttttttggtgaatattactactttttatttactcacactnntttatttttaaaaaccattctaatagagataacttataatatgtagttattcaatattcaaantaattacaaatctgggaacgatata

SEQ ID NO: 33331 - DNA, 583 bp, Glycine max
agcttctcccctattttgctataaataggcgaagaagtgaagaagaaaagggttcagccccttaggcacttctctctctctcgaatttgctgagaaaaattatttccgtgaagaaaatccaagccgaggcgcttctctaacgtttccgtaacgtttccgtgagtaattacgcgaagattctcggccattcttcaagattcatcgttcgttcttcgttttcttcagtcttcaacgggtaagtacctcaaaccaagcttttcaattcattttatgtacccgtggtggtccacatttcgtttcatgtatttttattctctttttcatttactttttatacccccttttgacgtgcttaagccaattatttaagtcatttctcgcttaatctaagaataaaataaatttccaccgatcgcttgaattgtatcatccggtagttttggttaaaatgaattctgaccgttcggtcgtgcccgaaccacgttggaaatcaaaaaagaggtaaaataataatataatgatcaaaataccttttagtaaaaaaaaagcgaaagatcaatccgacgttttctctttgggattt

SEQ ID NO: 33332 - DNA, 543 bp, Glycine max
  unsure (1)..(543): unsure at all n locations
tggagacaaaatcatgaaatttgggtggtgccaatgctttggtgagaaaatctgccacttgatcacttgttgaaactggtagtagctttagagtgcccttcaaaagcttctctcgcacaagatggcaatcaatttccaagtgttttgtgcgttcgtgaaaaaccggatttgaggcaatgtggactgcgctttggttgtcacagtaaagagttggagttctggtaagctgaactctcaaatctgcaaaaagatacaacagccattgcaactcacaagcagttgaagacagagccctgtactctgcttctgaagatgatctggacacagttgcttgctttttagcacgccatgacactaaagatttgcctatgaagaaacaatatccagatatggattttctagaatccatacagcctgcccaatcagcatctgaataacctataagttgcatttctgaagttctgctaaagaaaataccttggcctgggttgttcttcaaatacctcaatactctacatgctgcattngaatgaacatttgtgg

SEQ ID NO: 33333 - DNA, 601 bp, Glycine max
agcttgaacagatgattttgattttgtatgtacaaaaacaacaggagataagtgatttttacatgaaagatcaccatgttcttccataccagaggcgcaaggaggagcaagaagtgtgagccatgtagggtgtgtttggtttagatgatggaaatagagaagatggaaataaaagagaatttttctaattaaaatagagtgtaaacagtatgggtcccacaaaaaaggtacaaagtttcacctcaatattatttatctccacctacccgtagtgatggtagtgtaacagagcaggaggtggagtaacaattgactggatatataaattgcacaaattaacttatggcaaagtttgtcaaagaattcatttcttatgggaagtagatattaacaaacattattatcagatttcatataatttcaatgtgtcaagagtattgttaggtttgggtgagttgaaaaaaatgaactgaaatggaaaataaagtaacaagccaccccttattgtaatggataatattagtggaaagaaagaaaaccactggaatgatgtgttccttaagaacacaacacttttcatactataatccctttggataaa

SEQ ID NO: 33334 - DNA, 592 bp, Glycine max
tactaagcttataacatcaaacttggagaaagagttcttggggtcaagacatgttaagttgtcaagtataatgttacttccttcactaaagcggtgatccatctccacacatattgtatcaatagcaacataaaaaatctctgcacggtaatgatgaagattagtgatagtcctcccttctgctcttgaacgaccccgaactggtatttcgtcatccatatttggtaccagaatacttttagcaacacaaaatccttggacatcggcaaaaaaattattccagccactctctcattgtgcccaaccgagctttgacaacatcaactaattccatggcattcacaatattaagatcttttctttgcaatatatttgaaagctcgtttgtgataccaaacaactgtaacattaacctcaaaataaaagcaaatttaaagctcttccatttttctatcagacctgctgcttgagatggtccacgttcatcttcatcaaccatactaagcaccttttacacggaggaccacatatgatccagacgaagcaatgtagtatgatgtgaaccccatctagtatccccgggtctagtgag

SEQ ID NO: 33335 - DNA, 188 bp, Glycine max
agcttccttgagaagctagagcttatctacacacacccatctaaaaactaagctcacctccttgacaaaatacatgaaaatacaaaaaaagtccctactacaaagactactcaaaatgccctgaaatacaaggctaaaaccctatactaatagaatgaccaaaatacaaggcccaaaagaaggaaaaa

SEQ ID NO: 33336 - DNA, 545 bp, Glycine max
  unsure (1)..(545): unsure at all n locations
tcaagaatcaagtttcaaataatcaagattcaagaataatcaagtctcaagattcaatagagtttcaagaatcaagattcaagaacaatcaagatcaagattcaagaatcaagagaagacttaatcaagataagtactagatttttttttcaaaacattgagtagcacaagaatttttcacaaaatcttttaccaaagagttttactctctggtaatcgattaccaaaaggtagtaatcgattaccagtagccagcattgttttcaaaactgatttacaaagccataattgattaccataatcatgtaatcgattaccaatgttttaaaatgttagatttccaatttcaagagtcacaactagtgataaaacattttcaaatcattttaaacttgtggaatcaattaccaatgtttctaaacattgtgattttcaaatttaaacatgaagagtcacatcttttgatgtgtaattgactacactataatggtaatcgattaccagtgactgatttcgaaaaataaatntccaaaagtcacaattct

SEQ ID NO: 33337 - DNA, 589 bp, Glycine max
agcttaccttgaagacaagttgtttggcacgacaactctgaaaaggaaaactcattggcttgtacggtggcgccacaagacgagatgccggacacgcgaaaatgcactacgcccttcggccgaggtcacgggggtgcgacggagatgcaggcaaatggcagaggtcacggcgaggtcacggtagatcgaaatctcagagaaacagggaagcgagagctcgagcgcgagtgttcatgaattagcgcaaaaaaccttataaacctcaatgttaattagggtggctcaagaacaacgtcattgacattcaaaatttcaacgatggtgttttcaaaagcaccgtcttaacttacctgctgcgcaacctacaaagacaggcaccccggtcaacgttgttgaatgtgtcacgcgccatgcacatggcacataaaatggtaacatatttacaaaattgccactactacttctactacgacgggtattggcggaacgatggggatagcgtgtcgtaaaatggcttttttttaatagtggcaatgccccttaacatgtttaagggttgcatgataatattgacaatggattttttttt

SEQ ID NO: 33338 - DNA, 530 bp, Glycine max
  unsure (1)..(530): unsure at all n locations
tcttgctaaagggctaggaaggccaccataggggagggatccagtgtagccccgcaagcggagattgagtttgacggacaccatttctgaagcgagaagcatcatcgccatttaaaagcgattaaggattggtctttcctcaaagaaagacggtccaactaagggaaggagagtacacagaattccaagcggaggttgccaggaggcggtggacccaactgacagagcccatggctaagtatgacccttatttattcatggagttctatgcaaatgcctgacccatagaaaaaggagtcatggataagcgttcctgggtgcagggccaatgggtctcttatgatgaagatgctatcaaccaattccaagggcatcctatggtcctagaggaggggcaacattgtgaatacaccaaaagaataaatcaggtgtcaagttttgattaagaggccataggccaggtattgtgtctccccggacaggattttgcaagaagcatgacangaagacnggtgtggatcatgcacact

SEQ ID NO: 33339 - DNA, 549 bp, Glycine max
agcttgggtcatggtttggtgtttggtttccttgagcctagtagatacacaatgcaaaggatagacgtgatgactgtcaatattacattgaaacatgggtgaaggattcaatatgagaggtgtacctaggagcttacttgaatcagtaagtaaactttatcaagagcattaattaaaaaaatgtttgcattatacgtacttaattataggtgtggaattcaaggcctattggcagcttgttgttgtgtgtcttagggacaatatcgttgtttggttttgttcattgcgtgagaagcctaatattaatatcaaagctgcaattagcaagttaatttgtaaattataactcatttactctattatgcattaagaaatgtaaatacatttatgctcgtatatacatttatgtttttttgtaaccagtgcaatgatgacattaaacactagtttggatggtaaatttgatcaacctgcaccttcctaaatggaagaaaagttagtcatttaataatgcttttttttttttgactaatgacattttgtaacttt

SEQ ID NO: 33340 - DNA, 597 bp, Glycine max
  unsure (1)..(597): unsure at all n locations
taagcttattgagttttacacactctccactgttggtcctcaatttattgttaattatataatcagaataatgactcatcatatgagtagttggacctgtaaaatttgtgatttttaagaaatttgagccaacaaaaaagagtgttcaagagaatgtgttagagacagtgttgctaccatttctctgtttaggaatggtgtttgtagttattagtgaaaatagaaatagaaaatactttccttatgtcaaacaggcttctgcattactatttttagtttttacaacattatgatagatcattatatattttttctttctctaaaacaaatgatttgtttattgtcttggggtggtgtatataaaaactgatcaacacattttacttttctttttttgcctgttcattccaatgtacaaatgattggcttatgatgcaacaaaatctaaatcaggaactaagtagctcttttaatataaaacatgtnttctttatcttttacttttctacaacattcatgtccctttnctttgatgtctangctgatgtgctcngtgatatattgaagatctatttgagaatngtgatataatgctct

SEQ ID NO: 33341 - DNA, 575 bp, Glycine max
agcttaccaaaaaaagaattttttattaaaaaaaagtaagggtttcaaggtcacagaaaattagatgaaggagcataaacttaaataatgaacaataaaaatcaaaatcaaaatgcatatgaataaaaacacacagaactgcttcacaccccaccactacccccatatttatcagtcaacattcactgaaaccaacatcggtctctttcattttcatctggactaaagccacacctagaaattccacaactgcatatgcatatttatccactatatacaacttaaccattttaattatttatttttaatcaaagacaacttcatgtattatgtaatatattctttttattttaatgtcgcctttaacttttttttaagaattttaatttcatttagtgtgtaaattagtttattacactattatatacttatttaaattcttttcttaaaaaaaggtttcttgatttttacttttacgctttattattcatatatttattttttatattttaaaatcctgcatttttttttaaaaataaatcctatatccctaaaaaaagtatttcttaatttta

SEQ ID NO: 33342 - DNA, 241 bp, Glycine max
tctcattgtcatgggagacttacaaaaaataaaggtgggatgaattgtaagaaaatggaagacagatagactgaaatggattggccaaaatttcagaaaaggatttcccttacattggctatttggtttcctctacttcttgttgggttcttcgtgcatgaggaaacaaaatgtttcctttcttttttatatgcttcaccaactaattggccaattagaactcacttgtgcgcttggcgcg

SEQ ID NO: 33343 - DNA, 508 bp, Glycine max
agcttgcctaattaactttttaattgagagaaaatgattattaaacacacaaaatggaagtacttagtatttattacctatacttaacaaaaaaatacttataacactacaaaataaccataaattggaagagtttgatacaatttacacaagctttatacacaaaagttagtcgtattcaccgactaacacttaacgacatggggggtcgcttagcggatattgcagaaaactctgcttctgcataatcggcttagcgagctactgcctgctaagcctaatgataaccgcaacaaatatgcgctaagctcataagggctgagcttagcggaccaataatttcagaaatttcactaagtatgggggcttaacgagctaggctcgcttagcccaatggctgccataatgaaatgagcttaacccggatatgcttggcttagcacgcgactttcaacaaaaaattgactaaattacctgggcttagcgaatcatccccgcttatccacag

SEQ ID NO: 33344 - DNA, 567 bp, Glycine max
  unsure (1)..(567): unsure at all n locations
tggagaggatgcttcaatggaggaaaagaaagagggagagaaagatagaggggggagcatgaaattgaaggaagaaaaaagggagagaagttgaactttgagttgtgtctcacaagactttcattcatcaaagttacaacaagtgttacacatgcttctatttatagagtaggtagcttccttgagaagctttctagagaaaacttctttgagaaaacttccttgagatgctagagcttagctacacacacccctctcataactatgctcacctccttgaaaagattcctaaagaagctagagcttagctacacatacctccctaatagctaagctcacctccttgagatgagaagctagagtttagctacacaccccctataatagctaagctcacccccatgacaaaatacatgaaaatacaaaaaaaaaaatccctactacaaagactactcaaaatgcctcgaaatacaaggctaaaaccctatactactagaatggccaaaatacaaggctcanacgaaggaaacctattctaatatttataaagataagcgggctcatact

SEQ ID NO: 33345 - DNA, 299 bp, Glycine max
agcttacttgagttgttgtttgttactgaaaagagggagcaaaaatgcaggcaatgcagggagattgaagcattgtgcatagggtgaaaatgctcagaggaagaaaaatggcaactgccttaataaaatggcaactgcctaaggcagttgccttattgattggcagtttcgaatcactcgcttaacgcatggactcgctaagcgattcaacatgacgtttgagttttaaagctcatgcgcttagtggatctggtcgctaagcccaatacaaaaattatgaaattccatacaatttttgg

SEQ ID NO: 33346 - DNA, 523 bp, Glycine max
ttgacccagggtgagaatgccaatccttaccctcggaagcagaaaaaagaagagaaggaaaatttccaatcaaaggaaaaaggagaaggaaaatttacaatcaaagaggaagcaaaaaaggagagaaggaaaatctccaatcaaaggaaaaaagagaggaaaggaaattcccaatcaaagagtgggagaaagcccagagacaagaaagagaagtcccatgcaaagaatgggagaaagaaaaaagagaagggaaaagatgaaagttcctgatcaaagaaactagaagaaatgtgcagaaagatcttttgaccagatgatatctgaacaatacacgaatgtcacctaatgaacaaaagaaagaaaaggaaaccatgacctaatagtgggcttcttcctttgattaccaaccaaaatcctgtgcgctagcgactgtttcgccccgcactaaacaaaaacagaataggaaaagccaacaataaatccaatgcctaaaacacacaaaagccgaaaacccatcaaagac

SEQ ID NO: 33347 - DNA, 359 bp, Glycine max
agctttcatcattatttttaatttctttcctttcggctttaacgcgcttttaccgttgatttaagccgttttctcatctaaataatgataacaatgaatttcaaccgatcatttgtgttgtaatctcatttaatcacttttaaaatgaaatctaaccgatcgttcacactataacctgggttaagccatataaagtgaaatagtgataaaataatcaaaacgtcatggaacatgataattaactattcaaaatatctttgaataaaataaattaagagaatcaatcggacgttgttctttggaagtttgctcgaatgaattgattaataaccaacgggaaactaagacttgaatagact

SEQ ID NO: 33348 - DNA, 913 bp, Glycine max
  unsure (1)..(913): unsure at all n locations
gcgaccgtctctcaactcaaccgtcactctaaattctcttcataaccatctatgaatatataccttcnananatcacgcaatccgggggnnctgttcgttcatgccatgcgacaaaaaactcaagctcggcggccacctaagccgggaggctattttactttgggttggaaggagaaccggggggagggatctcggcgtgctgactggccgccatcaaaaagaaaagaaattacgccaacttaattggccccacctcacagcgtgaaattataacgaaagacacataatacgaagattgacaatcaccagtggacaaccagaaaccaaaaatcttgggggtatataaccccactcaacaaagcaatattgttccataaaccctccccatgaccgaaccaattgcaaataccataatctcctcattttcacatttaccgaaggcattttgggcataacgatgggaagtcgtaacatcaagggtggaaccacaatacgggagggatcccactggttcaccctgaaaaccccggccctttagggcctggggtttacaaaaaaacacctttcctggggcgtgaagaaaaaggccccccctcaacacttttttaaatcacaccaaaaacacttttttttgtgggcccgcatctttttctccgcctctcgaaacgagacgcgttcctaatctcaccacactcccgtatctgccctaacactcaaatccagcgagcgctataaatctcttactctctccttacaaatataacctcacccaatcccaccgtcctatcccctcttcattaaatacacaatgaggtcacacatatagtgatactcaccactcctcgacaccattataatcaccccctcccactgatatttatcacaccggccccgctctcgtgtgcccccgcg

SEQ ID NO: 33349 - DNA, 388 bp, Glycine max
ccgggatactctaccggcgagctggcggcctgcaagcttgaatcaggcctttttgttaatggtgggaccatttccttttctagaaaactgtcactggttaatggagaccctcaagagatgatgagcgctctatagtgacatagcgtgggaggacgcttacgaccatttagcgtttgtcggagacttggctggtcaagccggagagcctggacatatgatatcccagctgctgccgttcatgcgaccgggatggactagtctttggtgtgcaaagctacgaatgttaaatcactagacaactcttcccttgtactgccaattggaaaatgcatgtaaaaaattttggccctgctatctattggaacgagcccgtgcatcaatatgcaca

SEQ ID NO: 33350 - DNA, 381 bp, Glycine max
  unsure (1)..(381): unsure at all n locations
tctatagaaggttcgttcctaatttctctacaattgcatcacctctcaatgagctagtgaagaagaatgtggcatttaactggggtgaaaaacaagagcaagcctttgctntgcttanagaaaagcttactaaggcacctgttctagctcttcctaacttttctaaaacttttgagctagaatgtgatgcctctggagtgggagttggagctgttttgttgcaaggtgggcaccctattgcttattttagtgaaaaacttcatggtgcgacccttaactaccccacctatgataaagagctntatgccttaataagagcactccgaacttgggaacattaccttgtttccaaggaatttgtcattcatagtgatcaacaat

SEQ ID NO: 33351 - DNA, 504 bp, Glycine max
ctgcaagcttatgcccatattttcttacaaacgttctcttgcacaaggaacattctatgtaacccgagaaaaaatggcagcccaatattacaattcaagggcagcttcgtttacctaacattaattttacacgttacctttccaaagggtgtagtattgtgtacattacattcacacaaccatctccttggctaaattcacatacatgcatactcaaagcattttgggggaccaaaaattgctcatgtgcacatcttggtatttctaatacctatacatacacaaacctcatgatgaatcttgactatctacacaataaggtgctacatttcatgctcttttcaagtttttgctacctaaggccgcatgcaaattcaagtatatttttctttggtggctaaaattgtattcaaattaaaacgtatacatttttttggtaatgaatcttttttacatagcatgcgacatatttatgtatattttttttgggagacattttgacta

SEQ ID NO: 33352 - DNA, 325 bp, Glycine max
ggtgatgagaatcatgaaactggccaaatacaggctaaatgcccttgtggagaaggacaaagcccccgagtggagaaggatgaaggcccaagtggagaaggatgaaggcccaaaggcataaacactattagactatttattggtgctgaaggcccaaactaatttgaaggcccaagttaaataagtttttagttataatttatttttattggaattttggcccaaactgtttaaaaggcccatgtctatttttatctttttgttcagatacactataagtattggtttttattttcaataaagaacaaaaaaccttgacatttga

SEQ ID NO: 33353 - DNA, 179 bp, Glycine max
attgatatgttctacaactgattttacatgaatatctaatagtcataatggatgatctatgtctatgattcacgcattttttttctttctttacattttaagccattggcccaagagctatcccatgtatattgctctaccattagcaggccctttgagccaaacacttgatattttgt

SEQ ID NO: 33354 - DNA, 473 bp, Glycine max
atttacaacagtcattagaaattctaattaacatcttacaatgtgcaatcggctacacatgtatggtaatcgattaccagcatttacagaacgttttaaatcaaattttaaagcctgtaatcgattacacaaatcgggtaatcgattaccataggagcttttcaaaaaatattttcaagagtcacatctgtccaataggtttatgaatgaccatcaaaggtctatttatatgtgacttgaaacacgaagttgcttagagtttttcagaacaaaaaggtcttatcctctcaaaagtaaaaatatcttatcctcttaaaaattccttggtcaatacacttgcaattcaataaggaattattttgagtgctccatttgtcaatctatctttttcaagagagatttcttcttttctttatcttaatttctgaaaaggtattaagagattgatgatctctttgtgaaagcaatttgac

SEQ ID NO: 33355 - DNA, 81 bp, Glycine max
tgcacacacgcctgttgaccaatagttaaccttctcgacatactgtcttgcgaatcccgatcttacccacattctcccctt

SEQ ID NO: 33356 - DNA, 762 bp, Glycine max
agtaaggattcccggcgcccgagctctaatttgtgctttatgagacgtatcacaacacggtggccgtagttttaaaacttctttgactgaaagacgctctcgatacccaaattaatttatgcagcaacatatgtggctttggcccgctggtgttataatgcctaagcccacaccgagcgtccttctcaacagatgctctaccataatggcgaaaggcggcttaagccgcattgaaatcttacacatctgtggcggatataacaccgcatatggagccatctatttcattgtgatgtgagccacatgttaagaatcactgaacacatggcatcctgtgctcaaaaatattcatcccccaatttagggggatcaccgtgggggctaacactattttttatttatactggggggtccatgcaacctctgtgttcttataaaaaaccccccaatgggggacctttgggatctacaaaacattatgtgggggaaattaacactcttaatcctcaccatatatttctgaaatcaatattgtgacaactcttaataaccccctgccatatttgggatcctatcttgagacaaaaaaaaaaattgcttggaaatgctcttttttaaaaaacgatatcgcggtcttattcatacaattaaaggctgcaaccaatacatgggaacacctgtcttattctattacatatctctttgtctatgaaataaaaaataataaacttaattgtgtcttatatataacgcccactctcg

SEQ ID NO: 33357 - DNA, 526 bp, Glycine max
agcttcacaaaagtttgtatggtttgtttcaagcaccgagatagtggtacaagaagtttaatgagtttatgagcaactcaggattcaacagatgtgacatggaccattgctgctatgttaagaaatatactaatagttatgttatccttatcatgtatgttgatgacatgttgattacaggatctagtatggcagaaattaacaagttgaagtagtagttggcagaaaactttgaaatgaaggatcttggtccatctaaacaaatccttggtatgagaattcttagaaacagatcagaaggaattttgaagctatctcaagagaaatatatacacaagttgcttgacaggttttatcttgaagattctaagaccatgaatacccctttgggatctcatttgaagttttcaaagaagcaatatttgcagacaaatgaagaaaaatgttacatgtcaagagtaccatatgcattaacagttgggagtttgatgtatgctatggtatgtaccatacctaacatagcaca

SEQ ID NO: 33358 - DNA, 465 bp, Glycine max
aactcaagcttaaccatcaagagaagaagctaaacatggtgcttaaccactcaagacaaatgttaaacataatatttgaatgcttaaccaccataaaggcagaagcaagacaccaatgtttaaccatccatggtagaagcttgacatcaatgcttaaccaccatggatagaaacttaatgatttttttaatagtaggggttctttaccagattgaaccccagggactgcaactacttcaaggacaaagacaaggaagaagttgctggacaacaggatcaacaaatgacttataatagggtccttgaccagatcgaacccctaggactgttagacaagtggcctcagatatcttaagaaggggggttgaattaagatattgcaaactatttccccaattaaaattctatttcaatttcaatgcaagttgcaagttcccttaaaaatgaactcttaaataatgattc

SEQ ID NO: 33359 - DNA, 244 bp, Glycine max
  unsure (1)..(244): unsure at all n locations
agcttctttgagaaaacttccttgagaaactagagcttagctacacacacccctctcataactaagctcacctccttgaaaagcttccttaagaagatttctaaagaagctagagcttagctacacatacctctctaatagctaagctcacctccttgagatgagaagctagaacttagctacacaccccctataatagctaagctcaccccctggacaaaaaacatgaaatntnaaaaaaaaa

SEQ ID NO: 33360 - DNA, 522 bp, Glycine max
tctagccaaatggacttaccttgaattaattcctttgatagcccttttgagccttgtttccctttccttgttttgaagctcactacaagccttaagtgaaaaaccatgatattaccatatccttaaggaattttggagctttggaattgttttgggaataagtgtggggggtttttgtttcattggacaacttgttttgttggctatgcttcatgatgtattttgggccatacttgatgtacattgtatattggttaaatgttggacatgctgaatgaaatgttgtttctcaaaggctaaagagtaaaaaaaaaaaaaaaaaaaaaaaaaaaattcgaaaaaaaaaaattcgaaaaaaaagaaaaagaaaagcaataaagttgagtgaataagatcttaaatggcacaagaatgatgaaactcttggttctactcttcatgtttaatttttatctttacttctttttatttttttcttaatatgcacttattcccctttgctcctctattcctttgggattt

SEQ ID NO: 33361 - DNA, 608 bp, Glycine max
agcttgtatcttcctttcctcctcttcataacattgtcttctttgtcctttcggggggattgttaaaagttgaattgggattttgttttatttgtattacagttataattagttaggagtagttacaaaattagttagttagctttacaactttgtataaaaactcattttctgtactttgtacaaaccaatttcaatgaatactcttcttaataatttgtgaccttaatgagttggccatcttttgaatgatgtttgatacatgtcagccagtgaagaaatatgtctaatgaataaatctttggtttttgaacttcttattgggcaaatttgctagctgtactctcataatgtcatgtaaacaaaataggctttaaaattttaaatataaaataaaatccaatattcaaatattgtacaccacacttataatataattataaaaacattaattttataattttacaccttaagtttacataaaggctacatatgaatattattttccactattttaatttttaaaaattatataattatttttaaaaaattcccttttgaaatgattttacctttatttttccattattttttaactttctttttta

SEQ ID NO: 33362 - DNA, 581 bp, Glycine max
  unsure (1)..(581): unsure at all n locations
aagcttgtcaaatgaatcactgcatattgtgcagtccctatcatccttcagaggaatgtataagagagtaggcttgcaaacaaggttccaatttggacaaaagtgtaaaactacttattaattagaattttatgaatcattgtttggaatattgaagaaaaaagacaacctgacaaccagctgccctgaaggaactaaaatcatggcatccaacaagaactctgcatgcttcctgcatggatatcatcaataacttgaatagctgcaagattgagaatctagtaagtataaggagctgttaactaacttgcatagctggaagactaagctcctcaggtacatgccatgctcgatctttctcgaaggttgacaaatgctctggcccagaaagcaaccgatagaagtatctgaatagtagttccaaataactatcaattactgcatatggtcataaacagaacaaaagaagttccatgacaatgcatggaaatgtagccagattcagaagatctaggatgaaccttactgtgatactctccagtgtcactatttattattantatagagtacaatttcatgga

SEQ ID NO: 33363 - DNA, 363 bp, Glycine max
agctttaaagaccacttttatacaattcatctctctttttgtttgtcatacacatttatggatattggagtactttattgcaccgatgttttatattcacatttttattaagcatttttctttatatacgttcactgatttgctctgtattttctgctcccctaggaggtttattagttggcattcattgatttcaagccttcttatgcatctctgacatcctgttcttggttccttgtgggaagatatattctactccatttccattaggaatggattattttcttaaccaaaagaaaatccttgttagtcctgactttttttttttataagaatatgttgataaacatttcaaagacactg

SEQ ID NO: 33364 - DNA, 384 bp, Glycine max
tagaagcataaatctgcgcatactcacgaatccttcatcttttactatctaaagcgcatgcgaatataacattccctttctgcggctgaaaaacatcctcgttatcgtcgtagtcctctagggtctcgccggtggtggtgccggtgccggtgccggcgaagagggaatccacgtcggtgagatactttgcggatttataagcgctgactattccgttgacctcgtgaacgattcgtaagaggcgcgtgtatgcctcggagggggtaagtttgagctcggtgattaatcgggcgagtttgttgaggacgaggcagggggtgaggcgctcgatccatcactggcggaggacggcgtgtgtctagatgtggactccttctaccgcgt

SEQ ID NO: 33365 - DNA, 546 bp, Glycine max
agcttcctactggttgttgtttttacaatgtatcagctaccacattctcttttccttgcttttactcgacgctaaagtccagtcccatcagcttttcaagtccccaattctgcattaaagttgttggaggtttttctagcaagtgtttgagtgccttttgattagttttgatgataaagtgttgccccagaaaataatgttgccatttcttgactgcaaacaaaatggcattgaacttcttttcatatgcagacaaaagctggtattttggccccattgctttgctgatataagctattggatgaccttgttgaattaagacatccctaatgccaattccagaagcatctgtctccacagtaaagggttgaccaaaatcaagtaaggccagtataggggctgagatcaaggctttcttttgtggaagaaaagccctttttgtgtcccattccacttgaagtcagtattttttctgaagcaactgtgtcaaaggttgagctatcttcccataatttttgataaatctcatctaaaattctgataacc

SEQ ID NO: 33366 - DNA, 283 bp, Glycine max
cttctcttttctttcctcttttctcttcttctctcaaaggttcttcattcttcttcatctttttacttctgggccaccatttccttccacaaatatcgtgggttcttcattggtgatgaacaaggagggggaaaaaataatcaattgaaggattcactcccagccaagctgaatttgagtcccggttgggtctttttctctttgtgaaaggtcttcttctctttgtgaatggtcttctttctctttaatcctatttaatttttcatgattgttattatgttta

SEQ ID NO: 33367 - DNA, 313 bp, Glycine max
agctatgaaggacctaggtatttttttctagcaacaacaacccttgcaccacattaaaaaaattaacatctgcattcagaaattgacttactagaagatagaacttattgacgtggtcaaagataactactaccatcgccattttgaatagatacaactacaaccttgagcatagacatacggctagcgactatgacgcataaactgtactagaaaatcgtcaacaaagcccttagaagaaggatccttcaacaagatacgctatactcgagaacaaaggctaatcgaaccgagcacacagaccttggatgga

SEQ ID NO: 33368 - DNA, 804 bp, Glycine max
cttgacttgtataattatttggaaaaacatccttaaaaataagttttttcttcaatcacaaccgtcattgactcctacaatgagagactttatatcaacaaagattccttgcacaaggaaaaaccagggtatttccaagattatcagaccaccaatgggaaccatcccaaaatggaaataccggccattaaggaactttttctaataccgggccatgattgtccaaacaaggccctcagcacgttgatgacaacacgccctctcttacaaaacacgcaaaacacataaggagtcgctatcataaacatttttcaaagttgcccttttgaaacacacctcttaatcattcccgaatattcctaaaaacgttttttattgttttttttgctcgccactgcttcaaccccttgctctcaatgctttaaactttgtgtccccaatttaagccccaatatccttttacaacgcaaaagtgtatttactttggcggtataatagaaaataacaattttagggcgatacgcatactataattgccgttacgctttttaattctttatcatcaggagaataacaaaaatttttaattaatatccctaaatgcctaccgtccatgtatataagttgataataatcccacacttggggtcataaaccggatgatatcctggaatcacctttaagggaaaataaaaaattacaggaggccctttttaaaaaccaacaggtgggtcaagaacaaaaataattcccctcctccccccagggagggatggaagaccccttggaagggtcccaccccct

SEQ ID NO: 33369 - DNA, 202 bp, Glycine max
agcttctcccccaattttctataaatagggggagaagtgaagtagaaaagggttcagccccttaggcacttctctctctttcgaatttgcttaaaaaaattgtttccgtgaagaaaatccaagctgaggcgcttccgtaacgtttccgtaacgtttccgtgagtgatttcgtgaaggttttcgatcgttcttcgacgttctt

SEQ ID NO: 33370 - DNA, 444 bp, Glycine max
tggattgattcagtctgacgagggattgaggtttagtaatttatgctacaacacagaacacaagagcatgattgattagagaaatgtatttatatgcatcagcttgtttgtgagaaagacccaacatttctacctactcctgtcacttttacttactttgcattttatagatttagcataaaagtttagtttaaatcctatttgaaattatcaatcatacatgttctctcaacaatgcttcatttctgaacttaatttaagctaatgttagttccctgtgttcgatactcagattcattcgttttaatttttaaatacttgacgatccgatgcgctttccggcaaaccagatttcccttgaatatatttgaacgaagaaaaagtggaacaaaaagcaacagtaggagaaatccagcagtaatcatctccctttcaactatggga

SEQ ID NO: 33371 - DNA, 280 bp, Glycine max
agcttcaacattcaattttgagtcgtgtcgtaatattacgggactcaatcagacatccgagtaaaacgttattgctgattgaatggtacatagcttcaaaatttaatttctaacgactcgttgtttgacatgactgaatcccacattcgagtcacacgttattggcgatagaattggctcacagcttaaaaattttgattcgcgacgtgtcttatttgacaggcctcaattcatcctaccattgcaaactttgtggcaccagaattagctccgaagtttc

SEQ ID NO: 33372 - DNA, 317 bp, Glycine max
ttgagccaattcaaacgacaataactttttactcggatgtctgattgagtcccgtcatatatcgagacgctcgaaattgaatgttgaagctctgagccaattcaagcgacaatatctttttactcggatgtctgattgagtcctgtaatatatcgagacgctcgaaattgaatgttgaagctctgagcaaattcaaacgacattaactgttttctcggatgtctgattgagtcctgtcatatatcgagacgctcgaaattgaatgttgaagctctgagccaattcaaacgacaaataacttttactcggatgtctga

SEQ ID NO: 33373 - DNA, 352 bp, Glycine max
agcttcttagaactatcatcatttgacgctttattggcacagaataagttgctttctatgcaacttgagattttaacagaaacacttggtaagttgccaacgaaactgtctattggtcgaccttcacattcttctattttgcaggttacaggttgtaccatctgtggtgaggctcatgaaacaggccaatgtatttccattgaagaaaacactcaagaaattcattatatgggaaatcaacagtgacaagggtatactcaaggaggattttcaggcttccagcagggtccttataatcaacaaggagtggaggtcgcaccctggtaatcagttcaacaaagaccagggtgga

SEQ ID NO: 33374 - DNA, 370 bp, Glycine max
  unsure (1)..(370): unsure at all n locations
cataactttattttcatttccatgttggcgattgtacagatctgtttgactggatacatcacacaaccttagaccttagcatattttattcttattntatcttttggtacaccatgtatatcacgtatttactttttttggtcttctgctttgccgctcacataggcttacatttttattgtcaatcctgtgttgtagatggatttggttaaattattatttgaagtctcagttatatttttgcttaaattttgttgtccatcttagtgttcatgtcagttcttcatcataattcacgtgtgcatcaatttgtactcatatcttgcaaagaaatccccatttggagtctgtcataattcacttctgaatg

SEQ ID NO: 33375 - DNA, 105 bp, Glycine max
aatcacataactgtttcttctcgcgacccatttatatctcactatcctcccatcacattgggagacatgttccacccctgttataggtactctattctgatggcg

SEQ ID NO: 33376 - DNA, 227 bp, Glycine max
agcttggacatacacacttgttaaaattactgagaattggttactttgaattctcgagctgaaagttttactgaattttctagacatctgaaaaaaaattataaaaaaagaaccaggtggtttggataaaaggaaaaaataataaaaatcacacaagttggcagaaaaatcagtatccaaaaaaaaaaagagtgaaagggaagtgtgcttgttgttttggctgaaaa

SEQ ID NO: 33377 - DNA, 408 bp, Glycine max
  unsure (1)..(408): unsure at all n locations
tcggaagagagtgataaggtacaagccctaaatgcagagcttgaaagagcccgggtagtcgaagagaagttcaagtccatagccatcaaagtctgaaaagagtatgatgaactaagggacgtcaatatggccaccgctgaagccttggaacgagaaaccaaaaaggcccgaaaggaagaacatgaccaaagcaaagttttgaggggctttatagggcagcaatagtgagctcaagctccaaagaggtgaaaggaatcatcatgggtcaaaggcatgatcttgaaggacgagctaaaagcttgccttatgtcgaaaagaaatttgtcccaacagttaagcgagactgagggaatatgtgggccgtcatcgatgagtgcanagagaagctaaatctagcggcgactcatg

SEQ ID NO: 33378 - DNA, 421 bp, Glycine max
  unsure (1)..(421): unsure at all n locations
atctaggtatctaacacccctctatttagtggatnttcaaggtntgagaagtgaaaatgagaatggggtaattttggagcaaactctcaactcanacaagtctataacattaatctaaactctctcaaactggttttacgacgaanactctgccgaatcaaaatttgactcctcaacacccaatttaccctagaaatggctcttgccttcactttggtcactcattntcctcctttgcacagcccaagctttcccacagtcctaaatgacatttcaaactaggattaactcactttaacctccaattaccactaaatccagaattagcttttcaaaccctcaaagcatcacacttttccactcatatcactacattctcactgttcaaccctaggttaactctacccttcatctctatcag

SEQ ID NO: 33379 - DNA, 263 bp, Glycine max
ttctattggataagattcccttaaaactattacttttacttcctataatctaacgggtaaatttataccttataacatatttataaaatgaaaaaaattacaactattaataaataattaaagaatatttttttaatttatgaatttttctgtttattgtagtttaacacatgattaaaaaattcctaccaatattcattatcattgtataaaacaaatctactctttatcatggaaaagataatagtgtggaaaataaaaaa

SEQ ID NO: 33380 - DNA, 433 bp, Glycine max
gctctttcaactgcacaagcctattgatatttgcagagtattcttgtggaaccttcacccaacgaagacactgacaaaaacttatcttctccttcttggacaaaatatggcaggctggtggcaagtaaattttcttcccatcagaccttggatgcaactgtgatcgtatacccatatcagctagatcttgacgggtattcaagccatccttcgtcttgccttgaatgttaaggagcatcccaatcacactgtcacaaacattcttctccacatgcataacatcaatacaatgtctaacgtcaagatcacaccagtactaaagatcaaagaaaatggacctcttcttccatatgcaactctgactattatgcttcttttgggtctatccaaatacagtattcatgtgttgaacccattgatatacctgctcacc

SEQ ID NO: 33381 - DNA, 179 bp, Glycine max
tgtctttctgtaacccacaagggagaaaataacgatgacttgagccgatatgaactcttttacctttaaaaaaccgtttggataacagacatctaacataagtgttactttatcaaccaaaatgtaatgaaatttgggctgaatactatactcatactgagaagccatattgtaattaa

SEQ ID NO: 33382 - DNA, 161 bp, Glycine max
aattcaaaacaagaaaatatcataatttgcatcttttcaccacattaaacatggggcaagacactggtaaaagcaatatctatgaggactaaacatagccataagcatagccaagtaaaacaagaaactgacaagggtgagaaatattataataccaattt

SEQ ID NO: 33383 - DNA, 300 bp, Glycine max
ttttatatgtgtcttatacacactttaaaaagcccataaatttgtaatcaatataggaaacaatggacattacacgaaaagaacaagagcgttgtgattgctgcgactaattcaactggaaagtggaaactagtccattggcaggtttgatctaataagagtaacaataaatggaaatgcttatctcacttgttgaaaaaaagtgacaggtttgtgtagatgcaattgaatccaccaataagcaacgatttcaatctaaaaagtgatatcaattactatattttttttttaatttataat

SEQ ID NO: 33384 - DNA, 340 bp, Glycine max
  unsure (1)..(340): unsure at all n locations
aaccattgcgaatcccactttcctcaaagactatgcatagactcggagagctcaatacagctcgtgccgcatgttcgtttgcaattcaggaggttactactgaagcgaaatatacacgttattatcggttccattctgtgataaccgaatcagtggtcatttgtagaataaatgtaatagagagtggaatgatagtggcatacagacttatctcaattatctgttcctttagcattctttgaattccctcgtcctcttatgtgtgcatcggaacaactggttcgacctcccttctttagtcatttncgaacaccacactcggcaggtcacctctgatcac

SEQ ID NO: 33385 - DNA, 421 bp, Glycine max
  unsure (1)..(421): unsure at all n locations
cccagggtgagaatgccaatccttaccctcggaagcaaaaaaaagaagagaaggaaaatttccaatcaaaggaaaaaggagaaggaaaatttccaatcaaagaggaagcaaaaaaggagagaaggaaaatttccaatcaaaggaaaaaagagaggaaaggaaattcccaatcaaagagtgggagaaagcaaaaagaaaagaaagaaaattcccaatcaaagaatgggagaaagaaaaaagagaagtaaaaaagaagaaagttcctgatcaaagaaactagaagaaatgtgcagaaagatcttttgaccagatgatatctgaacaatacagaattgtcaccaaatgaacaaaagaaagaanaggaaaccatgacctaaaagtggtcttctccctttgattaccaacccaaatcctgtgcgct

SEQ ID NO: 33386 - DNA, 295 bp, Glycine max
atggtgttatcgattacaatatattggtgatcaattaccagtgtatctgaacgttgtaattcaaattcaattgtgaagagtcacatcttttcataaaatgctttgtgtaatggattacatggttttggtaatcgattaccagtgacaagttttgaataaaaagtcaagagatgtaactattccaatgggttttaggttgtctcaaggctataactcttccaatggttctcttgaccagacatgaagagtttataaaagcaagaccttgattttcattttataactttttcataac

SEQ ID NO: 33387 - DNA, 146 bp, Glycine max
cttggtaacccagctggccttgaatcagaaatttgtacctgttgcaagggtttgtggtttgtgctcctctgctgaccaccatacatacctttgcccttccatgcagcaacctggagcaatcgagcagcctgaagcttatgttgcaa

SEQ ID NO: 33388 - DNA, 256 bp, Glycine max
  unsure (1)..(256): unsure at all n locations
taaatccttgtgctntgttggtgcccaanataggtattattatgcactaaatccctnaaagaggtggtatgatgaatgttcatagtggtgcaaccctcttttgtaaaatcacttgtgcaccttacatcttcatgatttgtgtacatagggactcattatggagggttggtcttacttttaatttccataccaacctatgtgctcatatgggacaccctaagagaataaaggtcattcctgagtggcccactccacc

SEQ ID NO: 33389 - DNA, 150 bp, Glycine max
ccctagctcttttagactggtggcccctaggctcttgaccttgacctgatagaacctccttttaagtgaaggcatttgacttgatcccatgttttactaaagtgaacaaaaatcggtgcgaatcaaaactccgacatctatcatgggtgg

SEQ ID NO: 33390 - DNA, 360 bp, Glycine max
  unsure (1)..(360): unsure at all n locations
tatgcgcatacttcttcacgaacgttcacttgcacaagacattcttataactaagagaaatgcacccatatacaatcaaggcaccttcgttacctacattatttacatgtacttccaaggtgtatatgttacctacatcacacacatttcctttgctaaattcacatacatgcatactctaagcactttggctatcaaaaattgcatacgtgcacatcttggtatttctaatacctatacatacacaaacttgatgatgaatcttgactatctacacaataaggtgctacatttcatgcccttttctttntcaagagtgcttttttttttctttttntttttactacctaaagccgcatg

SEQ ID NO: 33391 - DNA, 337 bp, Glycine max
cttcttgaaggtggcagtccatgaggaatctccttgggaaagacatctttaaattcctgcaataagggttgaacactatgagaaacataaatagttaactgattagaattatcactctctctctcttgtgtatcactcttttcctcaggtgtatcactcttctttttcgtattccattgtggcgcctcactattttctttctcttgttcaatttcgagcgtctcgatatattatccgcctgaatctgacgtccgtgtgaaaagttatgaccatttgaatttctaaagagctttccgttgtcaatttcgagcgtctcgatatattatgcgcctgaatc

SEQ ID NO: 33392 - DNA, 357 bp, Glycine max
agaatggtcataagctttcactcggaggttctattcatgcgcataatatatcgagacacacgaaataaatcaacagaagctctctagaaattcaaatggtcataacttttcactcggaggttcgattcacgcgcataatatatcgagacgcaccgaactcaacaacggaagctctcgagagattcaaatggtcataacctctcactcagatgtccgattcaggcgcataatatatcgagacgcacgaaattgaacaacagaagctctcgagagattcaaatggtcataacctttcactcggaggttcgatacatgcgcataatatatcgagacgcacgagattgatcaacagaagct

SEQ ID NO: 33393 - DNA, 357 bp, Glycine max
tttgcagttttctttctattatatcttttatatatgatttgtaaattttatgtcaatgattgcctttattgattgacatggatgaagatttataaatttacacagcatttaatctagggaagtaaactttagcacttacaaagtgggtttcacgccacctactaatgagggttatctcactgttttcataaaccaggctacaatgaatgtggtcaacttggccgaggtgttacttgtgaaggactacagggggctcatattataagttcttatgctaaattccttgatgaagccccagaacttgtgaagattgccaaagtgtcatgcggtgagtaccacacagcagccatttctgat

SEQ ID NO: 33394 - DNA, 147 bp, Glycine max
cggtgagaatgctagtaattgggttgtaaacctggtgtttaaattttacgatgatccaacggtgaatgagtcccacatcgtcgtttttctaagacaggtttagtgagctgcgggaaaaagaaaggttttgagaggagaaggggaaaa

SEQ ID NO: 33395 - DNA, 400 bp, Glycine max
  unsure (1)..(400): unsure at all n locations
tctagccaaatggacttaccttgaagtaattcctttgatagccctcttgagccttgcttccctttccttattatgaagctcaccacacgccttaagtgaaaaaccatgatatcaccatatccttaaggaattctggagctttggaattgttatgggaataagtgtggggggtttttgtttcattggataacatgatttgatgggtatgcttcatgatgtantttgggccatatcttacgcacactgtatattggataaatgctggacacgctgaatgagatgttgtttctaacatgttacagagcaaaagaaaaaaatctaataagaccaagttaagcaataaaggtgagtgaataagatcttatatgacaaatgaatgatgagactcttgggtctactc

SEQ ID NO: 33396 - DNA, 75 bp, Glycine max
ctcactgatgtcataaaccaggctacaatgaatgcggtcatcttggccgaagaggagtgtctgtaaaagtctgga

SEQ ID NO: 33397 - DNA, 317 bp, Glycine max
  unsure (1)..(317): unsure at all n locations
gtacccatcacatgtggtactatgtggcggtcgggctatggtgcacaacaagttttccacatccacaatgcgcgcataaacccaccatcccctgttgcccacctncaactgagctcacgtactcccacgtagcccatattctcgtttctctcaacaccgggtcccgatcaatcctcccaagctttcacaacatccaagcaaaacaacattcacacagcacaagctatcacagccaagcaaaacaaagcaaatgcagaaaactctgcctaaacaccgaccaaaaatcacagctnttcccactcaaagaccccagtaac

SEQ ID NO: 33398 - DNA, 195 bp, Glycine max
tctatgatttacttgttcttaattttgtctggctactccataagtaagagaattatgcatgaatccttggtaaagcctcccgctcggtaagatgattgaaaccttattaataggttttgatattgtgcttatatcccatacccttaatagtttatcacagtggatatattatggactttacaatgtcatattggg

SEQ ID NO: 33399 - DNA, 396 bp, Glycine max
  unsure (1)..(396): unsure at all n locations
actaagcnttcacacgagtcttcacanatgaccatcatgaagcagagagctaacaaatctacccatcatatctgccaaaaccccatacccacgagaatcaaaggagaaagaagtccacccaaacctaaatgttcgaagtcccactcgtagccacgcacttcacgaccccgaaaatgctctcctttcacgatttggagcagaaatgatggccaaaggttgaagctctgtgtggagcttcaatggtggaggaagaagagagaaagctacgtgagagagggagagaaaaggcttctaaatgttctgctttggctgagtgaggagagagaaaagctttttggctctaaaataaaagggatttctctggtgcgattatgttattataaactacgccacatg

SEQ ID NO: 33400 - DNA, 153 bp, Glycine max
gctaggcagatgagcctaaaagatgtgtaataacttggcaaggatactatataacatcggtgatttaaataaccgatgttgtaattctatattaacattcattttcggaaaaccaatgttaacgataatactttcaacggtggtactatcaac

SEQ ID NO: 33401 - DNA, 400 bp, Glycine max
  unsure (1)..(400): unsure at all n locations
cgatgtatgctaagcctcgcatctcaggctaagcgcatgctgcagaaagagtttnggtgttgcagaaagcgctaagcaccgctgctgctctaagccccaaatgcttactggaagttacaacttcaagctgggcttatcacgaagctaggctaatcgctaatattttaaactcaaatgtcacgttggcacgctaagcgcagctgcgcactaagcgcgccatacgaatgtttagtttctatcaaaagtaaaggcagaggcacttaggttgctaccttggcacctaaacctctgcactctctcatacttgagcatacactagatatattgtgtgcttatatgaccctctgcatcctttgcttcttcacactctgcattacacaatccaagtaagtctctagat

SEQ ID NO: 33402 - DNA, 400 bp, Glycine max
gttcaccgattggcttgtgggtatgcagttaactgaatctaaacgcttacccagagttttattgggaggatcaattctccccaacataatgtctgttagtggggtagatttggttgcggtaatataattgtaaggggataataccatgccctgatgtggcattcttgtgacctcaagtgatgttatcttgattaataagggcttggagcataaacttaaggttaataattaaaatgaagataaaagtgcatgatagatattataggtattacagctctattataaaatatgtttaccaaaacatggtatattctcattattatacctaaatggcttctctttaatacactaaataatacttaattataacactactactacatccaattgtgtcttttat

SEQ ID NO: 33403 - DNA, 610 bp, Glycine max
  unsure (1)..(610): unsure at all n locations
acatgttgctccatccttgactcgctatnactaccatccaaacattanctnactcanctctccatcnnncnnnnnnnnnnnngatggggtgatccctagatccatcgacactacagannacannaagctaacgnngccttcacacagnagctgcaccagtctgctacatttcatcatttattctntccgcataacgccctcgtgtggatcaaatgcaaaccatgcaaaatgtacttgcctacaaatattatcctgtggcataggaaatagccacatctcaccatcgtattacatcagacacaatatgcacatctgagtatacgaacacgaagacctcaacgcatgtatcaacttatattgaccttacacgtaaccgagtagtattaactctttcttgacaaatgacaatcccgggaatatgccacatgaacattcttttcatgagacatataatcaagttcttctacctttgcccctagagatatcatgcggttatgtgcaaaagtgaccacactgtgagcaaacccagantgcaattgcaagttaccccncgtagacagatgacaatctcgaaacaactcattaacgcacacagaatggaacaacaaag

SEQ ID NO: 33404 - DNA, 166 bp, Glycine max
tatcgcgtggaagctggccatctggtcgtcgcactcaatagcggcggcaccacgggcctgaagaacaccgcccagttcgtctgctactaaggtgatgccgcagcgccctctttcgtgctggtgatcaacaacggcctgcacattgacatccgggttgacaagacca

SEQ ID NO: 33405 - DNA, 544 bp, Glycine max
  unsure (1)..(544): unsure at all n locations
tgggaatgtcccttgatcctgccatttgaanaccngcacnnatttaacttaaggtcgctggcgacagcagcttccgcggggccgttcatcttgtgcttgacgatgtaaacacttcccgtgcgcgagatgccgatgccgcttgcgcccacacccttgatgtcatggaccgcaatggccgtggggaccatggcgtccaggatgccctcggggatttccttgtccgtgccacacaagatggccgggttggtcatcaagtgggcgacattgtgcacgaacattaacgaacggccatagcacttgacgggcttgacatcggcgcccgtgttactccggtaggagttcaggccgcgcgttatgctcttgccgcccttgttgaaggtttcggtgagcgtgcccttgaggatgcccagccagttggcataggcgaccaccttgtgttcggatccacggcggtccggagttttcaggtcatgatggtggcagggtcggtgttaacacccgtttgcactgcggaggtatagtctggcgatggctgtgtttattt

SEQ ID NO: 33406 - DNA, 153 bp, Glycine max
gaattctggttgttcctggtgcggagatgatggtacagcgggtgaaccaaaagcggaagtttcttttggtgaggaagccatggaaaaacagagcgtttggaatgatttccgtaatctcagaaaactattgggaaatgctggagaaaacaccat

SEQ ID NO: 33407 - DNA, 281 bp, Glycine max
gactaatgttattccttatggcacagctgagatcaaaagcgactccacacaacagagcttcaaggtcaatggacaccgacttaagccattcctcacagaccctcttgtagcacacgtattgcgggaagagacttatttactccaccctactcttcctccaccatgactcacggagggtttctttactatctacttctttacttttattacaggagacacgatgctattagatggtctaattgcgcttaatcttgacatagagctacattgaggacaatgtg

SEQ ID NO: 33408 - DNA, 348 bp, Glycine max
aatgaagatgatcaaaaaagtattagtggatttgtgtttttcatggggaatacgaccttcacttggatgtaaaaaagtactcgatagtcactcttttgacttgggaggcagaatacgtagcagctacttcatgcgtttgtcctgtagtctggcttaggaatttgttaaaagagttggacatgtcacaagacgagcagaccaagacctttgtggataataagtcaaccattgctctagtaaagaacccagtgttccatgatcgaagcaaacatattgacactcgttaccactacataagatagtgcatagcaagaaaggatgtacatccagaatatgtgaagtctcgag

SEQ ID NO: 33409 - DNA, 318 bp, Glycine max
cttctgtatgcacaattatggtcttcattgtgtcctcatttatacattatattctaaaatacaggcattgatgcgaagattattactcacaactagtcgttcactcagtttacattcacactctaaccggttttggttcaagctattctttcacaagcaatctgtctactgactaacaattctaaatgcaagttcacattccgtgctctctctttgtctaacatacacacttgctcaaactcatgatgagaaacacaaattccatcacaatcatgcatgcaatccagaagcaagacatacaccaaatttcacaaaaag

SEQ ID NO: 33410 - DNA, 246 bp, Glycine max
atgctgattaatcattcaaacaatcacaaacaagttaattctaactatatgcaaaagtaaacagaaaataataattaagaaactaaaggaaaaactgggttgcctccccagtaagcacttctttaatgtcattagcttgacaagtcgaatgccttcaaggtggcatgaaggtcacatagaacacatattccttgcattttcgccttttagctagaaactccatgaaactcgtgtattttggaagta

SEQ ID NO: 33411 - DNA, 431 bp, Glycine max
tataaaagttcaaatggcatgcttctcagttatctcacctttgtctatttttcactagccaaacttgtgtccacaacagtaaatttcatgacatatgtactgtggtttggagtttttaccatgagatatcagcggcttggttgatttgaggaattttcacagtccagttttgtatctttcgtccacccatttccttacttgctagtgcaatcattatctggtatcttctctagctcaattagctaagagtcagaagcaaccttacagaggacatcactactttgattctattttgtcctctataaaaacaaaataaactacatctaattacaaatattggtccctagatctttcattgacatttgttgtgccaaatggtgttgtacctcgttcactttgcatgtttgtctaagccaattcaccactccttt

SEQ ID NO: 33412 - DNA, 460 bp, Glycine max
  unsure (1)..(460): unsure at all n locations
tgggcttcacattatgggtggagggaggaggataatacaagaatgaggtaggtttacggctaccccacaaattaaaaaaaaaatacaataatgtacacatattttatttgatgagattgtcattctttaaacaaaaaaaaatatacttggtttgaaaaataaagggactaatgctttctaaaaagatgttagcatattacttttttatgacttttttttacattccacttctaataaaacataaaatatcctacttttaatttgtattttatagtaatcatttggttagctccaccctgcttcacacgaggctgaaccaaatcaataattttatttaaatctcgaaacagtgatagtcaagagagttggactattataaactcgtgaggcatgcaaatttaaaattcattttcaaattttatttcctgagaccagaatganaatgagagagagggaaaaa

SEQ ID NO: 33413 - DNA, 373 bp, Glycine max
  unsure (1)..(373): unsure at all n locations
ctttgcgttntcaggtgcatgatgatccactgaatgcacctgttgatggcccaacacagcgggtgagttgctgcttaacacagttatttacatttataaacatcatttcctcaatattgttttcctttggatgttccctatatttatttttttatcaaatagggcacttaatgaactatgtatgtactaaatcctcttatttgacagcctttgcgccactntaaggagctacttgaagagcttgtagccattgctgtaagttgttgattgaaatttatgattctaagctgcataataaatctgtaagtaggcaaattgaactattcttcatacctctagggcctaggacatattaagttctcttattctaaat

SEQ ID NO: 33414 - DNA, 460 bp, Glycine max
acataaaaacaacttcaaatagatagtaataatatttacatcaagcactcagtggaatttcccaacaaaggattctagccctccattacaagggagtacctttcacaaatagtcaaagggtttcagagaaaataccatattacaaagcggtggggatgtctcctccacctctaggaacctaggaatcactcctaaacctaaaatctacctaaaagttagggcctttttcttccttgctcaacttttcttctgttcttcattcatcactaggctcacatagtctattcaaacctctcttttccattctttgcaattcaggcttaaaaaggactttttgtccatgaaggcgcgcttagcgtgagtaagtgaaatttggcttagcgccattctcgcgctaagcacagaagagacaatcttctcgctgaatgagctgatgaacgcgtgagcgcgtgatgacatg

SEQ ID NO: 33415 - DNA, 406 bp, Glycine max
  unsure (1)..(406): unsure at all n locations
cactatgaatctcagctgccttctgggcgaccacttgctatatctcctcataaaattgtaacttttcttccttcgtgcacaatagcatgttctagtcctagtctagaagctatgtgtttcactcccatgacgtcatcctctgagaccagtttcatctatatatntgcatcatttttgacattttccaaagctaattntatggattgaagactagtagtgcatttgagacctatcaatcctaacaagatcagttcttcttgctgaagttgttctccatctctttgtgtataagcaaaagcaattggcttaaggtcagcatcccccatttgttgaatcacctggccaactttgaacttcttattttccatggcatgtgtggcgtgtaaacaaattatgtttacacatg

SEQ ID NO: 33416 - DNA, 203 bp, Glycine max
atctatggacaaggctgagaaagaacttggttggaagtacgtacccaccatcgctttctttatttgtacttgctcctctcaatttcatgatcattatcatttttttatctctggcgatattataaacttacttactaactcatgcacaacaaaattaaagattatcttataactgcatgggatactctgcataattatgagaa

SEQ ID NO: 33417 - DNA, 517 bp, Glycine max
  unsure (1)..(517): unsure at all n locations
ncgatgacttatatcatcgcctgcatnaccgcacttatatactgagctcgtaaaantcatgagttctgctgcatctacccttccataattaaaagatgccgcaactacggctatcctcgcgtagattgttcacatgttacatgtctcaataactcctcaggtctaacctcacaacttcgagcctatctttgactcgcgaaggatattcgagctctactctcaacatgtatgattcctctctcttctagacgttgccaacgaatatgagtaactatatcacaaagcttcctctgttgatcctcaaaatctatatcaagcgcgaccttctatatgaacaatattgagagattaatgccaaatctggaacctaccttntaccgcctaaatatgatatgcctatgcgctatggacacaatagcgcgaacgtgtgctcgctaatatactcaaaaaaatcctatatataccccataacctatgattgcaaattatttaaccaatcatagtgtgaaggacggct

SEQ ID NO: 33418 - DNA, 158 bp, Glycine max
tacggaagttcgatctttaaaaacaccttcctgttattttttatttttttttgccgaatacccggtgaagttgtttactttcagtttaccaaggatacaaatacaattagtgaatcaagaaatattatttaattcgaaagaatcaatccacatctttg

SEQ ID NO: 33419 - DNA, 468 bp, Glycine max
  unsure (1)..(468): unsure at all n locations
cgtctccactatttgcctgccgacaccattgtatatacctaatcttaancctgcagttatagtatgtagatatatacatatatatatatatatatacatatatatatatatagtgtctagacatcggtgtatgctatatgagcatattgagcaactatgctcctaaacgcgctacttttctcctaaaaccacatatatgacaaatctatggacccttttatgcatctcaataataacagggacccaatgtatgctgaagaagatacgcacataggaaacataatccctctccaagatctggagtaggccaatagatatattcatgctacaccctaggactatgacacatatatgctctcctgacacatgaacttttaacataaatacgccgctcccatgatatttgtaagtcctctgtagttcaatccacctcaacctgcagtcaagaaataacgtgatgtttatttc

SEQ ID NO: 33420 - DNA, 442 bp, Glycine max
  unsure (1)..(442): unsure at all n locations
cagcttcttgatggttgttaattgctattcatgagctnttagtgcattgaanataagtaagaaaatagcaatgtgcctccaatttacggttcttnttgtggaaattgtaaatatttttattcttgtgtgaatttataaagtagaaactccatttttgtgatctaatgttaaattcaactcaatttgtaggctaaagaagagaaggtgtgaaaaggtgctgatgaactcgcttagcgcgacagattggctaagcaagcctcattctcttagcgaggcaaccagctcgattagcggatgcaaaaccctagaagaagataagtcagagatcaatgcgcttagcgtgcaaccagcccgcccagcgagcatgttgtctcttttcacgcttagcgcgcccaggaatcgcatagcgaatttcacttactctcgctcagcgagacatgct

SEQ ID NO: 33421 - DNA, 177 bp, Glycine max
gtgccctgaactggaagaaccattcttcaccttatttcccttttaccaattctaggctactgacaacgggagaaggtcaattaacttatccctgatcaattgtgtatttcaaattcattgaagcagccatactcctcagcttcttggaaatctctgaaaacgatggtctttctacag

SEQ ID NO: 33422 - DNA, 351 bp, Glycine max
aaaatcaagaacaaacttgttcgtacatcgttcttatgtatgacatccactccacaaggtttgaagtagaggagaccttcaatcctattacgcaacgtggcacacaaaagtggacattaaacttgaatggtcattattgacaatgcggaaggtattctgcgcttcactatccatgttcacatattattgcaccttgcggttacgtgaggctgaactactatcaatatatagatgttgcttatacaaataagcacatgttataagcttaattcccacaatggtggcctcttacgaatgaagcgactattcctacttctaatgacgcatggacacttatcccttacccaacta

SEQ ID NO: 33423 - DNA, 122 bp, Glycine max
ggttgtatgccatttttgctttaagagtaatgtcccatctaaaactacctttccaaatgtttgccttctcaagaatggcccccacgaaccttgcctcaaagaggtccaggaaggacaaggcg

SEQ ID NO: 33424 - DNA, 401 bp, Glycine max
  unsure (1)..(401): unsure at all n locations
ctaagagtcctctgacgaggtggatgttgagccatgttctcagtatgaaaattagtagtggaatgctcaaaatcagaatattcagaatcaccctcaacataatgctcagaatgctaaaaatgcttaaaatgcacagaatgaccaggatgcacactatgcctaactaatctatgaaaggttcaatctattntaggatcaaagggttgtaaatcacctggattgcccctagtcatgcactatatgcagcaaataatgtgtttctcaacaagcacctaacaagggggtaaaactacagctatactcaaacgatatcaaaatgagctaaaattntgtgaggtacaccctaaaatcatgaaaagatagcacagaaagacaaaaattcaaagtctaactatggaaac

SEQ ID NO: 33425 - DNA, 512 bp, Glycine max
  unsure (1)..(512): unsure at all n locations
tggtatccgtgacatccannccgantatnaacctcagctcgtcaaagaatggttcaaacgccataacccttttttttttcccncatggacacacagggccagctatcatgccatacttgatgatcacggcatcccatattttaatctggcctgggttgaccaccacaaattgctgaaatctgagcattaagcatgtgacgataacctgctcactccatctcgaaggttagcagatacctgagaattttgtcagaatggtcctcttgaccctagacatggattttggaatggattgcttgcgaggtgtcgaatcacaatctaacagaagctgggatgactggcagcaaaaacaatctggctaagatactgatgatgatacacatatgctctgtgacagatgccaatatgcatcctgaaccgacaaaggcggcaccctgaagaactaatgaacgaactctggttgatagattcacgatcacttgattagagactatgtgacccaatccttctcg

SEQ ID NO: 33426 - DNA, 468 bp, Glycine max
ccaccctcgcccttagcacgagtaagtggatttgagcttagcgtcagtcatgcgctgagcctggctgaagacaaccactgtgcttagcgcactgatcttgcatgtagcgcacggccttgatattgatgctctgtcagattcttctatcacgctgaagctgcgcttagcgatggatgcatgctgagcccaaatggtgagctaagcgcaactaccacttttagcacttcaatatttagcctcatttagcctgaaattgaacaaatttcatcattaaatccaatggaaaatattctagagacagctttaacaataaaacaagatttatttacaaattacaacaaaataaccataaattggggaactatacaagttttggaaaatgttttctatacaaaagttagtcgtataggacgactaacactgggcagtttagtcaatgaataaaacaaggactgatcaacaataata

SEQ ID NO: 33427 - DNA, 347 bp, Glycine max
  unsure (1)..(347): unsure at all n locations
ttgagccaaaatcctgactcaccatanaccttgacccagggtgagaatgccaatctttaccctcggaagcaaaaaaagaagagaaggaaaatttccaatcaaaggaaaggaaattcccaatcaaagagtgggagaaagcaaaaagaaaagaaagaacattcccaatcaaagaatgggagaaagaaaaaaagagaagtgaaaaagaagaaagctcctggtcaaagaaaccagaagaaatgtgccgagaggtccttggaccagacgatatctgaacaatacagaattgtcaccaaatgaacaaaagagagaaaaggaaaccacgacctaaaatggtcttccccctttaa

SEQ ID NO: 33428 - DNA, 167 bp, Glycine max
atacttagctcataactctcacttaggttcagaaattgcaacggttccactctaaggtttgctacctgatacttactgagtgctaattgaataagcaaaatagaccacttctcacttctgtaaacttgttcaacttaaggtaatcttgacacatttatactcatgcc

SEQ ID NO: 33429 - DNA, 424 bp, Glycine max
  unsure (1)..(424): unsure at all n locations
taatatagacgagagctcttaggcaactctgcgattgctggttttggtgggaattatcaagatcatgatggaaactggatttccaatgtagaggagaacgcggtatttttacaagccacaaagctaagctctttgccatctttcatgacctttgtgaaacgtggaataatggtcttcgaagtataaataatgaatctgactccaccatggtgattgagctgatccataatactagtagtgatctccatccactactacaaatagtggctttaacatcgctcagttaacatcggctttaccaaaaaccgatgttataaaaacatatttgccgtctcgtaaatgacacgagtttgtaacacgatttcattaacatcgggtctaaccaatgttacttnaaaaatgtagagaatacgtcacatcaatt

SEQ ID NO: 33430 - DNA, 142 bp, Glycine max
gtgaagtagaaaagggttcagccccttagacacttctctctctttcgaatttgcttaggaaaattgtttccgtgaagaaaatccaagccgaggcgcttccgtagcgtttctgtgagtgatttcgcgaaggttttcgaccgtt

SEQ ID NO: 33431 - DNA, 431 bp, Glycine max
actaagcttattaagaggtttcctccagaagcttcattaagaggcttctatcacactccagacatcttctcacagatcccaacggtcagatcatggaaaagtggtttgtgaagttgcagaccaaatttcgagaagatccaacggttaatgaaggctgggcagcatttttaccgaggcagcttcatgtagctgtctctagaagcttcattaagaggcttcctctagaagcttcctcgtggcttctttgagaagctttctcaagaggcttctttgagaagctacatccttatctatccacccctctattaactaaattaaattccttaaaaataattacagatgaaaataacgcaacacataatcaaacatcagacataattactagtaatatatatatatatatatatatgtatatatatatatatatatat

SEQ ID NO: 33432 - DNA, 160 bp, Glycine max
tggcgtcaaggaggtcatacctgcatatgaggtgtttccaagtgaacttctccatctcttggttgtgatttctcacaatggtcttgcctcaatccacttggtgaagtagtcaatagctactagtaggactttgactgcatctggggcttttggtagtgat

SEQ ID NO: 33433 - DNA, 418 bp, Glycine max
  unsure (1)..(418): unsure at all n locations
tgttanaagaatgggttcagaacgctataaacctctttatgttacccttcttgggctactctgggcttgcaatcatgccagtcttgttgatgagggctactcatatttcaatcgggcctggcttgacagccccaggttgctgaagtctgagcattatgcttgtatggttaacttgctcgctcgctctggacggtttgcagaagctgaggattttcttcacagtgtacctcttgaccctggacttggattttggaaggcattgcttgcgaggtgtcaaatccactctaacctgaagttgggagagctggcaacaagaaagattctggctctggatcctgatgatgtatcgtcatatgtgatgttgtcagatgctcattctgcaacaggtaagtggtcagatgtggcaaccgtaatgact

SEQ ID NO: 33434 - DNA, 454 bp, Glycine max
ttccaattttgaatgggaccaaagtaatggattgccttctacgtttcttcctaaactattgggattttgattgggtatttctctcacttttagtcaaagttcataaaaaataatttgactttgaaaaaaaaggaaaatatgaataaatatttaatgtgtcaaagatttaaaatatatactggttcaagttttaaccattaaatatttatttactacacatatttgatattattaaaaagtcaatgaagtgaataattcataattacaaataattttcatgaaattaatataactagtattttgacctatggattaaattatactttatatctataaaaaaaaataaattgcaatataatattacttttaattattggtggttttttaaaaatattaaaaattatttatagagaatttaaaggataaggataaaatgatagttgagatatattct

SEQ ID NO: 33435 - DNA, 486 bp, Glycine max
  unsure (1)..(486): unsure at all n locations
ctaagcctgccaacagagtgctaggttccttgcactngatggtctatntttatcagcatatactaaggaatcacatctagaaagcttagcaaaaggtgttttaatcgtgttatcaatagatactaaatgcctttcaacaagatttgctcatcattttctgctcaaaatttgtacaaatacacttcattgtcagtctcagataaataaataggtgctattctatgttaaatgttatatcatatataaaaaaatcaatattttctctgtaatattaagttattctgattcactatcctaaagaagcgttgatgacttatagtggtaaacaaaccaaatgaaattattttcacatgatctacagttccttttttaaaacaatatgaaaatctaattcttaaacagataaaggttggtaccttgacataactatggatttcacctctcatttgatggcatagaacttgagaattttataaaagaacttct

SEQ ID NO: 33436 - DNA, 304 bp, Glycine max
cgtcggtcctgcgctgagcctggatgaagacatccactgcgctgggcgccctgatcttgcttgatatcgctcacgccttgatattgatgctttgacagaatcttctatcacgctgcagctgctcttatcgaaggatgcatgctgagcccaattggcgagctatgcgctcctgcctctttttgctctgcagtatttatcctcattctgcctgatttagatcaaaatccattattaacatcaaagggctaaatgattcactcagctttcccattaaaacatgacttatttactatctatccaccac

SEQ ID NO: 33437 - DNA, 224 bp, Glycine max
acaatgtccagttcgaacgcataatatgaaatttcggccttcttccctttaataactctattcagagccatcaacctctcctttaaggtcaccatcatgctccaaaaaaataaacccctccggccatctagtgatttggtgcaatgctccaatacctgcgcataggtaattaaacaaagcaggttaatgatagccgcggtcgaacactccctcccgttataaag

SEQ ID NO: 33438 - DNA, 152 bp, Glycine max
cagcctattatgtgtacgaaggatcttctagtgattaaaggccccttgtcaattgtgaaaagggtgctgttggatgcaaaagagaagaaggagcataagcacgggttgcgcgaatggctcatgcaaattcaaaacgtctgctttgatgctga

SEQ ID NO: 33439 - DNA, 413 bp, Glycine max
  unsure (1)..(413): unsure at all n locations
tagcatccaatatctgctcgggagtatccgctcttactggagctctatgaacccatttcaccaaatctacaccttcaccaaaatcctcatcaactggtagtctagttgtaaggatatgcagcagaacaacaccatagctataaacatttcctggtgctgtgacttgcatagtatatgcatattctgcattacagaagaaatgtcacatgaagcatgctaaacataataaaagttaagagtttaatttttatgcaatgtcagtataattttttttaccctctcaatcaattaaaaatcatcattatggtttttaacgtaatattgtaaaatcaacanactaaccatacatgacgatttgtgattattagatgatagtgtanagactatntactatanagagtaatacgaagaat

SEQ ID NO: 33440 - DNA, 64 bp, Glycine max
tctttccttagcatagagttgtattctcgtgttcagggtgagccgttacttgattaagcaactt

SEQ ID NO: 33441 - DNA, 385 bp, Glycine max
  unsure (1)..(385): unsure at all n locations
ctaagctcttatgtttcttgtgggttattcgttataattgcaaagcctgctttatctttgtttgcaaaagattgtgatggctcgctcattctgttatgtatctcttggtgacaaacaatagcctgatacttctattacattaaatacggtttagctttaccattgtgtatgcctacatgaacaattttaaattcccagttaagatggagttnttcaacaagcatctagaagattttaaagattacgtgattgattgatgtaccttgtgagaactttatcggtccccaaaaatctggatccgtttcattgattattgttagtctagaaacaatcacagatttgcacatgacaaaattggagtccaatgctaaattttattatctaa

SEQ ID NO: 33442 - DNA, 109 bp, Glycine max
aatgactgccctcacgtactgacttgtgggcggtatgacctgcttgacaacaaacttacggaggagaagagcaagcgtggacataaggaacattcgtgcactgaaagcc

SEQ ID NO: 33443 - DNA, 435 bp, Glycine max
  unsure (1)..(435): unsure at all n locations
ttgatctcctttggtgctctaaattgtggggatgtgctcaaatatgtggggcaattttggtttgttttctttcttggttgggttgaattgggggtttgtatgagatggccctatgcctataatgtattttgaagtaatggggcatgccacattgtccccgttctcttgctattgatgcctaaacgcgcgcccaccaagtgttcggtgaaatgcctcaatggcattagcgcgtgattttcgtagggaaacaacccatgggacaatttggtttgcacatgttttctattttttgggacatgcattcagtttcgtaagggctagagtaattgccccacatatatcctaggcctaggaaccaaagttgttcatcagcatactctccttccgcggtagacgcatttgtttttactcanaanagcatatgctgctctaatc

SEQ ID NO: 33444 - DNA, 138 bp, Glycine max
taccattaaaggtggagttcaccaactagatcctccccataatggatgaacatagtatcctcttcaagaaattattttacatctaattctatctgtaagaggtctaagatgacaaactttgggcttgcccaagaataa

SEQ ID NO: 33445 - DNA, 506 bp, Glycine max
  unsure (1)..(506): unsure at all n locations
cgtcttctacaaataaatcanaatcgatcctctaatcttcaaagcccatttctagtttctttcttcccatgtcaactacacagcttgcagttaacataaatggtcttcccaagattaagggaatgtcattatcttcacagatatccattacaacaaagtctgctgggaagataaaatgttttactctgaccaaaacatcttcaattactccatatggtatggtaatggagcggtcagccaactgtaaagtcattctagtgggcatgatttccaactctcccagtcttctgcacatggagagtggcatcagattgatactggctcccaagtcaatgagagcttttcccactgtgacttcacctattgaccaaggaatggtcacactcccagggtctttgtgcttcggtggaaagattntctggatcaccgcactagcattacctttcataactatattctnctggtgaatgtacttgtgcttctttgtcaacatgtcttttaaaaac

SEQ ID NO: 33446 - DNA, 364 bp, Glycine max
acatctctttttataacattaatctctttaatcctctcatttgtactaattactttatcttacatttttcttccttttcttctcatctccttttctattaaaaaagttgcctgattttgttatataaatgcaatttctcttttcattttaccaaactttatataaagatattttatttgtttcaccaggacatatttgctgctggaactgatacttcaacatcaacactaaagtgggctatggccgaaatgatgagaaatccccgagtgagggagaaagcaccagctgaattgagacaagcttttcgagaaaaagaaataattctgaaagtgatctaaagcaacttacttatctgaagttggtg

SEQ ID NO: 33447 - DNA, 442 bp, Glycine max
tgatgttcgttagtcgtcattggatgtcgagagtgtcatcttgttggattctgagaagaagatcaataaaatcttggtcctctaattcagctccatcttcttttgcaattttgttcttttcttgatgctctctgatgatgttttccaggaccttgtcaacctgcttgtgcaacttcttcaatctggtcatctttccagttaggaaatataagaatggaattgaaggaaagacatcaacaaggtcgaatcctcccccggattctacgatttttcggatcaaagacacaacaaactcatcttgctccttgtatatgccaccgaatgctaccctggaaatagaggcacatatcaatgagaaaattctactggtgagaatgataggcgaaccagcagattcgcgaatggagttgataaactttgctgcctcgtcttctctaatgga

SEQ ID NO: 33448 - DNA, 324 bp, Glycine max
ttcctacttttaagaatctccaacccttatagagagagtcttgtcaactaaaatagcacgtttaaccatcatttcccaaaactacacaacgatgtaacgaggcgagctctatcattaaatcggagagtggaggaccacatcatgttacgaatgatgatttctcacagaaacttacctcggaagatgtcttatgaaagcttcctagggaagctccctagtatgtcaatagaagcctgtggcacacatgctggaacttctatgattgaaagtcgaaccaaattcgcataatgcttccactcttcagaagtgttaatgcttaagaat

SEQ ID NO: 33449 - DNA, 398 bp, Glycine max
  unsure (1)..(398): unsure at all n locations
tgcgcatatttccttacgaacgttcactntcacaagacgttctatcaactaagaaaaatgcacccatatacaatcaaggtagcttcattacctagattatatacatgtacttacgacgtggtgatgaacttgacgacacacacaccgtcttggctgagtttcgaacatgcgtactgaagcatcttgagggccacatactgcaatgcgctcatcttggatgtctatacccatcgtatcaaacttccgatgaatcttgctcctaccactatggagctcatttatgctnttttttaagtttggctactaagcccatgcaattcagctatttcttcgtgactaaatgattaaatagaagatatattttgtatatgtttttccatacatgcacaattatatta

SEQ ID NO: 33450 - DNA, 134 bp, Glycine max
tgtacccaaacccaatcacctggttcaagcacgaccttctttctgcttttgttggtcttccttgcatagcttgcatttttgttttcaatttgagccttcacttgcttatgcaacttcttcacatacttagcttt

SEQ ID NO: 33451 - DNA, 490 bp, Glycine max
acactatgacactaagctttagccaatggacttaccttgattaatccttttatagcttctttgagcctcgattccctttccttgttttgaagctcactacaagccttaagtgaaaaaccatgatatcaccatatccttaaggaattttggagctttggaattgttttgggaataagtgtggggggtttttgtttcattggacaacttgtttgttggctatgcttcatgatgtattttgggccatacttgatgtacattgtatattggttaaatgttggacatgctgaatgaaatattgtttctcaaaggctatatagtaaaaaaaaacaatcgaacaaaaaaattcgaaataagaataagacaagcaataaagttgagtgaataagatcttatatggacaagaatgatgaaactctggtctactcttctgttaaaattatcttacttcttctatttcttattgtttctaaatgccttatccctttgtctc

SEQ ID NO: 33452 - DNA, 106 bp, Glycine max
gacaataactttctactcggatgtctgattgaatcccgtaatatatcaagacgctggaaattgaatatggaagcttctgagcaaattcaaacgacaataactttta

SEQ ID NO: 33453 - DNA, 548 bp, Glycine max
  unsure (1)..(548): unsure at all n locations
nggatgaaaccttgaaccatctacntacctgacactatanancactcaagccttaacatgcagtatcgagggtctcgatataggactgtactcaatcggactattcacananaagtgatggacgcttgaatttgctcagatcatccacattcaagaactagcggcttgacttataacgggactcgaccatacattctagtgaaaagatgttgcctgccgacattgccccatcatctagatattattgcctacgcgcgcacccaccatgcgactcgagtaaaccctcaatagcattagcactggagtttgaattgtgatacgacccttggcacacaatgtctagggcatgtacattattctgtactacatgcaacatcttagtaaaggctatagtcattggaacatattcataccatgcctatgtacctacgagggtcttcacatactctcgtactccgtgagacgcatcggtaaaacgtataagcgcatgagctgctctanactttggcatatatgttcatcgctacgcatagtccggactaaggacg

SEQ ID NO: 33454 - DNA, 280 bp, Glycine max
  unsure (1)..(280): unsure at all n locations
tngcgnccancgncttnatagaangccccaaccgcaaacctcgtggctgccnggcgtgcctcaacctttttgactgaaaaatcatcataactatttgtgctcccttagttcccctacattactcacgagtcctccctacctctttcgtaatattcacagccttttccctaaaaaaaaaaatcccctcctactaccatgttgggttataaaatataatgtcgactcgctgcatttctcacagctgctactaagaatactagccgctctgcatttatcgttc

SEQ ID NO: 33455 - DNA, 315 bp, Glycine max
  unsure (1)..(315): unsure at all n locations
aattgagtattgtaatatatcgagacgctcgtaatggaaaagagaagcttcgtataaaatgcaaatcgcaanaacttttaactcggatgaacgattgagtcccgtattatatcgagacactctatattgaaagcagaagctctgagcaaattcaaacgacaataacttttgactctgatcatccgattgagacatttattaattcgagacgctcaaaattgaatacggagagcgtctatggaaactccaatgacaacaacttttgactccgatgtccgaattgagtcctattataatttggaacgctcacaattg

SEQ ID NO: 33456 - DNA, 380 bp, Glycine max
taaaggctgaatatagaattggtggcacaaatgtaattgagtctgaatatgttgatctgagagagatgatgcctagagttggtttgtatgaaatggatacttgtggagatttctttacttggaccaacaaacaagctgataataccatatactctaggattgacagatttttgggtaatctcaattggctgcatatgcatattgattccactttaaaaattctggctcctaaagtttcagaccatgcccttatgtttctcattttgaaagatccaagtatcacgctcaagggtagatttaagttcataagcaccctggctacgttgaaaggtttccatgatgaattcaaaaccaaatggaacttgggtgtacatggtaat

SEQ ID NO: 33457 - DNA, 494 bp, Glycine max
tggcctaatcctcactacgaccctaaaactaagctaacgacccactggtccatcaagaccgggactggtcaatttatatgactattgagcgacgtcagccacactgactccaccatgtgccaatattattccacagtggggttctactttaaacatgcgctgcgatcatgatatcacagaactcttgtgctacatatatttgaaacacaacatagaggccccatcttgagcagacattacagacatacctcaggcacaatatctattttcatgccatcatattgatctatatgcaatgctcatacttcttccagtgtctttaacgcgccaacattgtgcattctgctattccaagacataaagaaagtggaatggatccttaccatatgctacacgctctgttgtatccacatttagtgctccgcattatctgtcaaataagaactttgctctattttaatcaccccgacttatttccctatgaactgttcttt

SEQ ID NO: 33458 - DNA, 172 bp, Glycine max
cgcctacattcagtcctcaagcaacccacttgagattttccactctctctataaaactccttttacaaagtctgaaccacacagggacaacccttcccttgtgttcaagaatcctctacaacaagagactctcagtctcttaatcccttttcacgagtacgaagaagagaag

SEQ ID NO: 33459 - DNA, 443 bp, Glycine max
  unsure (1)..(443): unsure at all n locations
tatgcgcatgtttccttacgaacgttcacttgcggaatacattctattaactaagaaagatgcacccatatacaatcaaggtagcttcattacctagattatttacatgtacctccaaggtgtatttgttatttacatcacacacacctccttggctgaatttacatacatgcatactcaaagcattttggggtaccaaaaactgcacatgcgctcatcttggtatttctaatacccctacatatacaaacttcacgatgaatcttgactgcctacacaataaggtgctacatttcatgctntttttcaagtttttactacctaaagccgcatgcaaattcaaacatatnttcctttgctgactaaaatttgtattcagattaaaaggtatatattgtcttgtaatatgtttcttcacataacatagcgcatatttatatata

SEQ ID NO: 33460 - DNA, 198 bp, Glycine max
ccacgccctacagaaaatagaatatgaggggtactgctcccctggcagaatgactggtggtgtttcccagaaagcattcaacaacgcagcttcaaaatttattagcttccctctgactcgaatctgttttggtgatttatcttctggatcatacaggttcaagtaaaattctttaactagggccacatccgatgtgcc

SEQ ID NO: 33461 - DNA, 450 bp, Glycine max
  unsure (1)..(450): unsure at all n locations
tataagaacaanaatgccttaatcatttccaaatatgcatgtgaattangacgcatcaacaagaatcaagccaaggctattgtgcaagcaatcaatggggcaaaacacaccaaatgattataatgatggatggctcaaattctcacaaaggtaaaatcatcactttcaaattgagctttcaaaactatcatgacatgtagagaagaatcaaggatttcaagtcacaaaatgtcaagaacttttattttcaaaacatttacccatttcttgaacatatcctataattcaaagaaaaacatgcaaagtcgtacgtgcacaccaaaatgacccaaaatattaaactgaaaatccgacgaaactaacaacattaacaatataacacaactaacaaattaacaaaccaacanaactagcanaaccaaagaacactcccccccccccccatactta

SEQ ID NO: 33462 - DNA, 254 bp, Glycine max
aagctgagcctccagtccaaggaataatagttgtctttcacagagtgactctatgtttttatttcactggtgcagcattaactatgggcttaacattctacatggcattcaatatgagaacacaaactcaaaaaaatcactgaatgcaatttaatatacgatgttacaaatataaacccttctccatcatattccgtggagagtgttcgcattactactggcatgcatctagtttctttaccttgtcatgatta

SEQ ID NO: 33463 - DNA, 85 bp, Glycine max
ctttgatgagtccaatgctatttctccaacaaaggatattttacattatgttgcagaatctttagaacaaatgcctattcttgga

SEQ ID NO: 33464 - DNA, 461 bp, Glycine max
  unsure (1)..(461): unsure at all n locations
cgaagtagttcccttatctccacctctaattatcatctctgatgcatcatcatatgaagctactgcccctcctgatacaccagctgaagaaacagctgacccccctgcttccccagttggagaaattgctaatctttctgattcgtcatctggagaagttgttgctctcactgattccctagtgtagacactgttgacattgttgattcttgatgatgctttttgttttctttttggtttattattattattattataataattatggtttcagtacaatatctcttttatgttgatatacactgttagttttatgtataagtagttggtttgctcatcttgaagcatatggaacagtttgacttgactctgatgatattgcagtgaaacactcttatctntntgtgaaaaatggtgtatgactttggtttgaattgaatgcatgattgtgatgagcttat

SEQ ID NO: 33465 - DNA, 402 bp, Glycine max
tctatagaacgttcattcctaatttctctgcaatagcatcacctctcaatgagatagtgaagaagaatgtggcatatacctgcggtggataacaagagcaagcctttgctgggctcaaagaaaagcttactaaggcacctattgtagctcttcctgactatgctaaaacttttgagctagaatgtgatgcctctggagtgtgacgtagagctgaaatgttacaatgtgggcaccctattgcttatagaagtgaaaaactacatggtgccacccttaactaccccacctatgataaagagctatatgccttaataagagcacttcgaacttgtgaacattaccttgtttacaggaatttgcattcataatgatcataatacttaagtcattagaggaaaagca

SEQ ID NO: 33466 - DNA, 93 bp, Glycine max
attaaaactctgtcccagttgttgcacactttataccatggcatgcagcattacatttgatgttctgctatacagagccatatagaatttggg

SEQ ID NO: 33467 - DNA, 477 bp, Glycine max
  unsure (1)..(477): unsure at all n locations
atttgatgtatcatgttcgtggtatttttgcatagcacctaacatccctccattggtaggtatctggcaccaaagagcaagcggttagcttctatgatcaatcgcaaagtcaataattggaaaaacaggctatcacggatacgactgttacttcctgcacttcccataatttcattttggaacgagctttttgataaagtaatgggaattgtaggaagtcttaccacggaaattaattaataatacttactaaatttccataagcccaataacctccaatggcaaggggaaacaaacacaaggcgatgactatgtaagcaaacataacacctttccacatggccaagcgtgagggttgcttancatccgaaggcatggttccctacaattttgagggggacaatttagcaacaataaatgctcttaactgtgtaaatgcagaacaaatgtttgaccatgcaatacttntacgtacct

SEQ ID NO: 33468 - DNA, 425 bp, Glycine max
gaatggagggaagtttgaaaaaacaatggacgaaggaaaaacagtcatcatctctggcaaagcaggatgcaaccatcatcaaaacgatacttcctactgatagaacactagaacaatgtctcaaggtacaacattatcacttccatgttatccagtggtggaggctatttgagagtccatccacatgatctaactacaaaaggtccatatgtcagcgagtgtctaaagtgcgtatcagcttctttccgtaaaacattgggctccaagtgtggaggaggttcacaatctctacctttatctgcttcaaaggcatttgttccttgtagtacaacctaaagccttttttcttggtagcatcccatactggtagacatggacagactctatcagtaaccatcttgaagccagttgccctatagatgtgc

SEQ ID NO: 33469 - DNA, 400 bp, Glycine max
  unsure (1)..(400): unsure at all n locations
tgcacgactagtgctaagctcanatccacttactcgtgcttagcgcttgggtggcgctaancgcatagtcatgaattcagagcctatttaaagcctgtcttgtgcagaattagggtacaacttatacaatgcccaaggcacagaattccacagcaccccacagtgcctatttcgggaaaagagctctggaggctgcaagagaagcagcctttacagagatacctaggttttgtaagcttattattgttagggtttcttttgtaatggctggctaaacaccctagaaggggatttctaatgaacagctgatgtaaatacttaatatctaattgattatgttntctgtgtttaatgcttccttcaatgcttaatggttgtatgcttttggtttgataatcca

SEQ ID NO: 33470 - DNA, 106 bp, Glycine max
tggcttattccttagtggatggcgcctcctctcacctcttctcctttgtcttttgctgcatctccatggtggaaaatcaccattaaaggacctcattgaaactcaa

SEQ ID NO: 33471 - DNA, 368 bp, Glycine max
ctgcggatttggtcttcgctggcgaaatgatcgatgtgtgtctgtataatacgccaatgaagagggtgagaatgagggagacacccatgttgtgattgtcattcctatacagccaagattcctaccaacccaacaatgtgattactcagccaataacaacccttctgcttacccaccacccagatatccacaaaggtcatccctaaatcaaccacaaaatccaccttccatacaaccaatgctaaacaccaactatagcgcagaccaaaaaggaattttgcagcataaaacctgtaggatttaccccaaattccggttccatatgctaactcgctcccatatctacttgataatgcaatggtagccat

SEQ ID NO: 33472 - DNA, 147 bp, Glycine max
atgacctttttcacgtttgcatcaatattatatctctgactataaccaacagtgaaagtcacaaggtactttggctttgatgttaaatcctgcaagcagcaacttaatcaaatactctgtatatagatgatataccccaataaaaac

SEQ ID NO: 33473 - DNA, 413 bp, Glycine max
gacctataaaactaagctaacattggccaagaaatcactatttataataaaattggttactaaaatttaaaagcactcttggagcttaattatatacacgttaataagtaaaggtacttcaccttgtataatgatctccttgtgtcaattggcgcagactgaatgcacttgtctattacaactggcaaaggggtggtaaagtcactgccatatatctcaggattaaagaaaatctgcagaaatcatatggaaagcatacagatatgttaatatgactgatcctgttaacattatgacccatactgaacccatggattagctccacaattagaccaaggcactactatatgttcattaattcttcagtagtttaaggaacaagatcaagtggaactaatagctatacatagata

SEQ ID NO: 33474 - DNA, 162 bp, Glycine max
tcattatttccaaatataccagcaaaccttgcactcaagcatcacagcgatcgagcttgtatactatacacaatttaagaaaatggtgaaatatactcttgattttggattattctttttcctaaataacaagctcaatttctagaaacatgttagtccaaa

SEQ ID NO: 33475 - DNA, 504 bp, Glycine max
  unsure (1)..(504): unsure at all n locations
tgtttgccctggacattcacanacgcaactatnggtctcggccctgcactacaccgttacataagtagagggatttgtgtatttatacacgacaatacatcccacgagatttggagctgcaaacgctagcatgagtgtggtgatgctcaaagagtacatttgactgagcaagacactctgacatggtgtacccctaccatactgtgctcatattctgaggaacgcataaacaaggacggtactgcgtcgggcttgtcacaatgcgagttcagatgaactcttcttggtacccctctgcatacatccttacctggtagatctccgggcacacaatcctgagcatgtgattttgtaaccaaacacttctatatgagatataggcagccgtccgagcatgtcacgacggtatgcatttatcttccctcttgcgggggaggagcactacccatgtgctgctagcatgcctgacatgcagacatctacctttatagagagcattatccg

SEQ ID NO: 33476 - DNA, 154 bp, Glycine max
ttcaagtaggtgctccttaaacctccattaattttttgctttaccttctcttccattgttgtttctttattttttctccatgtatctcctcacatgtcttgtgataaatgttttaacatgattatttagagtttccaccgattaaacttgctat

SEQ ID NO: 33477 - DNA, 416 bp, Glycine max
  unsure (1)..(416): unsure at all n locations
cgagctaagtgagtatgtctcgctaagcccaaggctatttacttntgctgaatcttgttcatgcgctaagtgagtcatgctcgctaagcgtaatttcttcttcgttttagaattgggcttagcgagcaggctcgctaagccatttatgttccagtaggtaagtcgcgctaagcgcccactggcgttaagcccatttagtgtgtcatgctaagcgagtctatctcgctaagcgcaattagctctctgtcagagaataatgcttagcgagccatgctcgcttagccattgagttgtttcagctaactgagggtgtcttgcttatccagggtctttattttttactatttgcgctaagcgcggctatcgcactaaacgtatcatgttattgtctaaacgcactgctagagagtctgtct

SEQ ID NO: 33478 - DNA, 421 bp, Glycine max
aaaaccaacaacagcaaaataattatgacttttcaagcaatagatacaatccagattggaggaatcatccaaatctgaaatggacaagtgtcataccctaatttcgtccggggaccattgtttgatggcatgcaacctttggttgaccgcttcgaggtacttggcaccctttgctgcacaatacttgaagtttcgagacatgccggaaatcaaaaggaaacattgttacgcaatccgtgaaattccgtaacatgccggaaatcaaaaggaagtatcattacgcaatccgtgagtttccgtaacattctgaaagctaaaaaaggagtaattacatgacccgcaaggttccgtaaccttacggaaagaaaacaagtatcgttatgaaattcgtaaagtttcgtaacgttacgggaaaagaatc

SEQ ID NO: 33479 - DNA, 374 bp, Glycine max
tacctcgaagaatagtacattgcacggggcgtcaactagtcaaagggctctatgacccaacgttgcggtggtgccgcgacaatgtaccctatgttgcggtggtgccgtgaacaacactcaacgcgaagttaatggggccatgacaatgtacccttccttttgcggagctgacggtggtgtggcggagattgacctcaacaggagacgccgactaatagcacaataatttttagacactgaggatgatgagtgttcaattagcgcacaagggggacatatatatatgaaaccatgttaacgacagtgtatttctaaacccatctttgacagtcaagatcctctacaacaatgtctataaatacaccgtctttgat

SEQ ID NO: 33480 - DNA, 156 bp, Glycine max
gaaaccttttaaaaacgcatagtgattcatacctgccctatacaaacattgatagtctctacgtcttatgcttccaattctactcattttttctcttatttccctatcacctacacttgacatggcagtatcacaccccaaacttttaacccctgt

SEQ ID NO: 33481 - DNA, 409 bp, Glycine max
  unsure (1)..(409): unsure at all n locations
tggaagtggtaagcaatgcttatgtcgagtctctcctagtgcaaccacgctcatccagtgctgcattgatggtagctcgcgtgatgttaaggcatgggtacgaccctggaatgggtttaagttggaacggagacggtgcgacaagcttggtggagtttaaagaaaaccgtggaaggttcgagctatgatataagcccacacatgccgacataatgaacaacaccctaaaaagaagggaccgaagcatgcgcccgcagcatgaaccgcaagtggaagggacttccttatgtcatatcatttaaagcttcatcaacgtacgctggatgtgtgaaaggcggatcgccatgatcaacaatgaagatcctcaagaacaatcaaactcagtatggtcatgcnctcctgagttcga

SEQ ID NO: 33482 - DNA, 180 bp, Glycine max
cgaactcaaaaaacttggaaattcagaagaaagcaaggggcttagttgacacatggaaaaaacgtgttgaagctgaaatgattataaatgatgctaggtctggttcagttcagactgtcccctggccagccagacaacggcttttctgaattgctcaagtgggaataaactttccatggg

SEQ ID NO: 33483 - DNA, 296 bp, Glycine max
tctgtttgccagcatttttgaactacttatcaactgtggggattctagattacatacaatgaaagcttctagtctttacgtttctattgtttatggtgaatatgttctttggataatactttcacattctgacgtcaatctttttctgagatatcctgtatcttcattaaacttaagtccattcatttggtgtgttagggtgtcctgttatggcttctgtccatttgtcctacccttttgtggtacaatagatgcatgtatgtgtgtacgataattataatcatcttgcccctatt

SEQ ID NO: 33484 - DNA, 129 bp, Glycine max
aagatgctgtatctgtatcattcatagaaacagcaatatggcttacaaaaagcctggtggcctcacaaaatcttaatactgagatctaggtagagagtgtggtgcccctcattatttatacattattgt

SEQ ID NO: 33485 - DNA, 470 bp, Glycine max
  unsure (1)..(470): unsure at all n locations
ctaagctttctacaagggccaacatcttctcctttgctcttgngtgaacctagtcctgaaacgcttcttgctggacccgccatgatgagtggcaccactcgttgggtctgacactgcctccatgtcctcccttgaggactgggccccaccactgccccttgatctggaggggagtgccagtgtggcgcattgttgcccttgcacacggtggtagcccacttgctccccattgtacgctgcctacggcaacggcgagtggtggtagtcaggcaccatgtacgtgtcattgggggtctccttacaatggaagtttctgtggcagttgcacacgaggcattatagcgcgtccagggttccctcctcgcccagaggcaagaacttgatgcatccatcaagtgtgtggccgtcaattttgacgatgtggttcttgacgcactcatgatacttctcattgtcattgttttttaaac

SEQ ID NO: 33486 - DNA, 143 bp, Glycine max
gaagaacgacatgcacttcttgcattggatatttatttgatggccgtacaactattgggattgtgcccctatagaggtagcaagatgtttcttggtttcaccattgacttggtcatatcagcaataagtgtcctttcagcttt

SEQ ID NO: 33487 - DNA, 461 bp, Glycine max
tcttccttggtcgggtacatgagcatatgcaatgctcttctttgctctcaagtggtcaactctaggcttcactccacttcatgcttcttgtggtgttcgatctttgacattctttgttggggagcgattggacaaataaactgcacatgcaacagcttctggccaaaataactttggcatatttttagccttcaacatacatctagtcatattatgaatagatctatgttttctcttcggtaccccattttgttgtggagatctaggaaccgctagagggcgacgaatcccatatttttcacaaaattcagtacattctcttgatgtgaattcgtcacctctatcggatcttatagctttgatcacatagccactctcatcttgcactagagctttataattttacaagctacaatgcctcagattttagtgtagaaataaacccaagtcttttactataa

SEQ ID NO: 33488 - DNA, 251 bp, Glycine max
tcctttaggctgttttgtgtaaaactcttcctctagatgaccattaaggaatgtcattttcacatcatttgatgtaactcaaagtcaaaatgagctactaatgtcataattattcgaaaggaatctttcttagatacaggagaacaattctctgtgtaatcaatttcttctctttgagtgaacccatttggcaacaagttttgccttatgtctctcaatgctgctcacttcccattggcctcccttagttt

SEQ ID NO: 33489 - DNA, 442 bp, Glycine max
  unsure (1)..(442): unsure at all n locations
ctaagctatagttattggagggagaataanacaatccanaatcaattgtacccttatgtaacgaagaattctttttgcggcctatagatgaggagaggtaggagcctctgtaaagcgacacacaactcccaccgcatatagaatatcgggccttgtattggttagataccttaaactccccacaagactcttgaagactgtggagtctaccttctctccttcatcaaactttgataacttcaagccaccttccataggtgtgttcacgggattgcaatcaagcatattaaatttcttcaacacttcttttgtgtagctttcttgtgagacaaagataccattctccgtttgcttcacttccattcccaagtaatatgacatgagtcccatatctgtcatatcaaattcacgagacatggactccttgaagtctttaaacaaa

SEQ ID NO: 33490 - DNA, 100 bp, Glycine max
ccccaccaatggcctactgggattgtgcctgaaatgcttatacccttcctttacacaagtcataccctcaactcttacgatgaccgtgccaaagaaattt

SEQ ID NO: 33491 - DNA, 289 bp, Glycine max
accttaataccgacagatgcacacgatccaataccatgtttgaattcttaatattactccatcagcgaatcattatgaaacagtttgattgaggagatcagccctatatacattcaattagctcgaacctctcagacgaatcataattaaagctgacaaaacaccgaatgacaaaaaagcctaaatacaatggatgatgatgtgatctacaaaatgcacggagggagaattatccttcctagccaaatacacataagggttgtcgctctatgcactgttttatgtatgt

SEQ ID NO: 33492 - DNA, 142 bp, Glycine max
gaggaggttacatgccatttttgctttaagagtaatgtcccactaaaactaactttccaaatgtttgccttcgcaggaatggcaccgaggaagcttgcctcaaagaggtccaggaaagacaaggcggccgaaggaactagtt

SEQ ID NO: 33493 - DNA, 386 bp, Glycine max
  unsure (1)..(386): unsure at all n locations
agtacttgatcctttagcatcatcaagacatcataacatcttgcttaaatccatcagctganaaatccttcaactatttctcgtccttggaaaattctttntgcaagaatcaactgcttctttcattcttcctcactacgaggtcgtgaaaacaagacaacacttggtacctctaagccgtacactggggcgatgaggggcaccgtgcatgagcctcaagtgaacctaggggcagattataagttctcacccaataggttccctcctacaaggtcatgccgaaagacaacgattggtacctcaaagccttacactgnggcaatgaggggcatcgtgcatgagcctcaagtgaacataggggcagatcaaaagttctcacctgtcga

SEQ ID NO: 33494 - DNA, 150 bp, Glycine max
atcgatgtgggtccgaaaagaggcaaatttgatcatcctactaagacgactgagaaaactggggcaaatgaagagggtgagaaagagggagaaacccatgctgtgactgccattcctatacggccaagtttcccaccaaacccaacaatg

SEQ ID NO: 33495 - DNA, 415 bp, Glycine max
  unsure (1)..(415): unsure at all n locations
gatggtgtcgagaagaaatcacatgtntgtcatcatcaaatggnggagaatgtgaatgtatgtatacatgattntgatgatgtcaaaagaagaatcacacaaggctcattttgcttcaagattaatacaagattttttcaacaaacaaagccttgattcaatatttcttcaagatcaagccttgcctcaaaatgtagagatttcaagtcatccaaggcacatgtaatcgattaccaatacatgtaatcgattaccaaggcacatgaaagtgtgtaatcgattacacatcatatgtaatcgattaccagagactctgaacgttgggaattcaaattataactgtgtaatcgattacacaaacattgtaatcgattaccagtggaaagtttcagaaaatctgcaacagtcacatctt

SEQ ID NO: 33496 - DNA, 115 bp, Glycine max
acgctcgaaatggaataccgaagctctgagcaaatttaaacgacaataacctttttactcggatgtctgattgagtcccgtaatatatcgagatgctagaaattgaatgttgaag

SEQ ID NO: 33497 - DNA, 420 bp, Glycine max
  unsure (1)..(420): unsure at all n locations
actaagcttctacattcatttcgagcttttcgatatattactgtactctattggacatccgagtaaaaagttattgtagtttgaatttgctcanggcttccgtattccatttcgagcgtctcgatatattacgggactcaatcggacatccgaggaaaaagttattgttgttcgaatttgctcagagcttcagtattccatttcgagcatctcgatatattacaggactcaatcagacatccgagtaaataggtattgtcgtttgaatttgctcagagctacaacattccatttccagcgtttcgatgtattacgggactcaatcagacatccgagtaaaaagttattgtcgtttgaatttgctcagagcttctacaatcacttcgagcttttcgatatattacgggactcaatcagaca

SEQ ID NO: 33498 - DNA, 194 bp, Glycine max
atgagtttgcgagtgattgggaaatcctagaggtgaaggagacatcctcaccacttgtatttttgcaatctttcatcttgttcttctctttgttgtaaaggaggcttcctggttatggaaagctaaatcctctgttggatcttccctgtatgtacctgatgtaaatacatttctatctatttaatgatgttttg

SEQ ID NO: 33499 - DNA, 406 bp, Glycine max
ctgcgagaggcttgtcgttggagctgacccatcatctgccctatctcatttagactggcgatccttacgctcttgaccttgacttgatagaacctctttttaagcgaaggcgcttgacttgatcccatgttttactacagtgaaacaaaatctatcgcgaatcaaaactccgacatctatcatgggtggaatggatgaatgcatgaagaaatgcatatgacacagatgcaatctatgaatataggagcccgggaaattgtctccttcttacatacaatgtcttgagagagcacattgcccgacgtatgtatttaagaatgtgacacagaccctccgttggtttgccaaatagacgggatcaagactaatctcgtgcatgatgacaggcacaacaccggcatgtaca

SEQ ID NO: 33500 - DNA, 321 bp, Glycine max
ggttcctaactttaataatctccaacccttatagagtgtgtcttgtcaactaaaattgcacgtttaattgtcatttcccaaaactacacaccgatgtaactcggctttcgctatcattcattctgatactaggggaccaagtcgtgatacagcttttgatttatgacatatagctacatctgtagatgaattctccaaaggttcttgggtttctctctagaatgacaaatctgacctttcgcctatattcatgtctgtctttaattgaaagtcgaaccaaattcgcataatcgttccactcttcagaagtgttaatgctta

SEQ ID NO: 33501 - DNA, 282 bp, Glycine max
tttaaccacaaccaataatatcctatgacaatacgaatctttggtatttggaggcaccaagttgagccttccaattgtataacctcttttacgtggctatcaacatctatcattggcgacgtatgtaaactgtgttatgaattacacatatgttagatattttccttcatggaaaatcttgctagctcttaaccgataagtaaacatggactccttaattgttggcttggacagcaaaacatcatatgtcatcatcatcatcgaatattactgaagtttcac

SEQ ID NO: 33502 - DNA, 106 bp, Glycine max
ctgtggcaaatgaggacggtgagaaaaaggctgacactcatgctaatagtatcgtgcttataccgactaaattaacaccataccccaccatgcccataatatattc

SEQ ID NO: 33503 - DNA, 350 bp, Glycine max
  unsure (1)..(350): unsure at all n locations
tacagcagaatttagtaatgacccactaacctagaattatttatacttaatgccattaacctacggaattaaaataaacttaatggctgagtgtaactgaaattgtggcaaccaaaagtcacccccaacagccaacaagtcagccaccatttggtctcccaaaaggctgatgcctaggttgccaattgagcccttattacaacttgaactaaacctaactaaagcccttttaattgattaacccanaacatacttttggtcagccaactttacaaggattgcgccattatttagacaaactaaacactctaaaaattgagacaaagtggtgtcatttagtcctcctccat

SEQ ID NO: 33504 - DNA, 198 bp, Glycine max
ttttggcttttattgcttagtacttttgttatggttgtcttggatgtttaccattatgtcttggtttgtgtttagttcttttcaactttgatttggatgattatgacttatttggtttattccatggattgaatcagtttatggataaactgtgctatgattttactgttgtcttaagttccttctccaaactttttg

SEQ ID NO: 33505 - DNA, 468 bp, Glycine max
  unsure (1)..(468): unsure at all n locations
aagataatggtgggtacgatcaattatgaatccaaggaataatgtaaaacctgcaagaccatattaattcatgtaagacaagataatctagtttaagatgtatgcttattctaagggcctgtttggtctcaggaaatgtttttatctcattntctgttttcacaaataactacaagtgtcactttattttcactttatttcctgttttttgtaattaattactaatgaaaacaaaatcatttccttaaactaaacaggccctaagaaacatacaagaaaattggtgtccagtgtcctcacagcatcaaactgaacaaggcctacaaataaaagtataagattgtacaggcatcaagcttattataaactcaagtacagaatanacttgaacaatagaatacatatgccaacgtggcaattgggagactaaaacaccatatctctaccacaaaataagtacataaaaca

SEQ ID NO: 33506 - DNA, 354 bp, Glycine max
  unsure (1)..(354): unsure at all n locations
gaagcttctngcgatggatcctcaagatagggagatacatgttcttgtttccattttgtacagngaggcaacaatgtggaatgaggcaacatattcgnggaaattactgaaagaaataggagtatagaagactcctggttgcacctcaattgagatcaattgcattgcgcatgagggcatggcgagggatgtgttacatccacagtctgaatggatatatgactacctggcttcgctgacgaaacaactagcgcttattgtgtttacacatgatatttctgcgtgtggagagtctctatttttctaaacttgtccgctattatggtatatatgggctcgtttagttacattctt

SEQ ID NO: 33507 - DNA, 125 bp, Glycine max
gactaaacaacattattgtaacaacataattaaaactaaaacttaatccatagatccttcttgtaagattaagttttgatcctgcttcaatcaagttctaatgcaacagtacatttcccaatgct

SEQ ID NO: 33508 - DNA, 379 bp, Glycine max
  unsure (1)..(379): unsure at all n locations
ctaagcttccgttgctcattgactccagattgttgcatagaagaacaatgatctgtatggtgatctacaaaagagcatagaccacagactcttgcaacaggtgtagatttctgattcatggcaagctgggttactaggttgaccaaggcatcaagttttccctcaagctttttattttcagcagatgaagatgaatctgtggccacctcatggactcctcanaggataatagcatcattttttgcactgaattattgggagttggaagccatcttcttaatcaaattctaagcctctgtaggggtcatatcaccaagagctccaccactggcaaaatcgatcatactcctctccatgttgctaagtccctcatagaaat

SEQ ID NO: 33509 - DNA, 148 bp, Glycine max
tactccttaaaccttcattaattgttatattaaccttctgctccatcgtttcttcattgttctccatgtatctcctcacatgtcttgtgctgaatgttgctaacatgattctttagaatttccacttattaaacttgctattgaagct

SEQ ID NO: 33510 - DNA, 449 bp, Glycine max
agaaagagggagagaattagagagtggggagcacgaaattgaaggaataaaagaggtatagaagtggaactttgaagtatgtctcacaagactctcattcatcaaagtcacaacaagtgttacacatgcttctatttatagactaggtagcttccttgagaagctttcttgagaaaacttccttgagaagcttctttgagaaaacttccttgagaagctagagcatagctacacacacccctctcataactaagctcacctccttgagaagctctcttaagaagattcctaaagaagctagagcttagctacacatacctctctaatagctaagctcacctccttgagatgagaagctagagcttatctacacacctcctataatagctaagctcacccccatgacaaataacatgaatataaaaaatagtccttattacaaagacaac

SEQ ID NO: 33511 - DNA, 430 bp, Glycine max
agtttccaggaattttcaaactttaattaactcgatccaatttagataattaaataaaaactaaaattgaacttttagctgatttaaaagaaaagattaatccaaataattaaagttaatgtgataaatttccttttaacaactttttaaaatgttgataatgttattttcttaatgaagataactttatcattataattaatttattaaatatatattttttctgactattattttatcacgtgcattacataagtctaatttaatgtataaaatttatagttatcattaaatattataatgtaattagactaaataaatattatgtattaaaaaatattttaaaaagaacaaaaaaataaaattaattacttaaaatttaatttttcttttatttttggattaacattttttcttactacgcaatttt

SEQ ID NO: 33512 - DNA, 314 bp, Glycine max
gacccatgagagattgagccccgccattgatttggcgtatgttaaaaagaatagctggaaccttgatgacccctcggtcacctttgcgggagcccgcaaagctaggggcaaaggatccaaggcatcatcttcttcttctactctacctgcctctatatccattcagactccatctattcctcttgcacctacttagacaccattttcagctctctcatatgtaagacattcgaatatttcatttacaccacagatactgcactccatgctgcagagcttataccggaggtaggccatcatcatgtagagacttt

SEQ ID NO: 33513 - DNA, 159 bp, Glycine max
  unsure (1)..(159): unsure at all n locations
cggcactcattttaacctctacgtgctgtccttatacatataaatcagccccaaagtccaaagctcacaaaaccatgctcatatgtcgttgaggcatttcaccgagcacttggtgggcgcatgtttaggcatgaatatcaagagaatgggggncatgtg

SEQ ID NO: 33514 - DNA, 460 bp, Glycine max
  unsure (1)..(460): unsure at all n locations
ctgaagaaacaagacacgaacctacttgggaattattcattctttctttctgtaaatatctgtgtagatactaagctctcaaaacaccttgtaaaccttgagagagaagactaaagttttaagtgatatatccatttgcaagacaaagaatattgtgttaaagtctagcttgtggtaaagattgcatgtgtaaaagccaaaagtgacagtgaataatactctgtaacttttgataagttagtggaaacttgatgtgttgccaagaactagacatagtctcggggtagaggcgaaccaatataacttcttctgttattctttactacttttctttgtgttgactgaaaaaaaggtttgaattctgtttgactatttatatctgttaacaaaattgtgttttcaacatctgatagagtatttctcanaagatctcttatatgctntcagtanaatcaacata

SEQ ID NO: 33515 - DNA, 241 bp, Glycine max
  unsure (1)..(241): unsure at all n locations
cttgggttaccatctaggtaattattctttaatcgaggtttcagtggcctaaaccttcccttttcccattaatcatctgctttgctttatggtggattactcacctatttgtgaggtcgggtacctcttcagtggggatggttctggggttctcatttgaactgaatacctatccggtataatggagttgtggagggatgatgtgtngaattgggagggccagtggaggagggaacctttg

SEQ ID NO: 33516 - DNA, 475 bp, Glycine max
  unsure (1)..(475): unsure at all n locations
acttcagacacaaatgcatactatgcaaggtctctgaatgatgatttggttttaactcctttagtttgatctccaatgattcaatcttgacgataataatgaacaaatcttcaatccttcgtctgcgatggttgatttaatggttctttattctgaagaacgtctttattaaattgtttgactttatctattttagatacttcacatagacctatctgcataatcatcctcaagatctgatagcttcctatcaaatgttagttcatcattaaaagcgtgattcttactgcttatgcccaaaagtgcttaagaagtgagttctcatatagcatgatcctagtcacttcttgaaaagttatatnttcctttcaactatcccattttgtcgcgagttctttgtgaagagatgtcgtggagaatatcattcttttcacagaatgatctgaactcaccattctcaaactcagtcccatgg

SEQ ID NO: 33517 - DNA, 260 bp, Glycine max
  unsure (1)..(260): unsure at all n locations
gctccttcttccatggcttattccctactagatggcgcctcctttcacctcttctcctttttcttccgctgcatctccatggtggaaaatcaccattaaaggacctcattgatgctcaaatatccagcctccatagaatccccacaagcaattttccatcaaagtattgaaaagatttttcaaaaaaacaaacatagcacaattttgtttttcaaaagatttttctcanaatttctaattaccacatttttatctttggt

SEQ ID NO: 33518 - DNA, 272 bp, Glycine max
gaagattcctacagaagctagagcttagctacacatacctctctaataactaagctcaccttcttaagatgagaaactagagcttatctacacaccccctataataactaagctcacccccatggcaaaatacatgaaaatacataaaaaaaggtatgtgtaggttgcgacgcacatactatgccaaaatacaaggcccaaacgaaggataaaccctactataaagactactcaaaatacctcgaaatacaaggcttaaaccctaaactact

SEQ ID NO: 33519 - DNA, 377 bp, Glycine max
caactgaaaaacttttggaataagcagaaaaagttgatagttgtcaagtcatgatagctagtagagtcattatgagattcccattccaagtctgatgaacattttgaagatatattagaatggtgattttgatgttagttgagaaaggattcctactaaagtagatcattttggtgaagtacaattgatatgactttcgtaagtaacataacttcgttatacttagcacatcttcacaacacaaagcattttgaagtagattacttcataaaaagaaaatgaaggaacaattgcttgtggatttgacctacttcttagtgaatcctctaccttctctattccatttccttcactccatagtgagcttgtcaacatat

SEQ ID NO: 33520 - DNA, 378 bp, Glycine max
  unsure (1)..(378): unsure at all n locations
tgagttaacatgttatctnttcaatcacagacacagatttctctcccttgttatcctcaaaattaaaatggtttatgggcatttagaagatcaaaatagaaaaattgaacaagtatatcataaactccccaacagctagcactagtgtcccatagtattgggaaatcccacatagccggcctcaattattgggatgtgatttatatatctgttgggcaacttcacttaagccatttgattntaagaaggaatctaaaatggtatcaaagcctaaagcccatttctgtcattcccatagtattgggagggtgcaatataaacaaccaattcacatgccaggtgggggcaagaaacagaattgggtagtggggataggat

SEQ ID NO: 33521 - DNA, 460 bp, Glycine max
tatcgcgtggaagctggccagctggtcgtcgcactcaagagcggcggcaccacgggcctgaagaacaccgcccagttcgtcggctaccagggtgatgccgcagcgccctcttccgtgctgctgctcaacaacggcctgcacatcgacatccgcatcgacaagaccacggccatcggccagaccgatgccgccggcgtggccgacgtggtggtcgaagccgccctgtccaccatcctggacctggaagactccgtggccgccgtggatgccgaagacaaggtggtcggctatgccaactggctgggcatcctcaagggcacgctcaccgaaaccttcgacagggcggcaagagcatgacgcgcggcctgaacgccgaccgcgagtacacgggcgccgatgggcagcccgtcaagctgcatggcccgtcgctgatgttcgtgcgcaatgtcggccacctgat

SEQ ID NO: 33522 - DNA, 384 bp, Glycine max
  unsure (1)..(384): unsure at all n locations
ttcgctggcgaaagcggcttccgcggggccgtgcatcttgtgcttgacgatgtagacgcttcccgtgcgcgagttgcggatgccgttggcgcccaaacccttgatgtcatggacggcaatggccgtggtgaccatggcgtccaggatgccctcggggatttccttgccgttgccccagaggatggccgggttggtcatcaggtggccgacattgcgcacgaacatcancgaacggccatgcagcttgacgggcttgccatcggcgcccgtgtactcgcggtcggcgttcaggccgcgcgtcatgctcttgccgcccttgtcgaaggtttcggtgagcgtgcccttgaggatgcccagccagttggcatagccgaccaccttgtc

SEQ ID NO: 33523 - DNA, 315 bp, Glycine max
  unsure (1)..(315): unsure at all n locations
aactctgacatggctcctgaccgaacttaattgcaaaacatgagtaaacgggaacacgagtcttttaaagaatatgctcagtgttggagggacctagcagcgtaagtagcccttcccatggtcgagagagaaatggttactatgatagtagataccttgcctgtattctactatgagaaattagtgggttacatgccctctagcttcgcagacttagttntccccgaagaaaggattgagatgggtttgaagaggggaaagtttgattacatctccccataggtgccagcggtaggagggtcaaaacactggggc

SEQ ID NO: 33524 - DNA, 451 bp, Glycine max
  unsure (1)..(451): unsure at all n locations
tctntnggacctcgaacaagcaattaactcctctntcagaaccatgctatgtgctcgcgactggtctctatcttcccttcgcaacttgagttcactattgctaccccacagagctccgcgaaatttgttccggccatactcttccttgcgagccctcttggtctcttgttcaagggctcttgcggtaattgcattctcctcccgtaacccggcacactccttccgaatgtgtgttgcggccaacttgaacttctccttggcaaatttcgcctttcctaactcgctnttgagagctaggacttcttcgtcctcttccggagcttcaaaactctcttcgctgacgactnttaacttggcgagccaatctaaacttcgtatatgaactctcagccattcgtggtacccaccaatgatgccattacgaatgcctctaagntcttgatcttttctt

SEQ ID NO: 33525 - DNA, 187 bp, Glycine max
aagttacgggactcaatcttacatccgagaaaaaagttattgccgctcgaataaactcagaagttcaacattcaaattccagcgtctcgatatgtgacgggactcaatcagacatccaagggagaagtcattgtcatttgaataggcgtacatcttcaacattcaatttcgagcgaatcgatatatt

SEQ ID NO: 33526 - DNA, 162 bp, Glycine max
aaaagaaacgtggaggaagaaagagagagctgtgctagaagcttctagagaaagagagagaagatttggcttttaaaatggtttttcttttctttttcattttctttttaaaagcaattccacatgtcattttttaaattggagcaaaaagggcccaccttt

SEQ ID NO: 33527 - DNA, 419 bp, Glycine max
  unsure (1)..(419): unsure at all n locations
taatgactgcctacacgtactgtctcgtggggggtatgaactgcttgacaagaaacttatggaagagaagagcaagcgtggacatgaggaacatccgtgtactgaaaacccaacacttaacatcgacccaccatcctcagttgcaagacacttgaagtggaagatcgcccgcacaaagcggtatggccaaatgacgtctgaagtggcacaagaaattgcagacaaaattgtgagttcatatattctctggttactgacattgccaaataatggttagctaacctagtcaactntattttattcaaattcaacaattgtatatccatgcaggattcattacaggaacaagcaacacaggggatgtttgttccacatgggcgacaggacatactcaacacggaccttggccgacctgatca

SEQ ID NO: 33528 - DNA, 134 bp, Glycine max
ttcgggacatgatctagggtggcgggaataatgctggaatgcctcacgctgctccagaggtggggcacctgccgtgacatttctaactctcaagatcgtctctggatgaagggggtggcttatatcacctctat

SEQ ID NO: 33529 - DNA, 362 bp, Glycine max
  unsure (1)..(362): unsure at all n locations
gtccaggtccacatgttacatttatgatagtgacttctttgctcccatcacctagagatatgcaatcatcaccggtgccaatctttgagttagtaattttcactcgagttgattttccaatgtgaattccatctgtattaggactatatgcaggtgaactaactctgaagtttgtaaatgaaatgttcttgcatccaaaaacattcacatganaatatntgctatcctttgaagtatgtcctgaattactgaattatcgacaaagccaaagccaaaattctgtggaaaatattgccaaaagtacataatagttaattntacgaaaggtaatgaaaatgcattagtacatactaatttcaata

SEQ ID NO: 33530 - DNA, 141 bp, Glycine max
taactgaggttcatgaagctaagtgccagtcatggcagctaagctgaattccttgtggcaatgtgagcgctaagcaagtccttatcagctaagcgcatgctcctctgtacttaaaatgcatcattttagttaagccgggcc

SEQ ID NO: 33531 - DNA, 403 bp, Glycine max
actttcgtaagctacttgagctaagtctagtcttacatgaagggattgcggatgaaactcagtttgagttattctaaacctaagacgattgtctaaatcgatcccagtcttacatgacggatctacggacgaaacttggatattcagcctgacgagggatcaaaagtttagtaatttatgctcaatcatagaacacaacagcatgatcgattagagaaatatatttctatgcatcagctcgtttgttagaaagacccaacatatctacctactgctgtcattatatttaccttacattttatagttcttagcatacaagtttagcttatatacttgttgaaattatcacttatacatgttctctcaacaatacttcaattctgaatataattcaggctaacat

SEQ ID NO: 33532 - DNA, 361 bp, Glycine max
aaaagccaaatgaaatagctgaattcatgcacaattgggatgaaatttaaaattggcatcatccttgaggctgctcatatctctggaaaagtactccaaacaaaacacaaacaaataaggggagagaggattcccttgtctaagaccctgctgccctttgaagtggccataaatggatccattgactgtcacactaaaggaagtggaagaaacacattccatgatccaagtacagaactgggctgggaagccaatggacttaagcatccaatccaagaattcccaggaaatggaatcataagctttatgtaagtcaattttcaagaggcatctcggagaggatcttttccgtgcatatttg

SEQ ID NO: 33533 - DNA, 373 bp, Glycine max
  unsure (1)..(373): unsure at all n locations
cacacgcattgcgtgtctgatatgccttttataggcttgaaaagtgcgagaaaatgagttgtgttttctgcattgtttggaaaacgtgatgaactcgctaagcgagaatgctgcgctaagtgagttcatcaatactcattgtatataagctntatctgaagaactcgccaagcgcacttactgcgctaagcgagttcatcccttaatgatgaacattcatgctcttgctgaactacctgtggctaaacccacgtaacttaaccattattttatgtgataggcgcatgctaagctgagcattcctgagccaagcacaattggttggactgtagcaatttctgctaagcggctctcctgtgtcgctaagcccaat

SEQ ID NO: 33534 - DNA, 324 bp, Glycine max; identical to SEQ ID NO: 33448

SEQ ID NO: 33535 - DNA, 410 bp, Glycine max
  unsure (1)..(410): unsure at all n locations
tcaatacagtgacaccagtgtngcaacatatgagctgactaagtctttnggatgggatacatatgattctttcatgcagcatgatgttcaagaactaaatcgggttctttgtgaaaaacttgaagacaaaatgaaggtatggcaagagttttggaatatttgttcatgattattcttgatgggtgaccatatcaaatggttgctttgtgttatttgtcttcacggaactgttgttgagggaaccatacaaaaattatttgaagggcaccatatgaattacatagaatgcatcaatgtagactacaaatcaactagaaaggagtcattttatggtacttccttatgcattgtgaattcaattatatgttntggtcttccttgntatgtatttctaatttaagtttgcatat

SEQ ID NO: 33536 - DNA, 162 bp, Glycine max
tgtcgttatcgttgccggactacacacttgaacctacttaaaggtaagagatgtgtttatcgcaattgaagttagaatgatcatgtgtaggaatccttagagaatcaaattggggtttattttgggatgattattatattgtaattctggttttatgattat

SEQ ID NO: 33537 - DNA, 339 bp, Glycine max
  unsure (1)..(339): unsure at all n locations
tgagatgaggaagtgtagaacggtgaaacttcctgtttntattgtttaccacacagtggtacctggagatatgtctcggcggtcatgacacnattagtgacgtcaagtggagtgctattgcccaaaaccaagcttgaccaatcccgacccaacccgggcataatcggtcagtgagaacctgtgatgtacctaagcaggcgagcttctggcagtcaacagatgaaaggaaaacaagaccacaaagcaaggaggcttgtggtggctggccagctgagaaaattgattgatatgtgagatatggtctctggtaatcgattaccaagggtgggtcatcgatta

SEQ ID NO: 33538 - DNA, 142 bp, Glycine max
agcttcatgatgaatcaacaatgattcaaggtgtttgatgacactgatgacaacaaatgattatgacacaggtgatgaacaaaaagctcaaaagatcaaagaccaaatcaagtgaatcaaagaacattctcagtgaatcaag

SEQ ID NO: 33539 - DNA, 237 bp, Glycine max
aacagcatcatatagaaactatatatgcatgattatctatatcttaatatgcacaaaggcattattgcatcctaaccccacaaccttaaggactgaatatcatgagaaatacattaccttaagcaaagtggtcagaaaattaaagcaatggactatacaaatacaatgaaaaaaaatataccttaactctgagtagctctgcacaactccattggtgttagttcatgatatacctac

SEQ ID NO: 33540 - DNA, 301 bp, Glycine max
tctctcctcaataaataaatagtagtaaaaaagtggtacttataattataataaaaataattattaaaaattcatatttctaacacaaatttactcaataatctctgggaagtttcagttacagttacgtttgttgactcgacgttgagaaaaactagataattgactgcacatttttcctagtattgctgtgtccatctcagatggtcccctacatacaagtattaggtggttccttctttacagcttcacgatttggtttttccgttctcagtttttcctccttttcttataagtgtga

SEQ ID NO: 33541 - DNA, 497 bp, Glycine max
  unsure (1)..(497): unsure at all n locations
nnggctagcccaaatctgatatcttggggcagaacttctcatcctaaagaatgttatgtggttntatgtcaaaatgcaaaattcgagtgttgcatcctatatgcaagtattccaagcctctagctataccaattgcaatttcatatataatgtcccaactcaagggtgcaatggttacaggtccttttctataaatgagcttgtcaagggacccattgtgcataaattcatagatgagaactctcttgcggccttccaaactgaacccaagaagagtgacaacattaatatgagaagttctactaatgctagcaacctcgttcataaattcttcaccatcttttgttgatgcattcaatatttntacagccacaggagcgccattgggtagctttcctttgtagacagagccaaaaccaccttgccccagttntactcttgaagtatttgcattntcttgacattgacaattatatcttttagaagtatacaccatg

SEQ ID NO: 33542 - DNA, 168 bp, Glycine max
tatcaagcgtaataaccacgcgtttgagaggcaccataaatgcccttaaaaaattagcccccccccgccatctatgcgtatgttgtatttattaagcttctgccgaatggaaactctaaaaaggctgtagaaatgctagcccagggatagacattgtagttcggtttg

SEQ ID NO: 33543 - DNA, 193 bp, Glycine max
ccctgcgctgcgcattactgaatgggtcgacacgtagccggatatcaaaaggaaacattgttacgcaatccgtgaaattccgtaacatgccggaaatcaaaaggaagtatcattacgcaatccgtgagtttccgtaacattctgaaagctaaaaaaggagtaattacatgacccgcaaggttccgtaacctta

SEQ ID NO: 33544 - DNA, 116 bp, Glycine max
ttgaaccaatgctgatgcttttacaaaaaggtgtcatcaattcaagttgaaatatggaagctaccgtcttgtataattggggcaaaatatgaattcagtcacatcactgcttcttt

SEQ ID NO: 33545 - DNA, 275 bp, Glycine max
atagggctcgcgttctaatatttttaaatctagcttccacactccgctttcaatacaaaatcgatgttaaccaagctatgtaaacgttaacatcggttttattccgatgttaacatttgataagttaacatcagtttgtcataaaatcgatgttaacgaactttcattaagatcggttttataaaaatcgatgttaatgaagtcatgttaacatcggtttttaaaaaccgatgttaacgtaagtttgtttacatttgatttttccccaatcgatg

SEQ ID NO: 33546 - DNA, 363 bp, Glycine max
  unsure (1)..(363): unsure at all n locations
cacaaatntcctactcatagatctagcacagtgtgttgtagatctagaatgcttcaacttgttcttcgcagctttcataaatgcctcttacagctctcaagaagaccattttagtgggctgcacatagctaatacactcttgcagcaagttggttcactttccagttgtcatgatatgatagtagacataaccattctgaggctctcattctaaagagcctttataatggtcattctgaagaaccatcaaaattgtcattctaatgtttgcttagaatgaatccatactctgatgaactcccttgattaagttcatattgatatctcattccgatgtagnngcagttcatcactcttaaacac

SEQ ID NO: 33547 - DNA, 152 bp, Glycine max
ttaaaaaataatgtctctttctctttctaaaagcaatgcccatgtctcattttgagtggagcaaaaaagggcccacctctttcccttgatgtgacttcatactcagccacaaagaaaagaaaatattaccttttgaatgcttaaatccttcc

SEQ ID NO: 33548 - DNA, 272 bp, Glycine max
aagcccagcaatgaacctattcacctttcaatgcatcctggggcaatgactatggaaagtgtcgtatggaatttagagcatgattaaagaaaagtattagagcgtataggattcactttgacttcatctaattattctcacctccaagatgggatacacacatacagtatataagtatagtatattataccctatgcatcttgcgtaagccaatttgctttgaaactctaggttctcccttgaccccatttaaagtcatatgagtgcatata

SEQ ID NO: 33549 - DNA, 330 bp, Glycine max
  unsure (1)..(330): unsure at all n locations
cgtaaaaatgtcaactcaatctctatctatctggattttcatgaaaagtntattgatatgactagatgtatcatgttaaactaattgcgggataataatttataacttgtcaaaaaatagcttgatgagaacctcacgtccaatccccaaatcatcaagaataatcttcatcaaatgtagttcataaattcattgtgtcataactcgaaatccaagttgtagaccgagccaccgtatgccatttcttactcatccatgtaaatagatnttatacttaaaaacatgtagcttaagtntaatatttaatctttgactgagctgcataattag

SEQ ID NO: 33550 - DNA, 213 bp, Glycine max
cccttcagataccttaatatttgctctgccactgtccagtgagaatccaaaggagcggccataaataggcaaactttgttgacaacaaaacttatctcgggtctagtaaggagagcatactgtaatgcaccaactacatacctgtataaggctggatcatgaaaagcatcatcaccatgtcgagacaacttgcagttggataccattggagaa

SEQ ID NO: 33551 - DNA, 455 bp, Glycine max
  unsure (1)..(455): unsure at all n locations
actaagcttctaaggctcgtgcttagcggcaccatacacttcattatattactttgtatgggatnngccgcaaagaaatgtgcttagctcaggtaagcttggcttagcgcgcgacatccaacaaaaatttggctaagtcacttgggcttagcgattcagcctctcttagccacaggcatctcagcaagaggatgagtgttcatcctcaaaatatgaactctcttagcgagttcttccaagaatgcatgtattcaatgaattactgatgaacttcgcttagcgcagcatgctcgcttagcatgttcattgcgttttccagaaaaacgcagttagttttctttactttttaagcctctaaaaggcatatcaaacatgcaaaccatccanataatctatacagtacaagcatatataaagtcctaatctttaactacttctaaaaaagcattaaaacc

SEQ ID NO: 33552 - DNA, 511 bp, Glycine max
  unsure (1)..(511): unsure at all n locations
agcctgggattgtgctgcatgacncgncacccnnanagnngaccngcacgcatgcaagctcagancaancatgaagagcacnggtttgtttgtgataagncccacacgccangaacgcccacaagaggctgaagacagcaccgccgaccctgcagagaaggaangcgaagataccgttatnccagcggggagaaccctaatgtgtgttgcctctcatccggaagatgggatgtaaacccaggcattctgcatgttcaagacagataatatgcatgacgattgggtcacgcgccccctcgccaaaataaattcttagctcggagccttctactaagaagacgtgttcagtttttacacacgaataatcatgcatggcttgcaggagccgcagaaacctaagacccccaactgtcgatcgagagattgagcagctctgcctatgctatgctctaggcagcgaactcctaacgacgatccgatccagaaaataatgcaagaccgcctgtgcggc

SEQ ID NO: 33553 - DNA, 436 bp, Glycine max
  unsure (1)..(436): unsure at all n locations
gacactctgaaactcagcttgtgaatcgatacactaatttggtaatcgatacttgtgtctgtttctgaaaaaancaaaagaggtaactcttcaaaaagattttgactttntcaaattggttttaagtttttctaaagttataactcttctaaatggtcttcttgaccagacatgaagagtctataaaagcaagactttgttttacatttcaataatcttgaacacatattcatacaatcctttacaagccttgaatctctttgaacttcttcttcttctttgtaccaaaagctttctgaagttttctgattttccaaaccttgaaaacttgtgttattcatcttctcattctcttctncctttgccaaaaagaattcgctaaggactaaccgcctgaattacttttgtgtctctcttctcccttttccaaaagaac

SEQ ID NO: 33554 - DNA, 312 bp, Glycine max
  unsure (1)..(312): unsure at all n locations
acattaagagagnggatcaatatttagtccttcaccgctttcgccgaattgaggttttataatatacttttgttatatatatacctgaaatatgcgaccgaattgaacatacgagggtatattaggtatcaccaatacttcatgatgggaccaaacagtttattcttctttctttcttcccagacgggctgagataagtctagtaaggattaataattctaaattccaccatcctctcgaaattactgaattatttttgtatataaaaatttacatattgataagtttattttatataataggtcttattaa

SEQ ID NO: 33555 - DNA, 373 bp, Glycine max
acgacgtaagtgggcgtcacttgtactggtaagtaggttaataaaacttatcagagatggaaattagtactggtacgtcggcaggttcgcaattaacaaataacatgtgcacttaattaggtcgctttgtctcaatctgaataataatatatatgtaccatgacctgaaatgaacatctcttacaggtcatggtcaaccttttgttaactggtcttacgggttcgcttgtacattttcaaactccacttaatagatggtgttttggatgcatgctatactgggtgctaacgttgatacagcacaaacattcattcatatcacatatatttcacatcacatgcttatttatttccggttactattgaatgacaa

SEQ ID NO: 33556 - DNA, 294 bp, Glycine max
  unsure (1)..(294): unsure at all n locations
tttttgatatcccaaaatggcttgagtatgcctgtatgtaaatttaaccaaggagatgtgtgtgatgtaaagaacaaatacaccttggaagtacgtgtaaataatctaggtaacgaagctgccttgattgatatgggtgcattttcttagttaatagaatgtcttgtgcaagagaacgttcgtaaggaaatatgcgcataagcttgctctaaatttacaatgatggttgtatntatgggaggagggtatatgccattcttgcttaaaaagagtgcccactggaaaaataacttt

SEQ ID NO: 33557 - DNA, 345 bp, Glycine max
  unsure (1)..(345): unsure at all n locations
gtgtgtgcattaatttgaactgtgtataatgtaaattactgttgtctantttgcattctttacgctgcattctaagcacccacgggtttgagtaaaaaaaaagggggggcctatacccgggttcatgggaatttaaggagtggaggtgaatctatcatcatgctaggtctccgacttgcttgataatagtgaaacctcgtctagagctttctctctttataatgtgttgtcgctggtattccataccgccacaatattattatcttgagtgatgatacctctagaaaacagccgtgtgagttatgaattgttggggagtagttattagagacccctagatattgt

SEQ ID NO: 33558 - DNA, 291 bp, Glycine max
tttccgcattttgttaatgacctatgtgtcgttttatagtttgtaacatcacaagttaaaaaatttagtctaatatttctaacatcttttgaagcaattggagtgacgacgataatgatagtgaaggcaacgatgatgacaaatggtggaggtggtagttgtggtggcaacaaccaaaatagtggtgttgttgatgattactatggttgcgatgacgacaattaatgggggatgtatgttgtgagcaatggcgacaattggtccccataattttgtatacttcaatatatt

SEQ ID NO: 33559 - DNA, 328 bp, Glycine max
catggctaattccctagtggatggcgcctcctctcacctcttctcctttgtcttctgctgcatctccatggtggataatcacaattaaaggaccccattgaagctcaaagatccagcctccatagaatccccacaagccagcttccatcaagtggtaaatatagcacaagagcttcaagtaggtgctccttaaacctccattaattatgtgctttaccttttcttcgaatgatggttcttcattttttctccatgtatctcctcacatgtcttgagataaattgttttaacatgattatttagagtttccactgattaaacttgctat

SEQ ID NO: 33560 - DNA, 332 bp, Glycine max
  unsure (1)..(332): unsure at all n locations
tataaaactaagcttgaggcaaactggatgcgttggncatctttgtnaccctgctggcctcgaatcagaaatctgtacctgtcgcaagggtttgtggtctgtgctcctctactgaccaccatacagacctttgcccttccatgcagcaacctggagcaattgagcagcctgaagcttatgctgcaaatatttacaatagacctcctcaacctcagcagcaaaatcaaccacaacagaacaattatgacctttccagcaatagatacaaccctggatagaggaatcaccctaacctcagatggtccagccctcagcaacaacaacagcagcct

SEQ ID NO: 33561 - DNA, 245 bp, Glycine max
  unsure (1)..(245): unsure at all n locations
ttctcgnntcatttactttttatacccccctttgacgtgcttaagccattttatttaagtcatgtctcgcttaacctaaaaataaaataaatttccaccgatcgattgaattgtattatccggtaacttcggttgaaatgaattccgatcgttcggtcgtgccgtaaccacgttggaaataaaaaaaagaggtgtaataataatatgataataagagaataaacgttttttagtaaaataaagcg

SEQ ID NO: 33562 - DNA, 440 bp, Glycine max
  unsure (1)..(440): unsure at all n locations
tcaccatgaatgtaactgaaggggggattctcacattctatgtaacaaagatcaggccatgaaattntatatttntgttntatctttttttatattattgtgacaaattttgatagaggatgtatacccctatcttattgcacaatactaatttaatgatgaattcatgtacattttaataaaattttaatttataaaaaatattgaattttaaaatataataaacagtaaaatgctttcattcgttaactcaatccacactaacctttttgtgaacgagttgatttgtgttggattttatcattttttttaaatagacccaattcaactcgttcaaatttgattggattgagtcatagtcaaacctaatccaaactcaactcatgaatatccctataattcattatctttatcctaatacctaattatagaaatataat

SEQ ID NO: 33563 - DNA, 384 bp, Glycine max
  unsure (1)..(384): unsure at all n locations
agctntactcactaagctgccaactcanatgntgtcttttngaagagnnggtgccgctcagcggctccacatgtcgctaagcgatagtgcttttttttttacaaaggcccgctaaacggaccatgtctcactaagcggccagtgtctttntcaattttatttttcagtctttaaaattttgaataactatgtcctgattaattgtttggttcctctatctacagatggcttctagaaagagaaagagcattggtacaaggcccaaatctcaatatgacacaaggagattcgcttcattagatgcttggaccagatacactgataatgttctgggaagaaacattttacctgaaaggaaagtagagctatatcacactgagctag

SEQ ID NO: 33564 - DNA, 283 bp, Glycine max
  unsure (1)..(283): unsure at all n locations
aagtagatttttaaactctctgatttactaaaaactngattcttgaaaagaaaagcaattgtggttgtgaaagcgttaattaaaaggcaaggcaacacagaagcaacacccaaattgcttctgtatttttgcatggaacgcaaaaatttcttgttgaacatggtttcatcgtgtttccaaacacacctaattaggttaaaattcccgctgatacaatgattaatacttaaatganaaataaacatacaactaatgccccaactgtcccatgtccatacaaatt

SEQ ID NO: 33565 - DNA, 304 bp, Glycine max
  unsure (1)..(304): unsure at all n locations
aacttaatggctgagtgtaactgaaatttgggcaaccanaagtcacccccaacagccaaagtcagccaccatttggtctcccaaaaagctgatgcctaagttgccaattgggcccttattacaacttgaactaaacctaactaaagcccttntagttgaataacccacaacatatttttggtcagccaactttacaaggactgngccattatttagacaaactaaacactctaaaatngagacaaagtggtgtcatttagtcctcctccatttgggccatgatacaactcacaaccttggactt

SEQ ID NO: 33566 - DNA, 434 bp, Glycine max
  unsure (1)..(434): unsure at all n locations
actaagcttatttgtgtcttgtagctatataacaccaangttttattattcaccaatttaaatgcagacttggtcaaaaatttgaatgatgttaaaattctcactattcacataaaaataagaaataaaagaggggaaatctaacaatttttgtatgatttaataataaaatatacaaatgtaactcagttatcgcccaacaacaacaaatgtgtcgtacgttactacattaaggtcacccncacgtatttcctcatttgtgtcaacacttcctctactttccaatactttctctacagacatactattctcgtgaaaattctgctcattcccaaaggatggttttaggaaacccncttgactgcatcttagatcctctaaacattgtatagccacanttcacactatatagtcctagttctctttcccataca

SEQ ID NO: 33567 - DNA, 386 bp, Glycine max
  unsure (1)..(386): unsure at all n locations
cgggcgatggtgcacaacaagttttccacatccacaatgcgcgcataaacccaccatctcctgttgcccacctccaactgagctcacgtactcccacgtagcccatatcctcgtttctctcaagaccgggtccccatcaatcctcccaagcttccacaacatccaagcagaacaacattcaaacagcacaagctatcacagccaagcaaaatagagcataggcagaatactctaccataacaccaaccagatcacagcgtttctcacttaaagaccncaggaacaattccttcaatccaattcgttaaccggtggatcgactccaaaaatttaactggaagtctatagtacataagcctacattttgaccgttgggatctactagc

SEQ ID NO: 33568 - DNA, 306 bp, Glycine max
  unsure (1)..(306): unsure at all n locations
tacttatgtggcagggcggtcttncttcactttctttgttaaccgcgagttttgaccaccgctctttcttcccgcgatgcttctctttatatccgtctgagtgggtttatagcctaaaccatacattccacgatttcctttggcatctatcaagctagttatgcccccggtgtctttgcctaaacccattccgggttcgtaaccgctttcttacataacacaagccactattactgctgcatcgaacagggaagctttgccacagaaggagtccactgatgaaatgctaccacctcaacagactgg

SEQ ID NO: 33569 - DNA, 309 bp, Glycine max
tgttgtgtgaagatctgcagagaccaaagcttgaaaaggaagccatcctgagagcttgagatgagtttgtgagtgattgtgaggtcctaaaggtggaggagacatccccactacttgtatttctgcaatcttgcatctttctcttttctttatttgaaaagaagcttcccagttatggaaagctaaatcctctattggatcttccttgtaggtacttgatgtaaatatctttttatctatctgatgatgctttgtgtgttctctgtgctatcggtatttcattttaattatgcttttaccttgatcacg

SEQ ID NO: 33570 - DNA, 374 bp, Glycine max
  unsure (1)..(374): unsure at all n locations
tgagccaaaatcccaatttaccataaaccttacccttgatgataacaaaaaattaaaggaacttcccaatcaaaagagcgggagaaaacaaaaagagaaaatttccaatcgaagagcaggagaaaacaaaaagagaaaattcccaatcgaagagtaggagaaagcaaaaaaaggaaagaaaattcctgatcaaagatcggaagaaaacagaagaaacaagcagaaaggtctttggaccagacaatatctgaacaatacaaaattgtcacaaaaaaagaaaggaaaccacgacctaaagtggccctctccctttgattaccaaccaaaatcctgtgtgtcagcgactntttcgccccgcactaaacaaaaacaga

SEQ ID NO: 33571 - DNA, 283 bp, Glycine max
  unsure (1)..(283): unsure at all n locations
actcagcttgaggattttcaaacgacaataactttntactcggaattctgattgtgtcccgtnatanancgagacgctctaaattgaatgttgaagctctgaccaaattcaaacgacgataactttttactcggatgtctgattgagtcccgtaatacatcgagacgctcgaaattgaatgttgaagctctcagccaattcaaacgacaataacattntactcggatgtctgattgagtcccgtaatacatcgagacgctcaaaattgaatgttgaagctctc

SEQ ID NO: 33572 - DNA, 445 bp, Glycine max
  unsure (1)..(445): unsure at all n locations
ntgatgcaacattcggagaggttaatgaaacaacgagatgatgcgctctatgagaggttggatcaaatggagaatagagatcataatgaagaagaaaggaggagaagagggaatgatggtgttcctagacaaaaccgaattgatggtattaaactcaacattcctccatttaaaggaaagaatgatctggaggcctacttggagtgggagatgaaaatagaccatgttttctcatgcaacaactatgaggaagaccagaaggtgaagcttgccgccacggagttttccgactatgctcttgtgtggtggaacaagctacaaaacgagagagcaagaaatgaagagccaatggttgatacatggacggagatgaaaaagatcatgaagaagccgtatgtgccggctagttactcaacggacttgaaattcaagctccaaaaactaa

SEQ ID NO: 33573 - DNA, 291 bp, Glycine max
ataaatagtgaagaggctatgtaaaatcatgcacactatctaatagctataatatgaactactcggattttgtgcatgtcattttttatagttgaatcacgtacgtagcttattatatgtgttacttgataaaggcgctgcaggctttgttgcagtgcgccttaatattatataagctcttttttactcctgatatcaaactatatatatatatatatatatatatatatatatgtatatatatactcctgatatcaaagctcatcgtctaaaactctaaaacatattgag

SEQ ID NO: 33574 - DNA, 397 bp, Glycine max
aacaacgctccacatacacaaatcacgtatgaacccaccatcccctgttgcccacctccaactgagctcacgtactcccacgtagcccttatcctcgttcctctcaacgccgggtccccatcaatcctcccaagcttccacaacatccaagtaattccacatccaatcatcaagaactaaaaaaaccaagcaaaatatgcaaaggcagaaaactctgcccacaacaccaaccaatatcacaacttttcacatacaaataccccactaacattctcttcagtccaatttgttaaccgctggatcgactcgaaaatattactggaagtctataacacataaatctacattatgacgcgtgggatcttctagaaaacgtgcacagcccaatctgtactac

SEQ ID NO: 33575 - DNA, 365 bp, Glycine max
  unsure (1)..(365): unsure at all n locations
acctcggatatcttaagaagggggagggggctgaattaaaatatcaaagactattccccaattaaaattttaactctctttctaaattattaatgcactcttaatatgaattactaaaaacacaattcaaaatataacttctttaaagcaaaagatatatgacaataaataaaagaattttaagggaagggagaatacaaactcaantttatactaggttggccacacccctgtgcctacgtacattccccaagcaacccgcttgagagttccactatcttggaatatccctttacaatgtctgaccacacaaggacacccttctttgtgtcagataccttacacaagagacctcgtctttatca

SEQ ID NO: 33576 - DNA, 358 bp, Glycine max
  unsure (1)..(358): unsure at all n locations
ttcaaggtttgagaagtgaaaatgagaatggggtaattttggagtaaactctcatctcaaacaagtctataacattaatttaaacttgctccaactggttttacgacgaaaactccaccgattcaaaatttgacccctcaacacccaatttaccctagaaatggctcttgctttcacctttgtcactcatntttctcatttgctcagcccaagctttcccccaagtcctaaatgacattttaaactatgattaactcactttagcccccaattaccactaaccccaaatttangcttttaaaaccctcaaacctcacaccttttcactcacatcactaccatttctacatttaaccct

SEQ ID NO: 33577 - DNA, 127 bp, Glycine max
ctcattttgatcaactgggtgggtaggttccatctcagtaaattctatcggatactaatccagtgatcctcgtttctatactttattaaagaaacctcacaaatcacaactaaagcttcaagcattt

SEQ ID NO: 33578 - DNA, 279 bp, Glycine max
gaaccctatgattggaaccacgttggggtgttgagccaaggagagccacttcaacacggatgagaaaccaaaccctgcattgctcaacacaagaaaagggtgaatacgcttcaaggctacaagttgttctttttctttgtccagtgtccctgcatacacggttcctaagcgaccctggccaatgattctcctgtggttgaagccatcggtggcagcatcgatttccatcaaggggtgtgcacgagcacaaagcttcacggggagtgtttcttcggattc

SEQ ID NO: 33579 - DNA, 269 bp, Glycine max
ccaaaccgctcggagaaataatttctcgataagccgagttgtacgaccacagggattttgttgcacttatgtgaagtacttttcagttcgcaagttgtaaaattcgggtgtaaaaataaaggcagtctaaatctaagacaactaacatgtaatattaaagataaagatcatagataagattagataaaagatttaaagataagactaaaagattaaccttgcagataaaatatctagattgcgataaggataactacttctacgaaatc

SEQ ID NO: 33580 - DNA, 415 bp, Glycine max
  unsure (1)..(415): unsure at all n locations
actaagcttctacatgttctttgagcactttggactctctctcccttgaacgtcagcctcttactcagattaatgatgcaccaaggtgcacaaaaagctcacaaagaaagaaccaattctgtaactgaggagcaccacaatatccataaatcacgcatggttatatcatcatcatcatcatcgtcatctacttcgtctntcgccaattctacttccaccacaggaggctacaatagagtgatcaacctcgaccagtaagaacaatcttaacattaattacttttgtttattttgttcccttcattttatgatgatatgtcttcgctaacgtttcttacttgttcctactaatatagtagtgttattaattaaaagaagcaacctctgatatttgagaatctcggacatatatttt

SEQ ID NO: 33581 - DNA, 205 bp, Glycine max
cgcttggaaaaattggttccctgaagaacaatctaagccgaggcgcttcgaagatgtttccgtaacgcttccataaggaatctctcgaatgtgtcgaccgctcctcgacgttctccattcggttctcatcgttcttctatcttcaacgggtaagtacctcgaaccaagcttttcgatccattctatgtacccgcggaggtccaca

SEQ ID NO: 33582 - DNA, 377 bp, Glycine max
ccaaaaagtcttaatgaggcgatgaacatattgtgtaccatgggtctggagtatcaaaaaattgatgcatgtcttaatgatagcatactgcgtttatatgaatttgaagaaatgcctaaatgccgcatgtgtggggtatcacggtacaaagtgaacgatgatgaccacggtaacaatgatgaaagcacaaagaatcgcacttaacaaaggtgctatagaaacttcctatcattccaacgttaaagcgtctgtttgctaatggagatgacacaaagaaccttacatggcatacatatgggataaactgcgaatggaatgcatcaccatccgactgattattctcaatggaagattaatctgctgtattccaattcaag

SEQ ID NO: 33583 - DNA, 366 bp, Glycine max
  unsure (1)..(366): unsure at all n locations
agcttatagatatcaagcaagaattaatttttcctcacattataancgaagcatatgtgcataaataacaaataagtcataagtcatcaaaacataaatcttttgtctaagttacttgcatctagaagtcctaattctcttctaatggtgtagaaagaatctttagttagttggtttttagtatctacaaattttaaaacagagtcacatttttcctaagactaagtgctaattgactatcaacacttaccaagatgagttctttttaacatagtttgtttcatcacatcaaaataattttatttgaaataaaatactaatagtttgaaaagcataaaaaatattttgaacaatcaataaagtaat

SEQ ID NO: 33584 - DNA, 439 bp, Glycine max
  unsure (1)..(439): unsure at all n locations
tactntgaatattgtgatttaatatgatttatgcttgtttttatatatagaggtagttatttatattaataatttgtgtaaataatattgtagagtgttatagtatgattccaaaaattattaagtgttggagtttgagaatattatggttaaatttcatgaacatgtgtatgttgtaccttatgaatatcattgggaatgttatgagatggttgatgtgatgttatgagatgttaaagtgtggacatgatattcgattgtgaataagtggatgtgttaacatttgatgttacattaattatatcgtgagctatgaattatacaataacccgaccagtgtttatgcgcagtgttaaagagaaaatgtaggttccaagttaggaaccagtgttaaattgtagcgcaattgtgttaaacatgtttgaaacaagagtgtgag

SEQ ID NO: 33585 - DNA, 346 bp, Glycine max
  unsure (1)..(346): unsure at all n locations
gttagaaagatgactcaaagctgtagggattgatccagataaactgttattggccaaattcagaatttacaagatgttattgaagcatgttgtttgatgctgcaaatttttggagctcttcacagccttcaatctgttcaggtatgtggccattaatgctgttcatttgtacatcaagagatattagatgcttcaatttgccaattccanagggtatgcttccatctaagtggcagtagcctagaggcagatagaattcaagctaacccaactctgaagggatggagccagaaagagaatttgagacaaatcaagtgtttgaagagaagtgaacacaacacacagt

SEQ ID NO: 33586 - DNA, 410 bp, Glycine max
  unsure (1)..(410): unsure at all n locations
tactgggccctcaaactgctaaactntgatgaagctgttgttggagagaagaggaagttacaattgtttgagttagaagaaatgaggatgaacgcctatgaatcattcaagatttataagcagaagataaaggcatatcatgataagaagctacagagacagaacttccaactaggccaacaagtcttgctcttcaatttcggactcaggctatttcctggaaagctaaagtcaaagtggtcaaggtcgttcatgatcaaagaagtaagaccctatgaagctgtggaattggtggaccctacgataagaaccccggagaaaagatggatcgtcaatggacaatgcttaaaaatttaaaatggaggccagttagaaagataacaagtgttgctacctgaacgatcataaat

SEQ ID NO: 33587 - DNA, 418 bp, Glycine max
  unsure (1)..(418): unsure at all n locations
gaccctaagcacctgcggctgcactgacaccgcctgctttagattccactcangcnnnaagagtcaatttttgtcaaacttaggttcgaagcatcaccattacctttgcggcactagagacccaacttagttagaaagcccatcaagcatataaatagaaaaataacatgttttatccttgatttttgtggacaagttcatatctatgtcttttgtgtacaatcccaatttttgtgttgaggttntgttatgtcggtgagattctactcggacaatttgtgtatgtgcaatagttgttcataagttgcactctgacaaaataagggaacaaggacaagttgtgtttgggagaaacgaggcatggtgtctgaataaagtggagcaccattgtaagtaacaatggatgaattaaaaaatg

SEQ ID NO: 33588 - DNA, 448 bp, Glycine max
  unsure (1)..(448): unsure at all n locations
ctttatagaagctaccaaacaaaatataactatgaacttaattttaaaaactgaagcataaacataaaatgtactgaagatggaataataataaactattcaaagtgcaagaaaataaagatcctgatcctgtcaatcatcctttgcagcgtcattcaggtccagtgctggtgcagatagtggatcctgagaaataggcaagtccggcactggtgcagatggctctggctaaggctgaggagatggctctggatcagcctaaaaaataaatggctcaggtggagagggctcagagatgtcaatagaagcatcctcctgtgcaggctgaggctcctangctgtggaggcctcatccnctcctgaaggagaaggctggactcctcaccttctaaagaaatntatcaacgctcataactggcctctagtggaccacatcctgtaagctcta

SEQ ID NO: 33589 - DNA, 343 bp, Glycine max
  unsure (1)..(343): unsure at all n locations
taccagnataattccgatatggctcccgatcgcactcagctgcagaatatgttcaagatagagggcgaaacctttaaagaatacgcacagcggtggagagacctggcggcacaagtggctcctcccatggttgagagagagatgatcaccatgatggtagacactctgccagtctgggggacgaaggtcaagtggtcgcgatatacgaagatgatgttccgagtacattggatttggtacgaccatgccctcctganttccagctgggatattggcgagtggaggaacgccccgacatttacgcagcgagcataatgtaaaccttacnggcttaaaagctcta

SEQ ID NO: 33590 - DNA, 367 bp, Glycine max
  unsure (1)..(367): unsure at all n locations
agtgcattcaatatcctgatgagggtgtttcatatgttctcaagacttttcttattcatttgnngcctaagtttcatggtcttgcaggtgaagatccttgtcgcaacgtgcccttttgcgggcgagcgaaggcgaggctcaccggtgcgctttcccaaggaggaaaagatgcacggagtcgcaaccaacatttatttgtggaaaatgtcgggaaaaccgaaggaaaccggtcaaaatgaaaattctaagttcgggagttgtatttacgtttgaggaaggtattagcacctctcacgtttgtctcaaaggacaacaacctatttttagaattgtggaaattgtattaccttaactcttatttcttttt

SEQ ID NO: 33591 - DNA, 388 bp, Glycine max
tatgtattagggaccaaattaaatatgatacaaaatgttagaactatagtgtattttagcaaataaataaagaatataataattagaccatataataaaataataagtagaaaacattaagaaaacataattgcaaaactgcatgcccattcttcacttttgtttttcaatatctttaagaaagagcttttttccactatgaatatcattaacaatctgatcgaaaaccatatagtacaaaagataaaactttgatagtattaaaaatgaaaaactttattcaatgttttcaaaatatgaaaacttgtagacagtaacagtgatatatgtttgtacttttaatcacagtatattttattattagccttacaaatttatacatatgtat

SEQ ID NO: 33592 - DNA, 296 bp, Glycine max
acaacttaatgaacattcaaatatcatcacactaagaatgaagctagatataagaatcaacaatgtctgaccattatcatgaatgttgaggttgaggatccaaacttctggtccacatacatgtgacaaatgaaaattaaaaaaaagggaagatttctttattagctaaagaatacatcataatgaaaagaaattgtcttttcccttcactacctttgtatgcttaaagaatgagcatgcaaaactttcttaatttgtatagtataactaccaattagagttgctctttataaaaa

SEQ ID NO: 33593 - DNA, 458 bp, Glycine max
  unsure (1)..(458): unsure at all n locations
ttggtcaaaggcttgtatatgcacaatcatggccttcatcatgtcctcatttatatcatttcattctaaaattcagggattgatgcaaagattattactcacagctagtcgttcactcacaatttaagttcacactctcaccggttttggttcaagcttttctttcacaatcaatctgtctattgactaacaattctaattgcaagttctcattcttgttctttctttgtctaacatacacacttgctcaaactcatgaaaagaaacacaaactccatcacaatcatgctttcaattcaaaaccaaatcatacanccaatttcacaaaaagatagaagtgttttactgccgtatcaacaaaatcaagtcaaactgttccatatgcttcagaatgagcaaaccaactacccataaataaaactagtagtgtatataaacataaaagaaatactgtactg

SEQ ID NO: 33594 - DNA, 180 bp, Glycine max
tcacaggaagttcttcttctccaagtgacgctgatttgcactccctttttgagctccttcaacaaattttgatgaaagtgtctgttccaagatcagagaacttgtggctaaaggcacattgtcaccacctatgtctttctttcttgtgcccttcgagagctgtcgatttttcttctgctc

SEQ ID NO: 33595 - DNA, 426 bp, Glycine max
tgctatagtcatgcagtggctttgcaaggcccttcacctatgttgggaatttgaagtgtgtgatcgactacctcatattttgggaatttaagaaagtaatttttgaccatttttaacctctaaaaagttatcaaaaacattataatgattttttcaagcaaactgccacaaagattattttgaaataactaatattaattgtcacattattatttaatagagaaatataatgatagggatcaaaatcaaattaaaaaataaattaaagataaaaaacaatcaaataaaaatttaaaaataaaaacataatttatccataaaataatatatattttccgtcttgattgcatgtatcttttaagttaaaataatcatataccaatcgataagtggttggtggtccataaaatattactatatgcaata

SEQ ID NO: 33596 - DNA, 454 bp, Glycine max
agcaatcaatactaaaatttcttcatttatcattatcttcaataggagatagaggcgaatctattttagttggaaactatacctttaatcaagatgttgctaggatggaattgacaaagatgattgcattgcatgaataccctcttgctatggttgatgacattgggtttcgaaggttttgtaatgttgtccaacctttgttcaaagtaatatcccgtaatacattgaagttggatatactaaagttctatgagagtgaaagggccaaaactatgaagctaattcaaaaaaattcaaggcacctagctataacaacagacatgtggactgcaacgaatcaaaacaaaggctatatgactattacaacccatttcattgataacaattgacatttgaaaagtcgacttatgaggtaaataatcattcacttgaaagttctatgattctaatttat

SEQ ID NO: 33597 - DNA, 124 bp, Glycine max
catatcgagacgctagtaattgaaagctgaagctctgagccatacaaacgaccataacttattactcggatgtctgattgaagtccgtcacatatcgagacgctcgaaattgaatgttgaagct

SEQ ID NO: 33598 - DNA, 316 bp, Glycine max
  unsure (1)..(316): unsure at all n locations
taaacattcaacttcgagcgtctcgatatattacgggattcatatcacacatccgagtaaaaagntattggggtttgaattcgctctgaggttcaacaatcaatttcgagcgtctcgttattttacgggactcaatcagatatccgagtaaaaagttattgtcgcttgaattggctcacagctccaacattcaatttcgagcgtctcgatatattacgggactcaatcacacaaccgagtaaaaagttattgtcgtttgaactagttcagagattcaacattcaatttctagcgtctcgatatattacgggactca

SEQ ID NO: 33599 - DNA, 344 bp, Glycine max
  unsure (1)..(344): unsure at all n locations
gagctttaatgaggctggatctttgagcttcaatgaggtcctttaatggtgcttttccaccatggagatgcagcggaagacaaaggagaagaggtaagaggcggcgccatccactagggaataagccatgatagaaggagcttcaccaccaagataagccttggataagaagcttggagaggatgcttcaatggaggaaaagatagagggagagaaagagagaggggggagcacgaaattgaaggaataaaggagggagagaagtggaactntgaaagatgtctcacaagactctcattcatcaaagttacaacaagtggtacacatgcttctatntatagact

SEQ ID NO: 33600 - DNA, 387 bp, Glycine max
  unsure (1)..(387): unsure at all n locations
tctatataagatgaaccatnttatcaattaagacaagttgagtgttattcagaaaactagagtttatctcttttatcttagtgagagtgattctcctaaattcttgagtgattcaagaacaccctggctgtatcaaaagactttcacaacctttgtgtgttgccctcgctggaaagagtgattctttccttcctttcatcttcacccttgttctttcaaaccacaattccagaaaatccacctctgcccagaagtatctcgtggccataactcccatcttacgcactcaaattaagtgattcttgagcctaaatngactctcaaaacgagacctttcaccttgtttttgatcacctcattggagccctgagcttcagttattgcatt

SEQ ID NO: 33601 - DNA, 260 bp, Glycine max
  unsure (1)..(260): unsure at all n locations
tgaagantgttggttttccaaaccttgaaaacttgtgctattcatcttttcattctcttctccctttgccaaaaagaattcgccaaggactaaccgcctgaattcttttgtgtctcccttctctcttgtcaaagaattcaaaacgacacaggctgagaattcttttgattcttcccattccctaatacaaaagtgttcaaaggactaaccgcctgagaattcttttgtatccccattcacaaagtatcaaaggtttaaca

SEQ ID NO: 33602 - DNA, 305 bp, Glycine max
  unsure (1)..(305): unsure at all n locations
aagatatatttatttttctggnaagctatnnggacaaaagagcttgtgtctatacaattcatggccttcatcatgttctgagttatacaaatcattctagaattcagagatttatgcaaagatcattattcacaattagtcgttcactcacagagtaaggtcacactctcaacggtttttggttcaagcttttctttcacaatcagtctgtctagtgactaactattctattataagttcgcactcttgttatttctttgttcaacatgcatatttgctcaaattcatgaaagtaaacacacatt

SEQ ID NO: 33603 - DNA, 455 bp, Glycine max
  unsure (1)..(455): unsure at all n locations
tattcaaacctcagaggcatggtggcttatcgagcgctgctcgcttatccgccaacaaaataccaaaagcctcaaacattctgacctaactaaactaactcgctgagcacggcatgccacctaagcaagtttatacaaacttagaagtaaaactggaaatttaaacactcgctaagcctaagcgtagtggcttagagagtcatatagaaaagcataaattcaatataaatgatgaacaagcttagcgggacagggccggcctaacgagttcatcaaaaaacccagaaattcatccaaaattgatgaactcgcttagcgagtacattgagatttccagaaaaaatggggcttctaagcccttactattcaaccactttcaagcctaagaatcctatgcaaaacacatcanagcaacctatattacatgcgaaattaaacccctcacaacatactat

SEQ ID NO: 33604 - DNA, 129 bp, Glycine max
  unsure (1)..(129): unsure at all n locations
aaacaaanccctcttattactagctattntgaattctttagttcctgaatgtacatatcttaaattgttactcgctcccctctttgagaataaggaggatcttcataggacttcatccagctgatgttt

SEQ ID NO: 33605 - DNA, 329 bp, Glycine max
  unsure (1)..(329): unsure at all n locations
accccaaaggaatccctagatacacaaatggaaatgtcaagattctacaatttagatatcttggaaatctcttaatagtttctctcccaccactaatgccaccaaatctactcatatgaacattcactttcaacttggacactagctcaaaacatctcaacatactctntaccaccaccacattttccatcgttaaatctcccacaaagattgtttcatccgtatattgtagtaagtttcccctcacccccttactccccactgtgaaccctgaaaaaagattttaacttgagcttccctcattaaaccacttaatccttccgctacaa

SEQ ID NO: 33606 - DNA, 352 bp, Glycine max
  unsure (1)..(352): unsure at all n locations
ntcacaatatccaaacaattcgatttcattcatcatgttactaccctaaaccaagaaaacagagtagaggcagaaaactctacccaacactcattcaaattccacaactttccttactcatataccccaacaacattctctttgttccgattcgttaaccgttggatcgacttgaacattttactgagggttcctagtacataaatctacattttgaccgttgggatctgctagaaaatgcctggaacccgaaatttactactcttcccatgactagcaatacacaaccattttctgcactatataaaaaaaactgctgcacaattttgacagccattttctgcacaatatg

SEQ ID NO: 33607 - DNA, 346 bp, Glycine max
  unsure (1)..(346): unsure at all n locations
agcttttctttgtacacctacatttcattcanctacaactntttctggatacacatgcattaaaaactctttctccttatatcaacacggtctatataacaactctagtcctgttcaaagatttttttttcgtttttcaacatacacttngtggttatacaaaaatttctttatatacattcattgctcacacacaagaatttcttttcacacattatttacacacacacacaaaatctttccatacactttttacatataaaaaactcttttcttttctttataaatacgacatttgttcacaatgcctctttctttntcaattcttggtgttatcatgattttt

SEQ ID NO: 33608 - DNA, 311 bp, Glycine max
ttgacttgatagaaccttttttttagcgaaggcgtttgacttgatcccatgttttactaaagtgaacaaaaatcggtgcgaatcaaaactccaacatctattatgggtggaatggatgaatgcatgaagaaatgcatatgacacatatgccatttatgaatacaggagcccgggaaattgtctccttcttagatacaacgtcttggggtgacaaagtgcccaacgtatgtattaaagaaggtgactcggaccgtccattgggttttccatgtgcgtgatgtatatgcgaaagggcaacaccggaatgtcaa

SEQ ID NO: 33609 - DNA, 350 bp, Glycine max
  unsure (1)..(350): unsure at all n locations
actcagctnttatcagaagaatatacataaagaggcntgcngtgttaatggatcttgcataatataggggagggatatacttaaaaaaatgtaaacaagaacaaaaaaggatcataacattaaaatgggggagggcttcctaggaggtgggacgaccatgatgaagaggaattaggatgaatctcagtcatattaacatctanggaattgcttcaacaagcttgcgattatggcgtagctgtgttgtggtgtaattgtgtcaacatgacaaggtggggggttacgcatggtgaatatggctaatctatttatgtgtttattaatggacgactctatataatatggtgagc

SEQ ID NO: 33610 - DNA, 460 bp, Glycine max
  unsure (1)..(460): unsure at all n locations
actaagcttatatcttccattaaacttgatttttttatttgttatttgaatatatcctgttgttattnntttttctctttctggtttttgttctaagttatattgcattcttcaactggagtttttattggtggcacaaacagataacattgagacatcagcaagcctcataaatcctcagcaagtgaagtacgattgctttgaaacattttaaatgagtggaggggatctacattgatgctgattgacttttattgcatatgttgtagttttctcctcaatggaaaatgagtacttaataggactaatgttcaaatggtctgttgtatatttgttcttacattcttaaacatttagtttggaattttttcttgggtatgacatcaacttctatctctatcattttgttaatcaggatcctggaccagaggtaccaattaatgtgactggtatgcttaaa

SEQ ID NO: 33611 - DNA, 358 bp, Glycine max
gctggtttaattatttgcagaatactctgtttttcattgcaggtaacgatcttgttaaggctgttgctactagtatgtctaatagagctccagatctttgctgaatacttgtagcttcattgcagactgaagatatgcttttcttctcttttgagattcttctggactgttcattggttttaaaatgatcttgttgagggttgggcttcactgcctgtgatggttgcgtgctcaaattctattggcatctatttttaattataagggggtaacaacctgcatcaaatatttctggcaagtgcgtgtatctgttctactggaattgacttttgaacttttcatgaaatatgataactta

SEQ ID NO: 33612 - DNA, 259 bp, Glycine max
aaaaaatctgaagatttggtggtcccgtgaagtagtagttccgtatttgaagatttggtggtcccgtgaagcaggtgttccgtatttgaagttttgttagtcgttggtcttcctatttcgtcggaggtacgcatttatgggtattttctgggtagcttttagagaagataaacagtaaaaagttatttccggaagaaattctaactagagaaggaagtatttctggaatgagaatgttggatttccggaagtacttctt

SEQ ID NO: 33613 - DNA, 269 bp, Glycine max
  unsure (1)..(269): unsure at all n locations
tttttctattaataccactaagggatcggcaaagggttcaaacagttatatgatgaaatatttgagggataggactgaaaaagaagatgagcatagtcgatgcactaccgaatcgcaaccaaagatcattcgctacaatcgcttctctagctagcctcattccctatgcaatagcccagtaggtcttcttccttttattttatgttcttaagagttgaatgtaatccatgtaccctgtcataccttaatntcgtccgaggattataatt

SEQ ID NO: 33614 - DNA, 380 bp, Glycine max
  unsure (1)..(380): unsure at all n locations
tgtngaanatataatcaatgcaagacctcttgagagatttagtgaacatgtcctccagttggtcactagagttgacaaactcaatggtgagttttcctgagagcactttctctctcacaaaatgacagtcttctactgtgtttagtccattcatggaagaccggattagatacaatgtggagaacggcttgattatcgcaaataagattggtggcttgagtgtctccaaattggaactgctggagaagtttccttagccatgtaatttcacttgtagttgcaggcatggcacggtattcagcttcagcactggatctagtgactataatttgtttcttgcttccccatgggatcaaatttccttcaataagaacacaata

SEQ ID NO: 33615 - DNA, 323 bp, Glycine max
  unsure (1)..(323): unsure at all n locations
gtgccaccctggaagatctaagccaagcccctactttcgaggggcagctcccaccttatgacgactatctcggacaagacgatgaggaaggagatacccatctcggtcccctgctccacctcanagatccgtccccccatgaattaccccaaccaaacataatccgccatatcccgacttcacccacacccgtaaaagaatctgttcccttcgtggaagattaaggaaagattgaggcgctcgaagagaggttaagagcagtcgagggcctcgacaattacccattctcggatctagcggacttatgtctcgtacccaatatc

SEQ ID NO: 33616 - DNA, 414 bp, Glycine max
  unsure (1)..(414): unsure at all n locations
tgtaggattatggggtacccatcacatgttgtactatgtggcggtcgggcgatggtgcacaacaagttttccacatccacaatgcgcgcataaacccaccatcccctgttgcccacctccaactgagctcacgtactcccacgtagcccatatcctcgtttctctcaacaccgggtccccatcaatcctcccaagctttcacaacatccaagcaaaacaacattcacacagcacaagctatcacagccaagcaaaacaaagcaaaggcagaaaactctgccaaaacaccaaccaaaaatcacagcttttcccactcaaagaccccagtaacaattccttcgatccaatttgttaaccgctggatcgactccaaatttntctggaagtctatagtgcataagcctcattatgacc

SEQ ID NO: 33617 - DNA, 299 bp, Glycine max
cctaaacaggcgaactcctggccgtcaacagataaaaggaacaaagaccacaaagcaaggaggcttgtgtggtggctggccagctgtgaactttgattgatatatgggatatggcctctggtaatcgattaccaagggtgggtaatcgattacaaggcttaaaagtgaagacaggaagctgagatggtctctggtaatcgattaccaagggagtgtaatcgattaccaggcttgaaaacgaagtcaggaagctaggagggcttctggtaatcgattaccaatgggtgtaatctattacc

SEQ ID NO: 33618 - DNA, 390 bp, Glycine max
  unsure (1)..(390): unsure at all n locations
tgacgcaacactntgagcatgaaagtattttttctntttttataatgtatataggggtatggcaattagaatatattagatgttcttgtatgttaacatggttaatatgatactttctacacatgcgcgtgtgcataaatggattacatgagtttggtctaaatcagaggggctagcacgacattttcgcattaatataagcattatcttgtaaactaacttctaaatgtttgttctcgcacgaaatggccccgaggaaacttgcctcaaagagatccaggaaggataaagcggccgaaggaaccagttccgctcccgagtatgacagtcaccgctttatgagcgctgaacactatcagcgtttcgaggccatcaagggatggtcatttc

SEQ ID NO: 33619 - DNA, 399 bp, Glycine max
  unsure (1)..(399): unsure at all n locations
agcttcgcaagggacataannttgttgattatngtgtatttaanaaatattannattaaatgtaaaaaatatttgttgcttctaaattaaaaattatatttacaattttcttcttaattttaaaaatgagtataaaatattttaaaaataatttaaaaattatttcatctctatttttatcaaatatattttattttaaaaattatatttaaaattcataaattaaaaactcgcaaccactcctaacaaactacaaactgttgaatttttgttcataccattggcaaatgtcgtcacaagctaacactctttaagagacaaccaattagaccaatatctaacatattataaggattaatatgttcagtaaagaaaaaggattaatgcttanatggaata

SEQ ID NO: 33620 - DNA, 415 bp, Glycine max
  unsure (1)..(415): unsure at all n locations
tctntgagagaacttccttgagaagctagagcttagctttatactttcctctaataactaagctcacctccttgagaagcttccttgaaaagattcctatatatatctagagcttagctgcacacatctctctaatagctaagctcacctccttgagatgagaagctagaacttagctacacaccccctataatagctaagctcacccccatgacaaaatacatgaaaatacaaaaaaaaagtccctactacaaagacaactcaaaatgcctcgaaatacaaggctaaaaccctatactactagaatggccaaaatacaaggcctaaacgaaggaaaaaacctattctaatatttacaaagataagcgggctcatacttagcccatgggctcaaaatctaccttaaggctcatga

SEQ ID NO: 33621 - DNA, 379 bp, Glycine max
  unsure (1)..(379): unsure at all n locations
agcttcttatccaaggctcatcttggtgttgaatctccttcttccatggcttattccctagtggatggcgcctcctctcacctcttctcctttgtcttccactgcatctccatggnggaaaatcaccattaaaggacctcattgatgctcaaagatccaacatccatagaagccccacaagcaagcttccatcaggtttggcttccacccattttgagacataatcaacagcaaggagaaaataaacaaaaccaaaagagacagggaaaggccccataaaatctataccccattatgcttagcatcgctctntaatttatcattntgagctntagatgctaagggaggaaaaacagaagcaaccaaataattcacaata

SEQ ID NO: 33622 - DNA, 447 bp, Glycine max
  unsure (1)..(447): unsure at all n locations
tgcctgtccgatgcagtagtaatgatggtccgagttatgttgggtaatctgttaccaacccggaatgggtttagggaaagacaacggcggcatgactaacctgataaatgccaaaggaaatcgtgggaagtatggtttatgctataaacccactcatgcggatataaagagaagcatcgtgggaagaaagagcggtggtcaaagctcgcggttgaggcaagaaagtgaaggaagcccgccctgccacataagtagaagctttataagcgcgggtctgggagacgaaggtcaagtggtcgcgatatacgaagatgatgttccgagtacattggatttggtacgaccatgccctcctgatttccagctgggaaatnggcgagtggaggaacgcctcggcatttacgcaacgagcataatgtatacctttaccggtgtaaaagctctata

SEQ ID NO: 33623 - DNA, 61 bp, Glycine max
aggccgctccaattctatgtagacagctaacatgaatgctgcatcatcccttatatcactt

SEQ ID NO: 33624 - DNA, 271 bp, Glycine max
  unsure (1)..(271): unsure at all n locations
atataacgagacgctcgacaccgaacggggaagctccgagccaacncaggcgacaatanctntttactccgatgtctgattgaagcccgtattatatcgagacgctcgaattgaatgttgaagctctgagccaattcaaacgacaataactttatactcggatgtctgattgattcctgtcatatatcgagacgctcganagtgaatggtgaacctctgagcgaattcacatgacaataactttttgactcggatgtctgatagagtctcg

SEQ ID NO: 33625 - DNA, 382 bp, Glycine max
  unsure (1)..(382): unsure at all n locations
tcaacattcaatttgagcgtctcngaatattacgggtctcaatcagacatccgagtaaaaatttattgtcgtttggattggctcagagatttatatattaatttcgagcgtctcaatatattacgggactcattcagacatccgagtaaaaagttattgtcgtttgaattagcttagagcttcaacaatcaatttcgagcgtctcgatatatcacgagactcaatcagacatccgagtaaaaagttattgtcgtttgaattggctcacagcttcaacattcaatttcgagcgtctcgatatatgacaggactcaatcacacatccgagtaaaaagttaatgtcgtttgaattggctcagaggttcaacattcaatttcgagc

SEQ ID NO: 33626 - DNA, 326 bp, Glycine max
  unsure (1)..(326): unsure at all n locations
gcttagattgaagtactggaacgacaagctcctcntttttttagnnnngccctgtgcgnnnattgtgtatagacacttaagcagtacttgaaagtgatgtntttagctaagtaccctataattagtaagttcccaaaacgcaatatataaagctactactatttgcacaaatcaattatgcagctggactatgatgttgatgcattttgttcaggcaccactaaccttaacattaattaatcacttcatcgatttattaattgatttaattttaaaaacatcagtgaagttactatgaataccaaactgatatgcatatcaaattc

SEQ ID NO: 33627 - DNA, 366 bp, Glycine max
  unsure (1)..(366): unsure at all n locations
aactcaagctgggaatctggctaatgataagttcaagagcaaatgaatttatttcttttttatgctgctcgncggnattnntgtgcatgttcatactgtatgccatgtnttattcatgttgtagttgtatcaaatgagcatatgttctgaagggtatcataccttattaagctgttggaactattgatctcataattattagcaaacacatgatgcttcttataatcttgtatgacaaacattggaacctagcataatttgtagtgcggtaaaaaatttgtttactatttagtatcacttgcccaactgcaatgcactagtatttttggctgtgggtttgtattcacctgatgctttctgattcat

SEQ ID NO: 33628 - DNA, 255 bp, Glycine max
ccaaacaaacgatcggtgcaagcataccagcccacatcaaaggagaatataagacgcgacaccaaaatgaaactgaaacagccaacaagtaatgaaagtggggccaaaaaaacaaacaaaatagtcctggtgtattccaccgctcacagatagaaacaccggtgaaccggaagaattagacgacaaccagccaaaaatggaatattaattcaggaaagcgcaacaaactacacttgtatgatagagcagagggat

SEQ ID NO: 33629 - DNA, 453 bp, Glycine max
  unsure (1)..(453): unsure at all n locations
cactacagaaactaagcttcttacacaatcaagcctcatattatcccataagagattgattgatcttagatatnnnaataactactagacatgttctcaccaggatgttcaggtgagggtccatgacagaatcaatctgaaataatgtacattcaattgaaacccacaacgcttacctggactttgaatggaaaccgatgagtttttacttctgcacctgaaagaactctaacatccacaccaaggctgtcaaccccaaccaggtaagctccctggaaaccatgtaacaacattgaaataaacaatttggctattaacagtagacatacaaaatcaaagtataaaaatataacgtaccaaataatagtcatttcctatgtgtgagtgtgttcgttggtgtcatgaacggaaatgaattagatcgaaaagaatatgagagaagtaaaggaatca

SEQ ID NO: 33630 - DNA, 341 bp, Glycine max
caatcgcgattctaaatcaacaacaacaatgaaataccagcaaaatgtgacagtcattccatttatatattgttcataaaagattagataaacttaacatagtttaatagtttaatactacgagtagagcaattaataaactcaaattgagtcaaacacaactattgtggtcaaagcccactgtttccatgttacaagccatctaagcagtagcagtagcactagatagaaaagcttgtcctggttgacggtttgccagtggtccatggcacccaagaagctgcaaggccacgagaaggaacttgttcattagatcagctaaaaataacttctaaaaagat

SEQ ID NO: 33631 - DNA, 261 bp, Glycine max
  unsure (1)..(261): unsure at all n locations
gcagcancgcctacaannggaagcaagatgacagaaatataagccactgacatattcaatgactcagatgctccctgcaagagaccagaaacacaatgtcaatgaatgaacttatgatgcacaatttatggataatacgaatattgcgaatgtatgaatacagagttttgatgatgtcaaagtaaaaatcaacaaggttgtttcaacaaacattattgctttaagattaattcacggtccaacaaataagatcaagaaaaa

SEQ ID NO: 33632 - DNA, 421 bp, Glycine max
aaactcagcttatatttagtcctttcctagggaaacgttctcattcttctgttgtcttccttgctctgaaatctgaatcttattcttagacacgagttaaaaggtcagatttcagatttcagatactcagtttcttgaatcttggatgataagttagcttaaggcaagaaatctgttccatggtcatcagagttgtatttaatagtatttaattataatttatgtccccaataacaaatattttaggtgatattatccattatctgatgcttttaatgattaatatctgatcaaggtttgttcttttacattattatcttgtttgctaacaatttgcatgtgttgttgagtttctggtttaacaagttacatggataagatgtctggactattttgacgagctctgatttttcatttacac

SEQ ID NO: 33633 - DNA, 467 bp, Glycine max
  unsure (1)..(467): unsure at all n locations
cggaatgtgtcctgaactctgacttcggagaccgatgcagactaagcgacacaaggagntgggcatggaccgatttattatactcttcgatttgcggaagactagcctctggcaaaatattctctgacacacgcgaatgattcgctttaggaggcacctagaggcgcctcacaagagagtaacctatatgccgtggactacaacatccatcctatgtgacgtgtgttacctgtgatgtgaatatcatataggcgagactgttggctttatgcagatctagtgactcttactcaaaaggagaatgagctccttatggtgggatgagctgctatcacaatgcatcgtttactgaatatatgagtttactaggcaagaggtcaccgtnaccgacgggtactttggaggtgggggaatttggcccctccctccatggcgattcccccctttgggttccaacgcttaaaacc

SEQ ID NO: 33634 - DNA, 305 bp, Glycine max
  unsure (1)..(305): unsure at all n locations
atcttgacctgccaaagtactcctgatggttgtgaagagtaagtatgggttgtacctgattaaaggtcttgccaaataatgtggtggtagtttgtttagttgaacttggacctttgactgtggttgtcgtacttgctgcatgtgagcaaaccaagggaatgccttgtgttttgtagaagtgtgtaccaagggcagaccttgggttttaatgaatgcctctcaagacagacctttagttttggaagaatgtacaccanaggtggaccttgggttcttttggtatgcctgtattctgcacaaattaa

SEQ ID NO: 33635 - DNA, 115 bp, Glycine max
cgacatgcgcccctctctggctcttttcgcggccataaagagcactcactattccgctgaataaatagacaccgccgcatagatccgcaagagatgtaccaacgcgcactggcgg

SEQ ID NO: 33636 - DNA, 155 bp, Glycine max
  unsure (1)..(155): unsure at all n locations
ccgccagtgcgcgttggtacatctcttgtgtatctatgtggcggtgtctattnattcagcggaatagtgagtgcactttatggccgcgaaaagagccagagaggggcgcatgtcgatatatcgatgtttgatgccacgctgagttttctggagct

SEQ ID NO: 33637 - DNA, 359 bp, Glycine max
  unsure (1)..(359): unsure at all n locations
agcaccgcagctgcagctttctaatcgncggaaggatgattgagttattaaagcggcgacgcctactggagactatttttctcccatgtttcacttgagtgtaacttgtattttcttcacagatagggcatgcatgatgacccttaacactggaaccgctgagattcccatatgctgggaagtcattaatggtacaaaaaagcattgcacgcatttcaaacgtctccttgcgaaacgcatcaaacactacaaccccctcgtcccacaactttctcaaatcttcaccaacggacttagataaacatcaatgtcatttcctggctgtcttgggcccgatatcatcatagacaacatcatgt

SEQ ID NO: 33638 - DNA, 441 bp, Glycine max
  unsure (1)..(441): unsure at all n locations
ntgganaatgatttctatcaaaagtagtcatataatattactaacaaactcccncaaatttactgttttgcttgttctcaagcaaagaaagaacagtttacttgtcctcaagtgtcaaagacagcggccaatcaaaagaaaatggtgtttgattcatcaaggacatcaaccatatgaattgaataccatggaatgcttaaatcaattacttctcacaagcatgcagtttttcaaagataagagcacaagtcttagagtcacaactgaaataagctagtaagcatgacagaaatcaaggaaggatcatcaaccaaaacctcacagtcattgtttcactcaagttcaagtgtctaggctgattccatcataaacaaccaacacaagttccaaccttggcatttcatctcctatcatgcagcaatgaacacacacaaatgaatc

SEQ ID NO: 33639 - DNA, 296 bp, Glycine max
  unsure (1)..(296): unsure at all n locations
attaanncctaccccacacttgccttgatttatgcacttagcttttatatatattaatttacagcatacacacttattagatggatccagaatttcaattnttttacacaaatatatatagaaacagtatgtaattatacatagatcagtgtgtgtatgttattcaccttgaccacttcaattctttacccagtatctcccccaaatttggaacaaattgtcgcaacctacccttcggtgggaggacgacgcgtgactcgcgggatgcgtgtttcatgaaaggaatacgcgcggag

SEQ ID NO: 33640 - DNA, 381 bp, Glycine max
ccctaatcttaaaactaagtttacttaacttattattcctaaaaatcaaaagctacagttaaagtcttctaccctaaagttaagacaagaaaaagagaaaaaagatcaaggaacttacttggacggtgtatgattgatgcttcaaagtcgaaaatgcacaaagagagtacaaatgcaaaatgtgcaaatttttggagagagagaatgtagaggcgaggtttctgtaatctggaaaatgtgagtgtaactgctgttacattcacttaagcagtttcgatactttcgcttatcggaccgttgcgctaagcgagcaagtgagacatatggtttctaaccaggctcgcttagccgagcgtttaaattcgaattttctttaataaa

SEQ ID NO: 33641 - DNA, 285 bp, Glycine max
gcgacacgcgaagatgatattccgagtactatggatttggtacgaccatgctctcctgattatcagctgggaaattggcgagaggaggaacgccccggcatttacgcaacaagcataatgtaaacctttacggttttaaaaagctctatagttgggcctaagctgtatagttttcattttgttaaagctttgtgacttttgtttttgaatttataatacaacgatctttgttcatctgtggctgctctctacccatactaattcatttgcatgtgtacttctttt

SEQ ID NO: 33642 - DNA, 379 bp, Glycine max
  unsure (1)..(379): unsure at all n locations
nttgcaagctagaatcatttattctatctcttacagcctttgggtgagtctcgtccaggtagacccgaagaaaactggcctcaccgtgataaaaaatgagaaggaggagctaattcctactcgggtgccgaacagttggagagtctgcattgactataggaggctgaaccaggttaccaaaaaggaccattttccactgcccttcattgaccagatgcttgaacgcctggcatgtaaatctcactactgtttccttgatggtttttctagttatatgcaaatcactattgctcctgaggatcatganaagaccacattcacctaccccttcggcactttttcctatangaggatgcctttctgcctgtgcaatgcccct

SEQ ID NO: 33643 - DNA, 242 bp, Glycine max
tagaataagatagaacattccaggcttgggctagagtggtaagatctttcctcaagagctatcacggtagaccctcgacattaagtacaaatcccctcccagggatacacagccaggctgcaagctcctgaggattaggcctcagtctagcaaacctggagtaagagggcaagctctccccttgctccatgaccactggagtctccaaaaaggtgttgagagaatcaacatcaaattttatt

SEQ ID NO: 33644 - DNA, 303 bp, Glycine max
  unsure (1)..(303): unsure at all n locations
aaaaaccgatgttaactttcaacattaatatacattttttgggtgtaattcatattagcaacatcgggttttaaaaaccgatgttaacgataatactatcaacgttggtactctcaacatctgttcaaaaaccgatgttaaaagtcataaataaccgatgtagaaatcatatattctaatagtgttaatctcgcacaatgtcctataaatgatatggaacgaaaacaaatgaaacgaatgtggtatgcatcagttgntgttgcatctgacagctgaatctgtagtatgttttgagctacaatt

SEQ ID NO: 33645 - DNA, 343 bp, Glycine max
  unsure (1)..(343): unsure at all n locations
gcttatgattccatttcctagggaatctgnattttattcttaagnctattggctttccagcccagttctgtacttggatcatggaatgtgtttcttccacttcctttagtgtgtcagtcaatggatccatttatggtcacttcaaagggcagcggggtcttagacaaggggatcctctctctccttatctatntgtgctctgtttggagtacttttccagagatatgagcagcctcaaagaagatgccaattttaaatatcatcccaactgtgcaagaattcaactatctcacttgtgctttgcagaagatattatgcttctatctagaggagatatcccttc

SEQ ID NO: 33646 - DNA, 460 bp, Glycine max
  unsure (1)..(460): unsure at all n locations
ctaagctatgctgcnacattataatagacctccacagcagcttatccaactttctgcaaaaatnatgacctttcaagcaacagatacaatccaggttggaggaatcatccaaatttgagatggacaagcccttcactacaacaatagtctatccctccttttcagaataccgctagtccaagcaagccatatgttcctcctccaatgcagcaacaacaacagcagcaacaacaaagacaacaagcaactgaggcccctcctcaaccttccttagaagagttagtgaggcaaatgaccatccagaatatgcaattttagcaagagacaagagcctccattcagagtctgacaaatcagatggggcagatggctactcagtcgaaccaagcttagtcccaaaattctgacaacttgcgttcacaaactgtgcagaatccgaaaaatgtgagtgtcatcacct

SEQ ID NO: 33647 - DNA, 304 bp, Glycine max
ttcacccaatctatacacaaaaagcatctaattgaaaaatcactcattagaaaagtatcacaacaattaataacataggtggtacatactccttatcaataacatcttaaaaaaagagaggctcttacacccaaagaaagactggctaattcaacgattacttaactcacaggaatagacaggtttcttgtgtgtaggagcaacaacacttgaagactgagcattagatgacgcctcactcttcttgctctttggtgtctctgcatcaccacctagtatattgatactcatatgtcatcatttt

SEQ ID NO: 33648 - DNA, 438 bp, Glycine max
  unsure (1)..(438): unsure at all n locations
cccaagcacctgagctgcagcttaggaanaccataaaacaaggtagnttctaatcttaaatcaanngaggaagcttcgccgagtgtccccattgaaaaacctttattcaaacctttcaaagttagtgataaggctaaacgaaaaattagggaacttagaaaaactaaatccttaattgaaggcgtaggtgacaatcatagcgaattactaaacaagattagtagtttgcttaaggtcattccagatactccccaagcttcggaaaatacttccaaaatggtaacaagaagtacctccaaattaattaatgttattaatgaagatagtgaccaaaacttatataacacaactgagataggatcagtgtcagaaaagaatataaatccattaaactccacacactggagaacccccctcatatatatattcaacgtcact

SEQ ID NO: 33649 - DNA, 449 bp, Glycine max
  unsure (1)..(449): unsure at all n locations
attgacggtgtgagattttcccggtactctactatgggcaattttccttggcacccttaatcatgttcaatttgttggtaagtttaggtcttttaatccaaaaaaggaaacttggttaccatgtgagaataatttggataaattaaaatagttttggtagttatatgcatgagtatttcgatgcttgtttgcaacaatgtattatacaagagtacctaccatatagagagtggctatgcaatttggaatgcatcaagaagtttcagattgtgtgattgcattctctggcaccaaagctattgcattgaaaaattattgcatacccaaaattacttaaaaaaattgcaaagaatattacttggctaanaagcagtctaaagctactctgccatcatggacctcatgtatcanaaacaaatacanatggtaatgatgctgatgttgcacct

SEQ ID NO: 33650 - DNA, 382 bp, Glycine max
  unsure (1)..(382): unsure at all n locations
acacatatatcatnattatattatttgacttaattntgcttcaatgttaggttaagggaagaacagctagaatagagaagaaggcgtggcactggttcaacatcgttttttcttttctgctcacaatagcaaccacaatttcagcaattcggttgatagtcaacaacatccaaaagtatcatttctttgcagatgcatgattgctgatctcattcagctgtatggcttaatttcggtttaaattaggccaacagctatataatataataaaatgttaagtctttgcaatttagttcttttctatttttagttcttggaattntttatttttgtgcatttttaatacctaacattancaaaacatttattattgccttacgta

SEQ ID NO: 33651 - DNA, 333 bp, Glycine max
  unsure (1)..(333): unsure at all n locations
caattacttatgttagcagggntcaaaaggatttagagagagcttctgaacccatcttcattgtactattaattatgttattcacaataaaacttccattggtgcatgatctctcttctccttctatcatctattttccttatttgnttgtgcattttgtcaatcttaacccaacanatgtcatatgccagacttttgcataaaaataacaaacaatagtatcctcatcatgaacatatacttcccttcgaacctatgaccaaatttgtccatatgacattngctatatcttaacaatntgtcaagacattcagttcctctaacatatttgac

SEQ ID NO: 33652 - DNA, 291 bp, Glycine max
accacagagcggtacctgtagatatgtcgcgggggtcaggagaccttgtggacgtcaggcggggtgctattgcccaaaaccaatcttgaccaatcccgacccatcccgggcataatcagtcagtgagaacctgtgatgtacctaaacaggcgagcttctgacagtcaacagataatagaaacaatgaccactaagcaacgatgcttgtggtggctggcccgctgtgaatttagtgtgatatatggttgtggcctctcggtattctattaccataggttgggtaatcgatta

SEQ ID NO: 33653 - DNA, 451 bp, Glycine max
  unsure (1)..(451): unsure at all n locations
tgtntgttaganagacccaacattnctatctactgttgtcattntattnacctcgcactttatagtttttagcataaaagttagtttaaattctgtttgaaattatcaatcatacatgttctttcaacaatgcttcatttctgaacttaattcaggctaacattagttccctgtgttcgatactcggattcatccattttaattnttaaatacttgacgatccggtgcgctttctggcgaactggatttcccttgaatatatttgaacaaagaaaaaatggaacaaaaagtaactacatgagaaatcgaacacttaattaaagaacttaaagttaaaacaataaagagtttctatgcctcaatggttctcataatcttttgttaagaagatatcttgttttctgaagaaaaaaatacaagtctaatatcactatgactaagtaatttgatt

SEQ ID NO: 33654 - DNA, 448 bp, Glycine max
  unsure (1)..(448): unsure at all n locations
tattctctatctagagtagttgatcacaacaactnactactgacatatattcgactttagtagtggacaatgtagttgagccttgcatcttgcatattcatgttactaagttagcaccgataaagtaatagcttccactagtgctttttctttcaactttatcaccaacatagtcaacatcataatagcttgtaagtctgaaactttctcttcttttgaacataagaccaagattagaagttccaattaaatatctacaaatatgtttaattttagttaggtgaacttccctttgttctttttgaaatcttgcacatagataaacattgaacataatatcagaaatggatgcagtgagatagaccagtgagttgcatccactttttttgatccttgtccaatccaaggtatgtcatggtgtgcattggagtcttcatttcttttcatc

SEQ ID NO: 33655 - DNA, 248 bp, Glycine max
  unsure (1)..(248): unsure at all n locations
cctcccgnggatgtagccctgatcaaggtgaaccacgtaagtctgtatttgttctttctctcttttcttctctttcacctttgctgcacaattctgtgtgtatgacaattttgtgggagttttgtttctggttctttcgctgcttcttggtgatcaagaacactcaagatattatgtcanacacaatcaagattgagaaattcaatggaaagaatagcttcaatctgtggcgcatcaagatgcgtgct

SEQ ID NO: 33656 - DNA, 465 bp, Glycine max
  unsure (1)..(465): unsure at all n locations
actagcttacttctaatatatnnnnagaaaatgaatntttatttgttgaatngncacccatcatttatcaactacaataacattctaacatagaacccatcatggatatttaaagcgtaaaatttgaaagaaatttcctttctcaatttaatcaaaatatcatttgaagtatcacaacaaatttctgatgaagcctagacggtcaaaccatcaatttgaaatatgattcatcttaataaatatgttcggtaatttccaaacaaatgagaactatgaaaaatctaagctcataagaaaatataaacaagtgtgatcaaaatttatgattttcaataaatttcaatcaatattaaagtgtgttccaaaaaatatattaaagaatgtgttattaacatttttctataacagaaatataatcaccaacaatctncaatagtttgtccccactggctctaagtcctccat

SEQ ID NO: 33657 - DNA, 439 bp, Glycine max
  unsure (1)..(439): unsure at all n locations
agcttccacaacanccattcnatcacgtttctacagcacaagctatcacagccaagcaaaacagagcaaaggcagaaaactctgctcaacacatcaaccaaaatcacagcttttctcacgtaaagaccacagtaacaattccttcgatccaattcgttaaccgttggatcgactccaaaattntactggaagtctatagtgtataagcctgcattttgaccgttgggatatactagcaaacatccagaactcattctgcactagactntccacagccaaccacacacaagcatttttctgcacttgtgcaaaattctgctgcacaatttcacagcaaaaactctgcataagtgcagatntcgaanatcacccttcctctcatccaatcttgcccanatcanatnnctacagtcccagatcatgtatcanacatgtctaa

SEQ ID NO: 33658 - DNA, 373 bp, Glycine max
tattctttatctagagtagttgttcacaacaacttactactgacatatattcgactttagtagtggacaatgtagttgagccttgcatcttgcatattcatgttactaagttagcaccgataaagtaatagcttccactagtgctttttctttcaactttatcaccaacatagtcaacatcataatagcttgtaagtctgaaactttctcttcttttgaacataagaccaagattagaagttccaattaaatatctacaaatatgtttaattttagttaggtgaacttccctttgttctttttgaaatcttgcacatagataaacattgaacataatatcagaaatggatgcagtgagatagaccagtgagtt

SEQ ID NO: 33659 - DNA, 334 bp, Glycine max
  unsure (1)..(334): unsure at all n locations
caagcaccgcagctgcagctgagatgaggaagtgngaaaggattacttcctgtttttatngnngaccacagagtggtacctggagatatgtcgcgggggtcaagagaccttgnggacgtcaggtggggtgctattgcccaaaaccaagcttgaccaatcccgacccaacccgggcatagtcggtcagtgagaacctgtgatgtacctaagcaagcgagctcctggcagtcaacagataaaaggaaaacaagaccacaaagcaaggaggcttgtggtggctggccagctgtgaattttgtgtaatatgtggattgtggcctctggtaatcgatta

SEQ ID NO: 33660 - DNA, 442 bp, Glycine max
  unsure (1)..(442): unsure at all n locations
aggagaagatgcttcaatggaggaaaagaaagagggttttgatgagatatgggggagcacgaaattgaaggaataaaagaggtatagaagtggaactttgaagtatgtctcacaagactctcattcatcaaagttacaacaagtgttacacatgcttctatttatagactaggtagcttccttgagaagctttcttgagaaaacttccttgagaagcttctttgagaaaacttccttgagaagctagagcttagctacacacacccctctcataactaagctcacctccttgagaagcttccttaagaagattcctaaagaagctagagcttagctacacatacctctctaatagctaagctcacctccttgagatgagaagctagagcttagctacacaccccctataatagctaagctcacccccatgacaaanaacatg

SEQ ID NO: 33661 - DNA, 204 bp, Glycine max
  unsure (1)..(204): unsure at all n locations
tccaccaggagacgcagcggaagacaaaggagaagaggccagaggcggcgccatccactanggacaaagccatggaagaaagagcttcaccaccaagatgagcctgggataagaagcttggcaaggatgctccaatggaggaaaagacagagggggagaaagagagaggggggagcacgacactgaaggaagaataagggagag

SEQ ID NO: 33662 - DNA, 445 bp, Glycine max
  unsure (1)..(445): unsure at all n locations
actaagctngatacatgtngagggttctccttatcttcaaagtttttgactattttatattttatnannnnnannnctattgttccacttcattcccgtgcctcaaatctatgtaacccttgagttccaaactcctagctntattttactatttagtatagtaatagctaattaatttctagaaacatactttttgtttttttaattattttagattgtattcaattatctatgaaatcattgagcacgaattataaaaaaaatgagatttttttttttgtttatgacaaatatatattaagagttccgttcaaatggaaaagcacccttggtccttttttggccactaattntgcttaatcccaattaacatattacgggatattctgatcattaacaaaaatgatcttcagtgatgagatatctaactacaaacaaatttact

SEQ ID NO: 33663 - DNA, 370 bp, Glycine max
  unsure (1)..(370): unsure at all n locations
cctgaggcatgcaagcttaacaaaaggcatgcgaagngggttanatttttatatctanncnccnangncaccaaacataaaaagggaaaaggtaatattgtagccgatgctctttctcgacgtcatgcattactttctatgcttgaaacaaaattgattggtcttgaatgtttagttttggcattcacctgtgttaggccaaatggaacctgtaaaagcaagctagatagagtgttggtcactgatgggtggttagctaagaggccagatagttctcaactcaatcttgagaggaactattctgaccacagccctatcattttgatatctaagagcattgactgcgccctaaaccttttaaggttttgat

SEQ ID NO: 33664 - DNA, 458 bp, Glycine max
  unsure (1)..(458): unsure at all n locations
actcaagctgcattgaattgcaaagcccactccatattgtantttacctgacatcttatacaaacaaatcaaacgtaacaagacaattatagttgctgtttgaatacctcacccactcaagtgtatcacacaattatggcttttctctaatgaaacactcttgccttttaccactctaattccccttgagttcttaggcaattcaagagattatggccacaacaaagaacaattcaccaatatgtgtaaggtaaggctagagagacaaggaaaaggttaaccaagaaaaaggctaacaatgtttttaggcacaaatgaaggaaataaaattcagaatttaggaattcaagtaacaatccttcatgcaaccaatatattaccttaaagagattnttttntaaaagttcttcaagcatgaaccattcagcccaattnttttntnttttaattttgcttat

SEQ ID NO: 33665 - DNA, 254 bp, Glycine max
  unsure (1)..(254): unsure at all n locations
ccaacccangaannccccagggcacgcgaaacactnncagacatgagaacaaaaancangaccaacccgngaagactctacttcccatgaaccatatgtagcgctcccaaaatgcaaaagatcattgctagcccatgaattccctattgcaattaacccgtgaaacacctacaaataatattatggctttattttgctgggtctagacttacattggaccattattttatatgagactcttagacatagtaaac

SEQ ID NO: 33666 - DNA, 232 bp, Glycine max
  unsure (1)..(232): unsure at all n locations
aaaagagaagaaactcaaatcnccatatgttggcagatttgaggtgaaagtaatagcaaaattagtacggaaatagtgggatccatggctgtagatttcttcccaaaactgagatgaaatgccaagagtggaggtcgagatgttatgttgagtgttacaaaacttatcttgtggcttcttggacactcgcacataccacatttttgggtgaaattgatatcctgtcctcttc

SEQ ID NO: 33667 - DNA, 411 bp, Glycine max
  unsure (1)..(411): unsure at all n locations
aactcaaccgncatatattataaatagattatctatttattccattttacatgattttgttttaaaaggaacatatctacaaagctatcctttatttccttttatatgattaacggtcatatcctttgttttaaaaggaacatatctacaaagtcctaattgtattagacaaaaaacgtgcaacattcgcttaattcaggaaacaacgatcaatttgtacaatagtcataacattcaattcccaagatacttttcagagttacaagcgtctctttacctataaatacaacatcaaagattgaagaactctgatgaacgtacatagaaagataaaaagtcatgacttaagaaacgagaagaaccactgttgagaaacacgctgagccttagagagttcatcctttgtgtata

SEQ ID NO: 33668 - DNA, 398 bp, Glycine max
  unsure (1)..(398): unsure at all n locations
agcttaacataaggcatgcgaagttgggtatnntttatagcaatncccttatgnnatcaaacataaaaagggaaaaggtaatattgtagccgatgctctttctcggcgtcatgcattactttctatgctagaaacaaaattgattggtcttgaatgtttgaaaagcatgtatgaaaatgatgaaacttttggagatatttttaaaaattgtgaaaaattttcagaanatggtttctttagacatgaaagctttcttttcaaagaaaacaaattgtgtgtgcctaaatgttctactagaaatntgcttgtttgtgaagcacatgaaggaagtttaatggtgcattttgttgtccaaaagactctaaaaacattacaagaacatttttatttgcctcata

SEQ ID NO: 33669 - DNA, 448 bp, Glycine max
actaagctttattaagctgaaccatttatcaatttcacaagtttgtttttattcagaaaattagagtttatctcttttatcttagtgagagtgattctcctaaattcttgagtgattcaagaacaccttggctgtatcaaaggactttcacaacctttgtgtgttgccctcgctggaaagagtgattctttccttcctttcatcatcacccttgttctttcaaaccacaattccagaaaatccacctctgcccagaattatctcgtggccataacttccattttacgcactcaaattaagtgattcttgagcctaaattgaatttcaaaacgagacctttcacctcgttttggaatcacctcatttggagccctgtagcttcagttattgccatttctatatttctgtccagccaccacttaacctacgttttaccatcccattcatc

SEQ ID NO: 33670 - DNA, 158 bp, Glycine max
  unsure (1)..(158): unsure at all n locations
agagcaacaacaaccaancgcgagcgccgcgaggcgngacaggacncaaacagacatcaaagaaaaagagcagcgccgcacgagggggcgcacagatgcaacactcaaaaagcgagcgaacagatagggtacgggactcaatcagacatccgagaaaa

SEQ ID NO: 33671 - DNA, 377 bp, Glycine max
  unsure (1)..(377): unsure at all n locations
ctaagcttctctgcgtaaaaagaaatatcgttcttgtctgttataaaatngcgcaagggcggctgaaaaatatccgtcggggctatttaactaccgatgtcggctattgttttttctattccacccctgaattatatttggatgatgcctattacgaaatgttcggtcggggtcatccggtcatgcttctttttgaggcctcgatctgtcgtctttcctagccggccgacgtcggctagcatttttttcgatccatatctgtgtgaatcatgtnttttttttgccaaggagggctaatgttttcgtggccgacaaaatgagaacatgccagtgtcggccgaaacacaatcccgcacgaaaaaccctagccgacctac

SEQ ID NO: 33672 - DNA, 433 bp, Glycine max
  unsure (1)..(433): unsure at all n locations
ttgaaccaaaccaaaccctgacatgtatcatgtctagctantctataagctttgagccaaaatcctgactcaccacaaaccttgacccagggtgagaatgccaatccttaccctcggaagcaaaaaaaagaagagaaggaaaatttccaatcaaaggaaaaaggagaaggaaaatttccaatcaaagaggaagcaaaaaaggagagaaggaaaatttccaatcaaaggaaaaaagagaggaaaggaaattcccaatcaaagagtgggagaaagcaaaaagaaaagaaagaaaattcccaatcaaagaatgggagaaagaaaaaagagaagtaaaaaagaagagagttcctgatcaaagaaactagaagaaatgtgcagaaagatcttttgaccagatgatatctgaacaatacagaattgtcaccaaatgaac

SEQ ID NO: 33673 - DNA, 343 bp, Glycine max
  unsure (1)..(343): unsure at all n locations
gacaagnggcctcagatatcttaagaagggggggttgaattaatatattccaaactcttctcctaattaaaaatctatcttactttttacttaagttatgaattcccttaatgacaatcttcttaaatattaattcaaatgaagcaacttgaattatgaatataaagcaataataaataaaggagattaagggaagagaaaatgcaaactcagttttatactggttcggccacacccttgtgcctacgtccagtccccaagcaacccgcttgagagttccactaacttgtaaattccttttacaagttctaaacacacaaggacaacccttcctttgtgttta

SEQ ID NO: 33674 - DNA, 309 bp, Glycine max
accgccttctggaggaatcttctggagggcccaagtgggcctgtgtgctatttgcacccccatttttactaaatacaccccctaccttatttttgtgcttcttttttcgtaaagctacggaaacttacgaatcttgtaacgatacttgttttctttccgtaatgttatggaaccttgtggattacataatcatccattttttgacttactgaacgttacggaacctcacgaattatgcaacgatgcttcctttttgattcccgatatgtgacggaaccttacagattgtgcatcaatactttcttttga

SEQ ID NO: 33675 - DNA, 415 bp, Glycine max
  unsure (1)..(415): unsure at all n locations
agcttctatanaagccaatcctattcacttggatgnnnganncggggacacaatatatcaaggcgctcganattgaacagcggaagctcccgagaaattcgaatggtcataacatttcactcggatgtctgattcgtggacataatatatcgagacgctcaaaattgaacagcggaagctctcgagagatttgaatggtcatacctttacacacggatgtccgattcggggatataatatatcgagactctcgaaatagaacaatggaagcgctcgagaaattcgaatggtcataacatctcacacggatgtctgattcgtggacataatatatcgagacgctcgaacatgaacagcggaagctttcagaaatatgatgggcataccttctacacggaggtgcgactagggatat

SEQ ID NO: 33676 - DNA, 385 bp, Glycine max
  unsure (1)..(385): unsure at all n locations
ntggagaaccaagccaatcagaatgctagttgtaatattgatgggaatagaggtaacaatggcggtaatgacggaccgaggcagaaccgggttgagggagtaaagctcaatgttcctcccttcaaaggtagaagtgatccagatgcctacctggactgggaaatgaagactgagcacgtatttgcctgcaatgactacactgatgcgcagaaagtcaagctagcagcagctgaattctccgactatgcccttgtttggtggcataaataccaaagagaaatgttgagagaggaacggcgagaggtagatacatggactgagatgaaaagggtgatgagaaaaaggtatgtgcccactagctataacaaaaccatgcgacagaaac

SEQ ID NO: 33677 - DNA, 350 bp, Glycine max
  unsure (1)..(350): unsure at all n locations
accatgtcatgcattctagaaccaaacatatagagataagacatcattttcttagagatcatatatcaaagggtgattgttgcattgagtctattggtagtgaacatcaactagctgacatctttactaaacctctagccaaagataggttcttcttcattaggaatgaactgggtatcttagatggatctagtattgaatgatgttatgcttagaacatgtagcttgttatatatactctccatgtctgttaattttcctttaatgtctcagtatctngatatattgatatgtagctgattctttctccaaaaatacatgttttattttgtaatttgaagttttcacta

SEQ ID NO: 33678 - DNA, 326 bp, Glycine max
  unsure (1)..(326): unsure at all n locations
cctatggttggacctcccaaagagtatggagtaacaccacttttaacatttctgatttaattccttttgcaagtggagctgatattgaggaggaggaactaaaaaatttgaggtcaaatcctcttcaagggggaggggatgatgcaatcctcactangaagggaccagtcactagagccatgagcaagaggctccaagaggttgagctagagctgctgaaaaagaccctagggttctcatgaacctcangataaatttctgagcccatgggccaaggttgggtccaattatctttgtacatattagactacgatgtcattatattt

SEQ ID NO: 33679 - DNA, 375 bp, Glycine max
  unsure (1)..(375): unsure at all n locations
agcttcaccgatcctatngaagcaannggtaactttacattctccagatatccagaagaagnataaagatgaggaatttctcaaatccagatctatacttgctacaacaaatgaggttgtagaccaaatcaatgactatgtattaaacattatccgaggagaagaaaaggggtatttcagctatgactcaattgacatgaaaaatgctgcaacaactaaagcttttgaagcaattacactagagtttctacattcattaaagacatcatgaataccgaatcatataattaggctgataagtggcacacctgttatgttgattcaaaaattagatcaagttgatgcctatgcaacgagacaagactaattatctct

SEQ ID NO: 33680 - DNA, 233 bp, Glycine max
  unsure (1)..(233): unsure at all n locations
agctaacagcaataaaaagcatcaaagtaattcaaagattttctccatattctttcacaagcacgacngacagtgaaaaatcataagatatgatttaatgcctaattgcacacctgacatcctagtgatcaactctaactcatgatgataagaaaggaaacatgcccaacaacaacttcattaccctcctctaatgaaagctgaattgatctcttctctaacttaacagcatg

SEQ ID NO: 33681 - DNA, 405 bp, Glycine max
  unsure (1)..(405): unsure at all n locations
agcttcatgtttnatcacacatncaancttactttttcttattacnccnaaaaaaanagctattaaaaggtagcaacagatcttagaccctataagcctatgatttggacagctgtatttgacatatacggctcttctgggccgccctagcagtcagagttcatagaatttctattgtactgttcatacttcctagactcctccacctccactgtggactaaatgtaatgtggacagatctatcattgaaaatattatgatggctgcttgtgctggtgtgttttgggatgacgttgggaattggatttatgggtttgttaggaactngggcatgctctcacagctgaagtttggtgcatcctttcagccctacaggttgcatgggataagaggtttcgtatctga

SEQ ID NO: 33682 - DNA, 305 bp, Glycine max
ccctataatagggggaggaggtgtataccctgatttcggtcggtgacctacgctggatgacaggcgacctttctttggaccttgtgaggagctcggcatccatcattacgcaattaagtgaaattgcaagacatgccgaaataccagaggaggatcgatgcacaatccggaagattccgtgacacagcggaggatatatggaagcatcgatgcataatggaccgaggtttcgaaacattacctaaaggataaaggagatgattatgtaatccgcaaagatccacctcatgactgaaagaaaacaa

SEQ ID NO: 33683 - DNA, 457 bp, Glycine max
  unsure (1)..(457): unsure at all n locations
acctgcggcatgcaagcttgtgtggaatctacaagcaaggactaaattaatcttctagngacgcgacgaggaatccgnggggtagctcactataggtaaggcgagtttattataaaatttaccattttaacaccatagttaggattaaggaacctatctatgaggatatctgcctgtccttgtgcatgctgatttttcttcaaagaaaattacgttttaactaatgggatgcgatatatatattgcgatgaatgatattgttttggctggttgaaggctgcgcgtgaggaaatgatattgctgtgtttgtttgaattgttgctgatcgtgctattgaggattttaattgatatgtgatgataatgatgattttgatgatattgattcgagatgacatttgttataaagaccatgccacatgaattgttttatcgataaatgtaatatgaatgatgtg

SEQ ID NO: 33684 - DNA, 211 bp, Glycine max
agcaagagactatggggtacccatcacatgtggtactagttggcggtctttcgattgtgcacaacaagctttccacatccacaatgcgcgcataaacccaccatcccctgttgcccacctccatctgagctcacgtactcccacgtagcccatatcctcgtttctctcaacaccggtgtcccatctattctttaagctgtcacaacattca

SEQ ID NO: 33685 - DNA, 315 bp, Glycine max
  unsure (1)..(315): unsure at all n locations
agcttatcatgcgcacgtttaattattctatattacanncccgccctatgaccactacagatcaagtgctccttgcctaacacatgatcaattttatgatcactacaggcacggtatatgcaattagcagtaaccagcaaactttgctataacataggaaagaacggcgttctataacaggataaagatcagcagccattcgagaaaagccgatgcctaggccgcggtaacaccctgggagagcttacgccactcagaagatgaaatgccagtgggagccaccatccaaccaactcaattagcgttcgaaggaga

SEQ ID NO: 33686 - DNA, 293 bp, Glycine max
cctcctctcacctcttctactttatcttacgctgcatctgcatggtagataatcaccgttgaaggacctcattgaagctcaaagatccaacctccatagatacttctcaagcaagcttatatcagtgtccctccatactgataacagccaaccttaatgttgcatttggctataccttctgcacatcatagaatttctctgctcacgttgatggaaagttccttcgtaattatttttcacacacttaaaatatatcattaatgattaatgatctgacaatgaaaatttggcct

SEQ ID NO: 33687 - DNA, 337 bp, Glycine max
actaagctgatccaggtctgaaacgaaattttcttctctcttcatattatgagttcatcaagaggtcgaggggctctccaattcttgaatgtatgttgttgttaaacttcttgaacatgttgcttaaattttggcttcgtgccctgcctgatctatgtgtaagctatttcttaagttttatgccaaaatgatttatttgcatgtgaaacatacacttgctttttttatagtttattttgaaatcttaaacttaaattttcagccttaaatctatgaatgatcttaaattaactatataattttaaaaattgataagaaacatttattaattttacat

SEQ ID NO: 33688 - DNA, 321 bp, Glycine max
  unsure (1)..(321): unsure at all n locations
ccgctccggagtatgacagtcaccgctttaggagcgctgtacaccagcagcgcttcgaggccatcaagggatggtcgtttctccgggagcgacgcgtccagctcagggacgacgagtatactgatttccaggaggaaatagggcgccggcggtgggcatcactggttactcccatggccaagtttgatccagaaatagtccttgagttttatgccaatgcttggccaacagaggagggcgtgcgtgacatgagatcctgngtaaggagtcagtggatcccgtntgatgccgacgctatcggccaactcctaggatatccgt

SEQ ID NO: 33689 - DNA, 277 bp, Glycine max
  unsure (1)..(277): unsure at all n locations
agaaactaagcttgaaaacacttttattttaatcactggccaacttttgctattcaattaggaattcccttcctaatattctagtgatcatcttgatgttgtgacttgtaatcttgaagtattgtcttgaattttaatcttgaaaagcccatttgcatcaattgcaacacatcatcatgatcatcatcaaaacatcaaagccaattgcatctacacatgtgtcctccaccttcnagattggagctatgtttcacgattgcctaagtgcggaccctca

SEQ ID NO: 33690 - DNA, 410 bp, Glycine max
  unsure (1)..(410): unsure at all n locations
ctgtgtttgttgcacacacaaatttgatatgtgttttaattttgtatctacaataattgagacgaagctagccttcactgcaaagaatttctctgtacaaaatgtagttttgattctatagatgcaatagtttacgcgaagctagttttcgctgcaatgaatttctctacaaaatgcangttttagtcgataattgcactcgctgaggtgaagttagctttcgctacagtgaaactctctacaaaattcaattctgattttataattgtacttgctgaggcgacgctagttcacacctcacatctcacaaggtatgagcatattcatgagtcttatcaaagaatgtcacacaaccaatctcatccaaatgcaccaatcaattgtattcattcaagttcacacatgcacaa

SEQ ID NO: 33691 - DNA, 311 bp, Glycine max
  unsure (1)..(311): unsure at all n locations
tctaagaggagccaacccgtcaccctcattaaaatagctctttcttctctattcctttagngaatacacctttgttggttctctatttggtcttaaccctctcatgcatcttctttacaaattctgacctagattccccttctttatgtataaaagaaatgtccagtgggaggcgaatgaagtctaacggtgttaggggactgaacccatagataacctcaaaaggggactgcttggtggttctatgaaccccnctgttgtangcaaattctacatgaagaagatactcatcccagacttatggttgcctt

SEQ ID NO: 33692 - DNA, 251 bp, Glycine max
  unsure (1)..(251): unsure at all n locations
cgcttctacatcttgatagattagtnatcaatcattgttataactcctgacaaagaaaaataaaggaaaggttaaaattcggaaaagaaagcaaagtgaaacataaaaaaataatacatactcgtgatctgaattcaacgactgagttttagagaacggcaagttcaccaagttcttatagtgaagagccttaagaaactttgagggtgcaatcatctcctgctgattgaaagtggacatgtccagtacat

SEQ ID NO: 33693 - DNA, 409 bp, Glycine max
  unsure (1)..(409): unsure at all n locations
gggatccttaagtcacctgcngcatgcagctttgaccanaacctgactcaccttttttcttgacccagggggagaatgtcaatccttaccctcggaagcaaaaaagaatagatgggatatttccaatcaaagaaaaagagaaggaaaatttccaatgaaagcaaaaaaagaaaagaaggaaaattccccaatcaaagagtgcgagaaagcaaaaaaagaaaagaaggaaaattccccaatcaaagagtgggagatagcaaaaagaaaagaaaggaaaattcccaatcaaagaatgggagaaagttaaaaaggaagaagaagaaggaaagatagctcctgatcaaggatcgaaagaaaacagaagaaatgtgcagagaggtctttggaccggacaatatctgaacaatac

SEQ ID NO: 33694 - DNA, 417 bp, Glycine max
tgaccggatgtgagatacatcttcttaacctttggcttccttgactccatttcattgaagcgcgtatccacttgcaattctaaagtatcaaacctttcaccaacaaaggtttgaagaccatcaaacctttccataatcttctaaagaagagatgaatcttctccctcatgtccttcttcaccaatatttctagcacccttctttacccatgatccatcatgctccttaatataaccaaaggatgctatgactgaagcgcctataaggaatgatctcttgattggaacattaaggttcagaatcaagagggatgttgaaatgttgaatgaagaaggttacaaagtgaggataaggcaatggggcattcaatctcaatgccctatgcatgcgatatctaacaagatgtgcgcaatcaat

SEQ ID NO: 33695 - DNA, 315 bp, Glycine max
agcttgttgcaaatcttctacacttggagggataacatgcagtcctcttgaacccttacctcccactctttcgtcatgccgagactcgggaagcccaacaggtttagctttttcaaaatactctgaacaaaattcaatggcttcttttgcaatgtaccttttcaacaataaatgcttctggatggtgtagattcttggtatacccttttaagatcttcatgtatcgctcaaccgggtacatccatcacaaataaactagaccacaacatttgatttctctgaccaaatgaacaattaagtgaatcatgatgtcaa

SEQ ID NO: 33696 - DNA, 347 bp, Glycine max
  unsure (1)..(347): unsure at all n locations
agagtccaagctatgtcttgagattgagactagttcatagaanagttacacttctcaagaacttttaggagtnggaaaacaaattgaaagatcttcaaaaggatctaaaggagctgaatgaacttaatgatcataaaaaggaagaaagatatgatctatgtagagaatgtgcacaaacacacaaagattatgaagaccttcaaaagagttaacataatctctgggtggaatgtgaagaacataaganatctatgaaattctcgaatgatgagctcttgaataatctaacggtcaaccttaagatgttgtcaaacttcatgaggagataagaaccttaaaactacata

SEQ ID NO: 33697 - DNA, 329 bp, Glycine max
cctgcacgcatgcaagcttcatcatcttttgcattcgatcattgaaacagttgggttggccaatgcattccagctttaataaatgtacatgtgtgatattataaagttggaaagcctacactatcgctctaaatctaccccaaagtaactttttaataaaaatatttatttttttatttaaatattatttgttaattaatagtattacaaatagctgctttgtttcattgaacttgatttacatcatggaggaggattgtgacaccctctacccctcacatatatactaataaaggaataaaaattcaaatattaattaaaagtatttt

SEQ ID NO: 33698 - DNA, 468 bp, Glycine max
  unsure (1)..(468): unsure at all n locations
taagctntcacttagcgatctggctgaagcttagatgaattcaaatcgaattttgttagcttagctcaaccttggccagcttaggggaccaaatcagcctcagatgcaagggttgggtgctaagcgcttgagactcgcagcttagcatatgaacagagatgcgcttagcacgaggcttgcgcttagcgaaaggactatntttcagaaaatatttttctaagttatttttcagtcctttttccaagtaattgaaacccttatgttaaacatccaaagattggctgatatactcctatgtacagactatatagcaagttcctaatgatttaaatgcatgaaaacaaagataacataatttaaaactgggttgcctcccatgaagcgcttctctaacatcattagcttaacgcctaacttactaccttcaatgtggcatgaaaatcacagagaacacatcttccttgaagt

SEQ ID NO: 33699 - DNA, 308 bp, Glycine max
agcttgtaagaaagggggatccttagatgaaagtcaatgtttgtgttcgttttcattcaataaataaaatcattctttaggttactaacagaactagaatatatttaagcccatcctgtgatctatcttctcaacctcacccaagtacacacataaaaggatcaagtgagaaagaaattcaaactatcaaacaccatacaaacaatgtttaataagtttcaatgaggagaaaacacaataaaagcacctttgaatccagcacactactccataatcatccacatgaatttattacttatcctcaaaag

SEQ ID NO: 33700 - DNA, 453 bp, Glycine max
  unsure (1)..(453): unsure at all n locations
ttccctgttnntatatttgaaaagcttactttgggccatatgataattgttatgttatgtacaaattctaattaatgcatttgcaaattgttgtataccatgtgttactaagccgaattgttcccttgacttttaggttgaaaagctaggaaaagactcactaattaactgtgccaagaccagtatgtccttaaagttgatagctggtgataatgacttctttgccattttgttatgtntgtaattgcattggctatatattgaatgttgagagtttatatcacatgattgattcacaccatgctctgctgcttctgcaaattctagtgcatatccaatcgaatgaagcttatatgcatcatgtatcaatatttcattagtttctactgtgtgttgaatgtgtaaaattgtatattgttgaaccatattgagttggtagtatgagtgaaactg

SEQ ID NO: 33701 - DNA, 308 bp, Glycine max
agctttatgatcaaactattttctctctttttctctcaattattcttcattcttcttcctcttttcacttcttttttttcctttctcttatacaaatttcgtggtttttccattagtgatgattatggaaggctaaacacttaatcaatccaaggatccactccaagcaaggctgaatttgagatctggtttagtatttctaatctttgtgaatgtttaactttttctttaatcctattttttattttcaagattatgattatgcttaggattgaaaatggatcaggttgtggattcatttcctaatt

SEQ ID NO: 33702 - DNA, 461 bp, Glycine max
  unsure (1)..(461): unsure at all n locations
ttctntgtcctaccaagccattattcactctatacaaatcaaaatatttgtttgttgtttgatttgactcactaacaaaatcttaatcgtattatagaatgataggaaatctaagtacttagtcttttatctcaagatacataagatgttttgagagttttgaactttacaagatatgtacaaaaagaatttgaatgctagtgtgtaagttcataacccatttcttcaaagactttggtatttataggtcttcatcttcaagagttcgttgtctctaaacggatagaattgttcactagagctcacatttgaagtttgtgattgtcggagcatttaatgcttgcttaaatgcaagtcctacttcatgctggaanaaccactctagttggcttttcgtgttgagcactatcaacagaaattactgccttngagtcatagcaagttcgtcacagttgagcacg

SEQ ID NO: 33703 - DNA, 304 bp, Glycine max
agcttgtagccattagaagagaatgagcttgtgattggaagtatgactaaaaatgttagttagtttgtcagattgattgtgaaggaatgtgttagtcagtgaaaatgactaacttttgtgtataaaaattgtataaattgtatcaaagtctcccaatttatggttattttgtagtgttataaatattttatgttaagtataggtaataaatacttagtattttcattttgtgtgtttaataatcattttctctcaatttcgtgttaattaggcaatctttggaaagtgttgtttttcaccttct

SEQ ID NO: 33704 - DNA, 510 bp, Glycine max
  unsure (1)..(510): unsure at all n locations
atggctagacatgatacatgtcagggtttggtttggttcaaggataaaagggatgccccacactatttccatgacacaaatgcaaaaatgatgatttggaaacttttatgcaaaactggtcatgcatgcacctatgtggacactcaagtgtcaaacttttatggtcatgtgatgctagggctcaggattcatttcctccattttaaatcaacccaatgtttccaaaatatgttcttttatcaatttgtgcattcctccaagtccatttcgggcatccgggaaaatttcacagcattcacccttcaggtgtagacacgtttttttcaaaaactagctatgatcnagcgaattttcttttaaagaaaagttggaaatcatctcttttcaaaagcatgtcgatttttagctagacaacttattttctctttttccaccttttttcttacttggctttcttttccttattggctctctntttctntacttggctctcttntttctttgggtctc

SEQ ID NO: 33705 - DNA, 311 bp, Glycine max
agcttcaacacatttaagggttggctacattctgagtttgcccttaagtttactgaccacccactgtctatttgcttgtttgttgttcacttctctgcagcaattatggttatgcttaaatgtctttatctgaaaagagtttctaacttcattctttgcacagtagatttcccaatcacaaaatgtcttcttgcattttgctctagccctctgtttatcattcttcttccacttgaactccttgcccatcaatatgctatactccctcaaggcagatttaaattcatatagagtaccaaacttcatcccta

SEQ ID NO: 33706 - DNA, 474 bp, Glycine max
  unsure (1)..(474): unsure at all n locations
atgagatataactaacagaggagataaggataatggaaagcatcaagaattgcatatcaaagataaagtttattcccgcaccactaatctacgtggggtgccaaaagcttgcacttcaccatggtttaacctttgccgttcaagcagttgcagcaataaatctttcagctataataaccagcacagtagaatcaatattgaacaatgaatgagaataatgatagtaattcactaaaaatcataatagaaaataacaataaatatctagcaaatagctgaaaacaatntatatcagttatacttgcttgcttgcatcaacaacatcttgaggtggcatctcttcagtcccaatntcaagaacaaatgctcttgaatgatcatgcacctataaccagagaaaagctggantttacataatatataaatacatntgtgggacataatcaataaagaaactcgtactcaagctaaata

SEQ ID NO: 33707 - DNA, 308 bp, Glycine max
agcttttatgtgaaaggatgtgactcttcacatttgaatttgaatttcaacgttaaggcactgataatcgattaccaaaacattgtaatagattacagccttttgaaattaattggaacgttgtaaattcaatttgaaaactttttcaaaacaattttgctactcgtaatcgattacagcaatcatgttttgagaaaaatcatgtgctactcaatttttgagaaaaacttttcatacttatcttgattaagccttctcttgattcttgaatcttgagtcttgaatcttgatcttgattctttagatct

SEQ ID NO: 33708 - DNA, 419 bp, Glycine max
  unsure (1)..(419): unsure at all n locations
atgttctatgcttcttgaaggtggcagtccatgaggaatctccttgngaaagacatctttaaattcctgcaataagggttgaacactaggagaaacataaatagttaactgattagaattatcactctctctctcttgtgtatcactcttttcctcgggtgtatcactcttctttttcatattcctttgtggtgcctcactatnttctttctcttgttctctcttttctctcattctgatttggtcatcacacactnttctaggggatagaggtttaagagtaaacgaggaagatttggctattcgtctgtagggctcttctttgttacggtttaacaaacgttgcatttgtgtagtccacgcgtncagaaataagcgctgagattcgtccaattgatgatatacaccaccattgtcac

SEQ ID NO: 33709 - DNA, 305 bp, Glycine max
agctttgaggactttttaacgacaataactttttactcggatgtctgattgagtcccgtaatatatcgagacgctctaaatttaatgatgaagctctgaccaaattcaaacgacgataactttttactgggaagtatgattgaagtccgtagtatatcgagacgctcgaaattaaatgttgaagctctaagcaaattcaaacgacaataactttttactcggatgtctgatcgagtcccgtaattcatcgagacgcttgaaattgaatgttgaaactcttaaaaaattcgaaccacaataacttt

SEQ ID NO: 33710 - DNA, 414 bp, Glycine max
  unsure (1)..(414): unsure at all n locations
tactcagcttaacattcaatntcgagggtctcgatatattacgggactctttcggacatccgaganaaaagttattgtcgtttgaatttgctccgaccatcaacattcaattccgagcgtctcgatatattacgggactcaatcagacatcctagttaaaagttatgtcggttgaatttgctcagagcttcaacattcaatttccagggtctcgacatatttccggactcaatcagacatccgagtaaaacgttatttgcgtttgaatttgctcagagcttcagcattcaattntgagcgtctcgatatattaccggactcaatcagacatccgagttaaaagttattgtcatttgaatttgctcaaagcttcaacattcaattttgagggtctcgatagattacgggactcaa

SEQ ID NO: 33711 - DNA, 305 bp, Glycine max
agcttatacacgcgcacaattttttagaaaatatatgaaactgatacctaaagtaatgagaaaaatgtacaaaatagatcaaaagtatgagtgaaaaataatagacaaagaatatcacgagtttaattctaaaatcaaataactagtgaaccaatatatttgtgtcaattataatattaatagctagataatgacatggaggagttacgggtgatagataagaagatgaaaaattgcttaaaaattctatttatttttagtatatttgcatgagtgtatgacaatcaacacatttttataataaa

SEQ ID NO: 33712 - DNA, 316 bp, Glycine max
tatatatcataggctgctcattttaacttattttaatatgttcccttatactcctgtgtttaatattgatgttgcgaaagacaaataaaaaaagcataatcttactcttagattgatcttgggtgagcaaattgcaaaatcattttttaatgaaattgattttgatcataattgattatgaagtacaatgatatattttttagtgtttttaatctaagaaaaaatagtattaaaacttagtataaaagaaattgatccaatgcaaaagctattaatgttgctttaattcaaatcaatttcttcttaaaattaattt

SEQ ID NO: 33713 - DNA, 304 bp, Glycine max
cctgcatgcatgctagcttctgttttcaattacttgcgtctcgatatattacgggactcaatcggacacctgagaaaaaagttattgtcgttagatttttctcagagcttcagttttcaattacgagcgtctagatatattacaggacccaatcggacatcgaagtcaaaagttattgtcgtttaaatttgctcagagcttctgttttcaattacgagcgtctcgatatataacggggctctatgcgacatccgagttaaaagttattgtcgtttgaatttgctcacagcttttgttttaattt

SEQ ID NO: 33714 - DNA, 472 bp, Glycine max
  unsure (1)..(472): unsure at all n locations
cattatctcctttgggttcgcaggttcttccatgcactgaatccagtgatcatctcgattacaatgcacccaagagaccatatatctaacgctggttcaatctgaccaacgaccgattctggtgacatgtaaaaaggtgtccctctaaacttgaccttcccatactcagcatttgcatcttctctagtcttggacaacccaaaatcagcaatcttcagttgataccttgcatgatcatcagatgaaggaaagagaaggatgttgtccggtttgagatcacaatggacgactccttttcgatgaatgcaagaaagccctttgagaagcatacgagtgtagactcttacttcactatccgatattggccccttcttgttactaaaccaagaagagaaccataaggagcacactccatgaaaagattgtatgtcacataatttctctcaacagtgaatnggtcaaaatagcattg

SEQ ID NO: 33715 - DNA, 402 bp, Glycine max
  unsure (1)..(402): unsure at all n locations
aatgactcaatactacgtctaaaagaagaatatttctctcatntagcacacaattttgatcaacatgcaacccganntaaaancgccggagcagcaagcagtatggaaatgagttattttgacatagaagggaaatgcaacgtcaggctccgagaatacattaccaacaggactggataaactaacggccctggaagaggaagggcaagctgtaaactctaggggaaaaaggagttcaaaaaaaacctgcgacatggaagccattacaacttttaaggccgaaaaaacagcctgtgtccgtcattgcacgccacaaacattatccatgtatctggatcgagcgtaataggggcgccttggcgtgggcctaggtatgacgaaaatggataaagaaatacccag

SEQ ID NO: 33716 - DNA, 446 bp, Glycine max
  unsure (1)..(446): unsure at all n locations
gggagcacacaatntagaagccccagcttgagggggagtgttaaagttgttgttggataatgttntattaatgttntatatttcttgcttgttgtcgaagctcttagacgctgtccggtaatctgtcaccataggctaggctgtagccttcatcatgaactatttttggtaccatctgtcaattctcatatatatatattagtatatataatngggtcagagaagagagatgagagagggagagacagagcgagacagtgagagagacagcgggtgggaaagagtgaggtcgagaagggagagaagagagaatgagaggacgagaggtatgaanggtccgtgtctgtctatcgtcaaggaaaggaaaggaggtcaacaacgccgcatgcgagtcaactggagagatcatcggaatatatcnatcgtntacttcacaccgttttctg

SEQ ID NO: 33717 - DNA, 312 bp, Glycine max
aggcatgcaagcttcatggtgaatcaaatttgattcaaatgtgttttgatgataacaatgatgataataaaagatgatgacaaaggtaatgaacaaaaagctcaaagatcaaagaacaactcaagtaaatcaaagaacatctcaagtgaatcaagaacaagtcaagagttcaagaatcaagaagaattcaagactcaagaagaaagcctagaatcaagaatcaagattcaagattcaagatctcaagaatattcaagactcaagattcaagaatgaagaaaagactcaatcaagataagtattaaaaagttt

SEQ ID NO: 33718 - DNA, 427 bp, Glycine max
  unsure (1)..(427): unsure at all n locations
acttcactccccgtgccgctccggaagaagtgagccaagcccctaccttcgaggggcaacttcccccttatgtcgactaccccctgtaagaagatgatgaaggagatgcccatctaggccctctgcttcccctcaaggatccgcccccccatgaattaccccaaccaaacatagtccaccatgtcccgtcttcacccgcacccgtaaaagaatttgttcccttcgcaaaagataagggaaagattgattcacttgaagagaggctaagagcggtagagggcctcggcaattacccgttctcggatttagcggacctatgtctggtacctgacatcgtcatccctcccaagttcaaagcaccgtattttgataagtataaagggacgatatgtccaanagggcatcttcggatgtattgccgaaagat

SEQ ID NO: 33719 - DNA, 315 bp, Glycine max
agcttcaggttgctcattgactccagattgctgcaaagaaggacagagatttgtatggggatatgcagaagaaaatagaccacagactctcgcaacaggtgcagatttctgattcatggcaagttgagttactaggttgaccaaggcatcaagttttccctcaagctttttattttcaatagatggagatgaatcagtggccacctcatggactcctctaaggacaatagcatcatttcttgcactgaattgttgggagttggaagccatcttctcaatcaaattcctagcctcaataggagtcatatcaccaag

SEQ ID NO: 33720 - DNA, 317 bp, Glycine max
tgcagccttaggttgctcattgactccagattgctgcaaagaaagacagagatttgtatggtgatatgcagaagaaaatagaccacagactctcgcaacaggtgcagatttctgattcatggcaagttgagttactaggttgaccaaggcatcaagttttccctcaagctttttattttcaatagatggagatgaatcagtggccacctcatggactcctctaaggacaatagcatcatttcttgcactgaattgttgggagttggaagccatcttctcaatcaaattcctagcctcaataggagtcatatcaccaa

SEQ ID NO: 33721 - DNA, 308 bp, Glycine max
agcttgagctatcataagacttgtttattcatttagcgttaatttctctaccttcatagtttagtttagttagtttaagatctcttatgactgttagaaggagaaatagtctcttaatgagctcatttcatactacgtgcaagaagaagaaaaaaggctggagcaagaaaggactgaaagtgctcatgttgtgagtacctttaaagacaagggcaaaagagaaaggactgaggagccctcgaatgaagctgctaagggtccaggacaaaaaaaaaatcaaggtgacaactatttcttttgcagaaagc

SEQ ID NO: 33722 - DNA, 465 bp, Glycine max
  unsure (1)..(465): unsure at all n locations
tgataatgatcaagttgatgacaaacagcccaaagaatgatntcaagattaaatcaagaacaattcaagaatcaagagaaatttgatttcaagaatcaagagaagatgaattcaagtttctagagaagaatcaatcaagataagtattaaaaaggttttcacaacattgagtagcacatgaagttatcacaaaatcttttaccaaagagtattactctctggtaattgattaccataaggtagtaatcaattaccagtagccaacattgtttttcaaactaatttacaaagctgttatcgattaccataaacatgtaatcgattaccagtgttttaaaacgttaagattctcacaattcanaatgaagaatcacatctgtcgatgagtaatcgactacaccttaatggtantcgattaccagtgactgttctcaataaattcatttccaacagtcacaattcttc

SEQ ID NO: 33723 - DNA, 310 bp, Glycine max
agcttcctcggggccattttctgttaaggcaaacattcggaaagttagttttaccaagaaatgctactcttaaaacaaaaatggcgtacaacctctttcaataaacacaaacatcaatgtaaatttagagcaaactcatgcacatacttccttatgaacattcactcgcacaagatattcttctacctaaaaaaatgcacccatgcgcaatcaaggcacctttgttacctagatttatctatgtgtacttccaaggtgtatttgctacctagatcacacgcacttccttggctaaatttacatacatgca

SEQ ID NO: 33724 - DNA, 493 bp, Glycine max
  unsure (1)..(493): unsure at all n locations
cagcttctaaggaagttntcttaagaaagcttctcaaggacagtttcttaagttagcttctcaaggaagctacctagtctataaatagaagcatgtgtaacacttgttgtaactttgatgaatgaaagtcttatgagatacacttcaaagttccacttctttccctcttttattccttcaatttcgtgctccccccttctctctttcttgtcctccattaaagcatcctcttcaagcttcttatccaaggaaattcttggtggtgaagctccttcttccttggcttattccctagtggatggtgcctcccctctcctcttctcctttgccttccgctgcatctccatggtaaaaaatcagcattgaaggacctcattgaagctcatagatccagcctccatagaagctccacaagcaagcattcatcatttggtctttcatggactccatgtcagccatcatctgctctntacacttcctcatctcactcatg

SEQ ID NO: 33725 - DNA, 266 bp, Glycine max
  unsure (1)..(266): unsure at all n locations
agcttgaatatgacaataatatattaagagacaacgtctgccctatcatttaaagtaataaatcatacgtcttacattaagctcacaaatgctcaaggatgttaaatttaactttgataaaagaatattaccatatataagcttagaggtggtgttgctgtgtcactttagctaccgcagtgttatatagcagtattactgactttcaattttattattattatttttttgtttaggtgggggtggaggggaggaantnctaccct

SEQ ID NO: 33726 - DNA, 397 bp, Glycine max
  unsure (1)..(397): unsure at all n locations
ctcaagctnattatgagaaagatgttctaacctattatgccaaacatcgcattcagtggaatgtaatacattgacggacaagtataggaaaacttatttggtgaggaacacaagatgtatagcccatctctcaattcagcttgctcaaccatcctcaatgaggatgggtcctatatagagcacccagtatggtgaaaattcatggaacaatgtagatcactaaggagtttggatattgaaatcaagttataagtgaaagaaggaataaacaagacatcagttaggtaaaactggtcattaaaattgatagtgcctgctaaataggtttgaatttgacgtccatcacgtaatttaacacggatacggtcgatttgtcaacgcattgaaactgagtttg

SEQ ID NO: 33727 - DNA, 308 bp, Glycine max
agcttatcgttcaaaacttcttgcttttgcacttcctgatgcatttcattaaaggtttccttaacttcctcaatttctttaatggttgatgagtcatccgttgaatcagccatttagcacatatttgcaatttcttcttcactagaagagtcgaaggatattggcgcatcgtgttcacaagtccttgaattccttgatcattgtgattttcgattcctaagtttttgtaagatagttgaggatcttgatgtttaactcatcatcttcaaacttctttctgagactaagtaagtgattcactatgagag

SEQ ID NO: 33728 - DNA, 406 bp, Glycine max
  unsure (1)..(406): unsure at all n locations
cgttcagaaactgctggtaatcgattaccatatatgtgtaatcgattacacagtgcaaactttgaattcaaattttaatagctgttgtaaatcagttntggccactggtaatcgattaccagagagtaaatttgttgaaaaagactntttaacttaaaattcttggtcaaaccttntgctacttcaattggaattcccctcctatttaatataccctttctaagactagagacttgtcttgatcatccatcttgaatatctttaatttctttgtcttgaataaagctntgagacgcatgtgaaactttggcatcatcaaaacattcagcttgatcttttgtctacaacaattacatagcaatcttcatgctgcttcattctatcttaatcccaagtaagtaatttc

SEQ ID NO: 33729 - DNA, 307 bp, Glycine max
agctttcaaaacctatgtatttctgttaaagctgctcctcttgctgcctccagagctcttttcctgaaataagaactgtggtgtgctgtaaaattcttttccctgggcccttgttatcctaattctgcataaaacaggctttaaataggctctgaattcctgacgttgcgcttagcgccaccctcgcgcttagcacacgaccttgatattgatgccctgccagattcttctgtcacgctaagcgcgttgaagctgcgcttaatggtggatgcgcgcttagcccactgatgagctaagctcaactatt

SEQ ID NO: 33730 - DNA, 461 bp, Glycine max
  unsure (1)..(461): unsure at all n locations
tgcgggtntaagacgtgaaggccaagtcgccgcgatatgcgaggattactccccgaggagatcggttntggtacaaccatgtcctcccggtttccgactaggaaattggcgagtggaggaacgcccagacatttgcacgacgagctntaatgtaagctttgtagctttaaaactctacggttgggcctaggctttanaagttccttttgttaaggcattatgtctttggttctcgaagttataatataaagatctttcttcatctgttcctacgcctctacctattctcattcatttncatgtttatttctttatgcttaaaatgccagatccgacgatgagtcccttgaaggtactaatactcgggacccgaccatcaatttcgagcaagaagtgggtcggatgaagagtgaagaggacaagtatgtgggacttcccccagagctggagaggataatcgc

SEQ ID NO: 33731 - DNA, 305 bp, Glycine max
agcttgccttgcccctttatatatttgagggactcatggtcactatgaatgacaaattccttgggataaaggtagtgttgccatgttttcaaagcccgtactaaggcatacaactccttatcataagttgaatagttaagggtaggaccacttaacttttcactaaaataagcaattggatggccttcttgcatcaacacagccccaatcccaacatttgaagcatcacactcaatttcaaaagatttttgaaagtttggcaacgcaagtatgggggcattagttagcttttgcttaagaacatt

SEQ ID NO: 33732 - DNA, 493 bp, Glycine max
  unsure (1)..(493): unsure at all n locations
ctcagctggaatgaaaacggagagtcgaaaattcaatggtcattacttatcacaccgaagtccgattcaggcacataatatatcgagacgctcgaaattgaacaacggaagctctcgagaaattcaaatggtcataacttttcaaatggaagtccgattcaggtgcataatatatcgagaagcttgaaattgaacaaaggaagctctcgagaaattcaaatggtcataacttatcacacggaagtccgattcaagagcatactatgtgaagatgctcgaaattgaacaacgaaagctctcgagaaattcaaatggtcataacttgccacacggaagtccgattcagacgcataatataccgagacgctcgaaatngaacaatgaaagctctcaacanattcaaatggtcaaaacttgtgacacagaagtccgattcaggcgcataatatatcgagaagctttgaaatgaacaacggaggctctcgagaaattc

SEQ ID NO: 33733 - DNA, 306 bp, Glycine max
agcttgttgggatcttttctttttgtttgccacactcgtccaaaacgcgggtgatttggctttctgtttattttccgctttatttttaggggaatattccttcaaaaggttagtcccaatccaatgagaccatattccaaaaatgggagactaataaaaccaaattggtaacaagcaaaccaagatacgccgtccacgttataaattacagttatctatttacggtaaataaattacatagcacgtttttttcaattttcagagaactacaagagaaatctatatataatgtgtaatatacaaact

SEQ ID NO: 33734 - DNA, 412 bp, Glycine max
  unsure (1)..(412): unsure at all n locations
tgagcacgaacggtgaatggagtgtcacatttatcgtcagcaaaactatgatgtgtatgatcaatgccagtgacaacaaacccaatggtgattccttctccagcagattcaaacccacctgcttgcgaccaagctccctgtggcagacccaataattgtggagtgtgtgtggttgcagtcctcacagaaaaatccaaaaccacattggacacttctcttctccttgacagattttttgccttcaatatatcgaaaatcaagaacttgttggttgaagaagtttatcaaaacagacacaaacaccaaactacgcacaaatggaaacaactcaaacaatgaagcancgtgttcttcacagaataaggacatactcaagatcttgataatngaaaagtaaaaccatactatacct

SEQ ID NO: 33735 - DNA, 308 bp, Glycine max
tgcttgcttatgacgaggttttattttttgacgacgacggccctaacatctacgggagggaaagggactgagctcctgaatcttgcggctgcttgaggatagagagagagacagttgctttttagtttaaccaggctctttcctctttgcttattatgctatgataaactatgccacatgtcttcatttgagtggagcacagagggctcactttctcttttgatgtgacccatacacagccacagaaagtgagaaaaatatgacccttgtgaaatgctaaaatccttcctcggtttgcgtgtcgtttc

SEQ ID NO: 33736 - DNA, 481 bp, Glycine max
  unsure (1)..(481): unsure at all n locations
tactaagcttgttcttttattaaatgagaagttctgaactcatctatgttatctaaaaaccttgnggtggatccaagtgctccgatcatccatttgcatactcatgttttggtggcatactcaccgttgtttatttcaaagggaatttcatcataactaagaaaacaccaaggcacccctataacactcgatccagaaaaatggataatgaagagggcgtgcaggaatagatgaaggccgatctatcggccttaaaagatcaaatggcttccatctcagaggtcatgttaaaactccagaaaaccatagaggataaagccacggcaaccgcctccagtacagttagggaagcggagccggtgctgcagcccgccttgaatctgggcctagacagaaacacggccgtgttcggtcgaaggtatagtccgcaagcttatccttatggcctacctccggacttcacccctcgtaccaccccgga

SEQ ID NO: 33737 - DNA, 462 bp, Glycine max
  unsure (1)..(462): unsure at all n locations
attctataaatagacctgcaatcttcaatggagagggttaccactactggaaaacccgaatgcaaattnttattgaggcaataaatctaaatatctgnnaanccatanaaatanggccttatatacccaccacagtaaaaagagtttcaataaatggtagttcatcaagtgaaagcataaccatagaaaaacctagagatagatggtctgaagaagatagaaaacgagtacaacacaacttaaaagccaaaaacataataacatctgccctgggaatggatgaatatttcanggtatcaaattgtaagagtgctaangaaatgtgggacactcttcgattaacacatgaaggaactacagatgttaaaagatctangataaatgcactaactcatgagtatgaattatgtagaatgaatgcanatgaaaatattcanagcatgcanaagagaattacacata

SEQ ID NO: 33738 - DNA, 271 bp, Glycine max
agaaattcaaatggtcataacttatcacacggagggccgatttaggtgcataataaatcgagacgctcgaaattggacaatgaaagctcttgagaaacccaaatggtcataaggtatcagtcggggggtccaattcaggcgcacattatatcgagaagctttaaattgaataacggaagctatcgagaaactcaaaatgtaataactagccacacggaagtacgattcaggcgagtaatatatcgagaagcttgaaattgaacaacaaaaa

SEQ ID NO: 33739 - DNA, 363 bp, Glycine max
tttccgactatgctcttgtgtggtggaacttgctacaaaaggagagagcaagacatgaagagcccatggttgatacatggatggagatgaaaaagatcatgaggaagcggtatgtgccggctatttactcaagggacttgaaattcaagctccaaaaactaacccaaagcaacaagggggttgaggagtatttcaaggaaatggatgtgctcatgattcaagcaaatattgaagaagatgaggaggtaactatggctcgattcttaatggtctgctaatgatattcgcgatattgttgagctgcaggagtctgttgaaatggatgatttgcttcacaaagcaatccacgtggagcaactatta

SEQ ID NO: 33740 - DNA, 312 bp, Glycine max
agcttgtaatcgattacgcattgcttataatcgattaccagaagttttttaaactttttataacatcctttaaaaatttgaatttaaattttaaagcttgcaatcaattacaacttgtgtgtaatcgattaccagacatgaaaattcaaatttcaaatctgaagagtcacaactcttcagaaactaactgtgtaatcgattacaacaattatgtaatcaattaccagtaaggaattttcgaaaataactcccaagagtcacaactgttcaagaagtttttgaatggctatcaaaggtctataaataggtgac

SEQ ID NO: 33741 - DNA, 496 bp, Glycine max
  unsure (1)..(496): unsure at all n locations
attttccttttttattctttctttactantcgagctctagtcttnnctctncnctncatnnnctctnttnttncacacaatcctttttttttctcttccccctcaaaacactaacanacacttatcttctccttttgtttcataatcntcccatcttnnntcaattttntntncttcccagtagaccttggatccacctttatcctatttcctttcttctttatcttactnttcttctatccattctttttctttccttattcttcactacttcctatcttactttccattcttttttcttctcatccctactcactcggatgtatgtctgtggtttaactctctccattcattatcttctcctcatctctttccttctctcttttttctattttactcttccaatactccttcnatttcacccctcttttcttcttcactcattcttcctctttcttccttacttccttaccttttcaatctctccacattcctt

SEQ ID NO: 33742 - DNA, 313 bp, Glycine max
agcttatgctgcaaatatttacatttgacctcctcaacctcagcagcaaaatcaaccacagcagagcaattatgacctttccagcaacagatacaaccctggatggaggaatcaccctaacctcagatggtccagccctcagcaacaacaacagcagcctgctccttccttccaaaatgctgttggcccaagtagaccatacattcctccaccaatccaacaacagcaacaaccccagaaacagccaacagttgaggcccctccacaaccttccctcgaagaacttgtgaggcaaatgactatgcagaacatg

SEQ ID NO: 33743 - DNA, 469 bp, Glycine max
  unsure (1)..(469): unsure at all n locations
aaggggncctttnttanttcttnctttcannncncaccttacntctcttcccnnnccattctnnnnncnancncctncnccaggggtgtccttatccctcttccgccccaataccgtatacataacatcaaaacatcatcttttataaatcttcttccntactctctttttctctcttattcccccctctttccttccccgcgggcgtgcgcgtctatttatattatatttctttatcacatatattttcctttctattctaactctctctatttatatttctcttctcatcatttaatctccctactnttccattttttcatcttttttttaatttctatttcacatcttttatcttctatctattttactttactttatatttcttttattaatctctactctttatcattatatcctctcaccactttcttttcttctctctccaatcatactctcttttcttcct

SEQ ID NO: 33744 - DNA, 303 bp, Glycine max
agcttgtgcgaatcaaatcactcctgcatttcatctctaccatgcatttttctttctttacccactcctcacgtttggttttttagggaaaaacaccataactaaacgcgccacaagacatccctatcgcaccagatccaaatctagaacgatgggtgatcaagaggagacacaggaacagatgaaagccgacatgtcggctctgaaagaacaaatggcttccatgatggaagccatgttagggatgaggcagctcatggaaaagaatgtggccaccgctgccgctgtcagttcggctgccga

SEQ ID NO: 33745 - DNA, 589 bp, Glycine max
  unsure (1)..(589): unsure at all n locations
ttctcgtctcctctttaatccnnnnnttttgtatatgtannatttantnnnnccnnggnnnccgtggtgtttcttgcctgcgccacatanccactcagctnttatggtagcaagtgcaaaactnctattagttgggatgactatggatatactattcttcctggacctgaaatgctacaacagattaacgaacaagtgaagtcgcttctagagaagataaatgcatctcaggatctgctaatcagctattatgatagaaggatgacgccctcgattttccgaaggaaacatgtgttctgaatgtctctcctctatccggagtcggaagggctcttatatgcttagaagctgacacccaagtatctacgtccatatcagattttgaagaagattgctcctgtagcttatcatatcgtcttacctccatagttatcgaatctgcattctgtgtccatgttcttatatgagacggacaacccatatcattacatatcttgtgtggacaggatctgttaagattactccctataagcccacctggaatctctgcctgagctaaatactggatgaaataatctcctcggatgcc

SEQ ID NO: 33746 - DNA, 305 bp, Glycine max
  unsure (1)..(305): unsure at all n locations
agctttgattttgactngatttatccttttnttaagcataggtgtttgatttgatcccatgtttacggttgaaaatttttgtttgaaataatacttngatatcctatcatggaggaaaataggatgaatgcatgacacaaatgcattttacagacacgagagcccggaagatcatttttccttactggcaacatttcacagtacggggccccatgtatgcatttaagaaagtgatatggaaatttcgacttcttgtgaaaaaatgacgagaccaaatgcattacatgcgtgatgatgcaatatag

SEQ ID NO: 33747 - DNA, 306 bp, Glycine max
  unsure (1)..(306): unsure at all n locations
aagatctgctagaattcatgattcctgcgatttgtattgtctctcanattgagcaaatccttgttggactctttctgggaatatctcacggatnggtccaaagaagtcccatcattgcaaaaaaccaattgggaaaattgtaaattgtatctggcttgaaatatatcacccatgaatgcttgaagctggtattttggtgccacaacancctattccaagcatcaacataatcccaatangtataacctaccggatctaatggaactgaaaatctctttcctttgttcaagtccgaaccaaagtgtc

SEQ ID NO: 33748 - DNA, 309 bp, Glycine max
agcttaacaatattacaaatttcattattcgttgccaagtgtgagtatggatcttcatttggtaaaccatgaaataaattgctctatattagttgtatcaatgaaggtgggcaagttaagttttgtgcctaaacctctggccgagcaacacttgagaaatattgcggcaccgaagtacttgagtaatcttccaaggtcactcatcgaggttgctcttcatccatgacttcggcttcaaattctgctgtttgagattccctggatgtaggtgaattagaagatgttgactcagaaaagtgagcctcttca

SEQ ID NO: 33749 - DNA, 375 bp, Glycine max
  unsure (1)..(375): unsure at all n locations
actcaaggagaaacttagaatggctctagagtagagtaaataatactataaagaaagactcaacaaacctctagctntggcccatgtttttcacgctaattttcaattgaaatttaggaactaagattggtataaaataggaaccaattatatgaataaatttgagccaaaacaacaagcacacttccctttcaccttttttttcctggatactgatntttcttccaaattgtgtgattnttatcatttntaaattttatccaaatcacttggttcttttttataactnttttccagatgcctagaaaattcagtaaaaatntcagctcanaattcgaagtaactaattttcagtaattnttacaagttcgtatg

SEQ ID NO: 33750 - DNA, 308 bp, Glycine max
agcttctttgagaaaacttttttgagaagctagagcttagctacacacacccctctaataactaagctcacctccttgagaagcttccttgagaagattcataaagaagctagagcttaggtacacacacctctcaattagctaagctcacctccttgagatgagaagctagagcttagctacacaccccctataatagctaagctcacccccatgacaaaatacatgaaaatacaaaaaattccctactacaaagactacttaaaatgcctcgaaatacaaggctaaaaccctatactactagaatg

SEQ ID NO: 33751 - DNA, 390 bp, Glycine max
ctcaacataaacacagaacataattattagaaaaatccttattgcatcacttatttttaaaaaacccacactttacatctacttcaatcttcttcatatttctatttttacctagactagttaattatgttctaaccataattgcaatgtttctttcacaagccttatttataactaaccctgtctaaactattccctgattcgatactcggatcattatttgatttaaaacttgacattggtttgtttcaatgaataaatttcatgaacatattgataaggaaaatggaccaaaatactgcaggaaatcaacactatctttttggaactatcttagggtgattctctatgctaccctatctgctgggtttgaagtgcaccccaaattca

SEQ ID NO: 33752 - DNA, 309 bp, Glycine max
agcttgatacataaagtactttgtttgagatattacctaaccgtcttactacttattccttccaagtgagaaggaacatgttacattctagtaatgcacttgtggatgaattgcggaaagaaaagaccgaattcaaacttattgattttgtcattagtttaaactttaaataatttttttgaaaggcaatttaaactttaaaataatatccgagtcatttaatttgtttttaaaatgtttcacttaatcaaagcgtaatttataatagttccaaatccaagtatataaatattcaagaatgagtattgt

SEQ ID NO: 33753 - DNA, 378 bp, Glycine max
  unsure (1)..(378): unsure at all n locations
accttatataatacttcaacaataattttaaataaaatatatatccaaacctacctactcatactnntaacctaatcttctcanttactgttgttgccctaatctttctctgcatagagcatactgtcaacgagacagccaaagtccaactaatttcanaaaaaacatctcatcaagctccataaatccatcaaaacttcacaataagtcttgtaggttttatttcaaaattcaaaacactaaaaaattctgaaatctatcttcaaatctcatatacttgaantgaanaataantaaaacaagagctanttttaatttcttcataacaaccttccatntacaaatgacaagaacaaacaaacaantattgggatcaaa

SEQ ID NO: 33754 - DNA, 313 bp, Glycine max
ctgaggcatgcaagctttgtgtcattctctatttcgatggtcacccatgactatatttatctgtttcgttcacccaagcatccgacaaggttttgaacttaatcacataacgtttgcagaaaacgaatattcgatggtctcattcgcaacgagactatcaaacattagaaaggttagtttttgttgtttatttatattgatggtgtttgggaaaaaagatgttatctacttggtggcttaattgaatggtttgtggggttagacatgtgattgtcttaggtaaacaccatcttctaatgctcacttttaaaga

SEQ ID NO: 33755 - DNA, 519 bp, Glycine max
  unsure (1)..(519): unsure at all n locations
acacatgatactcagcttatacactcgtactcaacacaatcatcaccatcgtatattgtttgatgataaanaatatcaagtaaaattctgcaacctccgatggcgtcaataattgttttccttaaggcatcaagcgacatgtggtcacttattgtgacgacttgaagaacattaggacattcaaacaatatcccttcaggtgatggaatcatgtcaccatcgcaatacactaaagcatatacactctccatgttttaaacaatatggtgaatatcaaacaaaggtgttgagttgcatcaaatccctactgctatttatattagatgatctactgttctctcgtgactcataccatatcaccgagtgaggtgataccaaaaacataaatggtttagatcgcatctatatctaatcggctggtatgggtattaggaacaataattcgtcaataaatatgtcttagaaacagtggcgtttagtcaatattgtttagaaaaaagcagtcttagtcaataaaca

SEQ ID NO: 33756 - DNA, 209 bp, Glycine max
  unsure (1)..(209): unsure at all n locations
agnccgacaaaaagacaaaatttattttactttgccaagaaggagaagctggggcctcccatggaggcaaaaccaagggaacagatcagcaccataatcaaaaggaccccgagggcgagccattggcaaaaggccggacaaaacgaaaggaccgccaacacaaggaaactaatgaggtcacgcaaaacccagaggcaactccctggaaa

SEQ ID NO: 33757 - DNA, 462 bp, Glycine max
  unsure (1)..(462): unsure at all n locations
acccagctcgcccaggcgagctcagctcgcctattctagcatggttgcttcctccagaaggttgttgcttctggaggaatcttctggagggcccaagtgggcctggttgctatttgcacccccatttttactaagtacacccctctngccttttttggtgattcttttttcgtaaagttacggaaacttacgaatttcgtaacgatactggttttctttccgtaatgttacggaaccttgtggattacataatcatcccctttttgacttacggaatattacggaacctcactaattgtgcaacgatgcttccatttgatttccgatgtgtcacggaaccttacggattgtgcatcaatattttcttttgttttccggcatgtcccggaatttcacaaatngcctaatgatgggtgccaagcacctcacaaggaccaaacaaaagttgcatggtatcaagca

SEQ ID NO: 33758 - DNA, 261 bp, Glycine max
  unsure (1)..(261): unsure at all n locations
tcttctctccttttctttcctcattaacattctccaacttctttttangctcatcttctgtcatctctcttttcattcttattcttattattcccctctctcaccttctcctttcttcctcattccatttaaaaatcaccattaaagacctattaactaataccacctcataaactcacacaacttcatattcatcctataaacaattaacttcatactcacacatttaacaaaaattgctaaacttcattactatttatt

SEQ ID NO: 33759 - DNA, 299 bp, Glycine max
agcttttaaatttttaagtgatcttttgtgacctgttaaattattccattggattggatgtgcctcctgttttgcacaacttctataaaatggttgcacattttctgggtttgatgatccttttatttttcttcttaaatgcaggtgcaggctgtattattactcttgggagcacaggagatgccaaatagtgcccccacctctgactttttgttgcagcaaaactatcaggacattcgggtatttctttaggaattgctttcctctttgatatattttatcaataattgttttttaac

SEQ ID NO: 33760 - DNA, 313 bp, Glycine max
agcttcttcctataggaactttcttcgtgttccaaattcctgaatccccttttgaccaacaatggcaaatgcaacgccgcatacaagtggactcgaaagaactgctggtagcgaaaagcttggccctgtgcatccaaatgcagagacctgtgcatccagattgtggacccaactatttagagcattgttctcttcaaagcatgcaccaacctccgttccccttcccatatccaaaccctccatgcccatctcctcaaaaccaatttccattccgacccttctgcttccttcgccctcaccgccgcctacgctg

SEQ ID NO: 33761 - DNA, 303 bp, Glycine max
  unsure (1)..(303): unsure at all n locations
ctttacccccatttaatttgagtttttttttcataaaaaccgaaggaaaatacaaattactttaacgcccggcctggatcgttggttctcattctgttctcatcacattctttctcttttatcaagctatttctcnttttttttatatcacccacttcttaggtttttactatgatctataatttcttcacattgtcttttttctttatcatctcttttcttatatttcttcctaatactgatgcgagacatctcatattattttttttctaaccatcatcctattttttcgtttttatttaa

SEQ ID NO: 33762 - DNA, 312 bp, Glycine max
  unsure (1)..(312): unsure at all n locations
agctttggttgctntacatgctcttcttctccagccttctcccattgttttctctaaactgcgtttcgtcatttcctcaccttctcccgttttctttttttcttcatttttgtggtccgtttcttccagcttcacttgccgttgagttttccccttgttgaggttttccattttctgtttgctacacgaggttttctccgtgctttctttcttctccatttttgtgttccatctcttccatcttcacttccagtttttgctttggttttctgttgagtttttgttgttatgcatgttttcttcttaattgat

SEQ ID NO: 33763 - DNA, 494 bp, Glycine max
  unsure (1)..(494): unsure at all n locations
ctcttcacatttnaattttgatttgaacnttcaaannccctagtaatcgattaccggaacattgtaatcaattacaactgtttaaaaataattaaaacgttataaattcaattttgaaaacctttgttggatccgattttgctacttggtaatcncattgcggggcttntggtaatccattaccaaataaataatctctttgntaacattgttttaaaaaaacgcatgtactattgcaattttgaaaaaaccttttcatacttatcttgattaagccttctcttgattcttgaattttaaatcttgaatcttgatcttgattcttgaaatcttnnaatcttaatcttgattcttgactctaaactttcttcttgagtctttaattcttcttgattcttatgttnaactctttaactgttcttaattcacttgantttttctttgattgatctttaattcacttganttgttcgtttattgatcttgtgatcact

SEQ ID NO: 33764 - DNA, 307 bp, Glycine max
agcttatcttggacctcgagcattcctttaattcatccttcaagatcaaactgtctactcgtgattggtccattccctctctctggagcttaagcgcactgttactaccccacagagcccctcggaacttgttccggtcatgctcctccccacgagccctcttggattcttgctccaaggccttgagaaccctagggatttctcttgcatctatggcccaatcttcttggagtcttctatccaatgcccttgtggggtaggattgcatcatttcctatgtacttgacttcacgagtggggtgttctt

SEQ ID NO: 33765 - DNA, 509 bp, Glycine max
  unsure (1)..(509): unsure at all n locations
gcatgattacattctcccctttctcaagcaaattcttcttgacatcatcaaaatcttcatgatttacattctccccctttntgatgatgacaaccacctgtaggttaggagcaacaacaaaaatatctatttgcatatagtttactcccccttggttttgcaatgattgcttatatgagacaattaaagatttcatatttttcatatataaaaagttgtctcataaagaatagataatttttccttactattttatcttttatctttctctccccctttgtcaacataaaaaacaaatcatgaacagagaggagaaaaatgttaccactttctgcaatgtataagaaccaagtgataccaaaaggcattaaaacaatcattcaatattaatcaagcaaaaataagtacaataagacatcaataaataaacacaatcaatcaaacacacaatcaanatcaatcaacataacacaatcaataacaattatcaaagacaatcaagactcaat

SEQ ID NO: 33766 - DNA, 221 bp, Glycine max
gtaaagcttgtgaaaaatcaaaacattatatacatataccacataacttggcacaatcccagagtaggccagatgctattgctatgacatagaattatgagcaatagtgtgatagtggagcgcatgttacacgtggggatcggtggcgattttaatatatacagttactcggaactcagatatatttgtgctagtagactggagcgtaattgaacttgtcc

SEQ ID NO: 33767 - DNA, 299 bp, Glycine max
agcttcacttgacatcctctagtacttttccccatcgttaggtaatccgtaaagttccacaacattccgcaagtaaaaaagaaacattgttgcgcaatccgtaaagttccgcaacattctggaagtcaaaaagagcattgttgcgtaatctgtaaagttttgcaacattccagaaagataatggatgtcgttacggaatcaataaagattcgtgagattttggaaagaaaacagccaaaaacacaaaaatgggggggggtgaacttatcaagataggggtgtaaatagcaattcaagtc

SEQ ID NO: 33768 - DNA, 484 bp, Glycine max
  unsure (1)..(484): unsure at all n locations
gatgttcatgatgaagttgtcgaatcactagagaatcttctgagtcaaatcaaacaaaatgttgtaacgctatcagtttagttggatgaaagaaacttgagcgaattgagtgaatcttagttatgctaagttagcaagtttccattgtatttgagcttactgtgtaaacactctntgagtagttagaatatatattctatcaaacatcaattggttgtgaaagctaagagtggtttcgtgacaaaaaatactagggtcttaatctcagtgggagattaagggtagtgccagaagtggccaagagagtactngttgtagccaaaattggcatagagaatacttggttgtaatcgaagttctgattagtggaatctnttcaagtttgaaagagaactggacgtagcccaagagtatgggagaaccagtataaaacctttgtgttcttaacaacttaagttttttaccaagttttaaacacaagtga

SEQ ID NO: 33769 - DNA, 309 bp, Glycine max
agcttatggtaaaatcttgtttcttatccatggtagaagtctccacagatgccattgcctccctcgcctagtattatgatcagccgatcaggtgcttcacctttggggacttccagctatcacctatggtagaagaatttgaagagatcctatgatgccctctagggggaaggaaaccctacctcttctcagggttctatccttcattagctagaatttccaagatagtccaaatcttggcgcaggaattagaccacaggaagcaagtcgaaaatggggtggttggaataccgagaaaatatttggagg

SEQ ID NO: 33770 - DNA, 338 bp, Glycine max
  unsure (1)..(338): unsure at all n locations
ttaaatctcnctntttcatgcttcaatgtttcaacctctgntctcttgttacccntatcaaaatacatggaaccactcacataatctattaaatataataatcntctttaccattttaactccatcttctcaatatcggtggtgatgatcggcgttagggactgatgattattgatgttttttgattggaatgagatatgtctttatccatatttacaaccctcatgttgtgacccacatgtaataaggtgagttttcaggagaatacatgacaaggtctgttcaaatagagcttgattatgttgtgtagaatgtctggtgaaaaatctaagacagcc

SEQ ID NO: 33771 - DNA, 302 bp, Glycine max
agctttaacacacaggatctcacaatttttgaactattggcgcctttgagcgtgtaagaaatttgactttgtttgcatggctataagcatatgagactaagagtaactttcaccaaaatcttgtatataagaattaagaagcaccatatttggatcataaaggtgacaagatctatgaaacaccgatattgacacggacaccagacacaacacggacacatgaatatctgtaatgtccaaaatataaaacgtaatacggatgttgtgtcggtgtcggacaccagacacaacaagaaactgag

SEQ ID NO: 33772 - DNA, 491 bp, Glycine max
  unsure (1)..(491): unsure at all n locations
agacctcgtgtacactntatgtatacaaacaaaaccataggaacgaaattggaaattgctttactggaaacaaatttcaatatatatatagcaatcttttcaaagtagattcaaaaattaaacaatagtgagagcctccaaacataggaactaattaatgaaagctaaaaactcattattgttctccataaatgagacatcaagtgctcgaatgcaatataaaaaataacaggaaatgtcgaattgaaggttagtagaatttatatagatgatactgagataattgattttcaagcacgagttgaacaccaaacttctcataagaattaacaagtacactntaggtatacaaacaaaaccacagaanagaaattttcatatagttgcggcaacaaaaatntgtaattatcatctaannattataaaatggactcaacatttctaccaaataaatgagtctgcaatcatntcatgaattagcacttaattac

SEQ ID NO: 33773 - DNA, 302 bp, Glycine max
agcttgtgatgaggatttgtttaatgttgaaacttcctgcttttattgttgaccacagagtggtacctggagatatgtcgcgggggttaggagaccttggggacgtcaggtggggtgctattgcccaaaaccaagcttgaccaatcccgacccaacccgggcatagtcggtcagtgagaacctgtgatgtacctaagcaggcgagctcctggctgtcaacagataaaaggaacaaagaccacaaagcaaggaggcttgtggtggctggccagctgtgaaacttgattgatatgtgagatatg

SEQ ID NO: 33774 - DNA, 311 bp, Glycine max
gcaagcttatattcctcccacttttctttgtttttcaggttgcacactccacaatcaacaaccttctgcaggaatctactggagggcccacgtgggtctggctgctatttgcacccccatttttactaaatacacccccttgcctttttttggtgattcttttttcgtaaagctacggaaacttacgaatttcgaaacgatacttgttttctttccgtaatgttacggaaccttgcggattacataatcatccccttttttgacttaccgaatgttaccgaacctcactaattgtgcaacgatgcttccat

SEQ ID NO: 33775 - DNA, 372 bp, Glycine max
gacactgagctaaggaaatcaaatgaagatttttattatgatccagactctagaagaaagtctgagcttggccattaagactagcgaaactttcactgttgaaaaactaagggaagaagttgcatgtcttactaaagactttgtgaagttcttggaaaattcaaagactgtcaccattcttctgaaattccatcaacatcctcatgacaagtcttgcctaggctttgaatatggaacatcatcctccaagtcacagtctgtctcaaacaaatatggcttctatggtaagtttggacactccaagttcacatgaatccataagaagaaacatatgtctaaggaaactaactatgttggacccaaaaagatatg

SEQ ID NO: 33776 - DNA, 243 bp, Glycine max
aattctattagacatattatgaatcgtagagcatttgcttatatccacaattgtattggaggggattacaagggacaactgagatgatgtaatgcttggctttttgctggaaaagggaatggcaaatgacgacgaagaaatggtcgtgacactatgttatcaatgcctctgtcgaaaaatgcctgaaagtatggaccagctgggaggggtaaacagggaccgagtcatagaaatatgttaacc

SEQ ID NO: 33777 - DNA, 433 bp, Glycine max
  unsure (1)..(433): unsure at all n locations
atgtatntatacatnnatttgattatttcaataaaaaatctaacaaggctgcttcaaatgataaacatttgcttcaagaataattcaagattgcttcaacaaacaaagccttgttgcaagattcactaaagaccaagccttgccttaaaacaaagtgctttcaagacatgcaaggctctggtaatcgattaccaggaagtgtaatcgataaccagaagacatgattgagaaatatcttgtgaaaaaggtgaanttaaattttcaacatgtaatcgattgccatatgtttgtaatcgattaccagcaacaaaactttggatattcanattcnaaagtcataaccccttcaattataactgtgtaatcgattacacacacattgtaatcgattacccagtggaagttttcacaaaatctggcaacagtcacatct

SEQ ID NO: 33778 - DNA, 202 bp, Glycine max
tggaaacaggttgctgggagtggggcgctctagcacctgaataacaatgaccgtgcccggacacaagcagtcatataactgaaatgcaaaccgtggatataaaactataatggacaacatgatattctacttttgaatggaacagaacccgaggtcctttcgcacactagggaggacgccacacatgtaaatggtttgatat

SEQ ID NO: 33779 - DNA, 310 bp, Glycine max
agcttatattcacaatgttgactgattgtcttgtattctcatttcttctatttcttatttttttttttatagatatgtagagcagtagcttatattcacaattgtattggagtgtctcacagggacataaaagatgatgtcatgcttgctttcttcttgaaaataaattgaaattctgatactgaggacagatgtcgtacaggatgtcacgacatcccgcttcagaacatgcagattatatatgacagtatgaacagattaaacaagtaaataacacaagagaattgttaacccagttcggtgcaacgtc

SEQ ID NO: 33780 - DNA, 309 bp, Glycine max
agcttgtaagttgtaacaatcaaatatgcttatcctgtctttagttacgaagcacaaataattcacacttgattcatattagtcacgtatcgtcttcaatgtcttgtcttgctcaagtcgagctgggcctagagatgaaatcacaccacatttaaacgaatttatttctctattgagcacgacaaatttgtttacatattgctttgctcactctagtaatattgtaatacttccctttatttctccctagcatgttaggaccatattatctctaacttgaaccccccctcttctgtcttcgaccagtta

SEQ ID NO: 33781 - DNA, 391 bp, Glycine max
  unsure (1)..(391): unsure at all n locations
aagtctcataanaaaaagttatttagtcttaacatttatatactaattatgatcattagctgttctagcgtagtgaggattataaaaatagtttaatgataaacgaagaggagaaaatgaaaaagaggttctgggtttaaatcatatcatttcacacacaaaaaaaaaaaatcaactaacaacaaagatcaagaataattatctttttttataatatagcagcaattaaggcatatttttactttgatgaatggagctctcactctatgaacgataaaccactttttatctgtttatgactcctaagtattctcattctctcacttaaacaaataattaatttcaatagcataggttgtccgttaatatatcattcctcatcatatgatat

SEQ ID NO: 33782 - DNA, 309 bp, Glycine max
agctttactatgtgtttggatggagaatttaaagatttctaggaaattcaaattcatagcattttgattgccttgatttaaattcctttcattttgtaaatattttgtttggataaggcaattcaatttcttgtattttaatttccttgcttggacaaagtaattcatatcaatgaaattcaaattttcatttttaaatatttatttaaaaattaaaatttcaatattgaatgaaaataaacatgagtcattttttaaatagttaaatattcaaaataaatttaatgttataaaatatataataataaa

SEQ ID NO: 33783 - DNA, 503 bp, Glycine max
  unsure (1)..(503): unsure at all n locations
gctatattctntatcgtgaagatcnncttgcctttgngttacttactgcaacatattctcctctggcttttggaatctttgcaaaaccctcttactttcctgaagcatggactgaataccttctaactctaaatgggaaggttgtacatgcaatgttgtaggtagaaataaagggaactgcactggccaccctggagtaactgcataatcgggctttatagtttcattggattgnggcttttcagtctctcttgccaccttctgtctagtctttctagctttttttctttggcaccatatcatcaacaagctggttaacaaggtcattgctaatctgaatcataaactcacccataattgatgactcctacaaaaggtaccagaaagatattgatgcataagaagtagaaaagatgattaaaattatccgttaatttttgtggctcttgtttataggtatcatttatagttagaatagtgttatgtatttaagtctcttaatt

SEQ ID NO: 33784 - DNA, 308 bp, Glycine max
agcttctagccaaatggacttaccttgaattaattcctttgatagcccttttgagccttgtttccctttccttgttttgaagctcactacaagccttaagtgaaaaaccatgatattaccatatccttaaggaattttggagctttggaattgttttgggaataagtgtggggggtttttgtttcattggacaacttgttttgttggctatgcttcatgatgtattttgggccatacttgatgtacattgtatattggttaaatgttggacatgctgaatgaaatgttgtttctcaaaggccaaagag

SEQ ID NO: 33785 - DNA, 516 bp, Glycine max
  unsure (1)..(516): unsure at all n locations
acactatgatactaagcttctagtttagatgatgcagatgggcttgtagctacctcatgcactcctctaatgactatggcataatttctggcgataaactgttgggagttggaagccatcttctcaattaaatttctggcttcagcaggagtcatgtctccaagggctccaccactggcagcatctatcatacttctctccatattgctgagtccttcataaaaatattggagaagaagctgctctgaaatttgatggtgagggcaactggcacatagtttcttaaatcgctcctagtactcatacaggctctctccactgagttgtctaataccttagatatctttcctgatggttgtggtcctggaagcagggaaaattntttctaggaatactctcttaaggtcatcccagctcgtgatggaccttggagcaaggtaatacagccagtcctttgccactccctctaatgaatgaggaaaagctttcagaaatatgtgatcctctcggacatct

SEQ ID NO: 33786 - DNA, 309 bp, Glycine max
agcttaagctccttcaactgcacttggctcttaatatttgaagagtatccttgtggaaccttcacctgacgaagacactgacaaaaacttatcttctccttcttggacaaagtatggcaggctgggggcaagtaaattttcttcccatcagaccttggatgcaactatgctcttatacccatatcagctagatcttgacgggtattcaagccatccttcgtcttgccttgaatgttaaggagcatcccaatcacactgtcacaaacatttttctccacatgcataacatcaatataatgtctaacgtca

SEQ ID NO: 33787 - DNA, 391 bp, Glycine max
  unsure (1)..(391): unsure at all n locations
acttccttgagaagcttctgtgagaagacttccttgagaagctagagcttagctacacacacccctctcttaactaagctcacctccttgagaagcttccttaagaagattcctaaagaagctagagcttagatacacatacctctctaatagctaagctcacctncttgagatgagaagctagagcttagctacacaccctctataatagctaagcgcaccccatgacaaaaacatgaaaataaaaaanaaattccttactacaaaaactactcaaaatgcctcgaaatacaaggctaaaaccctatagtattagaatggccaaagtacaaggcccagacgaagggaaaacctattctatattttacaaagatagcaggctcatacttag

SEQ ID NO: 33788 - DNA, 302 bp, Glycine max
agcttaactgaaacatagaacatcacttttcttcaaggcaatgcatgcaactattcatatttctaatgaacatatcagtgaaacataaataacaacaatgaaaggctccaaatgataaaagccccaaattttccctaatttgtaaccctaaaaacctatctgaaacataaatagaatcaaaccaactaataaagttccaatatcaatgcaatacgaaacttacaacaatgaagtgctaaaagattaacttgcatctatatttgaaatgggtatttctgtaaaccctagaactatgaaactgt

SEQ ID NO: 33789 - DNA, 293 bp, Glycine max
  unsure (1)..(293): unsure at all n locations
accccccttacangaaaccattagctatattttttttttgaacaagcatttgcatagcttggacaaaagagctgtaccctctacaggaaaaaataaagatctttaagataatttcatcaatagaatttatcttaagctacttgagaactcttcatatttgatctccgacagatgactaactccgagaatcccacggctaactcgttttaaaatgaatttttcatgctaacaaaagtcggagaatttcaatctcatatgagcaggacttttaatttctcttgtggcaccaaaac

SEQ ID NO: 33790 - DNA, 280 bp, Glycine max
tttttgaaccccttttggggccctaaaatgtgggaatatgctcaaatatgtggggcaattttggtttgttttcttgcgtgattgggttgaattgggggtttgtatgggatggcccctcgcctataatgcatttttaagcaatgggacatgccacattgtccccgttctcttgctattgatgcctaaacgcgcgctcaccaagtgttcggtgaaatgcctcaatggcattagcgcgtgatttttgtaaggaaacaacccatggggcattttggcttgccca

SEQ ID NO: 33791 - DNA, 407 bp, Glycine max
  unsure (1)..(407): unsure at all n locations
tggagaaccaagccaatcagaatgctagacgaaatatagatgggaattgaggtaacaatggcggttatgacggaccgaggcagaaccgggttgagggagtaaagctcaatgttcctcccttcaaaggtagaagtgatccagatgcctacctgcaatgactacactgatgcgcagaaagtcaagctagcagcagctgaattctccgactatgcccttgtttggtggcataaataccaaagagaaatgttgagagaggaacagtgagaggtatatacatggactgagatgaaaagggtgatgagaaaaatgtatgtgcccactagctataacagaaccatgcgacagaaactccaagggctgtcctcagggaatntaaccgtggaagaatattataaagagatagaaat

SEQ ID NO: 33792 - DNA, 303 bp, Glycine max
agctttgttcagtggctgggtaagggataaaaaagggggagagatcatgagtttgaattctctcatttgatgtttctaacaaaactaacatttatcgattataaaattaaatattccacttttcacatgccataaaatcatccaaactcttttcaattttaactatatactggttttattcctttttatttatcttttaaggttattgtataaaaatcaagaaatttaataaattttcttaatctataacaatatataaaaggaatatctccttttggtgtacacctttagtttgattttttt

SEQ ID NO: 33793 - DNA, 392 bp, Glycine max
gcttgcttcccagatctgcttgtgattggcagcagtgtataggaaattcaaaggttcaaacagttcatgataactgagtttgaaatgacagatctagggaagttatcacacttccttggattagagattaatcaagttcagaagggggtgtttatgcaccaaagcaggtatgcacaagagatcctcaaaaggtttggcatgatgaattgtaattttgtttcaacaccagctgaagctggactcaagctggaaaatgacccataggaagagctggttgatgcaatagaattcatgaagctaattggatccttgagatacttgtgcaatagcagacctgatatttgtttgcagtagcctaatcacaggttatgagggaaccaaatgtcacacat

SEQ ID NO: 33794 - DNA, 305 bp, Glycine max
agcttgcatgcaccctatactcattgtatgcacaaccttattcatgtacaatatgagataaaagcccaatattaatttaagaattgcaccaacagtaccacaggtactgtgtctgaacacattttaagaaacatgctaatgaatttaattgtttcaaggcggtcaattagcacggtgaagttctaactttattttcaatgcatatttatgggatccaaccgagaatgtccatttcaattggttgtacaagaagcgtgagtgaatgtaaacctcctaatatccgtcttccattcctacggataaaa

SEQ ID NO: 33795 - DNA, 621 bp, Glycine max
  unsure (1)..(621): unsure at all n locations
ctatacctatacactctccattncactnntaaaatatacacnnnactatttttnttagggaaacgggtgattccttcgtgtcnatncataacgcgcanactaatctcaactttgttataatagctttcatctccgagagtttattatctcatatacggcatcatacatagctgcgacatcctagatagtgagacagntgcaccggagcaatntaactgatcgcggagctatgcccgtcacttgacacactagaagctcacggatgtggatcattgagactgcaatgtcacctattactgctggacaacaactgaaggaagattacataacggttgctttctgtagctgaaagaaactggatgaacattctgtaaaggctattgagcttaatgcacgaattaacctgaggaaatgcgcacaccaacattagttcacatgcggagatgcccatcaaagtacctatgtgtaccctggaagcatagttccagaatgggtggtgcacacgacaatacaacgagattacgagactattgatctatctttagttcttgctccacacancactgaacacttagacttcagttttggctgccgtgtaccagaagactctgatgagggtct

SEQ ID NO: 33796 - DNA, 307 bp, Glycine max
agcttggagtgtgcgctaatctttttgtccatttcttccaacttttcttcaaggctttttcttcagtttttgcatcaattttcttctaaagcaattgaaatcttcttattttgacttctgctaataaaaaattgcaaagatgttaatttattcattatttcattaaaaacaatagtaaagtgaagaaattacaatcattattagccaaaattgactatcaaattaactcatatttcgtagttattagatctcttacaaacatgcgagatagagaggattagagggggttggtttcacaacaatgtgg

SEQ ID NO: 33797 - DNA, 494 bp, Glycine max
  unsure (1)..(494): unsure at all n locations
gaactttccattcacaaatactattaaatatttatcatcatacattgagtaacaactctaagcaataaaagagatatgtatatgtactgctccatgagtggtaattaaattaaatatcagttntccttcttttcatcttttccctttcttcagagaacctcataataaaaatgtgtaggagctcaatccacagcacagtaccttcattgtatagtcacagccataagtgtagtgaattatgtatgtcttgccaatttctttctcccatggaggttgacacgcataataacaaacaagtgttagtaaatttgaagatggagagtgcttgtggtgaattcagtttatacagacaatgtaagtatgcattntagtgtaatggtagaanatgcaaagcaatgaaggatagtccananaccttcaaattgtaataataagaagatnaaaaagtctatgttgacaatggaaaaatgaatacaacattattctcgtacaat

SEQ ID NO: 33798 - DNA, 425 bp, Glycine max
  unsure (1)..(425): unsure at all n locations
ttctttagtccagtcttcttctggcttcaattcatcagtgggctttccttctgtgtccagcatcttgggatgttcccagcctttgatgacagctttccaggttctgctatccagtgatttgaggaaggccaccattcttgctttccagtattcatagttgcttccatcaagaattggtggtctgttcactggtccgccttctttctccatgttcatcagaatntatctccctagatctcactctgtgatttcgagtgttggctctgataccaattganattctgataccaggggacagatgtcgtaccggatgtcacgacatcacgcttcagaacatgcagattatatgtgtccgtatgaacagattaaacaagtaaataacacaagagaatngtaacccagttcgggcaacctccctacatctg

SEQ ID NO: 33799 - DNA, 106 bp, Glycine max
gcctccggatgcacccaacttcttttttgcaactacagagcaaattaaaaaatggccccacctaaactaagaattgcctaacagaaccaaagaccttgtgttaaac

SEQ ID NO: 33800 - DNA, 302 bp, Glycine max
agcttgtgcaaatcaaatcactcctacatctcatctctagcatgcattttctttctttacccactcctcacgtttggttttttagggaaaaacaccataactaaacgcgccgcaagggatccctatcgcaccagatccaaatctagaacgatgggtgatcaagaggagacgcaggaacagatgaaagccgacatgtcggctctgaaagaacaaatggcctccatgatggaggccatgttaggtatgaagcagctcatggagaagaacgcggccaccgccgccgctgtcagttcggctgccga

SEQ ID NO: 33801 - DNA, 234 bp, Glycine max
  unsure (1)..(234): unsure at all n locations
taagctggattcctttagtagggaatctatccttcctaagatggagtccaacccagtcaccctcattaagaactagctattttcttcctctattgcctntagttgaatacacctttgttntaggttctctatttggttcttaaccctctcatgtaacttctttacaaattctgacctagattccccttctttatgtataaaagaagtgtccaatgggaggggaatgagttctaa

SEQ ID NO: 33802 - DNA, 308 bp, Glycine max
agcttagcgcgtgtttctgttggatcgcgggcttagcgcacgtgttgcaggcttagcgcgtgcttctgttggatcgcgggcttagcgcctgtgcttcctggcccgcttagcgcgtattggactgggcctgcttcagattttctttttttcttcaatttttctggcctttttgcttgttacacctccagtttttatatctgcagccaaaattcaacaaaacatcaattctttaatatttaagcacaaataactgctaaataattatttttaaagacaattttgccttattttctattatcaaaatacaa

SEQ ID NO: 33803 - DNA, 331 bp, Glycine max
  unsure (1)..(331): unsure at all n locations
agcaatgaacacagaatattaaggctaataactntatgatttagccatgagaatgcaacgacaaagtcatctcatntgcttcacctgtggtatgtgctatgcgatacgaagaactgataatcatggtgattcgcctgaagcagccttaaccagttatttgcagcctgcaagagagaanttgctagttggctctcactaactccattttgtttccaaatagatcgatccctttaacttgtaggaagccattgcgaatgtcggtaacgaaatctttggcacaccgccatccatgtcatttggataaaccaaaattggagcctgagtactttca

SEQ ID NO: 33804 - DNA, 302 bp, Glycine max
  unsure (1)..(302): unsure at all n locations
agcttaagggaagaagatgaaccaatttttaatcagntctgcataattctagttgggtacaacttttggctcgttgaggtagtattcaatttcataaaatgttgtatctagagcattttgggtgggtcacacgtttgttgactcgctgggctaaatgttctgtctgggatgtgattttggctggctaggctttaatctagttgtttatatgatgattatttaaattttccttaaactcttcctttctttttttttatgattcaaatgactttaaaatatttttgcaaatatattatacttat

SEQ ID NO: 33805 - DNA, 500 bp, Glycine max
  unsure (1)..(500): unsure at all n locations
ttttcanatctcaatatacgttgccaagtgtgagtatggatcttcatttggtaaaccatgaaacagatatctaaaggcgttgggtcctcctactgagtaagttgatgcaattaaagatgttnttctaattaaagatgttcttgtgttctatgctgaggacaaaaataccaaacactgattcctcgagagtntggactaatttaaatcaaactttgttcacagatccctcttgttgaacttagcctaatttaaacaacattatactcacaacataataaacaaaactaaaaccctgcacattatccttagtgtcgcaacaagcccttttgtaggcgtgcgaagcgaggctcacgggtgcgcttttcaaaggaggaaagatgcgcggagtcgccatcaacgtttaattgtggataacgtctatataaccgaatgaaaccggtcaacatgataattctagttcaggagttgatttacgtttgcgaatgtataccactctcaca

SEQ ID NO: 33806 - DNA, 279 bp, Glycine max
agcttccacaacaattacaagcggttagttcttctcattcttttgttataaaggtagggggatgccacatatgtgaaggaacacacgagcctgggcaatgcatagacctacaagatccttcgagggaagtaaactacatgggcataccaaattgccacggattccaagggtaccaccaagaaggaccatcatgattctatcagagagataattttttgtaggaccactattggatatcttatccaggtaataactttaaccaatggggttcaccttatc

SEQ ID NO: 33807 - DNA, 430 bp, Glycine max
  unsure (1)..(430): unsure at all n locations
gctgagaggacttcacattgattcctatggcatcgaggtgccaaccgtacctgccatggaacccaataatcttgccacctgtcattggcaacgaaaaatatgtcccttgttcaactccaaatggtccatagagtttcttgttgctctcaaaactaagtgaccgaatgaagattggtccccattgatttaagctaccatagtatccatcaactgatgttaggaactcctctgggtaatcaagcttgatctgcagcacaatcataaatatttaatcgatataacacacgagtgtgatgagtaacaaccaaagaagcacanacacttcatgattgtatacacaaatgtttnttttgttattaacaaatgttaattgttagttnttcttggtacatgttagatatgtatctatgtnggacactctacggactac

SEQ ID NO: 33808 - DNA, 306 bp, Glycine max
agcttttatttgcaggcaatttcttttgcagtgcagtggcgttgacctacggtcattgtaagaagaattgatgtttatcatatgactatggaaagatatataatttcccttctagtttatttatcctatgactgaatttttaccttttcttttgcaggcaggctgaaggatctagtaaccctcctaagatgcgtaggaatgcatcagcttctgcaaatatcagtagccttgcttcacaaagcaatcctacaaattcaggttgattcaagaaacatttcaaaagatttgttaaaacttagaactatt

SEQ ID NO: 33809 - DNA, 503 bp, Glycine max
  unsure (1)..(503): unsure at all n locations
tacctcatactccanataacaatgagctaattgtggtgaatttgattcatttaccttatctttcccagggagttagaagaaagaaaaaaattaatgtaaaaattacaagcccttcccttttagcaaattaactctcctaattaagatattgtactatatatcctaaaaatgtaatatgtatgtntttttcagcatcaaaatataatggtaaataaaagtcttgtgagagagtatatatatgctcccaacttgttcctgaaaatgacaaacatgatnttatggaaaacagtcatatntagctgtagttntttataatcaaatttgtcttaaaagtatgtntatataaaaaaatctaaaaacattatctttgaggtgattaacgtgagaatcttaagttntatgtntctcaatataaaaaaaatccaaactttaaatacttncaaattaaatttaataaaataaaatntatatcaacacataagttataataaatgttcatgaaa

SEQ ID NO: 33810 - DNA, 305 bp, Glycine max
agcttgcttgtggggcttcttggaagttggatcttttgagcttcaatgaggtcctttaatggtgattttccaccatggagatgcagcggaagacaaaggagaagaggtaagaggcggtgccatccactagggaataagccatggaagaaggagcttcaccaccaagatgagccttggataagaagcttggagaggatgcttcaatggaggaaaagaaagagggagagaaagaaagaggggggcgcacgaaattgaaggaataaaagagggagagaagtggaactttgaagtatgtctcacaagac

SEQ ID NO: 33811 - DNA, 245 bp, Glycine max
tcacctcgatgccaaaatacatgataatacaatgggaaacttccttgagaagcaggaaggtagcttccttgggaaaataaggaagaaagcttctttgagaagctagaggggggcgactgattgaggccgttccctaatcatataacattataaatgcagtatctaggaagtgatcctaggtcgtctcccaatgagcaatggtcaagcaacgtttataatatatagtgataaaacagtaacgaatg

SEQ ID NO: 33812 - DNA, 410 bp, Glycine max
  unsure (1)..(410): unsure at all n locations
acatattggatttaatcctatactattatattgactacaccatacaatattgaagttaaatagtaacaagntagtaacaaatcacaagtgtaaatagtgtaatgaactgtnttgagcacagtcgcacagtttaatctaaaactaattaagaaagatgttgatttgaaactgaaaaactaattttttagaatacaattcagttaaaaaaatagtttagctcgaatcatagagcaatatgattcgaacttttataactttttctcaattcagttcggttcgaacgaattgtttttagttcagcttaattctcacacaattcaattcactctttatgccagtccctattctagcagtgttcatgaacatttaagtgaactttatttacataaacacccctatagcatgtcaac

SEQ ID NO: 33813 - DNA, 306 bp, Glycine max
agctttttcggaaaattttcactggtaattaattacagatttctggtaatcgattacacaattatattttgaagggtcatgacttttgaatttgaatttcaagagttccattgctggtaatcgattacaaacgtctgataatccattacaggttcaaaattcaaattcaaaaccttttttaacaactattttccaaaattgtcctctggtaatcgattaccagagccttgaatgtcttgaaaacactttgttttgaggcaagacttgatcttgaattaaacttgaagcaaggctttgtttgttaaa

SEQ ID NO: 33814 - DNA, 438 bp, Glycine max
  unsure (1)..(438): unsure at all n locations
tagtctttgtatcttaattcgacctctttttttcttaaggtaactgaggtcatttgtccaacatcctattcttgacaactcgcttctctaagaagacaaactttccggcatgataaaatgaggccacatgaacgtctgtatttttacttgaaaacacaatcaatcaaatgccctttttctttttgaacccctttcttgttttttgtctatttgttgtttttttactctactncgacgtttacgacacccccaccaacgtgcaagatgagtaatctctgattgaacggtcttggaagtccaaactcatgagcacaggtcgctcgagcaaactgaccaatggctngcacttgaaaatcctgatgagtcattagagacatctaacaaccagcttcaaaattgccccatgtgtggcatctcttgtcaaatgtcaaaattaca

SEQ ID NO: 33815 - DNA, 303 bp, Glycine max
agcttgtcgtttaattcattttgttccatataacaaggaacaaacaaaacaagattcaaaataggaattgtggggaaattgagaaagacaatgggaataagaataagaatgtgaaaaatgacccaatttatatgtaatactatttctaaaatcttttagtgtgaaaagtcccttcaaagtcaaactaatactagatttgcaaatgcatttgtgttgtgtgtaaacggttaaaacattcaactaacattcactgaaacaccaccccctacctcacccgaccccttctcaacccctcatcctctc

SEQ ID NO: 33816 - DNA, 297 bp, Glycine max
  unsure (1)..(297): unsure at all n locations
cccgccaggcaggcaaacanagagaaatcgtttactacaaacaggaaagcaactaccggcgtgcagagaggacaaaaccaacgatgttggccctgaaaaagggggagacgcaagcaaaggggtcaaaagacgtcctaacgaagacaggagctcagaacggcaagagcagccccacagggagagcaaatcaaacgccgcaccatgttgcgcagacccaaatcaaaatatcgcagaaggagaagcacacaaatcacgaggcgaggacagcctgcacacaatagaacgaatccttccaag

SEQ ID NO: 33817 - DNA, 489 bp, Glycine max
  unsure (1)..(489): unsure at all n locations
gtgttgattctgagatccnccctttgnaaaangcccgcnccnannnaanaacaaacgccgcgagcgtgtaatttttttttccggacatcacgggcctaattttctttaacttgaaatcgcactgcttgcacaattaggactatcttttcgtgtggtttgacaaggcgacctctaataatatttggtcccacggcccatcaatctgcatctaggcctgatggtggagtgagtttgcttgggagattctacccgtattaaaaaaagaaaagtttatacattcattgatgcacctaattaaattattttgctaacttgactgactagtgactcctctccattcttatcttatattcttttggcaatctactggtcttttcttaatatgatatgcggaaacctcgaagtaccaattgttatcggatacacagttctgcactaaaaggggttcgctaattaatatatagatgctatctacaactatactagact

SEQ ID NO: 33818 - DNA, 291 bp, Glycine max
ctgcactcccattttactaaatacacccctggcttatctggtgatgcttttccgaacgttacggaaacttatgaatttcgtaacgatacttgttctcttatcgtaatgacagggaacctttcgcattacgtaatcatcccttttatgccttccagaatgttacggaactatactaatcgcgaactatgcattctttaggctgtcaacatgtctccaaaattcacgaatggcctaacgatgggtcccaagtacctagaagtggcaaacgatggtcgattcgaacatggatag

SEQ ID NO: 33819 - DNA, 277 bp, Glycine max
ccgcaagcaagcaaacacgcaaaaaaatacttggtttcatacaacagggaacaaacaaacaaagactcaaatcggaattgggggcgaatcgaaaaagacaacgggaaaaagaaaaagaaacgcgaaaaatgacccaacttaaatggaaaacaacccaaaaaaacctacaaggggaaaaggccgttcaaaagcaaactaacacaacatttggaaaagcacttgaggcgagaggaaacggttaaaacatacaactaaaaataactgaaacaccaacgcc

SEQ ID NO: 33820 - DNA, 80 bp, Glycine max
gattccaggcgcataataatatcgagaacgatcgatattgaacattcgaagcttttgagcaattcaaatgggcataactt

SEQ ID NO: 33821 - DNA, 288 bp, Glycine max
  unsure (1)..(288): unsure at all n locations
aagatgaatcgagtcacatcactgcttcgtctactgccaaacatatttaggattgttgatgtccttgttacttccagtttcaccttgacaaagatgtcatggaccatgttgaaaatctaaattgattcaaccccatatcctgcgtaaaaattcgcaatactttgactgtacatcattcgcatgcatccatgcttntcatnggttgcattgctcgttgcattctttccttgaaaaataaaataaaatgaacttaatcattgtataaaaaaagaaagggacacgctttac

SEQ ID NO: 33822 - DNA, 284 bp, Glycine max
gcctgaaatgtcttttttgatggtagtggtcctagatgcagggaagaatttctccaagaacaccctcttaaggtcatcccagctgaaaatagacctgagagcaaggtagtataaccaatcttttgccactccctccagagaatgaggaaaagccttttgaaagatatgatcttcttggacatcagggggcttgatggtgaaacaaacaatatggaactccttaagatgcttataaggatcttcacctgcaagaccatgaaacttgggcagcaaatgtattagtc

SEQ ID NO: 33823 - DNA, 483 bp, Glycine max
  unsure (1)..(483): unsure at all n locations
tcacttaanaagttgtgacttttgaaaaaatctttagaaacaagtcacttgaagaattgtgactnttggaaatgtatttttcgaaatcagtcactggtaatcgattaaatgtgactcttcattttgaattntgaaaattaaaacgtttagaatgtctggtaatcgattacaagtgttgtgtaatcgattacacaagtttataatgatttaaaactgttaaacacaagttgtaacttttgaaatttgaaatctgaacattntaaactctntggtaatgaatttgtgaaaacttcttgtggtattcaatgttntgaaaagcttttttagtacttatcttgattgagtcttctcttgattcttgaatcttgagtcttgaatcttgatcttgattattcttgaatcttgattcttgaaacttgattcttgaatctttggaatttgcttgactcttaattcttgaatctttggattttgcttgactct

SEQ ID NO: 33824 - DNA, 292 bp, Glycine max
agcttataatatatcgaggcgctcgaatttgaacaacggaagctcttgagaaattcaaatggtcataacttttaactcggatgtccaattcatgcgcatcacatatagagacgctaaaaaatgaacaacggaagctctccagaagttaaaatggtattaagtttttacactgaggtccgattcaggcttataatatatcggggcgctcgaaattgaacaacggaagctcttgagaaattcaaatggtcataacgttaaactcggatgtcccattcatgcgcatcacatatta

SEQ ID NO: 33825 - DNA, 442 bp, Glycine max
  unsure (1)..(442): unsure at all n locations
tctntgggaccttgaacaggcaactaactcctctatcagaactcatgctatgtgctcgcgactggtccctttcttcctttcgcaacttgagttcactattgctaccccatagagctccgcgaaanttgttccggccatactcttccttgcgagccctcttggtctcttgttcaagggctcttgcggtaattgcattctcttcccgtaacccggcacactccttccgaacgtgtgtagcggccaacttgaacttctccttggcaagttttgcctttcctaactcngctttgagagcttggacttcttcgtcctcttccggtgcttcanaactctctttgctgacgaactttaacttggcgagccaatctaaacctcgtatatgaactttcagccattcgtggtacccaccaatgatgccattacgaatgcctctaagctcttg

SEQ ID NO: 33826 - DNA, 307 bp, Glycine max
agcttgcacataattttagtacttggcaaaaaaaattcatcaaccataatagtgcagcaattgattctgaaattccttgtatttgtaaacagaaacaataaaagatgtcatatgttaactaagcacactcaatagtcaaagaaaacaggaaaagatacagaatatagtacaaaatgtgaatatatctttccttctctcaacccttccctgattttcttttaaattagggcttgaatccattatctacaaagggaaatagcagtttcactacatgtctaatttaaggggtagaaaatcttcaccatac

SEQ ID NO: 33827 - DNA, 410 bp, Glycine max
  unsure (1)..(410): unsure at all n locations
tctagtaactcagcttgccatgaattagaaatctgcacctggtgcaagagtctgtggtctatgttcttctgcagatcaccatacagatctttgtccttctttgcagcaatctggagtcaatgagcaacctgaagcttatgctgcaaacatttataatagacctcctcaacagcaaaaccaacaacaacagaataattatgacctttcaagcaataaatacaatccgggttggaggaatcatccaaatctaagatggacaagtcctccacaacaacaacagcctgttgatcgaggccatacccgaatcaaataaacattaaaaatgcagtatctaggaagtgatcctaggtcgtctcccaatgagcaatggtcaaccaaatgttcataacanatagtaataaaatagtaac

SEQ ID NO: 33828 - DNA, 309 bp, Glycine max
agcttgtattacataaacaaagtttgaatctaatcattaatgtatctattcacttgaaaagagagtttatactatgatattgacatatttttattttattttatagcttatgattacgtaaatgtcaatttcaaggcttgatcataactcagttattagacttttacattgtgctaattttttatttcttgagtttaaaataactttaaaagatatttaaaataaattaaaaatataaaaattgccaaattgattcaaactaagctacaaattaaatatcagttcaatgtgattcagatttaatattgc

SEQ ID NO: 33829 - DNA, 469 bp, Glycine max
  unsure (1)..(469): unsure at all n locations
atgtcaaacacaaactagacatattgtgtgacatatgtatttagcaagggagtaagcatgttatcacatcacaatagtatttagctatgtataccgaanagaatgaattntgccttaggtggattagggatgtatgaagaaaagtggtatggtacacaccccaattaatagagtagattagatggatggtagtcctatcactagaggtagagggagatcangagatattatatccaaacaattaaggatttagtggttaatggtttgcctaagacatggttcacaatacaactttacgacgttgttngatccaagtagccaacttcacctggtagaaaaagacttggttgttgtagattgttgttgttggagagggcaaaacactctcagcaattgttaagctatatatgttaagagaccaataagtttagccaaatgacagaactgttcatataatcgataaatggat

SEQ ID NO: 33830 - DNA, 308 bp, Glycine max
  unsure (1)..(308): unsure at all n locations
agcttccccgnggctttttttagaagctttctcaagaggcttctttgaaaagctagatccttatctacccacacccttttattgtagaagcaaagcttcatggtgaatcaaaggtgattcaaaggtgttttgatgataacaatgatgataacaaaagatgatgacaaaggtgatgacaaaaagctcaaagatcaatcaaagaacaactcaagtgaatcaagaacaattcaagagttcaagataagaatcaagaagaattcaagactcaagaagaaagtttagagtgaagaatcaagattcaaggttca

SEQ ID NO: 33831 - DNA, 497 bp, Glycine max
  unsure (1)..(497): unsure at all n locations
gtctcacgactgtcacgtgctcatgctacatttgttagtcgtggctacacgagacatcttgccaaacaaagtcaggttaacgataacttgcctatgctttttctttcatgctatatgtagcaaagtcattgatccagtcatgtttgatgagttggaaaatgaggccgcaattatactatgccagttagagatgtattttccccttactttctttgacatcatgattcacttgattgtgcatctggtcagagaaatcaaatgttgtggtcctgtttatctacggtggatgaacccggttgagcgatacatgaagatcttaaaagggtatacaaagaatctatatcatccagaagcatctattgttgagaggtacattgcanaagaagccattgatatttgttcagaatactttgagaanggctaaacctgtgggcttnctgagtctcggcatgatgacagagtgggtggtaaggattcaagaggactgcangtgatca

SEQ ID NO: 33832 - DNA, 306 bp, Glycine max
agctttccatcagattaaattcgtttagtcgaaaggaaatttttagcttccaggatttcggctctcggaagtttaacataaagcatcaaaaatggattatggttggttctatacaaaggatggacttgtgaaattgtattgccatggattcatagggctgtgagcaacggttctcattgcagataggaaataatggttatgcagataacattgattcttgtactattatgctgaacactggggcatttttctgggtctcatgattttgtttgctcgaaagcattcaatcacaattatgtagaatcg

SEQ ID NO: 33833 - DNA, 510 bp, Glycine max
  unsure (1)..(510): unsure at all n locations
ggaggtaccattgttgaatgttgaaactccgaaactatgtggtacanggataccaatcttctattcgatcccacagaggttaatggttctgtttctcgaagcccattggatctccttgttgtcctttntgggccatctgtggtatggcccgttttgttgctaaacttaatcaagaagaataaaaaataataaaagaattattttattccttaataactcnttggagaaaaaaaaaagcacagttaaaatttttatatatgtaaacctttcattcgatcttacattttttgttttaaaatgagtccatgatattaattnttttttcatttgttttcagtaaatgccacttatatatatatatatatatatatatatatatatatatatatatatatatatatatatatattagtccctctaaaggttggactaagagtataagtcaagcgtctaattcacgttgttaaataaggtgagtaaaatattatanaattttaatattactcttag

SEQ ID NO: 33834 - DNA, 296 bp, Glycine max
agcttctacttatgtggcatggcaggcttccttcactttcttgtctccaacgcgagctttgaccacgactcttccttcccgcgatgcttcttttcatatccgcctgagtgggcttatagcctaaaccatacttccaggatttcctttggcatttatcaggctagttatgccgccattgtccttgcctaaacccattccgggttcgtaaccattccctaacataactcgggccatcattactgctgcatcggacagacaaggctgcccagagaaggaatccacggaggaaatgctga

SEQ ID NO: 33835 - DNA, 303 bp, Glycine max
  unsure (1)..(303): unsure at all n locations
ttgagcttctgccaatggccttggtgttgcctttgtcttggtggttaagcttgatgtttgctttggactcttggaagaagattgagaaagccgatattgatcgaagatttttaggagctatgcaccatgactgcccctacattntgatttgtttctaaatttctgttntggccgatgtatttctgacatgtntagctatattccaattntacagactntattttcgtttcctttgatgtaaatgtattatcttcttcaagctggaagtgcttttaacacctttcatcttgtaggggggggggg

SEQ ID NO: 33836 - DNA, 304 bp, Glycine max
agcttggcttcaatctccttttggttcatcctcaacctgcaaaacttagagtaggtgggtaaagattccccctcctctaacaccactggaatctgaagaaattcatttaggttgtctgcatcgatcttaatcagatgtcctcttactctagcttgtttaggggctggttcctctgggctgtatagattagcataaaattccttcaccactgccatgtctatgcttccatcttggagtttggtgaggcgtttgtggagattacgcctctccaacaacactttaaacttgtcgaactcagtatgat

SEQ ID NO: 33837 - DNA, 257 bp, Glycine max
agcttgaatatgacaacaattatttttttacaacggctgccctatcatttaaagtaataaatcatacgtcttacattaagctcacaaatgctcaaggatgttaaatttaactctgataaaagaatattaccatatataagcttagaggtggagttgctgtgtcactttagccaccgcagtgttatatagcagaattactgactttcaattttattattattatttttttgtttaggtgggggtggaagcgccgtttt

SEQ ID NO: 33838 - DNA, 381 bp, Glycine max
  unsure (1)..(381): unsure at all n locations
gacgcttagaattgataatgcaatcccaaggcaaatttcatacgaccgtaactnttgatttgattgttcgattgaggctcataatatatcaaaacactctaaatttaaaacagaagcccaagacaattcaaatggttataacttttgactcggttatctggttgaggcccatagtatatcgagatgctcaaaattaaataagaaagcccctggcaaattcaaatggccataactntatactcagatgtccaattgaggtccataatatatcgagacgctcgatattgaataaggaagctctataaaaatataaacggtcataattgtaggatcagatgtccaattgaggcccacaatatatcgagatgctcaatactgaat

SEQ ID NO: 33839 - DNA, 312 bp, Glycine max
  unsure (1)..(312): unsure at all n locations
cctgcacgcatgcaagctttccatcagataaattcctttagacgaaaggaaattnttagcttccaggatttctgctctcggaagtttaacataaagcatcaaaaatggattatgggtggttctatacaaaggatggacttgcgaaattgtattgccatggattcatagggctgtgagcaacggatctcattgcagataggaaataatggttatgcaaataacattgattcttggactattatgctgaacactggggcatttttctgggtctcatgattttgtttgctcgaaagcattccatcacctttatgt

SEQ ID NO: 33840 - DNA, 287 bp, Glycine max
gaggcagaaaactctacccaaaacacattcaaacaccacaactttccttactcatataccccaagaacatgctctttgttctgattcgttaaccgatggatacgcctgaaacatttactggagggtcctagtacataaatctacagtttgaccgtagggatctactagacaatgtctggaacccgatatgcactactcttctcatgactagcaatgccaaccatattctgcctatgtacaaaaaaaataaactgctgcacaattcaacagcatttttctgcataata

SEQ ID NO: 33841 - DNA, 267 bp, Glycine max
taccatgaaactaccctaggccaagaaaacagggcagaggcagaaaactctgcccaaaacacattcacacattacaactttccttactcaaatatcccagtaacattctcttcattccaattcggtaaccgtgggatcgacttgaaaattttactggagattcctagtacataaatctacattttgaccgctggggtctgctagaaaatgtccagaacccaatatgtactacctttcccataaccagtaatgcacaagcatttttct

SEQ ID NO: 33842 - DNA, 299 bp, Glycine max
agcttgcttctacaaactcccccttttttatgatgacaaacatgaaatcaagaaacgcatacaagttctatcttctaatcgaacactcacttaattctccccctttgtttttgagtttaagcttcacttgaaattaagttatttaattatatgaattcttgattcaatcctaagtttctctccccctttggcatcaacaaaaagccaaagggcgtattgagacaaaaaacattcaaaactcatatcatccaagcattttattcctacaccaaataaggggacaatattcataataaact

SEQ ID NO: 33843 - DNA, 306 bp, Glycine max
agctacttttggaccttgaacaatttattaactcctctttcagaaccatgctatgtgctcgcgactggtctctttcttcccttcgcaacttgagttcactattgctaccccatagagctccgcgaaatttgttccggccatactcttccttgcgagccctcttggtctcttgttcaagggctcttgcggtaattgcattctcttcccgtaacccggcacactccttacgaacgtgtgtagcggccaatttgaacttctccttggcaagttttgcttttcctaattcgcttttgagagcttggactt

SEQ ID NO: 33844 - DNA, 507 bp, Glycine max
  unsure (1)..(507): unsure at all n locations
gcttcttagtctcactctcaacaattgtaaaagcaagtggaaaattattcttattaccatctttctcaatggcagtcaacaaagtaccatgatattttccagttaaaaatgtctcatctacttgtacaagtggcttacaatatttgaagcctttaatgcatgggttaaacgcccaaaatacacgattaagaatcaccctaggagacgcatccccacctttctccattgaagatggagttttgtagtttactatggtatctagtacaaaatgttgagcagctgtcaatcatacaagcaggtagctgtatgattgttcccaacttccaaatgtcatttcaagggctttntgtttgattgtccatgcttttttgtatgaacagtgtaaccaaaccgttgttgcatgtctgcaatcaaggttntgatttcgataccaggaatttgtttcactaaatgaacaacattatgagcaattacagaagagtctaacctagcatgatcttgtgatat

SEQ ID NO: 33845 - DNA, 307 bp, Glycine max
agcttgtaatttcctcttattttattagactgtaaatccccataatgcaaaagggttcttgttcatatttattcatctttaccatggctgtttggaaccataaattgcttcttatgagataagctcatagatgcatgctaatcatgttctgttcttgtacgaaaggttggagggagggttggggtgagatctaactaatatgcgagggattcattttacatgaaaaattgagaagtttattacttatatataggttgaagttaattctataatttatgatacgaacttatgcatttggtcacaattt

SEQ ID NO: 33846 - DNA, 422 bp, Glycine max
  unsure (1)..(422): unsure at all n locations
aatgtcattgcataaatccactggaatatgatgcaagtacagcacaggtatgtttctcctctttcttccttcttccatttattntaactntntcttttaaaatgagattaattttcttgatctccatnttttnttcttgtntttaatcatgtgcctatatactaatgaaagaaatgtttnttttatcactcctctancttgtgtctgcattttattaagagaaaggaagaaaaggttaacaacttttatattnttaaaataaatactctaaaatctataactattaataataataattatcccattctggtgtacgccaattgaaattctacttatccttagtatattataatctatacaatatattatatatatatatatatatatatattatatatatatatatatatatatatatataa

SEQ ID NO: 33847 - DNA, 308 bp, Glycine max
agctcggaatggatgtcttaactattctttcaagtgagaagatttagaggatttgaaagaatcccatctattaatgaagtcaattcttcctgttagacattagacgatctattactagacgacccaaacatctcttacagttttgatgacaacaaagatatgaatttatattaaccattttgttgtatgtaagaaataggtttaatgactggaagcaacactaggagatacatattcattactagataagttgtctactagaagcacaaagtactcatgcagtccatccaaacaacgagtggaataag

SEQ ID NO: 33848 - DNA, 484 bp, Glycine max
  unsure (1)..(484): unsure at all n locations
gtgtngaagggtgaaacttcctgctnttattgttgaccacagagtggtacctggagatatgtcgcggnggtcaggagaccttgnggacgtcaggtggggtgctattgcccaaaaccaagcttgaccaatcccgacccaacccgggcatagtcggtcagtgagaacctgtgatgtacctaagcaggcgagctcctggcaatcaacagataataggaacaaagaccacaaagncaggaggctngtggtggctggccagctgtngaatttgtgtgatatgtggagtatggcctctggtaatcgaataccaagggtgggtaatcgattacaaggcttanaaatgaagacagggggctaagatggtctctgaaattctgataccagnggacagatgtcgtacaggatgtcacgacatcacgcttcagaacatgcagattgtatgtgtccgtatgaacagattannaccagtaataacacaagagaattg

SEQ ID NO: 33849 - DNA, 303 bp, Glycine max
agctttgtgtaatcgattattcatatttggtaatcgattaccagtgtttgtttctgaaaaatctaaagatgtaactcttcaaaaaggttttgactctttcaaatgggttttaagcttttctaaacgatataactcttctgaatggctttcttgaccagacatgaagagtctataaaagcaagactttgttttgcattttaaaatcaattattccaagtctttttaacaaatctcttacaatcctttacaagccttgaatctctttgaacttcttcttcttctttgtaccaaaagttttctgaa

SEQ ID NO: 33850 - DNA, 500 bp, Glycine max
  unsure (1)..(500): unsure at all n locations
ggtacaatgcacaggctcacctatcatgtgctngaaattgactttntattaaaagaatgggagcaacaaggatcaaactctagagtctagatgactcagtcaaagactcatgaaccaacttaataagcttaagctattaagtaaagatgcatgattggccttctattacatccctaacagtgttgtatttntagctgcaaaaacaaattgaaaaatgtttgtctggcatcactttnttntacacttattntgtatctcctagtaaaatgtctactcatatggacacacagataagggagagagtaaaagaagcctttnttcanagggtgtaaatgtgagactcataaaatggtgatggtgatggctaggttaggcaagacatttcaggtagtttctaactttntttactagtcgaaaaactcatntacttgttcgataaataagtntttntaataatctcttaagtagttctaatattttntggaatgtacttgaagtag

SEQ ID NO: 33851 - DNA, 305 bp, Glycine max
agcttgtaagtatttattgttgtaatttgcctgttccattaggctcttaatgtctttagaggttacttcctcattgacatcttttgtcttgaatggaattgccatgacaggtctgttgttactgtctttgatattcggtagttgatattgtgttgcgggaggtaattccgattggattaactcaccatccttcacttgccaatttgttatgacatttgttgttggatcacctatgatgtcttgtttccaagggtaatctatatcctttctgatggcataagcatgaaaccaataaaagaaaagga

SEQ ID NO: 33852 - DNA, 472 bp, Glycine max
  unsure (1)..(472): unsure at all n locations
acgtggagggtgtcgccattgtcaatgacgagtagcattctgacctagctgagagaagagtgtgccgccattgtcaatggcgagacagctgatgtggacgctgtcttgctgctcccactggcgagaagcatgtngtgtcactacttccaatggcgagaagtcttccacgtaagcaatgccgccattgcttcctgcgagacaccttcacgtcatgcacagtgcagttctgaagatgccacaattctgaagatgccacaattctgaagatggtagtgtaggcttgcagtgtttanggttagggttngcagtgttctcgaaaggctatgattatttgcaggtgaacgttaagcttttgaacgttgcttgtttacgttttcacctataaaaaaatgctcatcagcgtaaatggatgtacatttctccttcaagtngctgagctctcctntctctttcttctgagtgngagcttctt

SEQ ID NO: 33853 - DNA, 308 bp, Glycine max
agcttgtatcaagtttccactttttgtttggcctatccttcatggtgagataaccaatcctttaacccaatagtttaaccacaaaccatcttgccatggtgcacaaattaaataccatcaaccacgaagtcaatattaaaaaaaatctaagtcccacaactaaaaataaaatcaaattagagtatataagtgaggaataatcctcccccttgaactaacttttaagattgagttagacctaaactcacattataaaaatctaatatctatcaccaccattagtttcatgtgattttcatacttataga

SEQ ID NO: 33854 - DNA, 501 bp, Glycine max
  unsure (1)..(501): unsure at all n locations
gcagactagcctactcgataattgcggtctgatgagaacagggactactcagaccaaagtagcatgtgctaccttccttctattcactcaagtgtttaaagatgtaaaaatgtatttgcattattaaaaaagttggttaaatttagatattagtatntaaattgtcaatagttataatatttttttaaaaattatccttaatattattagaatttattcattttttttaatctctataagaaagaaagagacaattcagaaacgttcaattataaattaaaataaataaggatatnttaattcaaaatcaattaatgcacaacataattgaaataaaatcttatgaaaacaatntattttttccaaattatttcttataaatagggacacatgaagtagtttactcccttgaaaatactaaaatngacctgagtggctttttcttacaacaatcttnngttttgaatataatttattttgtaagatgatcgaatattaaat

SEQ ID NO: 33855 - DNA, 304 bp, Glycine max
agcttaactgtttccttttttctaataactaattatcacaattttgttcacaaaaatgactaaaaacagttatttccaattaagataattgaaaggaatggaatgccatattattttatatttttattgtttatctcttttcacacctaacgcatgatgtcaatatattttcttcttttttgttgttaatccggtatatcttttcttctataatatcagttttaataatgttttaaataaagtcggattgccgtagcaagcaaaaaaataaaataaaattttattacatataaaatatatatcg

SEQ ID NO: 33856 - DNA, 443 bp, Glycine max
gagactctgggtaggatcaggcccattgttagatatgcgatcatttattaatctccaattcgaagtatcatttctgttttaagctggcaaattaagacatgtttctgactagcgattttctttcgtgaactttcagctggccatggaaacatcaccgctagagttgattcggacaaagtaagacgaattgattgtgcggtttctcacaatatgacttgatttcaatatggaacatggctctactcatgcaacatttgatttctcaagtttcatgtaatgtaactcgatctcacacttgcacatttgttccagatgattacagcagcaatgtgttgacaaacatttcttagtctctcactcaaactaagcgattcactctgatagacaatgctagttatttaaaaaatcatcacggggtggatctagaacgctactcattatat

SEQ ID NO: 33857 - DNA, 303 bp, Glycine max
agcttcttgtacgggatatttcgacattattatttaattataggggaattgtacaatacaagtcatgcactactaacagtaataagaactaacacttatcacgggcaattaaaagcactctaaacaaagccatcagagctccatcctagagaagaaagaatttagcatcaaaaggtatatttagctcctccaagcttttttaataaatgtatatattcattttgttctcttaaattaaatacaattaattcattcaatttcacttttccgtaacatgaatgatctgatccagcatcattctca

SEQ ID NO: 33858 - DNA, 282 bp, Glycine max
tttttttggcctatccttcatggggagataaccaatcctttaacccaatagttaaccacaaaccatcttgccatggtgcacaaattaaataccatcaaccacgaagtcaatattaaaaaaaatctaagtcccacaactaaaaataaaaacaaattagagtatataagtgaggaataatcctcccccttgaactaacttttaagattgagttagacctaaactcacattataaaaatctaatatctatcaccaccattagtttcatgtgattttcatacttat

SEQ ID NO: 33859 - DNA, 287 bp, Glycine max
agcttcttgtacgggatatttcttcttattatttaattataggggaattgtacaatacaagtcatgcactactaacagtaataagaactaacacttatcacgggcaattaaaagcactctaaacaaagccatcagagctccatcctagagaagaaagaatttagcatcaaaaggtatatttagctcctccaagcttttttaataaatgtatatattcattttgttctcttaaattaaatacaattaattcattcaatttcacttttccgtaacatgaatgatctgat

SEQ ID NO: 33860 - DNA, 433 bp, Glycine max
  unsure (1)..(433): unsure at all n locations
gagaaattgtccaatgatcacaatagtgctgaagaaattcattatcctaatgatgtcgactctttgatgganactactcaaactatgaagcttatgaaaccttcatagaagagctctcgtgactganaatgtgtccaaagttcgagatactttaatgaaagactttcacacttcggatggcaaaattgaagttctacaataagagttaaaagaactcaatgaacttcacgactaccttcatgaagaaaggtatgatctctagaaagaatatgcacaagtgatgcatgaaatatgtttggctcacacaagggcaagcacaccttacacaatagtgacagtggacttggaagttagatgttgaccatgaacccatggattcccattatcacgttataaattagtgtgagcgattaaaacagattatatattttat

SEQ ID NO: 33861 - DNA, 311 bp, Glycine max
  unsure (1)..(311): unsure at all n locations
tgctctcttatgcaatgacgatttataagtctcattgtctgtcattatctactgctggactatacttacctaacccattgtttagtcatggaattatcaatcaaagaatggattaaaaagtttaatacatgatataaacaaaacaagctngacctctaccaccaatgtagatttcaaagaggcttttccaagcctggtaaggtatatatataatatctatatactgaccattttccttaagcattataatgtagtcactactaatttagtcacactcttatatgcagcttcatctcatatgatgctatact

SEQ ID NO: 33862 - DNA, 242 bp, Glycine max
atgtcagtcatgaagaggattcctgtgtctgattagcatttgagaacttttctacatccagatccgtcgaattaagttacaacaaatatggtcatgacagtcgacacttgtagatattgtaacagatcacgttcaccaaaagattgtatctgtccatgttgtatcacagctgcagaacacacttgctagataagttatgtctgttagataactgagagcattgactctgaacctggtgagct

SEQ ID NO: 33863 - DNA, 563 bp, Glycine max
  unsure (1)..(563): unsure at all n locations
cggatgagacgtgaccccttatgatcacatcgtatgccaacttatagactatgatctctgtggggaaggattacctatttatgatctacattatttttatggggatatggatcttatacaaatatttctttgtttacttattcactatactcctcgttactgtataatcaatgcaaatggtgaggaaaggtgattgtcttgcacatgcaatcacatgtatggttggagcacaacaaatgatgctgccgaaggttgtcanagggattatgctgcatgcaattgccaaattaacatgagatatacttgatatattatgatatgattacatggattgctgagaactttaacgagagagagatggaatatatattttgtgtgtttgtctgtacaataactgatcattgacaaagtatttattattgcatgcaacggcattgaagattgcacatctctttttgagcttagatagacttcattcttgtgattagtgacaggtgacttgatataacagataattgatctataagccttgaagttgttcctgcttagtcaaagtatacacg

SEQ ID NO: 33864 - DNA, 421 bp, Glycine max
agtgggtcactctcaatagagatggttgaataataaattacaaatttctcactcttgagattaagctttagtttctctcactagaatccttcaacttgtattcaagatgctcttcaaacatgtcttaaagctctatggaagaccattgaaatgggctctacccaactgaaatacttctggaacaagtagacaaacatgacaactatcatgaaatgacagctcgcacaacattctaagacagacattctgaggaacatcttttataatatttttgaagcatctttagaatagtcattctgatgttagctgagaaagaatatatacttgtagtagattctattgatgaatatcaactaatatgcctttctatagtaatgcagcttcatcaatcataacacatcttcacagcacagagcattat

SEQ ID NO: 33865 - DNA, 355 bp, Glycine max
  unsure (1)..(355): unsure at all n locations
acgagatattcaacaccaacactacacccaanacacactcttttttgaaaaganaaaaacaactttaattaaataaaataaaataaaatctgcttttgtttatattttttttattttttgtgtgtgagagagcttgtattttgtgtttgatttctgtttgtgggttttgcttgtattttttgtggagacaaccctattgatgactctagttgccattacacaacacaaaatccaacagaactacagtgttcataattttttctcaacataaattctacaagctctatctagctgctgctgctgttgttcttgtgctcgtcctcgtctcactcccaaatcccaattctaaacccca

SEQ ID NO: 33866 - DNA, 430 bp, Glycine max
  unsure (1)..(430): unsure at all n locations
agcttgccacccagctcgcccaggcgagcagggttgcttcctctagaagcaacagccttctggaggaatcttctggagggcccaagtgggcctggttgctatttgcacccccatttttactaagtacaccccctgcctttttttggtgattcttttttcgtaaagttacggaaacttacgaatttcgtaacgatactggttntctttccgtaatgttacggaaccttgtggattacataatcatcccctttttgacttatggaatattacggaacctcactaattgtgcaacgatgcttccatttgatttccggtgtgtcacggaaccttacggattgtgcatcaatattttcttttgttttccggcatgtcccggaatntcacatattgcctaatgatgggtgccaagcacctcacaaggaccaaacaa

SEQ ID NO: 33867 - DNA, 345 bp, Glycine max
  unsure (1)..(345): unsure at all n locations
gctggagtggcgctagcggttgtcattcttcaactttcttcagggcttttcttctagttttgcatcaattntcttctaaagcaattgaaatcttcttattttgacttctgctaataaanaattgcaaagatgttaatttattcattatctcattaaaaacaatagtaaagtgaagaaattacaatcattattagccaaaattgactatcacattaaactcatatctcgtagttattagatctcttacaaacatgcgagatagagaggattagagggggttggtctcacaacaatgtggggagagttctgtagaagcaaagcttcatgttgaatcaagattgattc

SEQ ID NO: 33868 - DNA, 384 bp, Glycine max
  unsure (1)..(384): unsure at all n locations
ctctcacagttgtctcgaaggacaacagtctattttttagatttgtggaattgngntatcttaactnttatttctttatattatgtgaggtcgacaaaagcggggctcttgctcctacgtaccctccatcaaagaggaaatcagacctacgtagttcttccttatgcgtgaatcaagtggttcttttttacttgagaggtgatcnatttaaggcgttggaccttanaagtgatccattttacttggtaagatacagaaatgataaactttcaaaatcctatttttgtggacgagctngactangcgagttgattntagccttagtttcactttagttattagtcaattcaattcagaatgagaaatcccaaagagaaaacgtct

SEQ ID NO: 33869 - DNA, 354 bp, Glycine max
  unsure (1)..(354): unsure at all n locations
ttattgtttaccacagagtggtacctggagatatgtcngcggggtcaggagaccttgtggacgtcaggtggggtgctattgcccaaaaccaagcttgaccaatcccgacccaacccgggcatagtcggtcagtgagaacctgtgatgtacctaaacaggcgagctcctggctgtcaacagataanaggaacaaagaccacaaagcanggaggcttgtggtggctggccagctgtgaattntgtgtgacatgtggattgtggcctctggtaatcgattaccaagggtgggtaatcgattacaaggcttanaaatgaagacaggaggctaagatggtctctgggtaatcgatacta

SEQ ID NO: 33870 - DNA, 402 bp, Glycine max
  unsure (1)..(402): unsure at all n locations
gcttgtaaaagacttctatacaaagttagtcttataaagcgactaacaacanaagtgttgcccttgctcctacgtatcctcaggtgcgatgaggaattcagacctacgtagttcttaaagtccgaaagtgtgtgtgttacatatgatttttggctcttgaaagaatgattntaattatgaacaaaagtcatttaaagcgttggaccttgaaacgacctcaagtgatgtttgatgaaaagtggagaaaatcattaaggtgttggaccttgaaacgatctcaatcgatattagatgaaatgaagaagtttatgagttggttttattttggttttgcttattaaccttcaatcttatttaaagataactcgcggcactaatgatcagttaagacttactttacaa

SEQ ID NO: 33871 - DNA, 326 bp, Glycine max
gaagaagagacaaatcactagagttttacactgattcggcaacaacccgtgcctacattcagtccccaagcgacctgcggtccttgagatgtctttcaaccttgtgaaaattcttttacaagcgaagatccacaaggggatgtaccctaccctcgttctctgtgaaaccctagtggatgtaccctccactacaactaatccacaagagatgtaccctctctagttctcagtcaaacccaagtagatgtaccctctacttgtaccacaaaggatgtaccctccaatgcgtgtagacaaagatctcatgatgttatacctttgatact

SEQ ID NO: 33872 - DNA, 383 bp, Glycine max
  unsure (1)..(383): unsure at all n locations
gcttcagattgtgcactataaggcaaagatctgngtggtggttggcagatgagcataaaccacagagtctggcgacaggtgcagatttctgattcatggcaagctgagttactaggttgaccaaagcatcaaattttcctttaagcttggtatctttagtagatgaagatgaatctgtggccacctaatggactcctctaacaaatatagcatcatttcttgcactgaattgttgggagttggaagccatcttctcaatcaaattcctagtctcagcaagagtcatatcaccaaaggctccaccactggcagcatcaatcatactcctctccatgttgctaagtccctcatagaaatactgcagaaagagttgctgagaaatc

SEQ ID NO: 33873 - DNA, 239 bp, Glycine max
  unsure (1)..(239): unsure at all n locations
gagagagagagctgtctgaaaagctatttggtcttaaataaaagggttctctctctttctanttatttatttaagcaatgccacatgtctccatttgagtggagcaaaaagggcccactttccctttttgactgtgacccatactcagccacaanagtgaaggaaaatctgatctttgaaacgctaaaatcctgcctcggtttgcgtgccatatctctggttccagttactcgcgtttc

SEQ ID NO: 33874 - DNA, 429 bp, Glycine max
  unsure (1)..(429): unsure at all n locations
gcttgcggattnggacttcaccggctgattgatcaaagcgggtctgaatagaggcatatttaatcatcccactcggacgaatgagaatactgtggcaaatgaagagggtgaatatgaacgagaaacccatactgtgactatcattcctacatggccaaacttcccaccaacccaacaatgtcattactcagccaataacaaacgttctccttacccaccaccccgttatccataaaggccatccctaaatcaaccacanagcctgtctaccgcacttccaatgacgaacaccacctttagcaaaaccaagaacaccaaccaagatatgatatgtgcagcgagaaagcctgtagaattcaccccaattccagtgtcctatgctgacttgctcccatatctactntgataatcaatgggagccataaccct

SEQ ID NO: 33875 - DNA, 351 bp, Glycine max
  unsure (1)..(351): unsure at all n locations
atatctacttgataattcaatggtagccataaccctagccaaggttcatcaacctccatttctccgagaatacgactcgaacgcaacgtgtgcttgtcacggagaagccccggcgcgttccattgagcatggtatggctctgaagcgtaaggtgcaaggtctaattgatgcgggctggctgaaattcgaggagaattgcgtgtaaatcctgacattgacaagagatgccacacatggcngcaatttgaaagactgtgttaggtgtccctaatgactcatcagggtttccaagtttatgccattatttgtaaccacagctacaatgttaaatgaaatggataaagntgatat

SEQ ID NO: 33876 - DNA, 455 bp, Glycine max
  unsure (1)..(455): unsure at all n locations
agctntgcagcaacanatgcagtagccataacatattcttcatttttaaacttatgttccccattgaggaattgaacaaggatgtcaatatgatatggtccaacataagaggcacatgtgtataggaatgaaaacaaacctgataaaaggatcccttgccatgttgacaagaataacaccttcgccagcttaagagtggtcacaatcctaacactaccacactctgactcaagtttgtttctaaaagttggaaaaaccccataagcactgtcatcagtagcaagaagtgggacgtcctgatgctctaatatcttctccttgcctagacttattaatggaccaatccatgagaaagtaagaatgctgataaaaatccagcattngaataacgggttaaantttcatttagtctactcttactggaatcagaattgtngcatacactagagtcacca

SEQ ID NO: 33877 - DNA, 337 bp, Glycine max
  unsure (1)..(337): unsure at all n locations
tcctttgnttcttcgcgcacaaatattcttacactacccatggttgagatgtgaccataacattgtaattcatattttttgttcttgagaaanttaatctaattattggagatatataanattctgttctaaaatattataatacttttcctttaatatgagtcgattagaaatgttattgtacatcaattatttattttggttctcaatcttaaagtatataatgtgagaagtctaactcaatttcaaaggctaacaaaagtagacttgatgaggactaacggaagcgtgatcccatgattagaacgggctttgatatcattttaaagtgtataat

SEQ ID NO: 33878 - DNA, 313 bp, Glycine max
  unsure (1)..(313): unsure at all n locations
tgtgtcttatgctgtgattggngctctancttcattgtgttccaatttggataagcttcaagagaagatgctgcataagattactggtaaaggggtatgagtgggtgatagaacacatggtcatcttggcgtataattatgatgactatgaatttcaatctccggatggaggtgctagtgattgcgtttggggagctcangataatacctgagagcttctaccaaacatcattatccatactaccgaggccgaagctgacgcttcttcaagtcttaattacacccgaatgacaatgttaagatcatggtttgg

SEQ ID NO: 33879 - DNA, 371 bp, Glycine max
tctcgtcatattatgccttgtctgactgcttatggccaagagaactgattcaaaggacaccattgatggagactattcatcaccatccggtgatatttccgagacacaaaataacccactatgcataaaatgtgtctaacttatcgcaagagtaaatactttggttgctaatatttccttccctcaagctaggaagacattaatattatggctcaacgttgtatgtgaagctaaacaaaacctgcactacccctagtattagtaaggaaccaaagctagcatctttcctttacaaagttatcaaggccaatcccgatccgagtagaaataatgaacagattgacagccatgtgcatgtgatggcatacatc

SEQ ID NO: 33880 - DNA, 326 bp, Glycine max
  unsure (1)..(326): unsure at all n locations
ttaagcgagactgagggaatatgtgggccgtcatcgatgagtgcaaagagaagctaaatctagcggcgactcatgagcaaaggctagaggatgagtacgccaagatatcancagaaagggaagcaagggaaagggtaattgattcattgcaccaagaggcaacaatgtggatggaccgattngctcttactttggacaggagtcaagaactctcccgattgctagccaaggccaaagcaatggcggacacctacttctgccncgaggagatccacggacttctcagctattgtcagcatatgatagacttaatggaccatatgatt

SEQ ID NO: 33881 - DNA, 583 bp, Glycine max
  unsure (1)..(583): unsure at all n locations
ttgancccgtgttgtcgcactgaancctgatcgcatctattngcgcactatgaatactaagcttcacctgaggagacggccattcctgtgttgagaagataacgacaatgcgtacaagaatgacttgcctagtgagtataatgtaagtgccactttcaatgtgtctgatctatctcttttngatgcagatggacgagccttggatttgaggacaaatccttcttcaacatggacggagtgatgaggacataaccaagggcaaggaccatgaaccaacttgaatgtcccatgaccagatgcagacttaaacaagcccaacacgtcatatagacaaggctggtcattagtatagctgtcattgatgatgattganagcccaagtggagaaagatgaacttccatatccttctgcactgctaaagaaatagaccttgctcatcgccaatctacctagatgtctcagaatacaagttttcatctacatctctactgatgcgatttaagaccatacgctgtgacgctttgaatttattatatcatgctatcacatacacaacttctagaacacatgccttgtcatact

SEQ ID NO: 33882 - DNA, 198 bp, Glycine max
atcctctgagtcacctgctgcatgcaagcttgaagctttaaaggttctccggagtccaattgttacggtttcttcccaattatgcgatgcccagagacatatgttgatttccgaaactcgatctctccctattgattgagagttagactcttcaaatctctcgagaaaaatgcttggttatattgcctaatgcatggc

SEQ ID NO: 33883 - DNA, 337 bp, Glycine max
  unsure (1)..(337): unsure at all n locations
aggttatgaagtatttcggactatgtgcatccatgtctggacaacatatgtctgtatgtatgatttctaataaattagaactcctctatgcaccctctttagacttggtagtttgcttacccttaatgcaatctacacaagtctcataatcagcgatagtcanagtactaagtactccttcatttactaatcgcttgattctttcaatagagatatgtcctaatctccggtgccacaacatagaggattcttcattcacaatacatcgttttaacccaacagaaacgtgcatagtaagtagcgtcatttgctaatcaatcgaataaagaccatcaac

SEQ ID NO: 33884 - DNA, 470 bp, Glycine max
  unsure (1)..(470): unsure at all n locations
tacccatcacatgtggtactatgtggcggtcgggcgatggtgcacaacaagttnttccacatccacaatgcgcgcataaacccaccatcccctgttgcccacctccaactgagctcacgtactcccacgtagcccatatcctcgtttctctcaacaccgggttcccatcaatcctgccaagcttccacaatatccaagcaaaacaacattcacacagcacaagctatcacagccaagcagaacagagcaaaggcagaaaactctgccaaaaacaccaaccacaaatcacagctnttcccactcaaagaccccagtaacaattccttcgatccaattcgtaaacgcgtggatcgactccaaaattctactggaagtctatagtgcataagcctacattntgaccgttgggatctactagcaaacatccagaactcattctacattactctttccacaaccagcaaatacat

SEQ ID NO: 33885 - DNA, 306 bp, Glycine max
aaacactggtgatgtgtgaactattattgtgaacatctctgtctgccacattgtatgtgccagccgaaatgccaagactctccatctttgcgcgagtgctatgaaagatatgtgcccgctcattgcacatgtgctagcaacagcgttctatccagagccatatcacaatatgactgacactgaccaactaacgcggccatacagtacttctaacattggactgatgacagtaccaaaatagtctaccaagtgcatgctgtcccgcagcgacttacttgcgataaatgtattaccgcatccacatcc

SEQ ID NO: 33886 - DNA, 455 bp, Glycine max
  unsure (1)..(455): unsure at all n locations
tcaataaacacaagtttgtgtttattcagaaaattatagtttatctcttttatcttagagagagtgattctcctaaattcttgagtgattcaagaacaccctggctgtatcaaaggactntcacaacctttgtgtgttgccctcgctggaaagagagattctttccttcctttcatcttcaaccctggtctttcaaaccacaattccagaagatccacttatgcccagaattatctcgtggccataactcccgttttacgcactcaaattaagtgattcttgagcctatattgaatctcaagacgagacatttcacctcgttntggaatcacctcatgtggagccctgtagcttgagttctcgccatttctantattttgtccaggcaccacttaaacctacgtntctcatctcattattccattttatgccangaacaccttattaagaaccac

SEQ ID NO: 33887 - DNA, 577 bp, Glycine max
  unsure (1)..(577): unsure at all n locations
cgcanaccanatgctcaccactgctagaggagaagccttcggttatttcatataaacctcctcctctaaatcaccattaagaaagcatgttttcacatccatttgttgcaactcaaggtcaaaataagcaactaatgccaagataatacgaagagaatctttcttagatacaggagaaaaagtcattgtgtaatcgattccttctttttgagtaaatcctttancaacgagtcttgccttgtatctctcaatgttgcctaatgaattgtttntggtcttaaagacccatttacaaccaatggcctttgccctattatgcaactctacaaggttccaaactccattgctctgcatggaattcatctcatccttcatggaatcataccatannattgactctttacaactcatggcttaatcaaaatttttgagatcattntcaactccagtattatagtcaaattcttacaaatatacaatataataactaggaacaactaattntcttactctagtagatctccttaatggttcatcaacattntctttgtgatcatgttgntagcaggtngtgaat

SEQ ID NO: 33888 - DNA, 394 bp, Glycine max
  unsure (1)..(394): unsure at all n locations
tcacatcttcaatgattggtatctcaaagtttatacgggtagagatatgatgacattgtgcaagaaagatagttgtgattntagaaagttggacaaagagagctatgaagttaccagatgctgatcttgcagtacatcattcataactctcagagtgtggatccaagtgtcatatatttgtccagaaactatggaaagaaaggtacaggtacaggtcatatgttggctaattagatcttgaagaggaagtaagtattagttatcacttatgaaacaaatgaaaatattggttcgagtgattgtgtgcttaattatgtgtattctgatgaaaactcgtagttgcacatattcagatctctattgatctataagatgcttatgggtggtattctct

SEQ ID NO: 33889 - DNA, 297 bp, Glycine max
  unsure (1)..(297): unsure at all n locations
ctacctacctgtctgtcccatcaagcattcggaatatatatgtaaggctgatctgtcacaacatgcacacacttaattatcttttcactntgtttgttcacagctaattagctaatgctgttgacaccttctcaatatccaggaggaatggagaatatttacttcattctattttaggaacaagaattagaaagaatgnataagatttataattattaatcgtatatctaaatagcttatatgtttaaagtttaatctctaatttggtggagaaataaatggattaaaaaacgtgta

SEQ ID NO: 33890 - DNA, 231 bp, Glycine max
  unsure (1)..(231): unsure at all n locations
tcctctgagtctacctcccgcatgaagctttatccatggcttctatgggggagctcttctatactcatcttctncttgaagnggcgtctcctctctctcttccttctccattccgctgccatatatcttccaagaagcacaggaatccattgatgaagaagatcctacgcctacaagctccaatggagcttgcatcagatacacactctttttggctttgagatgccaaaa

SEQ ID NO: 33891 - DNA, 335 bp, Glycine max
  unsure (1)..(335): unsure at all n locations
atctgagcaattcgtgcatagtttatcacgtgtagggggatgtttccatctcttgaatcctgatcttgttatctttagaagctagacttcattgcatgttctttcgatgttacaaacttgtagctacttccttggctggatctgtgtaatatgctgtttctatagaaattatanggtaaaaatgagttccttgggtgtcaaaactcatggttagccttaaatttcacctaaattagagttntctagtaaaagttatgtacaaaacaagtttaagggaagttcttgggattaaatctatcacgacaataaagtggttgttatggccatatagacta

SEQ ID NO: 33892 - DNA, 389 bp, Glycine max
gctagtctcagcgtttatgcaagacggttaccaacttgctagctatcatcgccaagtaccaagaagagttatgtctatccgcggcccacgagcataggattgcggacgaatatgcccaagtatacgcggaaaaagaggctagaggaaaggtgatcgactctgtacaccaagaggcaaccatgtggatggatcggtttgctcttaccttgaacgggagtcaagaacttccccgattgttagccaaggccaaggcgatggcagacacctactccgcccccgaagagattcatgggcttctcggctattgtcagcatatgatagacttaatggcccacataattagaaatcgttaggaaacttgtatggtctctcagaccttgactagatac

SEQ ID NO: 33893 - DNA, 585 bp, Glycine max
  unsure (1)..(585): unsure at all n locations
cccatgaccttatggcgcctcttangcgcaccttgatgctcagcttcattgtatagcggntatcgaccggattatattgtgtacttttatgtgaagcactagagtcatcgccggtgtacgttccagttcgaaatagcaagtatctagaggttatgagcggtaacaaagaaatgactccgaatagagttgtgaactggccattcacgactttatattgaggatcttccttctaaacctacttattgtgaaaagagagagatctcataaggacaaacaagaaaacaatttaccatggtttatgtcagntagatcatttctattaaaccacgcattaatttatggacgccacatgaaccacctcacagaacaacatgcgttgtcgacgcatttgctgcctccatgatagtgagtctgctgctctatgacaaggctcacaagtgctacataatcttcacgcatccttgaggatgtgggccatagaaatcgatcaacaccttgcgagctgctttgatgcaagatgccacttgtgcgagatgatnattatagatgagtatctatgggtcgatgcattctataactgtcccg

SEQ ID NO: 33894 - DNA, 372 bp, Glycine max
  unsure (1)..(372): unsure at all n locations
agcttccattgttcaatatcgagtgtctcgatatattatgcgcctgaatcggacctccgaatganaagttatgaccatctgaatttctcgagagctaccttcgttcaatttcgagcgtctcgatatattatgcgcctgaatcggacctccgagtgataagttatgaccatttgaatttctcgagagcttccgatgttcatattcgagcgtcttgatatattatgcgactgaatctaacctccgagtgaaaagatatgaccatatgaatttctcgagagcttccgttgttcaattatgagcgtctctatctgtgatgcgcctaaatcagacatccgagtgaacagttatgaccatgtgatattctcgagagct

SEQ ID NO: 33895 - DNA, 583 bp, Glycine max
  unsure (1)..(583): unsure at all n locations
ctgaaccccttgatttgatcgcaatcttatangctacactatcgtatactcaagcctagccctagangngatggaccttatcaggttttggagaagatcaataactatgcctataggttggacctcccagaagagtatggagtcagcaccacttttaacatttctgatttaactccttttgcaggtggagctgatattgacgaggaggaactaacagattttaggtcaaatcctcttcaacgggaaggggatgatgcaatcctccctacgaagggaccaatcactagaaccatgagcaagaggctccaagaagattgggctagagctgctgaagaaggacttatggttctcatgaaccttanggtagatgtctgagcccatgggccaatgatgggtccaatatctttgacatatagaacangatgtatcatatatggccttgatatatgcttcatactgacgatgggacctagaatatcgatattaaccatgtatttcggcacagactagttatatatggttttttggntaacatcactatggaatttattttctgtccgacaaaattagttgaagtcaaccg

SEQ ID NO: 33896 - DNA, 386 bp, Glycine max
  unsure (1)..(386): unsure at all n locations
ttcattcaatttattcttagaaatgtgacctaagcacttatgccataatgctcctgagtttgtattatcaattctacgcttagtaccacacaattatgcattaaaggattcaccaccggaagctacgttatcaaatatagatcatcacaagtcaagagtgaactagttccaacaatatttgaattaaaagacaacctatacacattgtttccaaatgaaaacaaataacctaatttgtccaaataagagactgaaaccaaattctgtctatatgacggtacaacaagagtgtctctcaaatccaaataaaaaccagtacataataataatctaaaatgccctatangcttctccttcaccaatntatcatctctaacatatattca

SEQ ID NO: 33897 - DNA, 330 bp, Glycine max
  unsure (1)..(330): unsure at all n locations
gacttgtaatacatcanaacatgaataaaggtaacaatttactattacatgaagaatacaataatgtggccacaatataacaataaaatgaacaatacatgtggggaaacttgtagaacggacatcaacaaagcatggtgaaggccttctatctaggacatctctgcagaacaaacatgaacatttaagcaattaaaagagaattaataaacaaacctgtagttaggtttgtgggacagcgataacagcctttattgtgcttcacttatcatttttgccttctttgttgtctcgaccatcatgcaaccacataacaacgtgtatgtaatg

SEQ ID NO: 33898 - DNA, 448 bp, Glycine max
  unsure (1)..(448): unsure at all n locations
gcttctcgacacgggacaacctctntcacccactattctgctcagagcttaagggtcttatgtactgtccaggacccaccaatcctacccacaaatcatcccttacccactcatagccagcgacggtaggggtggacgacggtgacccaacactcatgctatgtcgaacggtgggagacgacctcacgtttccacctccaccaacctacacccctgaaagcagaaagatggagggtcacagtaatggagactggctccctggaagtagcataaggtcatgcccttccgtgaaggcgagaagtgcctctactatttttgtgtgaagtcttcaccttgaagaggactccccatgagaagcacctcggtgagtatccttaaacgacaaatcgtctattgagatgatctcttgatccatgattgggtgctcaatgtccccagaatcactact

SEQ ID NO: 33899 - DNA, 383 bp, Glycine max
  unsure (1)..(383): unsure at all n locations
ttcgtatatgtacccttcgaaactaaggatcacattataaataaaggatctacatttgataaagtcactgtatacaagactaatcaaatcagaagagcctctcatagtatagtagaaaggagtttagtgatgattttgtagattacaagctattggtctgcggtatgggaatttagtaggatgaaaatcacaactgtatccttgatttacgatagatagcaacttggtttgaagtatactcgcactgtgggtattacatttcctcaaatgaatcccaactcattttgtagaaaaggcaactattcaattatgtttggaagttacagctcacggtttaccgcaaccttntaatcaacngtttaaattaanttattttagttttg

SEQ ID NO: 33900 - DNA, 427 bp, Glycine max
  unsure (1)..(427): unsure at all n locations
agctngtcgctggagctgagccatcaactgtcctatctccttanagctggtgacatctaagcccttaatcttgacttgatagaatctctttccgatttgatttgtccccatcatttacctaaaaaggggtgaatcaaggctctgatatgaatgatgcaatgcacatgcataaagcgaaaataaacacaagtggtagattacatattcgagaaccgaaaagatccatctttntaatactatgctctaggcattgtggcgccccaacgtatgcattaaaaagtgacgcgttactctaaagagacaagatatcactagatatacaacacaactataatttatgtgctattcgcagaagaatgcatgagaacaaatggtacagagcgtgcttgctccatgcctctatttggggacctataggataatatct

SEQ ID NO: 33901 - DNA, 363 bp, Glycine max
  unsure (1)..(363): unsure at all n locations
atggattctcggcatgtcagatggctgccaagagaacaggtccatgttcttgtataggacatcaatgatgtgcttgtgttcaaggctagtgaggtccttacatgcagcttgacaagctcttcgatgggcttttggcctctgtcagaagtgttctcccacaaatctatatcaaattcatcgtccaggcttggttggtaaacaatgaaggctcggattggaagccctntgttcatgacttgagtaccttcaaccgctgtagggtgaggcttggcaagctccctagtgggaggatagggtgttaccttcacgctctcagcatagcattattgtgcttgcttttgatcagccttgatggtcacaatc

SEQ ID NO: 33902 - DNA, 228 bp, Glycine max
  unsure (1)..(228): unsure at all n locations
gatagcccaaggactacagtacttgcataagggatgcaacacttgagttgtacattttgacatagagccaatacattcttttggatgagaagctctaccccaagatatctgattatgggctagcacagccttgtgctacaaatgatagtattatttccaggtctggtgccagaggaacattanggtatgtagctccagaacaattggcagaatttcacacaaatctga

SEQ ID NO: 33903 - DNA, 273 bp, Glycine max
  unsure (1)..(273): unsure at all n locations
aatgtgcagtgaaattattagatagaatacactgatttagaagaatgtgaaaagtacttgtgattctgtgtaactaactgataagatgaagccaagcacatgacaacctatttacatttacgtctgcaggggctagctggctttacacagtatatgggaacctcctgcatatatgcatgttctgcattnttcaaatttagttttgccactttgtgcaattgaattgagttcaaacanantacccatgtgagctcttggtctcttatgcttaat

SEQ ID NO: 33904 - DNA, 575 bp, Glycine max
  unsure (1)..(575): unsure at all n locations
attganacccttcttgacctcctttttnnnttttgaatgccctgctattangcgcactatagantactcaagctcgaatctgggtagacatgatngatacatgnattgngacttgtatgtaatgattgngcaagaatggatgagaggaagtgtgattntcgaaatctgcacttatgcnagaattttgctgtgaaattgtgcagcagaattttgcacaagtgcagaanaatgctcgtgtgtggttggctgtggaaagtctagtgcagaatgagttctcaatggttgctagtagatcccaacggtcaaaatgtaggcttatgcactatagacttccagtaaaatnttggagtcgatccaacggttaacgaattggatcgaaggaattttactgtggtctntaagtgagaaaacctgtgattttggtgatgtgttgacagagtatctgccttgcttgtatgctggatggatagctgcgctgtgaatgtctancattatgttgtacatgnaggacttgtgcccttaatctagatcagtattcctatgagctactatactggcggtccgagtgtggtgcn

SEQ ID NO: 33905 - DNA, 441 bp, Glycine max
  unsure (1)..(441): unsure at all n locations
agctagtataactcttanagaanaagattccaagtcatgtcttgagattgagacaagtgctagagaaagagctattcttctcaagaacgttcagaagttgaanaacaaactgtaagatcttcaaaaggatctgaagaagctaaatgaacttcatgattatcaaaaggaagaaagatatgatctatggagggaatcgcacgagcacacaaagattatgaagatctcaaaatgaataaacataatctttgggtggaatgtgaagaatacaagtgatgtgtgaaattcttggatgataagcttttgaagaatcaagaatttaagggtcaacctctagatgttgtcaaacttcatgagggaaatagaaccttaacaactacattttcaaaagttgtcaatggaatagataatcttaacaaactattaggatactgtacaattcct

SEQ ID NO: 33906 - DNA, 308 bp, Glycine max
  unsure (1)..(308): unsure at all n locations
aagatcgaagaacgatgaagaactaatgaagaacgtctaagaacggttgaaacctttgcgagattcctcacggtaaacgttacggaaacgtttcggaagcgcctcggcttagaattttttcacggaaacaatttttccaagcaaattcganagagagagaagtgcctaagggggctggaccttttcttcttgcattcctcccctatntatagcaaaataggggaggtggttgccgcccagctcgcccaggcgagctcagctcgcccaggcgagcatggttgcttcctccagaagcaaccgccttctgg

SEQ ID NO: 33907 - DNA, 479 bp, Glycine max
  unsure (1)..(479): unsure at all n locations
ttttatataaagaaacctaactcataaatgagtatcaacgttattgaattactactatgtgtgtggttggattatctntgtgaatacaagttttagatgcaaaagaagaatgaaatagagaacaatataagcaaaaaataaaaaaaattcttctggaaaacaaaattacaatataaactcttcaaaaaaattcactcattgaaaaacattgtagatgtgtagtcgtataattcttatttaaagaccaacaacatgaagagtacctattcaccaacactaatgaacttcaaagtgacctcttcaaatgacaaaatataattgattagcaattcataaacaaaaccatctaaaatattcattggactatctttagggagtgatgtttcttanatgagaaagttgtgattgttttacatatggatctccatgttggaagaagattcattaggaaaatatgtataatgatatctatacattat

SEQ ID NO: 33908 - DNA, 319 bp, Glycine max
  unsure (1)..(319): unsure at all n locations
taatcttcctacctctacatgcatgatgtacatatgataaaatggagactaagatgcaacaatcaataaaaattccactcaaagagttgggcatgtaaaaagacaaaacttcttcaagttccaaagcttagtcttcatgttgcttcccctatctctaacatccttaatttcanaaaagtaaaactgatggtggcagtggaatcacaaaaacatgttaggatgattttggctntccaaatgcctgatttattntaattagctatgctaggatgatattatcaatgatgcatttctatattcagattctataatcttattc

SEQ ID NO: 33909 - DNA, 380 bp, Glycine max
  unsure (1)..(380): unsure at all n locations
tcttcgcgccgcaataaatgcgctagtctctcctttctattcatcccatgtganattattatcaaaaacaccagatcctctaattcaagtctgcaccaagtnttcctgagataatgtctggtcgtggaaagggtggaatgggtttgggaaagggatgtgcctagaggcacatgaagggtcttctcgacaacattcanggcattacgaaacctgcgattcgtacgttagcgagaagaggtggcgtgaagaggatcagtggttcgatctaccaggaaaccagaggggttctgaagatattcttggagaacgtgattcgcgatgctgtgacttataccgagcacgctacgaggacgacggctactgccatggatgttgtttat

SEQ ID NO: 33910 - DNA, 406 bp, Glycine max
  unsure (1)..(406): unsure at all n locations
acgcgccttccncaatcttattctctatagagaactntgctgttgccttgtaaatctcctcanaggtgaagtttcccattccaagcttactacttgcagtgccagatgatgcagagcaatgagaaaacaccctttttgatgaactcttggaactatcagatgatacatctgtggaagctgcaaattccaataaatnttatacatgattgtgcaccaagatgaatagccacaaaagcatttatattatacataaaggctatcatatacattaacaaacacgatcaaatcatttaacataatcaattggcaggagaagaaaaaacatcattattcattaaacttacatgataccnctctaactgtgtgtgtattctttctgtcatcactatcagcagcttctgagtct

SEQ ID NO: 33911 - DNA, 428 bp, Glycine max
  unsure (1)..(428): unsure at all n locations
tcctcggggtattcagagttgcaactattttcttgtntgtgcctcgaaacaaccgtgaattaattctttcttggacgactggtttttgagcaatttcaagccattatgtcaaatcataaccattaacaagtggtcaaagctggcgtgaattggatcagtctttacactcttgatcattaatcttgaattgacgtacgcaaatctaacccaaatattggatatgacacggagatcagcagtgaaaggtttattacccttcacttcccaattctaattctgccattgcaacgatgtatgatcatatttaccggcgcagtcacaaatgtngactttcctaactnctcctncaaagcgagtgtcctgattagcctagcttaactaaanaatcaacattagtcgcttttgcagtcactcacttgaattattta

SEQ ID NO: 33912 - DNA, 374 bp, Glycine max
  unsure (1)..(374): unsure at all n locations
gcttctcttaagtattaaggcanactcaagaccatagttaaggtagaacaactatatgtcaattgattcacatgctaagcagtgtatgaaatggtattttggatcatcatgttattaatacaaagtattcaccgattttgttggtcactgattttcactgcaaaaaagcattgaaaaaataaaattaaggaggagctgcaacttgagttcattctcaatgtacgcattgagaaattgggagtgccaaagacaaaaggagaaaggtttgttgatttggggattgtgtatgatctgtgacttgtgattgtgagaaccaggaggaagcaatttctggttgtttttaactgcaaagcaatttctggctggtttttaac

SEQ ID NO: 33913 - DNA, 368 bp, Glycine max
  unsure (1)..(368): unsure at all n locations
tcagttatgaggcagaggaagtattagctaacatgttaaattatgcaagtggggtcattctgccctctaaatgttcctttatccacttcattcaagacatttacactacagtttttgtttttatcggcatgttcactacaggtgacccatggatcatanaagtaggatgtaaagcacgctatgttcattctcttggccctgaataattaaggcataccctcatggttatacagactctaggtttatctcactcaaaggaatgtagattgcctagcaatgacaggttcattgactagagagctgcgtatnttcttggttaaatattaacatttatgctaatcaatcactgattatcaagctagaagtta

SEQ ID NO: 33914 - DNA, 481 bp, Glycine max
  unsure (1)..(481): unsure at all n locations
gtaactntatgggatgcagtccatataggtcaaacatattcctagtagacaattatctgtgtctcaccttcatatagacatctatatctgggtcaggtttaatatttgcttctttctctcttctggacacctctgctagcaaatctgcagaatgtaaaataattttggttaaaacttgatattgcatatgaaatttttgcacggtatancaaatgcaatgctgtgggctaaccataacgagctccaactccttggacccgtgcggagaaggccaaggtntctctaactgtcatttctccaatatgaagatcatattgactgacataagcagcagttctgtggggacaaactcattcatcccatgaccattataagtcacctntccagtgaactgatcaataagtcaaaccttaatagctgcatatccanaactgganactacgagccaagcatgataacatcatttaacaattaaatatat

SEQ ID NO: 33915 - DNA, 459 bp, Glycine max
  unsure (1)..(459): unsure at all n locations
tatgcatcttcatcttttctatatacaaaagcatgtggttctagtaatggcatccaatattactattcatgtttccacttactcacaccccttagtttctaactaatcctataactcatcatcctcaagacatgagaagtgcatcacgtatacggcaactggcagttatttcacacaataacatgcaaactccatttgaatgagtaccagttaacatcccatagagcgaacttattcaaaaacttcagaaaatctagagtctctatactttccccttttagttctgcatgtacatatacacttcaactacaactataataaagaggttcagcacanaattccatcatctttgcttccagttccagactcatattgcacccacaaagacagaattagttaccaactttttaaacatatcctatatataaccgagtataatcctccttgataaatcactca

SEQ ID NO: 33916 - DNA, 596 bp, Glycine max
  unsure (1)..(596): unsure at all n locations
ccgcccattgatcgcagttgattgagcgccagtctattatgcgacactctcgaatactcaagctcgtcnattctcttgtggagctcaggatcagaatgtggagcaacctgtggtggagcatgagcataatcataatatggtgatggaacaagcggcggaggatcatgtgaacggaacgtgggcggtccttggtgctgctgctgctgaagaacaacatgatgcggtggaggggcatgagggtgtaattgtggaagcggctgctgctgctgctgtagctgctgctgaanggcccgatgatagcggaactgttgcataagcnggggtgcatgaccatgaccatcaccatgacctgatggtataatacgatgaccgcgcattgatgaatgaaagttccgatgctggggatgaaatccatactgctgctgttgttgctaataacccatgtctctgtgctggcatatgcctactcgacgctctgctatatatggcctgcgtgtctttctcgctcacttagatgcttttatttagtaatgttctccacacaaagaacttactccttccttaggatttatcatgttgctgcatcatcataccct

SEQ ID NO: 33917 - DNA, 437 bp, Glycine max
  unsure (1)..(437): unsure at all n locations
agcttaagggtcttgctacttactagtgtgtaatgttactaattaaagaattaataagtaaagagttagttgagattgcattgaaaatcagaatataatgcactattatacttttcaatgaacaaatctctacttttgattaaatatttgttaatctttgcaaatagaaaaatgttcatcttttcgacacaacaaaaatgttcatttttagtccctaataaaaagtatatttcgttntgctcattcatttacggaaatgtgtcaagtatgcagggactattagggaacacattcgacacattnttataaatgacggataaaaagaagaataattttctaaagaactcaaaaagaaatttttttctatttgcagggactgaagatacagtttaatctttatgaataaaaatgaccacttttaaatgcttanaaatagc

SEQ ID NO: 33918 - DNA, 292 bp, Glycine max
  unsure (1)..(292): unsure at all n locations
cctctcatataatcatagcttttanggtatacattaatgggttacagatcttctatacaatatcagttaggaaaattacgttgaggttatgacaatggttgcgcctctatggtttagagatatcttgtgacatatgtaacattctattgttaccactagagttagattccttatatctagcagagggttctttgctcctccggttgtgctatagtgttgatattggactagcttctgagttgcgactgaggtttgagccatttttgtcaccattttttttattagagagaat

SEQ ID NO: 33919 - DNA, 524 bp, Glycine max
  unsure (1)..(524): unsure at all n locations
gtgaaatgtggctttgaacncngacctataagcgacctgcagctgaagctattntgaaatacatgtcagtttttaactanatatganncnccgagaanacacacgacgacaacatatgcataggcacacctattttattttgtagaatgccacactctcctatatgtgcgactatgatatatcttataagctccagttaacctcatcaaagttgctgagatatgttcgcttccacggaatatttatattatctgaaataggtcgcctacctatcatgttcttgattaaaacaaaacaagcgttatatctcaagaatgaactcctttcgatattaatatgattatgccgagaaaattagttcttaacaagatcgttttacatcaccagactaagccatgactattctgtcactaatcgtgaaaagatatgagacatgtagttccaaacaaaacttattacctagatgcatccttatctgaccactccataataaatttgctttgtaactacccactccatttgct

SEQ ID NO: 33920 - DNA, 491 bp, Glycine max
  unsure (1)..(491): unsure at all n locations
gctataagagatcatccnctagacaacattcttggttacatctcataaggggtaacttctagacgttctcttaaagatntatgcaataatatgacttctgtgtctatgattgaacctaagaatataaatgaagccataatagatgatcattggatagttgctatgcaagaataactaaatcagtttgaaagaaacaatgtgtgggaactagtagagaaacctgaaaactaccccatcataggaacaaaatgtgtatttatgaataagtcagatgaacatggcataatcattaggaataacgctagattagttgcaaaaggatataatcaagaagagagtaaagattatgaagaaacatatgcgtccagtgcaagattagtagccattagaatgctttagcttgtgcaccataatgacatttaactttatcaatggatgttacagtgctttctaatggctaatcaagagaagatatgtgaacaccccaggtt

SEQ ID NO: 33921 - DNA, 391 bp, Glycine max
  unsure (1)..(391): unsure at all n locations
gcttctccccaatttctataaatgggggagaagtgaagtataaaatggttcagccncttaggcacttctctctctctcgaaatagctgaggaanattagttccgtgaacaaaatccaagccgaggcgcttccgtaacgtttccgtgagtaattacgcaaagattctcgaccgttcttcaagattcatcgatcgttcttcgatttcttcagtcttcaacgggtaagtacctcaaaccaagcttttcaattcattctatgtacccgtggtggtccacattatgtttcatgtatttttattctcgttttcatttactttntatacccccttttgacgtgcttaagccatatatttaagtcatttctcgcttaatctnaaaataaaatatatttc

SEQ ID NO: 33922 - DNA, 576 bp, Glycine max
  unsure (1)..(576): unsure at all n locations
cgagccttgacgcattatgatcgcctcgaaaagcgaccctcantactcagctcactctcgcgttcaaacatattgtgaaacattagacattactgttgtttagacatatattactaatatgattaagaagtcttagctattatgacagcgacattaattgtgacatgtgttgatgcncatgtactctctggtttgcatactaatggtatgaatgatactgctacctgagaacatggtctgttatatgtggtgaacaataaatatcatgatatgcgaatactactgtgaattagctttgtggactacatgcatattatcattattgcatgaatgcttatgttagagagcgcatgtcatcactcatctcatggactaatgcgcctgtccctaaatagaatatgatggaatagattgataataatacatatgtnttgtgataaatatagagcnacgtacctatatgtctcatatgtcgccgttggtaatcctgaatagaaccacgataattattcaaatgtgtaaaatactacccattgcctcgacgtattgacatagcattggctcgtcctatgactt

SEQ ID NO: 33923 - DNA, 430 bp, Glycine max
cattttaatagcgcagagggcctctctatgtctgtgtctattaccttaactagtggtatatacatattaccattagaacataccttgtcatatgcatcattctaccagttatcggacaagcaacttcacatcgattgcaagctcatcaccgaactctaattaggatccccgacctaacggagagaaactattattgtacttttaaagacatgttcgtttagagaacaggatagctttggattgagagattctaaacatatggagatggatcacttatggtacgatagttctgaaaggccatttaaagtaatgtagcgttcatgggtggattatacttgcaaacgatgagatttgattcatcgatagacacatgaccgtctctatccaaagaataattatggatgaagacggctatttataacagctgtag

SEQ ID NO: 33924 - DNA, 472 bp, Glycine max
  unsure (1)..(472): unsure at all n locations
cgctcacactatcctatataagtgagctttattgagagccgtatgatgaggtgcgaaggatctgagatgcatacccttagaaaagcgatcctcctgcatgagcaccatcgtgtgttctatgtacgcacacaaacctgtgacgacattgaccattattctaccatcttagctcgaaccctaaatcttacataaggtcttacgtacatcccgcgtgcatagtgttgtattgaactactttcactccgactgtgttcgaacctattttcatcacttttcttacagcaacgaacattagaaccttctttctttactgtgcttcttctaacgcccatgtttaaatcaagacctaccatcatattgtaaatacaaacaacaaattgcatggacttccctcaatcctcgcctatcactaccactgcgccggcgcacanatccccccgacttatacacctcctgatggatcacactcccc

SEQ ID NO: 33925 - DNA, 276 bp, Glycine max
  unsure (1)..(276): unsure at all n locations
aatgttcagccctcctggtaattcgagaatcacttgaaattagtgaaaaaaattgtntccgtgaagaaaatccaagtcgaggcacttccgtaacgtttctggtgggtgatttgcgaagattttcgaccgttcttcgacgttcttcattcgntcttcggcgntcttcggtcttcaaccggtaagttcccgaaattgaacttttcaattcattctatgtacctttagtggtcctcatttgctttcacgtgctnttattttcgtttcatttactttcta

SEQ ID NO: 33926 - DNA, 352 bp, Glycine max
  unsure (1)..(352): unsure at all n locations
cctatataagctgaactcatttatcaataaacacaagttgangtttattcagaaaattagagtttatctctnttatcttagtgagagtgattctcctaaattcttgagtgaatcaagaacaccctggctgtatcaaaggaatttcacaacctttgtgtgtgccctcgccggaaagagtgattctttccttcctttcatcttcaaccttgttctttcaaaccacaattccagaaaatccacttctgcccaaaattatctcgtggccataactctcattntatgcactcaaattaagtgattcttgagcctaaatngaattcaaaacgagaccatttcacctcgtttggaatca

SEQ ID NO: 33927 - DNA, 514 bp, Glycine max
  unsure (1)..(514): unsure at all n locations
agcttgcatatgttggttgataaaaaatgtatattactgagtntcatgacatgcaaatattctcatatggaagagttgatctctggtcacagcctagtcagcaacttctggcatatgcttttagcatttatgaaacttatattagcatcatacacaagtaacagatatgcaagttcacaatgaaagcaagtttgagaccttatactaattaggatccatgacctaacacaaggtaactaatagttcatttaaatttgacatgtccttttaagattacaataaaactnttgggattggattaatttaaaatntacttaatctaaaaaaaacatatntaaatgataattaagtatatcaatatttaaagtagatatcgggggttcatgcagaggattntatactctcgataacggatgatgtctttgatttcatcgtatggaatccatctaccggacttcgattcaaaagggaataactatatggaatgaatgatgctcatcaatatnaatttcat

SEQ ID NO: 33928 - DNA, 389 bp, Glycine max
  unsure (1)..(389): unsure at all n locations
ctaagtcattatttagttgttaaaataattatataacacattaatattttcactaaaactatattagcattntctataaattgagcaacctacaagcttggtagatttttctaaaagcttacaagctaacctacttataccagaaagaaacattntaaaaagtgtgtgcatgacatttttgctaaataaactagggtaggccataccttaagtagaataagcattataccttaaatgaacaacctaacaacttaattatatttgaagccctagctcatacaagcatgatngtgtataaaggaattgaatccaatgtaatgattcgtatcttatgtgtgtgtacgtatacatagatggatagagaatggatatataatatgacaatgctt

SEQ ID NO: 33929 - DNA, 462 bp, Glycine max
  unsure (1)..(462): unsure at all n locations
gttntctggtttctaaaccttgatatcttgtgctattcattcttttcatctcttctccctttgccaaaaagaattccccaaggactaaccgcttgaattctttntgtgtctctcttctcccttttccaaaagaacaaaggactaaccgtctgaattcttttgtgtcttctttctcccttgtcaaagaattcanaacgacacagtctgagaattcttttgattcttccctttcccttatacaaaagttttcaaaggactaatcgcctgagaattcttttgtatccccattcacaaagtatcaaaggtttaaccgcctgagatctttgtcttaacacattggagggtacatcctttgtggtacaagagggtacatctacttgngttgtngactgagaacaagagagggtatatctcttgtggatcagttctagtggagggtacatccactaggttcaaagagaa

SEQ ID NO: 33930 - DNA, 238 bp, Glycine max
  unsure (1)..(238): unsure at all n locations
acattatgttgaagagctatggtaagacgtttaattatttaatgtgaaacctatatctactccttatgactcatccattaagttaaagaaaattctgagtaaatgaatttcttctcataaatattctcaaattattagttctctattgcatttgacaaacttctctagaattgacattgcatatgaggttgngtagatanggaaggatactaataatctggatcattctcattggact

SEQ ID NO: 33931 - DNA, 454 bp, Glycine max
  unsure (1)..(454): unsure at all n locations
cttctagtctcaatttgaaggtctcgatatattacccggttcaatcggacatccaagtattagttatggttgtctgaatatcctatgagcttcggttctcaatttgtagcgtctcgatatattacaggactcaaccggacatccgngtataaagttattgtcatttcaattgtctcagagcttcggatctaaattctgagcgtctcgatatatgacgggactcaatcagacatccgagtcaaaagttattgtcggttgaatatgatacgagcttccgtttcaatttggagcatgcctcgataaattacgacactctgtcgggcattcgagaaaaaagatatcgacgtctgaatcctctaacacgtttccgttacaatatggagcgtctcgatatatacgggactcaaccggcatccgtgttacattattgcattacattgctcagagctttagt

SEQ ID NO: 33932 - DNA, 450 bp, Glycine max
  unsure (1)..(450): unsure at all n locations
ctgatctcaatcctgagcgtgtcgatatattacgagactcaatcttacatccgagtaataagttattgtcgtttgaatatgatacgaacttccattctcaatttcgagtgcctcgatatattacaggactcagtcgaacatccgagtaaaaagttatatgcgtatgaatttgctacgagcttcctgtttcaattaggagcacctcgatttattatgggactctatagganatctcaggtaaagttatcgtcgtctgaatttggtaagagcttccattctaaattcgcagcatgtcgatatattacgggactctgtcagacatccgagttaaacgttattgtaatttgaatattctacgagcttccgtttcaatttggtcctctcgatatgttactggactcatctgacatctgataagtattgtcgtgatttctacctctcatatcaatt

SEQ ID NO: 33933 - DNA, 417 bp, Glycine max
  unsure (1)..(417): unsure at all n locations
agctntctcccttatttgctataaataggggatgaattgaagattataagggttcagccccttaggcacttctctctctctcgaatntgctgaggaaaattatttccgtgaagaanatccaagccgaggcgcttccgtaacgtttccgtgagtaattacgcgaagattctcgaccgtttttcaagattcatcgttcgttcttcgttttcttcagtcttcgacgggtaagtacctcaaaccaagcttttcaattcattctatgtacccgtggtggtccacattttgtttcatgtattntcgttctcgttntcatttactttttatacctccttttgacgtgcttaagccatttatttaagtcatttctcgcttaatctaanaatanaataaatttccaccgatcgtttgaattgtatc

SEQ ID NO: 33934 - DNA, 394 bp, Glycine max
gctcttgaaaacttcttggggctgagctagctacacacactcctctcataactaagctcacctccttgagaagcttccttaagatgattcctaaagaagctagagcttagctacacatacctctttaatagctaagctcagctccttgagatgagaagctagagcttagctacacaccctctataatagctaagctcaccctcatgagaaaatacatgagaatacaataaagatccctactacaaagactactcataatgccttgaaatacaaggctaagaccctatactactagaatagccaaaatacaaggctcatacgaaggagaaacctattctaatatttacaaagaatagcgggctcatacttagcccatgggctcgaaatctatcct

SEQ ID NO: 33935 - DNA, 481 bp, Glycine max
  unsure (1)..(481): unsure at all n locations
tcgatcctcttatcttcaaagcccatttctagtttctttcttcccatgtcaactacacagcttgcagttaacataaatggtcttcccaagattaaaggaatgtcattatcttcacagatatccattacaacaaagtctgctgggaagataaaatgttttactctgaccaaaacatcttcaattactccatatggtatggtaatggagcggtcagccaactgtaaagtcattctagtgggcatgatttccaactctcccagtcttctgcacatggagagtggcatcagattgatactggctcccaagtcaatgagagcttttcccactgtgacttcacctattgaccaaggaatggtcacactcccanggtctttgtgcttcggtggaaggaatttctggatcaccgcactgcaatttacctttcataactatatttcctggtgaatgtacttgtgcttcttttgtcacatgtctttaaaac

SEQ ID NO: 33936 - DNA, 358 bp, Glycine max
  unsure (1)..(358): unsure at all n locations
tcagctctctctttctcgttaattattatatttgttgtaagtcttgtatttggctatgttcttatgacattcgaatacttagtatttcttttattatttgattagtatgactgaacatgatgattatatttacttactcttgggtgtttatgggtttgaagttttaaacttaattatttcgatgatatatgactagaggtatgcacttttatttggttattatgaatgactctctagattatatgacattctatgaagtattatctttctaagaatgatgaatgcgtaagatatcttgtttgattgttcttctattcttgtgtatgtcatatatgtatgggntttatatttcttaaac

SEQ ID NO: 33937 - DNA, 286 bp, Glycine max
gtccaggttcctcagcagatagaaccagaacctcagcggttagtggcttaaggaagaaactgtatgacttgatggatgattttcaagggttgagggccagaatgcagaatgagtacaatgaaaccgtggaacgaaggtacttcaccataacaggagaaaaggctgatgaagacaccatacataacttgatatcaagtggagaaagtgagatttctcttcagagggcgattcatgaacaagggaggggtcatataatggacaccatatcggagattcatgagagaca

SEQ ID NO: 33938 - DNA, 301 bp, Glycine max
gaaatgagattattggaagggtgtaaaattgcattaatattgtaacctcgacaagatagaaaacaagagtcttgatgagcaagattccaacacgagagaatttctagtggattttgttcaatatccgtgagatatgcttatatggaagtttaagatgaacaatctatttagagatttcttatagtgtaatgagttgaaagaggaagttacataacaaagtaactattccatctcaacatataacgtgacttaaaaacatgtaaggtaaaatgtgtatacatttaattcataattatattta

SEQ ID NO: 33939 - DNA, 353 bp, Glycine max
  unsure (1)..(353): unsure at all n locations
ctctgataaatctgccatatactcagccggtattaagcctcatgagctatctcatatccagcttactggatgtagtttgggtgacttcccttttagatacttaggagttccccttttatcatcgagattaaatgtatgtcattatgctcccttgctttccaagattactggcctgatttatggatggagcaagatgtctttatcttatgcaggtaagttacagttgattagagcagttattcaaggaatcgtgaatatctggatggagattnntcctttgccgcaatctgttctggaccgaatcaacgcttctcgccgtaattttctgtggggaaagcgaatattgcaaaaac

SEQ ID NO: 33940 - DNA, 350 bp, Glycine max
  unsure (1)..(350): unsure at all n locations
gcttaacctcatcgtctctcacagtctntagatttgtgagccaatccaatccttgtgttcggactctcagccacttatgatagccgccgatgatcccattactgcttcccctaagctctctgtcctttcttcacgccgcatcccatgccttgcgaactccttggagtaccctcaggttgtggtcactgaaaccccgtgcgatgaaaggcgtgatgctttcgtctgatggcactcctctcatggggtagccaagctgtcttatggcgaggacgggattataattaatacaacccctctgtcccatcaagagaacatatggacatccttcgcatgaagatagaatcctgatt

SEQ ID NO: 33941 - DNA, 179 bp, Glycine max
tcagcgcaacaaccaggctgttaatgtcacctataactgctctaaataaatacgtcctcgcctgtactcatcacagtcatgctgatttattatatatctggcgactaggatctcactcaactgattaaaacctgatcgccataggatactcccttgttacttgctaatatatatgcccg

SEQ ID NO: 33942 - DNA, 398 bp, Glycine max
agcttataaagttagatgattagttgttctacagtattataaatcgaacatgataatcagatgcacctcattttcttacatgagatataatcttatttatacttgagccaatttcaaccattataaaaaataaaactctgttgataaatgcttaacacatacacactgtatattattaaatgtttaacacatacgcatattaaatatctattgtctagaaaaattcaataattgaatctaaaattattaattaaagtaaaataatcctatcttagtggatcatcaatagatcgatgtatatgtacctactttgaataatggaaagtgttgaatactattgctccatttattgatgtagagtgccaggtgtttggcataaaaacagaaaaacacgatcg

SEQ ID NO: 33943 - DNA, 338 bp, Glycine max
  unsure (1)..(338): unsure at all n locations
acaagaaagataaaggacaagcttgttgtcgatctttagtgtgttaatcttttattagctcttaattaagatcaaatctaattaaattaaaaatatttacatctactgtaagtcttaaaaaataatatattaatgtatcacttaaaaaaaattgtattaaatattgatgttaaaagaacagtgaatctaaaattattctaaatttttctctatatgccaaatgcaatcgaaagtgttcatctttgatgactttatatgtataagaacaatatcaatgggtaaaattcaaggaatatatcntgacgttcttttatcttatgttaattagtttctacaat

SEQ ID NO: 33944 - DNA, 381 bp, Glycine max
agtcacctgccgcatgcaagctttcacccaacaggcgaatgaagattgcatttattggcacatctgagtttgacagtgcaccgattcctttgtcaggtcatgaagtttttgatcgggtgaagaacatcgttactatatatgggaaaacacaaaaataggatgggtcccacaaccagctttggaagaaaaagtctatatatttttatctgccttactggtcgtcattagatgtgagacattgtttagatgttatacatgttgagataaatgtatgtgatagtctagttgggacactgctaaacattaaaggcaagacaaaagatggtttgaaatgccgctcagatttagtagagatgggcatacgacaacagttgcacccag

SEQ ID NO: 33945 - DNA, 349 bp, Glycine max
  unsure (1)..(349): unsure at all n locations
gctcgctgggagcttcatggaggctggatctgtgagcttcaatgatgtcctttatgttagactagtggcctcagatatcttaagaaggaggtggggttgaattaatatattacaacttatttccccaattaaaaattctacttaactttctattcaagttataaattcccttaataatgaatctcttaaataatgattcataagaagaatctgaataagactataaaacacatataaatcatggagtttatgggaagagaangtgcaaactcagatttatactggttcggccacacccttgtgcctacgtccagtccccaagcatcccgcttgagagttccactatctt

SEQ ID NO: 33946 - DNA, 535 bp, Glycine max
  unsure (1)..(535): unsure at all n locations
cgcacaccatatcattgtaatactgagctaccttatgtgctctgatatgggtacaaagcatgacgaaatggactccctctgagaatcgatccacaactaataaaaccacagtatcttcttggaagctatgcaaccctgtaatgaaatacaacgccacgtgctcccacacaatatatacagggggaattggatgaagaatccttgaatgttatttacggatattctttgtgagtcgacactcacaacaccttagtgatgtagctaatatggagcctgtaagccttggatcttcttcatcaatgaagacatttgcttcttgaagttagatggtagcggaatcgacattgagagatatgactggatacaccactccatgacaagatgactctagaatagctcacctccattcgtattcctggataagagctttgacgttatataagatgactagacggacatggtgaaatgacgcnagatctctgcctcacagaggatgactctgagtatattctatatgatccactcaaatangcct

SEQ ID NO: 33947 - DNA, 132 bp, Glycine max
acacacccatctaagaactaagctcaccatcttgagaagcgtccatgagaagttagctacacacaccatctatagacatagctcacctccttgacaaatacatgaatatactaaataaagtccctactacaa

SEQ ID NO: 33948 - DNA, 264 bp, Glycine max
  unsure (1)..(264): unsure at all n locations
aacgatgaagaacgaatgaagaacgtcgaagaacggttcatactttngcgagattcctcacggaaaacgttacggaaacgtttcggaagcgcctcggcttagactttcttcacggaaacaatntttccaagcaaattccaaagagagagaagtgcctaaggggctggaccccttccttcttcatttcctcccctatttatagcanaataggggaggtggttgccgcccagctcgcccaggcgagcttagctcgcccaggcgagc

SEQ ID NO: 33949 - DNA, 468 bp, Glycine max
  unsure (1)..(468): unsure at all n locations
ctgcagcttgccttatcttttgcacaagtgagtactgtatttgtgcactaaccatctatgcactatgaccaggttacttgaagaaacacaggatgaggtgatctttctgattcttcagcatttaatgtatatatgttcatttgcattattcggctatgattctatttttttttcaaatgatgccaatcttgcagttggctgaattgatcaaaaaaggatctgtaaaagtgggaggtgtgagcaaagttcttggtcaagatttgagcanacatcgcagtcaaatgagggaacttcaatgataattggaggaatttaatattaacttattggtctgcttgataagccgagacatatnntgtgaatttatcgtctaaaatcattatntgagtggccaatcaggttctatgttctaaagataatatcatcggttattgattatgaacatttctatcatgctttagcatttac

SEQ ID NO: 33950 - DNA, 394 bp, Glycine max
  unsure (1)..(394): unsure at all n locations
gctatcaaactaatctattcntttatcacatttctgtgtcgttctataccanaacctaattcgctaactttntaccaaaatattaatttattaattaggaggggcatacaaggaaatatatnttcaaaacctatttaggaataaatgtaaataaaatacaaaatcaaatctattgtccgaagggagcgccgttgggttttctatactaaaatcctaccattttccttttcataattctcactctccgcaatattatnttccttcaaagtcattggtaagttaaagacatattttttatataatatcttgcccataaaaaaaaaataattccatgtatcgaaaatngaatattcaatgtagaccacaaccttaattgaacattatattcaagatc

SEQ ID NO: 33951 - DNA, 484 bp, Glycine max
  unsure (1)..(484): unsure at all n locations
ctgcaagctgttcttttgctttttaatcagagccttatttattgttccaagtcttcaactttaacgacatttacagcaaccaagctntatttattcaaaaaataagaaattgatagtgctgcaatgaagaagatcatcatgctgtcggaccccactcatcatattacactttgctntcagttaaagagttaaacagttaggagattcacatttaaagcttttatctttatttgtatgtatatactatataggataggatagtagtagttaatgtgtaatatcatatcacacaaatttaagatcaagtgaattttttttttactaaattggaatgtttttacatgtatgatccacaccaaatgtgctcttcgacatttaaatggcatttagacatttagagtaatctatttaaataataaaagtcaaaaacattctactgagatgggattattttaagcagccaactttacttaataatatatta

SEQ ID NO: 33952 - DNA, 382 bp, Glycine max
  unsure (1)..(382): unsure at all n locations
ttgacctaattgtggccttaagatgacgtcattcttccatagttntccacattttagattgtattcaatccctcgtgagaattagatgacaaccaaataccatttttttcatgcgctgatctttgaagagaaacacatctacttctttttggctaaatgttcggaatataaaagaaagaaaaagatgacaattcatgccctctaatcaatcaactaaatcaattgataaaaaagcatgcttcctgataattgatttagaagaagtaatctactttttntaaatttatatatgaactatctttaaacattagaaatatatatatatatatatatatatatatatatatatatatatatatatatatatatatatatatattat

SEQ ID NO: 33953 - DNA, 502 bp, Glycine max
  unsure (1)..(502): unsure at all n locations
agctntagacagctngctgtaatcgattacgatggactggtgatcgaggtcgtacccgaatcatataaacattataaatgcggtatctaagaagtgatcctatgtcgtcttccacagagcaatggtcaaccaaatgttcataatagatagtaataaaacaataacgaattgtgggcggngttgcttgtttttgtaaattaaacaacgagcaaattttaattagaaaatatcataattaaaacacgttgtttccccttgaatcacaagcaagtctcttatcctaagttacaagaatttatcctctatcagttcaacaacttaatccaaccctaaattatattactaagcgaaatntaacataaggcagttattatgtgattaagcaacacatacaccaattaatcatgaacgagactgatcattaagcatgaacgtataataagcgcagagacaattaatcaagcactaagcatgcatgaattaatagcaacanatacagagt

SEQ ID NO: 33954 - DNA, 444 bp, Glycine max
  unsure (1)..(444): unsure at all n locations
atatgcatgtgaattatgaagcatcaacatgaatcaagccaaggctattgtgcatgcaatcaatggggcaaaacacaccaattgattatgatgatggatggctcaaattctcacaaaggtaaactcatcactttcaaattgagctntcaaaactatcatgacatgtagaggagaatcaaggatttcaagtcacaaaatgtcaagaacttttattttcataacaattacccatttcttgaacatatcctataattcaaagaaaaacatgcaaagtcgtacatgctcacaaaattgacccataatattaaactaaaaatccgacacaactaacaacattaacaaattaacacaactaacatattaacaaaaccaacaaaactatcataaccaaagaacactcncncccatacttaaacaacacattgtcctcaatgtagcacaatt

SEQ ID NO: 33955 - DNA, 482 bp, Glycine max
  unsure (1)..(482): unsure at all n locations
agcttcgtcattataattntaagaaggtgaattatgattttaactctaatttataaaattgatatgtaaggtgcagattatctccatntacatatactattcgatcttatcattagttgatgtaagagtttcaaacagacattttcaagtcgagaaatgaactcttcaaatgtgaaatgtgtatgactagacttccatgggtgatgcgataggtcaatcaaacaataaattattagttaggataaattctggtacgagaattctcaaatgatatcatttaaggagagagtgtaaatacaagagagaagtgtcataaaataacatctgtagagatgattgataaaaagatacaaagaaaatacataagtgctttatttatagagcttatcataacaagactaattcactcttaacattctccttcgagctcatgtggtataaccacaatgagcttgaatattagcatgtacaaagaaatcaac

SEQ ID NO: 33956 - DNA, 406 bp, Glycine max
  unsure (1)..(406): unsure at all n locations
gctagacaatatacctgtccttcattaactgtctatgggctnggcgtgccatgatcaacatagtactntcaacacctactatatgttgatttgaccaacgctgttatcggtatgttgcggcaatccttcaataccttatttatacattctgagaggttcgttatcatgtggccatatcgacgtccttctctatcataagccatggtccatatttccttagaaatgtgatcaatccatgttgctatggctggactcagttgacgaaatttttctatattttggtcaaaattatgcttgcaaggagtgtagcctgcatgaaattagttagcaacaataatttgaagtatacatgaaagttaaattaacgtgaccatgatacatgaaatcttacccaatttcttcaaca

SEQ ID NO: 33957 - DNA, 450 bp, Glycine max
  unsure (1)..(450): unsure at all n locations
agcttgcctgtccgatgcagcagtaatgatggccctatttattgttgaggaccggtacnaacccggaatgggtntatgataagacaacggcggcataactagcctaataaatgccaaaggaaatcatgggaagtatggcttaggttataagcccactcgggcagatataaagagaagcatcgcgagaagaaagagtggtggtcaaagctcgcggttgagacaagaaagtgaatgaagcccgccctgccacataagtagaagctttataagcgcgggtctgggagacgaaggtcaagtggtcgcgatatacgaagatgatgttccgagtacattggatntggtacgaccatgccctcctgattccagctaggaaattggcgagtggaggaacgccccggcatttacgcaacgagcataatgtatactcttacggttataaaagctctatag

SEQ ID NO: 33958 - DNA, 541 bp, Glycine max
  unsure (1)..(541): unsure at all n locations
ttgacaggtgataactcataactgaatgtgtangctggcatccctgtgtgataaggtgaaagaccttcacgctaatgtgagtgatgttgaggtgggtgataaggtgaaacaccttggataagattaanatactctctaattattttgttttctgattntaattttagtgagagagaatgggtatagagactaacattattggtcccatcttgcttcgtagtcataccttntcataatcgatcacttatatattntttgatgttaaataactacaaatgtagctaagacttaaaattttaattatttatctatntgatttaatgtctagntctatttttattntctaaattaanaaatactttgatcgattcatatgtgtgtattatatcagtntatcactataccattcatttgtatatacaaactaatttatgntgttgtcttctttttgtactcgaatacactannattagacttcatctatgtactcctctatttacatggtatcatgttttaatatacacatttgttgtaaatacct

SEQ ID NO: 33959 - DNA, 501 bp, Glycine max
  unsure (1)..(501): unsure at all n locations
agctntggagtntccaagtgccaattcgtcttcttctttattccagacttcttctggcttcaattcttcagtgggctttccttctgtgtccagcatcttgggatgttcccagcctttgatgacagctttccaggttctgctatccagtgatatgaggaaggccaccattcttgctttccagtattcatagttggttccatctaagattggtggtctgttcactggtcctccttctntctccatgttcatcagaatttatctccctagatctcactctgtgatttcgagtgttggctctgataccaattgaaattctgataccaggggacagatgtcgtaccggatgtcacgacatcacgcttcagaacatgcagattatatgtgtccgtatgaacagattaaacaagtaaataacacacgagaatggtaacccagttcggtgcacctcacctacatctgggggctccaagccgagaggaaaccactctaatagtgtagttc

SEQ ID NO: 33960 - DNA, 333 bp, Glycine max
  unsure (1)..(333): unsure at all n locations
taccgattatgtgtctaccatcacgattatcgtctccctttccattattgggggtaccacctgtgccgccagatccctccaccttatgtgcgtgttctttgaaagatccgtccccctttntgcacatgttctgtagttgcatcctatccgaaaccatatcaaaattgtactgatactgcctaacacaggcaaccattatgtccttccaagaatggactcgggaaggttccaagatagtgtaccaggtaacagctaccccagtaagactttcttggaaggaatgtatcagcaattcctcatcttttgcgtattcccacatcttctgacaataca

SEQ ID NO: 33961 - DNA, 641 bp, Glycine max
  unsure (1)..(641): unsure at all n locations
ccgcgcccctctncntcttacagcgctttgcgangtgaggaacgtcgcgacgcttacncgtannntnnaaggcnncaaggcgtttganatgttgacactcgganccggaccttanagcggctgcagcatgcanagctttaatgcacaaatgagaaataattatatgatctacttaggcaatcacaattatgagtataatttgttaaatatatcaaaaacctagaccgcaagacaaagagagaatacaatatcagtatttctctctaaatttctcctttatttcatcaatgcatattaatgagaaaaagtggtcgagctatatggttcacgctctacacaatagcattgcaacttcacattaattgtgctgtcgaacatatgatacacactggaataattataaggataatatgagaatagcgaaaacacctcataattcattccaattgagatctctgaggattcctacacatggtctcactaatacccaagagtgagtactcattcatacctctaagcggctcacgtgtctacgccaccgatacagcatctctagcggttcctgaaatattacatattctcctcaactgtccgaagagctccacacgtaaagagacaagagaggacgaagcctcactgcn

SEQ ID NO: 33962 - DNA, 177 bp, Glycine max
cacactacatatggaaacaattacctataacaacaattggtgatattttatcatctcttaccaatgtttatgtttcccctgatctcattaataaccttatttcagttggcaactagatgataatgattgtagagtttgaatctcaaaatctggttgtcttgtgtatgaacaacactc

SEQ ID NO: 33963 - DNA, 317 bp, Glycine max
  unsure (1)..(317): unsure at all n locations
agctagtggaagaggcaaagaaatatttatggttggtgctatataattatctcccatctttcaatcaatcctttgtatagtgtggtcttgtagtccacaagcttgcataaggggagtttgaggtggtgtacgactctattcttaggctgagagaaatgttcttattggttgtggctatccctagtgtacatgagggtttangtgtagggcgagggtgtgcgtgctcgaccaaatttgctagatttgtgaatgttttctgttgtgaggttcatgaatagtattgttgtggcataatgggttctgaaggatgtaacatg

SEQ ID NO: 33964 - DNA, 339 bp, Glycine max
  unsure (1)..(339): unsure at all n locations
tgtgtggttgcctgaaaacctctgtgacaaccaacaatgctcgtagttgcaacgggtgctcacttatgaataaagcacgccttgacgcgaaaggagatggttccagtgtgacgttcactgaagatgtgtcatgcatagtgtgcatgaacttctcccgcccaaanagagcccctatgtggaatcatcgtggtggtgtgttgagatatctactcatgtgaacaatgtggcattcttgacatgtcactgatgcaaaccgacaagagggtggtgcattggcatcctaacacgctcacagtgggcataggtactggtcacccatgaagaaagcttctcacagat

SEQ ID NO: 33965 - DNA, 391 bp, Glycine max
  unsure (1)..(391): unsure at all n locations
ctgcagcttgaggtgtgtagcccaccatctggttatgtgtctactattattgccatcattnntgtttcgtcattgaggtgccacttgagcggccaggactctccaccttagggcgtattctttgaaagatctgtgcccctttttgcacatgttctgttgttgcatcctatccggaaccatatcaaaattgtactgatactgtctaatgaaggcaaacattaggtcctttcacgagtggactcgagaaggttccaggttggtgtaccaggtaacagctaccccagctagattttcttggaaggaatgtatcagcaaatccctcatttatgcgtatgcgcccatcttccgataatacaattttagatggttcttgggcaagtagtcccttgac

SEQ ID NO: 33966 - DNA, 403 bp, Glycine max
  unsure (1)..(403): unsure at all n locations
tgcctccatactcgcgttgccaaactttcaaatatctgttgaaagtgagtgtgatgcttcaaatgttgtgattgtggctgtgttgatgcaagaaggccatccaattgcttattttagtgaaaatttaagtggtcctacccttaactagttaacttatgantaggagttgtatgtcttattacgagacttgaaaacatggcaacactacctttatcccaaggaatgtgtcattcatagtgaccatgagtccctcaaatatatcaaggggcaaggcatgcttaacaaaaggcatgcgaagtgggtggaattcctatagcaattcccttatgttatcacacatataaagggaagaggtaatattgtagccgatgctctttctcagcgtcatgcattactttctatg

SEQ ID NO: 33967 - DNA, 554 bp, Glycine max
  unsure (1)..(554): unsure at all n locations
gtgaccgtgttgacccntgagagttgtcgcctcgataagcgaccttgaaactcagctcaaggactgtattagattcgcctgttgggatctgaacgttgtacctgcggcaatgtgcctatggaggcatctatccagagagctcccagatgtgttttacgtgaacgagtttatatgatgatccgagatgcgacttacaagctgacaatactgcgcaccgttngcatacttgtggccttatatagctggtagtgagtaactaagtcctctttatgggttagctattatggaaattaatactgtactctgacaatttgcgctcaatcttacttctattcatgcccgtggagcgtgcagatgaggatatgttcttctgataaatgccacttgacttaatgatctgaataatgtgctatcatgtcacgagaccgaagaacgcttattatacacgacgctctgcgttcatcttgatagttaattgacctgtcagagttggtacgagcaatgatgattaatggcgcttcctctgcagtacaattatgtcagaggtaatgacg

SEQ ID NO: 33968 - DNA, 219 bp, Glycine max
  unsure (1)..(219): unsure at all n locations
atcgaagaacgatgaagaactaatgaagaacgtcgaagaacggttcacacctttgcgagattcctcaccgaaaacgttacggaaacgtttctgatgcgcctcggcttagatnttcttcacggaaacaatgttttcatgcaaattccaaagagagagaagtgcctaaagggctgggatccatttctttcttgcattcctcccctatttatagcaaaatag

SEQ ID NO: 33969 - DNA, 423 bp, Glycine max
  unsure (1)..(423): unsure at all n locations
agctntgggctcagtggccncggtcacgtctattctttacatggagaagggccacgacgcttccaggatgttcgaaggcaagggcggagcgttgacgttgtctgcaaatgtatgacacttatggcactttctcacgtggatgcaatagtcactctccatgatgagccaataatagcccgccctcaggatctttctagccatggcgtgcccgttagcgtgtgttccaaaggaaccctcgtggacttccactagaatccgcttagcctccttagcatccacgcatcggagtaacaccatgtcatggtttctcttgtatactatgtttccacttaagaagaaaccggttgccaatctccttaacattctcttgtcgttggtggaagcctccgatgttcttgagcccgaaagacatctncttataat

SEQ ID NO: 33970 - DNA, 386 bp, Glycine max
  unsure (1)..(386): unsure at all n locations
tcaatatgtgattaagcaacacatacaccaattaaccccttgttcattaagcccaaacgtaatttaagcacagaggcaattaatcgaacacgaagcgtgcacagattaacagaacgcatgtgggttaattggtgaagggaaaaccgataggagagcaacaataaaaacagaacctcaaagagagttatgcttcttcctcagagggaaacaacactagaaatttagccttccataagttcaacagaagcagaaaacataaatgaaactaaaggcagaaagcgtaaatgaagctaaaggcagaatacgaatataaaattaaaggcagaagaaggaacaaaaacgaaattgtattagaagcnaaaatggaaaaaatgcattacgtgaac

SEQ ID NO: 33971 - DNA, 482 bp, Glycine max
  unsure (1)..(482): unsure at all n locations
agctntattatgcnctctnccctcggcggagatatcttcttcatcgaatgcaagatagttgttggcagtgatattattgaccagccctccgaaaccttctatcgagatgtcttgggccacgtgggcctcgttcagaacctttactagcagagcccgatgaggctcggaactcatgagtaactccaacagcgagaccctggccggagttttgttgagctgtttgataaccttgaattcgctctgctgaattatacggaggaactcgctggcttcctctagcgacacctcttttttaccatcctttttctccggaagggcctttgccggaatatctntattcgaagcgtggggtgcttcgccatcttgttcctccaccacctttccttttccctagacgttcgcaggttggactgggaagtccggaggtgcatacacacgaccagctgcggtcacaccactcgtccccgtgatatttgtacctt

SEQ ID NO: 33972 - DNA, 312 bp, Glycine max
  unsure (1)..(312): unsure at all n locations
cttgtctccaacgcgagctctgaccactggttttccttcccgcgatgcttcttttcatgttcgcctgagtgggcttatagcctaaaccatacttcccacgatttccttgtgtttttatcaggctagttatgccgccattgtctttgcctaaacccatcccgggttcataaccgttccccaacataactcgggccatcattaccgccgcatcggacagacaaggttgcccaaagagggagtccacggaggaaatgctgaccacctcanaagactggaaagcggtttctaacgattcttctgcggcttccacat

SEQ ID NO: 33973 - DNA, 428 bp, Glycine max
  unsure (1)..(428): unsure at all n locations
agctnntacggattggtcttcgtcggagaaaggatctaagcaggtctaanaagaggcaaatttaatcatcttgcttggacgaatgaganaactgtggcaaatgaagagggtgtgaatgaaggagaaacccatgctgtgattgtcgttcctacatggaaaattcctaccagcttaacaaacatcattactcagccaatatcagcccttcttattacccaccacccaattatccacaaaggtcatccctaaatcaacaacaaaacccactgaccacacaaccaatgctaaacaccacctttagcacaaaccaaaacaccaaccaagaaatgtaatttgcagcgaanagcctgtagaattcaccctaatttcggtgtcctatgatgacttgctcccatatccactcgataattcaatggtagccataaccc

SEQ ID NO: 33974 - DNA, 430 bp, Glycine max
  unsure (1)..(430): unsure at all n locations
gcttacacggataacagactattaacagtgctgataggtcttacaacttctataaaatacatcttctattcagacatgaagtcagaaactaanactcanagtataattctagaagcttaatgcaagaataagagaaaataaactaacatgtagaataataagcctatacggataatagactatcaacatcatttactcttctatttcatgaataacttccaactcgaaattctgacgtcttgttggaacaagagcatttgttctataagaaccagtgatgtcaaaaggagtaggaggtgcaattaaatcatctccatctcctttaagcattngtaccacagttntcatggatgggcggtcccttggattccactgaatgcacctaagtcctacaatggccagtttcttttgctatttgaacatctcctca

SEQ ID NO: 33975 - DNA, 510 bp, Glycine max
  unsure (1)..(510): unsure at all n locations
agcttagcttgtcccaaggcttcatgtagacttgtccaatatcgcgaagtgaacctcggatccctgtctgatacaatactagaaggaattccatgcaaccttattacttccttgatgtacaactctactagcttctccattctatacttcatattcaccggaataaaatgagcagatntggtgagtcgatctactatgacccacaccgcatcatgtccacgactagtcttgggcaaactagatacaaaatccatagatatgctctcccatttccattccggaatttccaatggcttcaattctcccgatggtcgttggtgctcagccttagccttttggcatgtcaaacatcttgctacgtattcagctacatctttcttcatgccatgccaccaaaaacttctcttcaaatcttggtacattntagtcattccaggatggaaactaagacgaactttatgagcttcttccaagatcttaactctcanatcatctaaagatggcacacat

SEQ ID NO: 33976 - DNA, 343 bp, Glycine max
tggcttatttgagcttgtggatatcgatgcatattctccagacagtgaaagtccttggtgggattatgtcattcttttcatcctgaatgattttcgtgcccactttctttggtaccacctggattgggcttacccaagtactatcagaaatggtgtggataatccaagcctctagaagctcgagcacctcttccttcattgatgggttaaggcttctcttgggctgtctgactggattgtaatcttccgccatcattatgttgtgcatatagtagacagggttgattcttatgagatctgatatgtgccaccttattgctcactgtcaatgtacatacccttc

SEQ ID NO: 33977 - DNA, 463 bp, Glycine max
  unsure (1)..(463): unsure at all n locations
agcttcttagtntcagatgatgcagatagggttgatctacctcatgcactcctctaatgactatggcatcatttctggcactaaactgctgggagttggaggccatcttctcaattaaatttctggcttcagcaggagtcatgtctccaagggctccaccactggcagcatctatcatacttctctccatattactgagtccttcataaaagtattggagaagaagctgttctgaaatctgatggtggnggcaactggcacatagtttcttaaatctctcctagtactcatacaggctctctccactgagttgtctaatacctgagatatccttcctgatggctgtggtcctggaagcagggaaaattntttctaagaatactctcttaaggtcatcccagctcgtgatggaccttggagcaaggtaatacagccagtcctttaccactccctctaatgagtg

SEQ ID NO: 33978 - DNA, 444 bp, Glycine max
  unsure (1)..(444): unsure at all n locations
tcagctaatgctcctcctacggcgcaaccctaacttcaatgcatttatggcttggccaggtggagaccaaccttctataggggggtggtagacctgtttcaatggagattatggttgtacctgacgagggaaatcaatntcatcataatgaggaatgggttgaagtgtcaaatgcaagagagaagggtgttgaaggtggtaatgatgctggaacaagaaaggaaggatcgggctatgttgatgttttttaggaccaactaattattgatcagggggactagatgtggaccccacattctgactnnttaattaatatctatataatatattgtgtcattcgattggttttgtattattgatgcatggctatgttgttaacttattgaacttcgtgacgtcagtattcgtaccgttagtgcatgtggtttaaatttggttatgtct

SEQ ID NO: 33979 - DNA, 432 bp, Glycine max
  unsure (1)..(432): unsure at all n locations
agctagccagatacataagctatagcattctctttggtggatgtatacggcaacatgcatcatatgtgggtttgaagggtgaataagtgtgtgtntggttcatgaattgaatgaataaacacatattcaaagaaacattgtgtgacaaataataatttttacttttgctcgaacagttgtttgaaggatgcacaatacgaaaaacaaacataacttaagttgcagtgacattgatcgagctaaactggttaatcattacgatcagcgtagtagtaagaaattccggtaatgagtaataaatcttagttacaaattgtcagctgatactgcacatatactagctgatgatactgcatactggtccacgaatgtgttaatgatgtcactatgaactcatcaaaattcagcagtaattactgactggtcacattg

SEQ ID NO: 33980 - DNA, 353 bp, Glycine max
  unsure (1)..(353): unsure at all n locations
tgtcatcaactacnttcattggtagccatcgaaagttgttgcatccactgtcaacctcacgttgttctcaatcaccaacataaatcaatagttaagaatggctaagcctagcaattcagcatgtagtcttgtgaaaattcaacaatgcagccgctataattaagaccaaacacatactactaagataagataagctaagcgtaggaactcagcatgtaatcaatagaaaagtgcaaggccacaaggaacatattgatgcacagatacatgtgcaagaatctaagatagaanattgattctcaccttgtagttgggacattccacaaatctccttccatagtaatattctgtga

SEQ ID NO: 33981 - DNA, 419 bp, Glycine max
  unsure (1)..(419): unsure at all n locations
agctagtctattttaatcagcacatacattatgttttatgttcttcgggaattntccttgctgctgccattaagaatagaaaagaancaactcttttaaccttttctattttctagtttttaaaacactttttaaacaggttttaaaattcaataggttgtataagataaattgattaataagtaaaggaaattagttttgaaggcaactcttaaaacaaaaaggtgaaaagcaaatcaaataggctcttaattatctttagctcatctctagtacccgaatccaatatagaaattcagcatntttgttgcatcataaatgatatttaaaataaactattttctatgctctanaaatgtaattataattccgatgtccatgttgttcttatgcaatgtgtgctaagtgccanaatgatt

SEQ ID NO: 33982 - DNA, 309 bp, Glycine max
  unsure (1)..(309): unsure at all n locations
aaaggcttctgaatttctttcttttggctgagtgaggagagagaacagacttttggttttaaataaaagggttttctctttttctattattttatttaagctatgccacatgtccccatttgagtggagcaaaaagggcccactttccctttttgattgtgacccatactcagccacaaaaagggagaataatctgacctttgaaacgctaaaatcctgcctcggtttgcgtgccgtttctctggttccagattctcgcgtatctctgcgtccgtcggngccagttttcgaaagtacgcaatatatata

SEQ ID NO: 33983 - DNA, 394 bp, Glycine max
  unsure (1)..(394): unsure at all n locations
agctagtagaatggctagacatgatacatgtcatggcttggttnggttcaagggtaaaagggatgccccacattatttccatgacacaaatgcaaaaatgatgatttggaaatgttatgcaaaactggtcatgcatgcacctatgcggacactcaagtgtcaaattnttatggtcatgtgatgctagggcttatgaattatttcctctantttaaatcaacccaatgtttccaaaatatgttcttntatcaatntgtgcattcattcgagtccatttcgggcgtccggagaaatttcacagcattcacccttcaggtgtagacacgttntttttctcttcaaaaatcggtcatgatcaatgaattnttctttcgaagaagagttggagatcatc

SEQ ID NO: 33984 - DNA, 258 bp, Glycine max
  unsure (1)..(258): unsure at all n locations
ctttattgttgaccacagagtggtacctggagatatgtcgcggtggtcatgagaccttgtggacgtcacgtggggtgctattgcccanaaccaagcttgaccaatcccgacccaacccgggcatagtcggtcagtgagaacatgtgacgtacctaagcaggcgagctcctggcagtctacagatataatgataacaagaccacagagcatggaggcttgtggtggctggccagctgtgaattatgtgtaatatgtgga

SEQ ID NO: 33985 - DNA, 319 bp, Glycine max
  unsure (1)..(319): unsure at all n locations
cttctggtagagtccaatccagatgtttcctctattaccctagtactagtctctgtctttactgtgtttgagtggaggaataatcctgaanatctttatgtgtcgttactgagttgaagactgggcacatgagttctgatctactagcttatggggcatcatatggaaccttgactgtgtgctttgtatttgacaatccttcattcattcaacaattaaatgggcgtcccatagatgtaacatgttggatagactgcnctcgttctatattcaaacctgcgtgacctgtatggtctaccgcactaaggctatatcatgt

SEQ ID NO: 33986 - DNA, 578 bp, Glycine max
  unsure (1)..(578): unsure at all n locations
aggggtttgaaacctanggcanttcagacncgcgatccttagagncgagctgcaagcatgtcagctcatataagngaaatctagtgcagccatttcctttatagtcctctcacgaggtggaggctgtgccatgtgctcacaaagtgcaaaatcagaatgctcacaatcagaatgctcaaaattattatgctcaagagcaggatgttcaaaatcaccaataacagaatgcacacattcaccacctttgggatgctcataatgtcaggatgtgtaaaatgatgcctaactaatctatgaaatggtctatctatctcacgatcaacagggttgtagtcagatggatagcctctactcatacactactattatcatgcacacaactacctaccctgtcatgtaataaaagtgtaggtcttaactacagctactctcagatgatatccaatgactgaaattttggagcaccttataaatgatgagaagaagcacaaaaatttcgacaaaattcatagctaactatgaaagctagaantgttagctaagaccaataagtgactaaaacttgaacaataaaagcn

SEQ ID NO: 33987 - DNA, 333 bp, Glycine max
  unsure (1)..(333): unsure at all n locations
atggatgatgtcgggacatacatctcggaacatgcactggaggtacatatggatatgcatatgagtgatgttggtgatgaccaggataatattgtgattcanatttacaaagttagaaataataaagaataatgatatcaagaatttttaagaattgtaaagtagatctacaacctcagtagatagtactccttcacgtaatatatatcgtctagtgcgacgtatataccattgcatgtattttgaattttcatgtaaaagaccttggtccatttcaccatgaacaatataatcattccaatgattacattcggcaatccagtgacaatgata

SEQ ID NO: 33988 - DNA, 450 bp, Glycine max
  unsure (1)..(450): unsure at all n locations
ganactttctgcttttactgtngaccacagagtggtacctggagatatgtcgcnggggtcaagagaccttcgggacgtcaggaggggtgctattgcccataaccaaacttgaccaatcccgacccaaccccggcatattcggtcagtgagaacctgtgatgtacctaaacacgcgagctcctggcgtcaacagataaagggaaacaagaccacctaagcaggaggcttgtggtggctggccagctgtgaaatttgtgtaatatgtggatggtggcctctgcaaatcaataacacagggagggtatccactacatcgcttaaaatcaggacaggaggttaaatgggttctgattctaatacaaacggtgattataaacctctctacaagcaatctgcactcgagagaccgaggtttcaaatcactttgtgctcaaatactcattatgcccg

SEQ ID NO: 33989 - DNA, 125 bp, Glycine max
cacttttatttccgtgcctaattagagatgactactcttaagctgaatattggctgcgatgatgataccacaatcaaccgtatcctttatgtgcagcgtgtacccgcattgttatagatgacttc

SEQ ID NO: 33990 - DNA, 332 bp, Glycine max
  unsure (1)..(332): unsure at all n locations
ggtcttcgccagtgaaaggatctatgtgggtatgaaaaaaaggcaaatttgatcatcctactatgacgactgagaaaactggggcaaataaagagggtgaggatgagggagaaacccatgctgtgattgccattcctgtacagccaagtttcccaccaaacccaacaatgtcattactcagtcaataacaaacctcctccttacccaccacccagttatccacaaaggccatccctaaatcaaccacaaagcctgtctatcgcacttccaatgacgaacaccacctttagcacataccanaaacaccaaccaagaagtgaattttgcagcga

SEQ ID NO: 33991 - DNA, 339 bp, Glycine max
  unsure (1)..(339): unsure at all n locations
gtaccgataatgtgtctaccatcatgattatcgtctccctttccattattgggggtaccacctgggccgccagatcctctccacctttgggcgtgttcttttaatgatccgtccccctttttgcacatgttctgtagttgcatcctatccggaaccatatcaaaattgtactgatactgcctaacacatgcaaccattaggtccttccaagaatggactcgggaaggttccaagttagtgtaccatgtaacagctaccccagtaagactntcttggaaggaatgtatcagcaattcctcatctgttgcgtattcccccatcttctgacaatacatcttt

SEQ ID NO: 33992 - DNA, 422 bp, Glycine max
  unsure (1)..(422): unsure at all n locations
agcttggagaagggtgatttgggactatatacaaggtatgtgtgcaatgtactattgataattaaaaaataataaagcttggaaattattattcactgcatttaacttcctctcccacaaatgttgagtggttagggaacattaccagattgacaagaggtcgcggttaagaggctctgacaaacatctaagcaaggatcaaaagaatttaagaatgtggttatgttatgtgccgaaccccaacatcaaaatcttgtaaaagttcttggatgttgcattcaagaagatgaaaaattgctcatatacgaatatatggcaaataaaagcttagaggtctttctttttggttagtttctctaaatttaactgggtaattaatgtaagatngcattttgttcttacaattggttgcaaattaatta

SEQ ID NO: 33993 - DNA, 169 bp, Glycine max
  unsure (1)..(169): unsure at all n locations
cactgctctccggcaatggcgcccaaattgatcgangccgttcccgaatcatataaacattaanaatgcagtatctangaagtgatcctaggtcgtctcccaacgagcaatggtcaaccaaacgttcataacagatagtatgaaaatagtaatgaattgtggggggggg

SEQ ID NO: 33994 - DNA, 442 bp, Glycine max
  unsure (1)..(442): unsure at all n locations
agctangagcaccttttcctcacttcttccttcattgatgggttgagccttctctagggttgtatgattggtctatagtctccttccatcattntcttgtgcatgtagttggcagggctgattcctttaagatctaatatgtgccacccaattgcttccatgtgtcccttgaggacctttaccaacctattctcttcctctgctgttagctcactgtgatcaccacaggctnggtctcgctctcctccaagaacacatacttcaggtggttgggtaggatcttcaactccaccttggtcttctcggatggactcccacttnttaattcttcaaagctggtcccccttgcaggaatgttttcttcatgatctaagtcttccaagaaagtcctcagatccttttcctcttcaatagttagataatccacaacattgatcaaagc

SEQ ID NO: 33995 - DNA, 433 bp, Glycine max
  unsure (1)..(433): unsure at all n locations
taccagtgggacactactcttaaaacaataatggcatacaacctccccccataaatacaaacatcaatgtaaatttagagcaagcttatgcgcatatntccttacgaacgttcacttgcacaagacattctattaactaagaaaaaatgcacccatatacaatcaaggcagcttcgttatctagattatntacatgtacttccaaggtgtatttgttacttacatcacacacatctccttggctaaatatacatacatgcatactcaaagcattgtgnggtaccaaaaattgcacatgtgcacatcttggtatttctaatacctatacatacacaaacttcatgatgaatcttgactatctacacaataaggtgctacatttcatgctctnttcaagttttggtacctaaagtcgcatgcanattcaagtata

SEQ ID NO: 33996 - DNA, 460 bp, Glycine max
  unsure (1)..(460): unsure at all n locations
aagattccttaagaagctagagcttagctacacatacctctataatagctaagctcacctccttgagatgagaagctagagcttanctacacaccctctataatagctaagctcaccctcatgacaaaaaacatgataataacaaaaaaaagtccttattacaaagacaactcaacatgccccgaaatacaaggctaaaaccctatactactagaatggccaaaatacaaggcctagacgaaggaataacctattctaatatttacaaagataagcgggctcatacttagcccatgggctcgaaatctaccctaaggctcatgagaaccctagggcctntccttggatctctagcccaatctacttggagtcttctagccaatgcccttgcggggtaggattgcatcanttactttcactcagatgtgcgattcaggcacatcagatatcgagacgctcg

SEQ ID NO: 33997 - DNA, 347 bp, Glycine max
  unsure (1)..(347): unsure at all n locations
tgcctagaggctgaaggtcaagatgtgacctgtgatgtcttcaagagggtatttttggagaaatattntcctgaggatgttaggaataagaatgagatggagttcttggagctcaagtatggaaacatgattgtggctgaatacgcagccatgtttgagaagttggtgaggtactttccccattatcatcgtagagatggtgaaagttccaaatgtgtgaagtttctgaacagcttgtgacttgaagtgaagcatgcagtgaattaccaaggtgttcgtcagtatccactcttggttaacatgtgtcggatatgggatgaagactcactagacagggcgacctatta

SEQ ID NO: 33998 - DNA, 317 bp, Glycine max
agcggtatgtcctccccactctttattcatgcacatagggagatgccccatttgcaaaggagtacacgagccagggcaatgcatagcccaagaagattcttccaggggtataaactacatgggaactcagaatcgccatggattccaaggctacaaccaaggaggacctccgggattcaaccaagggagggatgtcacataaggctcaagttataggaatcattcggtgaaccagtttaacaaggagcaaggaagtcaaacggcccataaccccaaccaagggatatatctttatgagaagtgtcacaacctaccct

SEQ ID NO: 33999 - DNA, 375 bp, Glycine max
  unsure (1)..(375): unsure at all n locations
caatagctgtagattctgagaggaagaggaggtcaaaaggtaactaccgaagtaatcaaacttcacatttgtcgagacacagaanaattcataaatgacaatataaggttatgaatgataatgatgcacgagattaaaggacttctctcttggtgatgagaataaagaaacacaatttccagtgttaactgtgaaattntataataaaaagaaaatggccttacatagttgggtgaatacatataatgaaatcttggaagctatggccataagtatgtgagatgcacgaatgatgttatagaatatgagtgtaaatgaatcaagttgtgaacaatggctatngagtctcttatcatggtggttacctaacctatc

SEQ ID NO: 34000 - DNA, 490 bp, Glycine max
  unsure (1)..(490): unsure at all n locations
agcttctaccattcaattaaattatatttctcctcacacatcaaatattcacttagtgtatgtgaattacanaactacccctaatacaaaaactagtctaagtgccctaaaatacaaaggctgaaaaatcctatatttcttgggtcccctacctacattatggagccctaaatacatgacccaaaattaatgaaaccttaatctaatatgtacaaagataagtgggctcatacttagcccatgggcccgaaatctaccctaaggctcatgagaaccctagggccttctcttgcatctttggcccaatcttcttggagtcttctatccaatgcccttgaggggtaggatngaatcacacagtttctatgaattctatcatctaagcaacaccaaanatcttgaaataaacttaaattcactaaattgcttaatgtggaacataactaatataactcgaaccaattcattacaataaataagggtaacttac

SEQ ID NO: 34001 - DNA, 319 bp, Glycine max
  unsure (1)..(319): unsure at all n locations
ctatccaatacattacacatacattatcaactctcatgcaacaagacctttcccacccatgcacctattatgcattcaatgggagattgtttcacanaccacatagtacagctacagaatcgtggaactgagataaagaatgcataactaatctgtagagaatatgaaaaaaaaaactagtatcagttgtatgatacataaaagtaaccgattggcacatccaacaagactgaagccggtaacaacaaattcaaatatgtcccaatacagatgacaggattcttcattaccccaattatatntatgccttanatacctt

SEQ ID NO: 34002 - DNA, 485 bp, Glycine max
  unsure (1)..(485): unsure at all n locations
agctagagtgttattcggttgaggttgagctaagcgcgccatgctgcgctaagcctattctgcagaaagaaatgttttttgtgtcttcgagcttagtgccagcctgctgcgcttagcgcctgagtaaaatttcataaggcgcgctaagctcagcatgttgcgctaagcgcccagtcaaaatttcagttttatttttctgtttgtgaaaataacctgtgttaatctcttgtgtttattctacantttgcagatggcatccaagagaagaaaatctccttctacacctacccaagccagatttgataggtccagattcacatccctagaggcttgngagagatacactgacattgtggtgcctcgaaagctactaccagagaggaatgtggtagtttattacacagagttngacgagatcaaggaggaactcaagagaagacattgggatgagaagctgactggattttctaacagtagcatagaca

SEQ ID NO: 34003 - DNA, 84 bp, Glycine max
taaaaagaaactttggttaaaaagggttctctttttatatgtattaagcgtgcactgtcctattgagggagcaagggccacttt

SEQ ID NO: 34004 - DNA, 250 bp, Glycine max
aataataactgaagggagtgggggtaatgtgggaaacaaatactaaatactaaaataccatatatcacgtggagaggtgtaagtagtcagtctatcatgtttcggagttggaacacagctaagttgatggagtattctcctcattacaagcaggcctgcaaataattaaccattttccacaccacaagcttggtgtatacacatctttaactgtttcttgggtgaggatatcttaaatgagagatacata

SEQ ID NO: 34005 - DNA, 476 bp, Glycine max
agtcacctgcggcatgcaagcttctttggagaaacttccttgagaagctagagcttatctacacacacccctctcataactaagctcacctccttgagaagcttccttaagaagattccttatgaagctagagcttagctacacatacctctctaatagctaagctcacctccttgagatgagaagctagagcttagctacacaccccctataatagctaagctcacccccatgacaaataaacatgagaataacacaaaaaagtccttattacaaagacaactcataatgccccgaaatacaaggctaataccctatactactagaatggccaaaatacaaggcctggacgaaggaataacctattctaatatttacaaagataagcgggctcatacttagcccatgggctcaaaatctaccctaaggctcatgagaaccttaggggccttccttggatctctagcccaatctac

SEQ ID NO: 34006 - DNA, 390 bp, Glycine max
  unsure (1)..(390): unsure at all n locations
gtcctaatggacattctanactagaatcaactcactttagactccaatntcctctaaccccaaatgtggcttttctaaccctcaaaatctcacactnttccactcacaacacttccatcctcacatttaaccctatgttaactctccccatcatctctaccagttttctatcaacatgttcagcatacacatatcacaaaacatcatcataaaaccctanatcagcatgggtagatttgctcacatcaaacatgtcaagtttatcatgatttcaacanattccttcacaaataactactctaaggcaatgacctagtaaaactatccatcataactcccagaaacccaacacccacgaatntcatgtgagaagaagtccacccatacctg

SEQ ID NO: 34007 - DNA, 555 bp, Glycine max
  unsure (1)..(555): unsure at all n locations
ctctanggggaagtttctcaagaaagcttctcgaggaagctacctattctatanatagaagtatgtgtaacacttggtggaactntgatgaatgagagtctcgtgagacacaactcannagttcaacttctctcccttttctttcttcaatntcgtgctcccncctctctctttctcaccctctttcttttcctccattgaagcatcctctccaagcttcttatccanggctcctcttggtggtgaagctccttcttccatggcntattccctagtgaatggcgcctnctctcacctcttctnctttggtttacgctgcatctccatggtggaaancaccattanaggacctcattgangctcanagatccagtctccatagaagccccacaagcaggcttccatcagatggcggtatgtcntnttccgctggggagcatcatcagaatcatcatgattctctctcccangacctctggcaggnnacctacctaggggacgaccttggcnttatgtctaaccatgatctggatnggctacagcatatcattccgn

SEQ ID NO: 34008 - DNA, 231 bp, Glycine max
catcttcttcgaccttggtgattcttgactccatcttattgaagcacatgtccactgtgaactccgaagtatcaaacctcttaccaacaaagggttgaagaccatcgcacctgtccgaaatctcttgaagaagagaggaatcttctccaccatgtccttcgtcatcaatgggttgagcacccattttcgccaagagccctcatgctctttaccgtatccaaaagatgcaat

SEQ ID NO: 34009 - DNA, 285 bp, Glycine max
  unsure (1)..(285): unsure at all n locations
caccgataacattatcgaccagaatatccttccggagagaaatgtgcagatntatcatactgagtttgacgagtttaaagtggagttggagaagcgtaatctacacaaacgcttcaccaacctccaagagggaagcattgatgtggcacttgtcaaagaattctatgctaactttgacagcttggaggatcaatcacctaagcatgccagagtaagagggcatctcataaaaattgatgcatacagcctcaatgattntcttgagacactagtagtcctagatga

SEQ ID NO: 34010 - DNA, 299 bp, Glycine max
  unsure (1)..(299): unsure at all n locations
aagctcctaatatctcccacactntnntgggtgggccattcttggatggccttgattttctcagggtccacttggaccccatntctaccaactataaaccctaagaanactatattatctacacaaaaagtacacttctcttatattgcatagagggtgtntntcctaaggactganagaacttgcctgagatgtcctaagtgatcatctaggctcctactgtacactanaatatcatcaacataaacaactacaaatctacctatgaaatcccttaagacatgatgcataagcctcat

SEQ ID NO: 34011 - DNA, 405 bp, Glycine max
  unsure (1)..(405): unsure at all n locations
agctntgagggtgcgtagcccaccatctnttatagtatagtatcgataatgtgtctgccatcacgattatcgtctccctttccatcattgggggtaccacctgngccgccagatccctccacctttagggcgtgttctttgaaagatccgtccncctttntgcacatgttctgtagttgcatcctatccgaaaccatatcanaattgtactgatattgcctaacaaaggcaaccattaggtccttccaagaatggactcgggaaggttccaagttagtgtaccaggtaacagctaccccagtaagactttcttggaaggaatgtatcagcaattcctcatcttttgtgtattcccccatcttctgacaatacatctttagatggttcttgggacaagtagtcccc

SEQ ID NO: 34012 - DNA, 406 bp, Glycine max
  unsure (1)..(406): unsure at all n locations
cctgttcctccctaccttacatgtttcatcanacttgtttctgaacacccactntgctccaacaacagaatattccttggggagttctacaagctcccatacatcattattctgaaactggtctagctcttcttgcattgctgtgacccaatattaatcagacatggtatcatctatgtngttttgctcaatctcatatagtaatgttgtgttcttaagagagatccttctctgtactttgtccataggatcacatatgatctangctctagatgttgtttcctcaacaggcatccagttggttctctggcctcttcaggttggttgtccactggtgagttagacgcaagttggttctgactctacacaacagtagacttaacaatatcctctatcttcatttatg

SEQ ID NO: 34013 - DNA, 478 bp, Glycine max
  unsure (1)..(478): unsure at all n locations
ctgcagcttctatatagctngaaccatttatcaataaacacaagtttgtgtttattcagaaaattagaatttatctcttttatcttagtaagagtgattcttctaagttcttgagtgattcaagaacaccctggctatatcaaatgactttcacaacctctgtgtgtttccctcgccgaanagagagattctttccttcctttcttcttcaaccttgttctttcaaaccataattccagaaaatccacttctacccagaattatctcgtggccataactcccattntagtgctaaaactaagtgattcttgagcctaaattgaatttcaaaacgagatctttcacctcattgtggaatcacctcatttagagccttgtagcttgagttattgtcatttctatatntttgtctctcaccacttaacctacgttnntttttcatttcattcttccattttatcccaagaaaccaccttat

SEQ ID NO: 34014 - DNA, 349 bp, Glycine max
  unsure (1)..(349): unsure at all n locations
cctcctctaacaccactggaatctgaagaaattcatttaggttgtctgcatcgatcttaatcagatgtcctcttactctagcttgtttaggggctggttcctctgggctgtatagattagcataaaattccttcaccactgccatgtctatgctttcatcttggagtatggtgaggcgtttgtggagattacgcctctccaacaacactttatacttgtcgaactcagtatgataaattntaacatttctcttcggaatgatgttccgaccaagaatgttgtccgtatatctattccaagcttccagagaatggaacacctgtatcattgtggcgtcctaaatatgact

SEQ ID NO: 34015 - DNA, 521 bp, Glycine max
  unsure (1)..(521): unsure at all n locations
agcttgtanggttaaagtctcacgatggtcacgtgctcatgtcttaattgttagccgtggctatacgagacatcttgccaaacaaagtcaggttagcgataactcgcttgtgctgtttcttccatgctatatgtagcaaagtcattgatccagtcatgtttgatgagttggaaaatgaggcagcaattatactgtgccagttggagatgtattctcccnctactttctntgacatcatgattcacttgattgtgcatctggtcagagaaatcaaatgttgtggtcctatttatctacggtggatgtacccggttgagcgatacatgaagatcttanaagggtatacaaagaatctatatcgtccaaaagcatctattggtgagaggtacattgctgaagaagtcattgannatttgtcagaatacttagagaaggctaaacctgtggggcttcctgagtctcggcatgatgacagagtgggtggtaaaggttcaagaagactgcatgtgatcactccaagt

SEQ ID NO: 34016 - DNA, 132 bp, Glycine max
  unsure (1)..(132): unsure at all n locations
tcacgaatgtcacgtgctcatgcaacaattgttagccgtggctatacgagacagctngctcaacaaagtcaggttaacgataactcgcctatgctnnttcttccattctatatgtagcaaagtcattgatcc

SEQ ID NO: 34017 - DNA, 390 bp, Glycine max
  unsure (1)..(390): unsure at all n locations
atgcaaacatgcaataaatgaaactccaattcagattggagaatagcataaaaaatactcaattaattaatttggtccaggttttgttcttttaacttaaggtaacaattattgcatanggtttatgttgaaatggaaattgtttgttgacgacatgttgcttgttggtttggtggatcaatcangacgctaangaacaggaagagaagagggccactactcagttgatgtttgatttgggttagaaggcctatgggaagggctcctatggacatgccattgaatttcttgaagttgcactcactatcatnacccaggcctacattattggtggtgaggttggttctttcttgcccaaacaagaatttntgtctgattgtggaacgagga

SEQ ID NO: 34018 - DNA, 396 bp, Glycine max
  unsure (1)..(396): unsure at all n locations
tctatcctccctaagatggagtcaaacccagtcaccgtcattaagaactagcttttttcttcctctattgcctntagttgaatacacctttgtttggttcttaaccctctcatgcaacttctttacaactctgacctggattccccttctttatgcataaaagaagtgtccagttggaggggaataaggtctaacggtgttaggggattgaacccatagacaacctcaaaaggggattgcttggtggttctataaacccnctattgtacgaaaattctacatgaggaagatattcatcccaagacttatggttgcctctcaaaagagcaccttaaagggtggataaagacctatttactacctctgttcgcccatcagtttgtggatgacaaagtg

SEQ ID NO: 34019 - DNA, 452 bp, Glycine max
  unsure (1)..(452): unsure at all n locations
tggaatagtcagtctttctactttngtatgttgaccacagagtggtacctggagatatgtcgcggtggtcaagagaccttggggacgtcatgtggggtgctattgcccacaaccaagcttgaccaatcccaacccaacccgagcatagtcagtcaatgataacctgtgacgtaccttaacaggcgaagctctggcagtcaacccatataagatcaaagaccacacagcatggacgcttgtgttgtggcttggcanctataaatcttgagggggatctggactttgcctctggtaataaattacaacggtgtgtatctttacaccgcttaaattggaacaggaagtaaggtgccttctggattaattaccaggtgcgtatcattaccggcttaaatggaacagaaaataaaggctctgtatctattccacggggaatgaaacaaggttaaacg

SEQ ID NO: 34020 - DNA, 523 bp, Glycine max
  unsure (1)..(523): unsure at all n locations
cctgttatttcagctgatgaagatgaatccgtggccacctcatggactcctctaangacaatagcatcatttcttgcactaaatnngtgggagttggaagccatcttctcaatcaaattcctagcctcagcaggggtcatatcaccaagagcttcaccactggcagcatcaatcatactcctctccatgatgctaagtccctcgtacaaatatagaagaaggagttgctcagaaatctggtggtgaggacagcttgtacacaanttacttgaatctttcccagtactcatacaagctctctccaataagattnctgatgcctaaaatgtcatttctaatggcagtggtcctagatgcaaggaagaatttctccaagacaccgctctaatgtcatccagctgaaaatggacctggacaacgtatataccaatctttgcactccttcaaaaatagaaacgctttaaatatatatctctggacatacggcttatgtgaacaacatatgaactctatatctatgagg

SEQ ID NO: 34021 - DNA, 413 bp, Glycine max
  unsure (1)..(413): unsure at all n locations
agcttatgcacggaanatgtaattatgatattgagtatcccgaagaaacaccatttcctatttaaccatgcattangtaccatgttcaattattntgtttttaagtgaaacgggtttatgatcccaacatggttggctcgtggtgcctaacacatgaaactaagaatgtagtgtgaagtttcacgcttccccctttntaggttntgttntgtagaggaaaacgcaaggatgagcaaacatgaaaacaaatggtatgcaatttggcagatcaaaaagtttgttgaacgcatatgcatgatgatgccatgactcatgcaaaatgtgaggctggaatatgataacggacaaatgcaggaacgatatgttcattatgatgttatgaagagatgcttatgcgatgcatgatatgaatg

SEQ ID NO: 34022 - DNA, 128 bp, Glycine max
cgagtgtctcgatatattatgcgcctgaatcggacctccgaatgaaaagttatgaccatttgaatttctcgagagctacctcttgtcaatttcgagcgtctcgatatattatgcgcctgaatcggacc

SEQ ID NO: 34023 - DNA, 391 bp, Glycine max
  unsure (1)..(391): unsure at all n locations
gctagaggacccaactaggtcgttattgggtcttatattactggtaccacatattttttatctaaactnttctgctcctgaaaacatattaattagccattagatggtataggatgtccagaaagagaacagtaaagtttcttttggtctaaacttcaggttcaccggagacaatcttatacaggtagatagaaccattattcttgtattacaggaccataaagcatacataaaatatttatctactatgtttatttatgtctactgttggctgacgtgtggacgcattatctccaaaactttcctatcattcatatgatccaagtggcacccaccttgtattatgctccctcaagtaaaaagggtgcttgtaatcttcttctttcatgcg

SEQ ID NO: 34024 - DNA, 585 bp, Glycine max
  unsure (1)..(585): unsure at all n locations
ctgatacgtgatgatcgcatcttaatgctacancttgatactaagctaccgcctgacatacgcattatctgatattatgtccaggttatttacctcacaacatttgctatagtggaaagttgacacagtttgctgtcagggtaacttcttacgggcccaccaccatagagtatgaagaatagctctggccttacaacggttaggcttgaacaaaaccagctgacatgacatataacagatgaattcggcgattatccacatctggagtacatcgacctgaatgacaaatacttatatggccatctttcccagaactgtggaaagtgctataatctcacatgccttataatctgctacaataatctatcatgcagtattccatcatagtctaagcatgcacaccaagtacatgtacgtcatctgtcttgcaaccatctgaantgacgcgtttcagaagaatttgtanattgacctaactgtgcatctttctctcataacataatcnttctcaaacgtccttatcagtacatcttggagaactggaacatacacctggaccagatttttctagctaattcaatcact

SEQ ID NO: 34025 - DNA, 405 bp, Glycine max
  unsure (1)..(405): unsure at all n locations
agctagccatgaatngtttcatgtgtactattaaagatgctggcataatcctgtcatataacacaaccataaactaaaataagcatatgtgatcagtgtcaaaataaaatgcaaccatttacaaaaccaatcaagaaaataagaatagattattacagctaaccaatcaacaagcctttcaggtagccatgcttgagattgcttgtccacataaaatatttcaattaactcccacgcagctttcaaagatgtaggctcttcacctctctatattatgtgtaatgtgttaaaaagcaagtgattaacttctcggtatcataattcccacaaagcagatctcagctcagctaaacacggtanaacaatntagaacctanaacagtaccttagcaattacatttgggt

SEQ ID NO: 34026 - DNA, 344 bp, Glycine max
  unsure (1)..(344): unsure at all n locations
tgaagctcactacaagccttaaatgaaaaaccatgatatcaccatatccttaaggaattctggagctttggaattgttttgcgaataagtgtggcggggtattgtttcattggataactggatatgttggctatgcttcatgatgtatattgcgccatactcgatgtacattgtatatttggtaaatgttggacatgctgaatgaaatgttgtttctcacaggctatagagtaaaacacaaaaaatcgaagatgaaaaagagaagcaataaagttgagtgaataagatcttaaacggcaaaagaatgatgagactcttggttctactctnctatgttacttctt

SEQ ID NO: 34027 - DNA, 417 bp, Glycine max
tttccttattgtcctattgcaaatagtgctcacggattgtattgataacccaatagccgatatcggccatgagataaccccaactgatatatttcaagcgacattagcgcatttgttttttaaatacgctcgctggcagataatgttattcttacggctgacgaagtattcttgttacggcgctgatataagaattacaatgtatgtctgataatgtttcttggcgagccaaccgacgtttgttcgccaaactgcatgttccatttatcggcagaaacattactcactcggaaaaaaattgccaccacttttgcttttgaccaggatgaattaaactcataccttcacgccggaaatacccactgattattcactgactttcactttattaaaaggtgctggcataaggttttccct

SEQ ID NO: 34028 - DNA, 520 bp, Glycine max
  unsure (1)..(520): unsure at all n locations
attgcaccatgattgacgcctctaaatgctgnctccatctattngcgacctatgaatactcagctctgtctgtntagatatctctacagagatataggtccaacttccatattagtttgagagcatttgctgtgagaatactggcatagaacacagcgagaagaggaaaccatctgagagcatgagatgagtctgcgagtgattgagaggttctacatgtggaggagacattcccactacttgtattcctataatccttcagtgttctcttctctgtgttgaaacgacgcttccacatatcgatagctaattctatgtggttcttcttgatgtcttgatgaaatcttgatatcattaatgatgttagtgtcttgcctaaatctctttcaaggttttcctgtccgcgaatcgcttgtggacatcacaggaactggtgcttttactatagacggctctatgttatacaggatcggacatacctctgttttgtctttacgggcatttattttccacaagacct

SEQ ID NO: 34029 - DNA, 51 bp, Glycine max
ctcatattagctgattttgacattaaatcatgaatgaagtatgtattatgt

SEQ ID NO: 34030 - DNA, 307 bp, Glycine max
agcttgccacccagctcgcccaggcgagcagggttgcttcctccagaagcaacagccttctggaggaatcttctggagggcccaagtgggcctggttgctatttgcacccccatttttactaagtacaccccctgcctttttttggtgattcttttttcgtaaagttacggaaacttacgaatttcgtaacgatactggttttctttccgtaatgttacggaaccttgtggattacataatcatcccctttttgacttatggaatattacggaacctcactaattgtgcaacgatgcttccatttga

SEQ ID NO: 34031 - DNA, 256 bp, Glycine max
  unsure (1)..(256): unsure at all n locations
tttcttctaaagcaattgaaatcttcttattttgacttctgctaataaaaaattgcacagatgttaatttattcattatttcattaaaaacaatagtaaagtgaagaaattacaatcattattagccaaaatcgactatcaaattaactcatatttcgtagttattagatctcttacaaacatgcgagatagagaggattagagggggntggttcacaacaatgtggggagagttctgtagaagcatagcttcatg

SEQ ID NO: 34032 - DNA, 365 bp, Glycine max
  unsure (1)..(365): unsure at all n locations
cgctaccgtcgcctttantttgaacctttgagcccccccgggaaccttaaatcacctgcggctccaactctgaggacccaaaattttttttaaagattttctttccaactttaaaacgggttgggttaaacataaaaattatatttaccctaaaatgaccctcctttcgcttttctaaatggtggaaattggtttgcttattaaggggttgacaaaaaggtttttaaacaatcaacggcttttttggggtaagtttttacatttaagtattgggaattggaccgtttttgggataagggttgactagggttccttatggggatcgttagaaccagaactttttaaacttgaaagaacccagaaac

SEQ ID NO: 34033 - DNA, 121 bp, Glycine max
gtgactttatccccagcgactgctagtacttactgcgtcattctcgctacctaaaataaatcatgtcaccaacgtgattgtgtatccggactttgtaaaatgattcgacgttgggggccgc

SEQ ID NO: 34034 - DNA, 343 bp, Glycine max
  unsure (1)..(343): unsure at all n locations
tgtatttctctctaccagaagcanaaatggttttaacagctttcagaatagtgtgaatctgacaattaaaaagttgtaatcgattaccagtaacgaaaaactttgaaattaaaactgagaaggcataactcttcacaattaactgtgtaatcaattaccacacatctgtaatcgattaccagtgagaaatatttaaagataactctgaaaaatcacaactcttcacaagttgttngaaaggccaccaaaggcctataaatatgtgacttgtattcgaaattctntagaacattcattgtcctatcttctcacaagagaatctttggcaatcacttgcaaatca

SEQ ID NO: 34035 - DNA, 133 bp, Glycine max
  unsure (1)..(133): unsure at all n locations
gattgaaccaccaactngttcatcaagctcctctaactaagacttgttcagagtcatatggaatgaacacccagagtccaagatccatcttgtcatagtgtcttcatgagacaccattatagtctcatctgac

SEQ ID NO: 34036 - DNA, 215 bp, Glycine max
  unsure (1)..(215): unsure at all n locations
ctaagctaaacctacagacncactangtgatctacaggacttgtngttgtcaagttcgattgaaccaccaacttgtgcatgaagctcctcaaacttagacctgttcagagtcatatggaatgaacacccagagtccaagatgcatcttgtcatactgctttcatgagacaccatttaagcctcagctgactcataaccatcttcaactagagcac

SEQ ID NO: 34037 - DNA, 112 bp, Glycine max
tgcaagcttggaagattatggggttcccataacatggggtaataggtgggggacgggcgaaggtgcgcagtaagttttccacgtccacaattgcgcgctataaaccctcacc

SEQ ID NO: 34038 - DNA, 303 bp, Glycine max
agcttggaactaccgatgcatttaatttcaagttcagttcaacccttgtaagtgtacatcaataataataaaaatgagaagaaaaccaacaggatcccccaacccagtgactaaatcgaaggacaaaagtaaaattaatagctccttacatagaaaaagtcaaaccaataaccataagatttcatgattgcaataacaacatcaaataatgagtttgaatgaacaacagataagaaatgactctggatacctgagaagagcggagaaggtttccctggtctggacttgaactcagggtgaaac

SEQ ID NO: 34039 - DNA, 224 bp, Glycine max
gcgatgcttcttttcatgtctgcctgagtgggcttatagcctaaaccatacttcccacgattaccttgggtatttatcagtctagttatgccgccgctggtttttcctaaacccatcccgggctcataaccgttccccaacataactcgggccatcattaccgctgcatcggacagactatgcttgccaaagagggagtccacggaggaaatgctgaccacctc

SEQ ID NO: 34040 - DNA, 223 bp, Glycine max
aaaccttcaatttttttctccttcccaaaatttagttgcccgcaataaaaccgaaaaaatattggcccttgtttttgcaaatttgattctccaactaattggtaacttctattctttctgtgtttaaccatattgttccaactaatggcacagtgcaaagagatattcagaatctttgggtggtttggtgtatcccgacataaaaggaggacataagtatgac

SEQ ID NO: 34041 - DNA, 236 bp, Glycine max
  unsure (1)..(236): unsure at all n locations
ctgatctctctatacttaacaacatctcatanggatgaatgaatcgggcatactctaagcttatgcacggataatgtaattatgaaattgagatgcccgaagaaacaccattttctagttaaccatgcatgaggtaccatgttcaattatgttgtttttaagtgaaacgggtntatgatcccaacatgggtggctactacacatgaaactaagaatgtagtgtgacagttcacgct

SEQ ID NO: 34042 - DNA, 244 bp, Glycine max
agctttagtgtgttcttcgagcttctctgcgaaaccaaaagtatgtgatgcaatcctaccccgcaagggcattggatagaaaactccaagtagattgggccagagatgcaagagaaagccctagggttcttatgagccttaaggtaaatttcgggcccatgggctaagtacgagcccacttatctttgtaaatattaaattaaggtttcattatttttgggccttgtatttagggctccataat

SEQ ID NO: 34043 - DNA, 142 bp, Glycine max
agtgacatccttggccagagtggctttgatggcgatgacactaaacacataatcaccattgagaatgaagatgcttggtatgaatattgcaactatgtaatatatatttattcgttattcagtcgcataaatcggctaaact

SEQ ID NO: 34044 - DNA, 299 bp, Glycine max
agctttaggcgatagttaaactagaacactttttggccaatatggaactccttcctaagaatcctagagtcatgaatcctcttcactttctctttgtagatcttggatttctcataggcttctaagcgaatctcttcaagttcttgcaattgaagcttcctttccatacccgcttcatcaaatgccatgttacaacccttcaccgcccaataagtgcagtactcaatctccaccggaagatggcatgccttaccaaaaaccaccatatagggagacatccccaaaggtgttaggtaagc

SEQ ID NO: 34045 - DNA, 265 bp, Glycine max
  unsure (1)..(265): unsure at all n locations
tgagcaactatgcatcaacctaacgaatgataagttgccacaacattntaatcacgcaaggttataacttcataatacaacttgaacatcattattaatgaaaatacataagatagaagagatgcatctgtttcaacagcatgtattccagatggagcaagaagagtacacacaggaggaaatcaataggagctatgtagaatctgtggataatcacgatgttctcgatcttattgagaacgtagntagatacttctgaatcatc

SEQ ID NO: 34046 - DNA, 297 bp, Glycine max
gcaagcttttatttttttggctaaaatgctctctggtaatcgattaccatattagtgtaatcaattacaggcagttatttttggctaatatgctctctggtaatcgattaccatattagtgtaaacaattaccacgcgtccctgcacctatatatacaaatttcaaaataaaaaatctgcaacctctcttattttcgaaaacccttgttcccaattctcttctgccatatctcactcatttcttgtccaaatcactccccacaaagcccaaacttcatcttttttcattctctttca

SEQ ID NO: 34047 - DNA, 156 bp, Glycine max
tggattgatgtgtgctgtggaatatcctagctagaacctactacttctcttagataaagagttctcaaatggaatctatgacgttttcaggtcttccatatctcggaacaactgatactatttactactgcatctatgataaaactagtaatgata

SEQ ID NO: 34048 - DNA, 307 bp, Glycine max
gcttctggtgactaggaagtacgttattctggtggtttccaaaacggttcctttgccgagtatgtgtatacgtgtatatgtggattatgttcattggtctttggtattgtttggattttggtttgggcagaagaaaaaaagaaggaatggagacgagagtcgtcatcacagaaagggcaggacggacgaaatcagtgtcctatctttgctttcctcttatctccgatgaaaagtaaataaagaagggcaactgtcataccctaatttcgtccggggattattacttgatgacatgcagtgaatgaaa

SEQ ID NO: 34049 - DNA, 249 bp, Glycine max
ctgcaggcttacagcctttttccatattggtattgaaggcaggcccaacaagaggttttttatgcctggccatgcaaaaatagcatctgagtccattttaaaaggcgagagagggccttgatactttaagacgcacaatggggatttttacctgaaaagaggtcgttgctgttgaacaaactacagagtttttggagagtatcgcctgcccttgaatgaaaaaaatcaatggtaaaaccacaaaggttg

SEQ ID NO: 34050 - DNA, 319 bp, Glycine max
  unsure (1)..(319): unsure at all n locations
ggtcttcgctggcgaaatgatcgaagtgggtctaanatgaggcatatctgatcatcatgcttcgataaatgcacaanaactgtggcaaatgaagagggtgagaatgagggagacacccatgttgtgcctgtcagtcttatacagccaagtttaccaccaacccaacaatgtcattactcagtcaataacaaaccttctccttacccaccacccagttattcacaaaggccatccctatatcaaccacaaagcctgtctgccgcactttcaatgacgaacaccacctttagcacaaaccataacaccgaccaagaaatga

SEQ ID NO: 34051 - DNA, 200 bp, Glycine max
tggtaccaccatgccctcctgttttccaactgggaaaatggcgaatggaggaacgcccccgcctttaccccgcctgcatgatgtaaaccttttctgatttaaaagctctattgatgggcccaaggtttacaggttatcctcttgttaaggctgtgtggttttcgttttggaatgtaaaatacaaggaaactacttcatct

SEQ ID NO: 34052 - DNA, 377 bp, Glycine max
  unsure (1)..(377): unsure at all n locations
agatgttcgactgttccaccaattcattcttcaatctctccaagtcnccctcccgatcattctntggctactaatccagcgcttcaactagaatcgaccccattatgatgcaatactngcatttgtaaactaccagaaaattatggtcttttcgaacctttatctttgacaacaactttagcatttgttcctattccttctttatataaataggaaatggagcataaatattggtaggatgctatagaaactgaacttcttgcactagaggaaaatcagacatgggacattgttccatgtcctccatcggttaaacctctttggtagtaaattgtatccactataaagctacattcagatggatcaatagatcgata

SEQ ID NO: 34053 - DNA, 125 bp, Glycine max
  unsure (1)..(125): unsure at all n locations
atctgatcatcatgctntgataaatgcaaaagaactgaggcgaatgaagagggtgagaatgagggagaaacccatgttgagccttgtagagttatacagccagattttccaccaacccaacgatg

SEQ ID NO: 34054 - DNA, 323 bp, Glycine max
agcttctagagaaaactacatgaagctgtctcggatttaacgctgcccagcttttgttaaccgttggatcttttcgaaatttggtttacaacttttcatgacaatttaccatgatttaaccgttgggatcgttgagaaactatctggagtgtgatagaagccttccgttctccgagaggcattctctttatttaaagcatcttctagcccttttgctttttctttgttagctctagagaaaaaatgttcattgccttctttctttcttttctttcaaaatccattttttaaagtttacaagtacctttcttccattcacccac

SEQ ID NO: 34055 - DNA, 190 bp, Glycine max
tgcggatgtggtcttcgctggcgaaatgatcgaagagagtctaaatatatgcttatctgatcatcatgctgtgataaatgcaacaaaactgtggcaaatgaagagggtgagaatgacggagacacccatgttgtgcctgtcagtcttatacagtcaagtctcccaccatacccaacaatgtcattactca

SEQ ID NO: 34056 - DNA, 298 bp, Glycine max
tgtttccatattcagatcaaatcagtgtttcaacaattgttcttttatcaagtccatgcaaaaaaagcatctgaatccattttaatatttgggaaagtccttcattattttcatccccaagatacacattttttttaaaaaaaacctttttgttgtttttcgatctacaaaattttcgaagagtattggtggtccttcttttcaaaagctcgttagttttaagaaaaaggttggaatctcacacaaaattattatcctagactacaccatcaaacatcataacgcgcgtgaaaataaa

SEQ ID NO: 34057 - DNA, 308 bp, Glycine max
  unsure (1)..(308): unsure at all n locations
tgagagatgtcttaatattgtttctattagaagtgatcatggaggtgaattataaaatgattattttgacanagtttgtggagaagatggaattcaccacagacctcaataaaatggtgttgtggaaaggaaagatagatcccttgaagaaggagctagaactcttctaaatgaaacaaagctaccaaagtacttatgagctgatgttatgagtactatctgctatactttaaataaggttcttataagacctattctaaggaaaactccttatgaactntacacaggaagaagaccaaatatatctc

SEQ ID NO: 34058 - DNA, 294 bp, Glycine max
ttgcttgagaagcttctattgaggctgtatctttaagtctcaatgaggtcctttaatggggatttttaaccatggagatgcagtggagataaaggagaaaacctgagaggagtatgtcatccactagggaataaaccatggaatgaggagctttaccaccaatagagtgccttggataaaaagtttatagagaaagctttaatggagggaaaaaatgagagagggggtgggggcatgaaattgaaggagaaaaagagggagaaaagttgaactttaaagtgtgtctcacaagac

SEQ ID NO: 34059 - DNA, 275 bp, Glycine max
  unsure (1)..(275): unsure at all n locations
tcatcacacattgtgttcaacaaatgagccgcaatgtatgtcaccatcaccatcattcaaatcaacaaactctgctggttctagagtcattcaattgctatgatagcgagaggacccgtgggcatggatntcaacgttgcaacagacaactcacggtaattntctagctatgggtataagtaaanttgttcaaactcctcattacatctggctcaatacatganattcanatcttataactattattgaatcatttcattggtatcccacaatac

SEQ ID NO: 34060 - DNA, 292 bp, Glycine max
agcttcttttaccacctttattaatctattcacatttttaaaaatctacattatttatgcagattatgttgtcataatctcgtgtgtcattttgatggtccttttcttcattcaacatcatgggacacatagagttgccttcatggttgccccactacttgcaaaatggcttttgtgcattagtggtattggtgtatacaacagattctactggaaccgacacatataccgtgcactttctccactctacatgttgaaattcctcagagccactggcattgaaggatggatg

SEQ ID NO: 34061 - DNA, 326 bp, Glycine max
  unsure (1)..(326): unsure at all n locations
gctgctcggatacattgcacattgctgatcgtcaacttattgtttgctcatcactgaagaactccatagttaagcatgcttaacttggagtagttgtgggatgagtgaccttctatgaagatctccggaaagtgtgtaagtgagaacaaaataggctgaatagtctcgtgtngatttgtggtgatagtcatcaatcctgaaagttgtcaaagaagactttcaagttcttgggacatgcttcctacagagggttctaactagtggagggctctgacctacgaggactcgcatgaagtgccatcgtgtcaagtatcatagtatgtgag

SEQ ID NO: 34062 - DNA, 296 bp, Glycine max
agcttagggcctgtttccatattcagatcaaatcagtgtttcaacaattgttcttttatcaagtccatgcaaaaaaagcatctgagtccattttagtatttgggaaagtccttcattattttcatccccaagatacacattttttttaaaaaaaacctttttgttgtttttcgatctacaaaattgtcgaagagtattggcggtccttcttttcaaaagctcgttagttttaagaaaaaggttggaatctcagacaaaattataatccaagactacaccatcaaacatcataacgc

SEQ ID NO: 34063 - DNA, 289 bp, Glycine max
  unsure (1)..(289): unsure at all n locations
agagggagagaggtggaactttgaagtatgtctgacaagactctnnnncatgaatgttacaacaagtgttacacatgcttctatatatagactaggtagcttccttgagaagctttcttgaaacaacttcctagagaagcttctttgagataacttccttgagaagctagagcttagctacgcacacccctctcataacttagctcacctgcttgagaagcttccttaagaatattcctagagaagctagagcttagctacacatacctctctagtagctgagctcacc

SEQ ID NO: 34064 - DNA, 262 bp, Glycine max
  unsure (1)..(262): unsure at all n locations
gatctcaatctntntgtcaaaatatttaacaaatttcttataatgagaggaaatcaaagatgccagaacttcaaaccaaaaaggagaactgaagaatcatctcanactttaagatgttatgagtgcaatcaacccggacatctaagggctgattgtcaactntaagaaaaggatggagaagtccgacaagaagaacttctgagaaaagaatgcaanaaaggcctacatcacatgggatgatagcaacttataatcatctgat

SEQ ID NO: 34065 - DNA, 226 bp, Glycine max
  unsure (1)..(226): unsure at all n locations
attttttattatactcttaataaataaatgtagcttcaaccaatatagggggcgaagggttggatgaaatntcatccactaccgaataaaccatggaatgaggagcttcaccaccaatagagcgccttggataaaaagtttatagaaaaagcttctatggagggaaaaaatgagagaaggggtgggggccttaaattgaaggagaaaaaaaaggagaaaagttgaa

SEQ ID NO: 34066 - DNA, 153 bp, Glycine max
  unsure (1)..(153): unsure at all n locations
tgattcataatactaatntaaaagctgtcaatgacacaatgacagctgttaaattagtataattaaacatgcctgaaaatcgagattaggttattttatagattagaagaatctcagatattatcttaccacacaatgacacaagtgaccttg

SEQ ID NO: 34067 - DNA, 280 bp, Glycine max
agcttcctagcgggttctaattatatgggccattaaatctatcatatgctgacaatagccgagaagttcgtggatcttctcgggggcggagtaagtgtccgccatcactttggccttggctagcagtcggggaagatcttgactcccgttcaaggtaagagcaaatcggtccatccacatcgttgcctgttgatgtaacgagtcgatcacccttcctgtagcctccttttccgcatacacatgggcatactcgtctgccactctatgctcgtgggccgtg

SEQ ID NO: 34068 - DNA, 182 bp, Glycine max
aaagagaggaaaggaaattcccaatcaaagaatgggagaaagcataaagagaggaaaggaaattcccaatcaaagaatgggagaaagcaaacagaaaagaaagaaaattcccaatcaaagaatgggagaaagatcaaaagagagaacgagaagaaggaaagaaagctcctgatcaaagatcg

SEQ ID NO: 34069 - DNA, 307 bp, Glycine max
agcttcaagaaaaagatagcctcagcaaactccttattttcagaagggaattctatcaatagacctccaatctttaatggagagggttaccattactggaaaacccgaatgcaaatttttattgaggcaatagacctaaatatttgggaagccatagaagtagggccttatatacccaccacagtagaaagaattacaatagatggcagttcatcaagtgaaagtataactatagaaaaacctatagatagatggtctgaagaagatagaaaatgagtacaatacaatttaaaagtcaaaaacataa

SEQ ID NO: 34070 - DNA, 184 bp, Glycine max
  unsure (1)..(184): unsure at all n locations
accgcatctntactatcaaattccatgccaacatataattcttgaccaacattaaaggtcgacagcatctccaaaccgcaaatgtcctcctcatcaggataactccagntgatattcgtataatgtgagacatcattcctaaatggatnttcaagtcgccgagcacctaacagttcacaataaa

SEQ ID NO: 34071 - DNA, 314 bp, Glycine max
  unsure (1)..(314): unsure at all n locations
ctaagctatgctgcatatattacaatagacctcctcgacctcagcagctaaatcaactacagtatagcaattatgacctttccagcgacagatacaaccctggatggatgaatcaccctaacctcagatggtccagccctcagcaacaacaacagcagcctgctccttacttccaaaatgctgctggcccaagcagaccatacattcctncaccaatccaacaacagcagctacgccagagacagcccacacttgatgcccctccacaaccttccctcgaagaacatgtgaggcanatgactatgcataacatg

SEQ ID NO: 34072 - DNA, 275 bp, Glycine max
agcttcctattcattgctcatcttggtggtgaagctccgtcttccatgacttattccttagtggatggcccctcctctcacctattctcctttggcttccgctgcatctccatggtggaaaatcaccattaaaggacctcattgaaactcaaagatctagcctttataaaagccccacaagctagctttcattaagtggtgatcagagcacaagagcttcaagtatgtgctccttaaacctccattaatttttttgctttactttctcttccatt

SEQ ID NO: 34073 - DNA, 639 bp, Glycine max
  unsure (1)..(639): unsure at all n locations
agatgtcgccagtantacgcgcactatagantactcaagctggcacaggttnagactcaccttctgtactatcagcaccaatgatggttgtataagtcaccttatccggcgctagcctctttgtcttcattgttttcacaacttctcaagctgtttcaaattcttctcagactgctgccaaacgaagcatgtaacttcaaaatcgtacattcctcctcaacaganaaggtttcgtctttgagatcagctcttagatagataatccaccttacgctgcaattgatcccgcatctcaataatgctttagaagcaaaaattcacaatgccaagtgtcgcaacttacccttcagcgggagggcgacgtgtggctcgctggtgcgtcttctaagaaaggaatatgcaccgagtcaccaccaactgttattcgaaggatacactcngaaanagctgatacgtgtggtctacgaactctaactgtgacnggtcgggagttgttctatgcaccgngaaagtatatcactccacgtgctcctcacaatggaccacaggctcttactcaatgtgaaatatganntcaaaaggctattctccctgtatcgcctttgggtgtaaggcgtatagtctatattgggaggcacg

SEQ ID NO: 34074 - DNA, 248 bp, Glycine max
ctctacagcgagcctggcgcatgcaagcttcgaactgttttgtttgctaaagaaagcaatagggtgcccttgctgggataagaccgcccccataccaacacctgaggcatttgtctcaaccgttaatggaaattggaactccagtaggaccagtacccaagctactgataacgctcgcttgagatgatcaaaagcaccttgtgccttctcagaccactgaaaaagatcgatggtaatggccttgacta

SEQ ID NO: 34075 - DNA, 146 bp, Glycine max
cgagcccgcttattgggagaatccttttacgccaccgatgtgggtgttgccgcaatggtcagccatgagtgatatatccttgcatacgatctctgaccaacaagccttgtaaccatcagacaaaagtctttcatcccgaagagatt

SEQ ID NO: 34076 - DNA, 179 bp, Glycine max
gcatcttattgagattgatgctgtctgcctcaccattaagccccctcttgaacaaggggattatatacttctcacagcttatataattctctggagggcgtgtcaacaaattagatgatctctcttgataccctttccaattcatgctctgatgacgataaaaaggggtttctggacaa

SEQ ID NO: 34077 - DNA, 456 bp, Glycine max
  unsure (1)..(456): unsure at all n locations
gccttctagacacgtcattaaacacgcatgcatattatntactgtacataaaacctgtttgatactactacaatattcctatcaagtatatgcttatctttctntttgcttcttatttctacttcctagcacacaagaataaaaaaaatttatcaatagactgtagtatggttgaccaatatccatgttccgtacgtaaatatgagaatacgactttaatatnntaagttgtatgtatngaaataatatttgtgaaagagatcaattntntaaataaattntaatatcctgaagacttagtttatgactntcaaacagagaatactttacatttangaaaaaaatngaatcaaaagtttatttctattgggtatatgctaacttntattagtcatataatgatcttntntatcatgtataaacataanactagtattaaatttattaataataatc

SEQ ID NO: 34078 - DNA, 95 bp, Glycine max
cctgaagatgcgagacgtttggttttttgccattgaacaattcatatggagccctctttacaatggggcttattaaagccctatttaaaatgtac

SEQ ID NO: 34079 - DNA, 346 bp, Glycine max
  unsure (1)..(346): unsure at all n locations
ttatttcacaatcaatctatctatngactaacaattctaatggcaagttctcattcttgttctttctttgtctaacatacagangtgctcanagtcatganaagaaacataaactntatcacaatcatgcactcaattcanaaccaaatcatacactcaatttcacaaaaagaanagagtgttttactgccatgtcatcaaaatcaagtcaaactgttccatatgcttcagaatgagcaaaccaactacccataaataanactagcagtgtgtataaacataaaagaaatactatactaaaactataatcataataataataaaccacaaagcaaaaagtatcatc

SEQ ID NO: 34080 - DNA, 296 bp, Glycine max
agcttggagcgcgagtgatgtttattgacaacgatgaaagacgaaggaccagcgacgacgaagaccacgagtgagggccagcgatgacgatgcgagtgagggctttcaaagcagaactcaaacaaggtgaggtgagtagctcaacttcagcacaacacagagtcacgagtaagtgagtagctcagcttcaaaacaacgctgttttgtaattttcataaacccatggagtcataacagactcacgagtctacctaaactcgcttgagtctgtgctaaatcggacgattctactccga

SEQ ID NO: 34081 - DNA, 327 bp, Glycine max
  unsure (1)..(327): unsure at all n locations
gcttgaagcggagctcgaaagacaagactggtgaaggagaagctgaatgtggtagtcactanggtcacgaaagaatgtgataagcttaaagatatcaacatgaccactgctgaagcattagagcgggaaacgaaataagcccgaaacgaagaatgacccacataattaggaattgctgatgcatttgcgttgtgtcttatgctttggctttggcaagataaacaatgttctgtntaatgaaaatgggatttgattctaccctatgttctactgaatgtcctatgtgaattcaatatactatcaacttatcattgtcatgcattcacg

SEQ ID NO: 34082 - DNA, 272 bp, Glycine max
atggaatttaacattctaaattaggggcaaaaagcaaattttggggggcaagaaccaattgcctgcataaaaacattttgggtaccccactttaccacttttttcaccctatttaagggaagttttcccctggggaaaacatttcccccctccactaatggtggtggacccccacaatattggggaaataacccttttcccccccaatttaaaaattcctaatccctcccttttcccctttcttcccccttctaagcacctctttccccttt

SEQ ID NO: 34083 - DNA, 226 bp, Glycine max
  unsure (1)..(226): unsure at all n locations
cattgcttctcttgaattattatatgactgcctgtgattatggcgttacctctttactcttcaacatgaatgatgcaaaacaagcacacatgcgcaaaccctcaaattgcttgtcaggccaatacatctatngttatgatcttgctagcaggttcaatgaggatttgctgaangngtgtcactctctcactaagtcgatagatatgtgcgcttacatgtctaactt

SEQ ID NO: 34084 - DNA, 158 bp, Glycine max
ctgcaggcttcgagctcaaaccctcatcctctagggaacctattgcgtgaaaactgctaagatgccaacaagtttacatgaagtttaagccaggtacctttcaatgccccacagcatcggctttgatgcaccaatcaatgtctttcaacatgaccttg

SEQ ID NO: 34085 - DNA, 413 bp, Glycine max
  unsure (1)..(413): unsure at all n locations
tctcgactgatgaagatgaattcgtggccacttcatgcactctctctaatgacaatagcatcacttctggcactaaatngctgggaagttgaagccatcttctcaattaaatatttggcttcagcacgggtcatgtctcaattaaatatctgacaatcaaatcaagtccagttntaagaacatatgggacatcctcatcaaggtattggatgcacaagctntcgtaggtgaaatcangtgcagccatatcccttagagtcctctcacggagtggaggttgtgccatgttctcagaatgttcaaaatcataatgttcaaaacaataatgctcataatcaccaataacanaatgctcatgatgctcataaggaactanatgatgtctaactaatctatgaaatgtgctatctatc

SEQ ID NO: 34086 - DNA, 202 bp, Glycine max
tcttttccattattcaatgcaaaaccattacaacccctgatcttaaaaggagagatgttcggttttatgccattgaacaattcatatgtagttttctttgggaggggtcttattaaagccctatttaaaatgtagcatgcagtgttaacggcttcagcccaaaagtattttggaagaggagtatcatttaataaagttctag

SEQ ID NO: 34087 - DNA, 284 bp, Glycine max
agctttcttgttttggtgttttataaaaaatgtacaatgtatgtcggcttggtttttttgtgcgagctcaaccgacgttttgtttcggccgaaactgccatattcgcatttattcggccaggaaaacattagcccatctcggcaaaaaaatatttttcaccgatgttgatcgaaaaaaatgcaagtcgacttcggccaggaaagatgaccgatcgaggttaaaaaggaagcatcaccgcatgacgccgatcgaacattttcttaccgacatcatgcatatttta

SEQ ID NO: 34088 - DNA, 276 bp, Glycine max
  unsure (1)..(276): unsure at all n locations
catatattcagatccttgagaatgaccacggaagctctcggcanattcaaacggccatatacgttgactcgaatgtatgatcgatgcccatgatatatcgagacgctcaaaattgaacaacagaagctctcgagagattcatatggctataactnttctctcggatgtgtgattcacgtgcatcatatatcgagacacttgaaattgaccattgaagctctcgacagattcaaacggccataactttagactcgaatgtatgatcgacgcgcatga

SEQ ID NO: 34089 - DNA, 193 bp, Glycine max
agcttctagcccaatggactttccttgaattaattcctttgatagcccctttgaacctattttcccctttctttgttttgaagctcattacaagccttaagtgaaaaaccatgatatcaccttacccttaaggaattttggagctttggaattgttttgggaataagctgagaataagtgtgggggggggggt

SEQ ID NO: 34090 - DNA, 657 bp, Glycine max
  unsure (1)..(657): unsure at all n locations
ggcnnccccaatgtactgactcccttgtgtcgccgcactctgaaatactacagctggtacatctatattaagtccaagcgcatgcacgagataagatgagatcttgacacgatatgatcagatgggatgaaatacaatctggaagatatcaaatctatatgagaataaatctggataagacaaacattgatgaaatgaaactgtctgctctcttcaagtccagacccaataccggattcaagcccaattgctgataatactcctataattaaattaaagacacataattagtcaagtgggcccaaataataaaactgcatgactaatatgacaatgaaggataatcagtaattaaaatggtgactaaaagggttatgaaatacgagagagtaatgacacatcaatatgttattagaatgaatgagtaaattatgtgaggattaaggatactctcactaagttctatacctcatgcatgtatcanagaatatgcgtaggagaattaaatangcntgataactcgcctntgtngccacccaaacacttgttctctttactgttatctgagtcatagtgatagtgattnananncntnnngcagcgacgcattggannatcaaaagaacagantcacagaaacagaaatgactttgcatg

SEQ ID NO: 34091 - DNA, 208 bp, Glycine max
ccctgggagccaaaaagaaaaggaaggaaatttgctattcaaggaaaagccaaaagaaaagaaagggaattccccatcaaagaatgggaaaacgcccatagaaaagaaagaaaatttccaatcgaaaaaagggggaaaggtaaaaaaaggaagaggaagaataaaagggaagaaagcttctgatcaaggatcgaaagaaaaaaaaaga

SEQ ID NO: 34092 - DNA, 688 bp, Glycine max
  unsure (1)..(688): unsure at all n locations
tcaccactgcccctctcatcnncnctcccttctcctttcnncnnnncnnnnntacaaggggnnnatggttttgcatcatcgcacgcaccanactaactacgctgttattagtctcaattggttcatctgagcaagaagtcttatatatagaacaactgtcattagagaagtgagatatgtctatagcccaatcttattcattcaggatgtctcattgattcatgagcaactaaatgatgcattgattcacaaattgctaacgaaactntgtcatcttattttcatactcatcctcaacatctcacacttgaagaagaatcatncctagagtgagacatctcaacaaacatcctacatgcaacacataatagataggataatgagaacacactgacataatgctacattaacacaagactgcatgaaacaccagacccatcatccaccaacaccaatgccgtcaaatgcctataatcatagagtccggagatagacaacacaattatgtgatctcaaacatgcttatcacattgcaatctataaatcaatctataatatatctganacacaacttattgttcacgaatgaagtcnctattacgatctcgtgcttctcttgaacgacattatgctccctttgtgtacatactagtgacagtcaaagatgagacaagattgttgccataag

SEQ ID NO: 34093 - DNA, 73 bp, Glycine max
aatccgatagtattaaacgttattcaaactgatggacatgaatttttcaaacctttaccaagagttttacttt

SEQ ID NO: 34094 - DNA, 297 bp, Glycine max
  unsure (1)..(297): unsure at all n locations
catgtcacactgaagtccgattcaggtgcataatatatcgagacgctcgagatagaacatcggaagctctcgagaaattccaatggtcataacttttcacacgaaactctgaatcaagcgcataatatatcgagaagcttgaaatngaacaacggaagctctcgagaaactcaaatggtcataacttatcacaccgatgttcgattcacgcgcataatatatcgagacgctcgaaattgaacaacgtatggtcgcgagaaattcaaatggtcataacttgtcacacggatgtccgat

SEQ ID NO: 34095 - DNA, 291 bp, Glycine max
agcttgattaatcttgttaatcatgtagctctgcagatgatggagaatgatgtggttgctgttgttggtccactgtcatctggaatagctcatgtcatatctcatgttgttaatgaactccatgttcctcttttatcatttggggcaactgatcccactctatcttctctacaatatccgtatttcgtccgcaccactcagaacgactattttcagatgtatgcaattgcagactttgttgattattacagatggaagaaggtaattgccatttacatagatgatgacaat

SEQ ID NO: 34096 - DNA, 109 bp, Glycine max
acaactatgctatctgcttctgcagccatcgtgacagctcaccaccgagacacctcgccactacacctatgtattgtgctgcaaccatatcatatgaaactctatcatc

SEQ ID NO: 34097 - DNA, 295 bp, Glycine max
agcttgtcagaattctgggactgttgttgattcaattgggtagccaattgtcccatctgattggttaagctctgaatggaggctctggtctcttgctgaaactgcatgttctgcatagtcatttgcctcacaagttcttcgagggaaggttgtggaggggcctcaactgttggctgtttctggggttgttgttgttcttggattggtggaggaatgtatggtctgcttaagccaacagcattttggaaggaaggagcaggctgctgttgttgttgctgagggctggaccatctga

SEQ ID NO: 34098 - DNA, 246 bp, Glycine max
  unsure (1)..(246): unsure at all n locations
acgcgaacccctatttcctcgcgctctcttcttctacgtcttcacaactctgctatctccttctgcagccatcgtgacagctcaccaccgtgacacctcgccactacacctaggtatnttgctgcaaccttatnttntgaaactctatcttccctacatctnntttgtattcaataccatggctgagttttagcttcctgctcttattttatccatatgttgttccagcatatgcaattggngggg

SEQ ID NO: 34099 - DNA, 306 bp, Glycine max
agcttaacttcttcaggggttgtggctcacgggctacctttaaacttgcccaatctatgacgccggttcggaaaataaccgtcttcgtattgaatggttcgtgtactgttatttacaaaaaatgccaccggtcatttgttaaggacggttttagtagaaccgtccttattcacgcgtcgtaaaaagcttttaatttagtagtgactgtaatgttatttcaaagaagaatgaaagaacctagagttttcatcaccctcaccaatccatcccaccctagatttttgggtcatttcttcaaagatctcc

SEQ ID NO: 34100 - DNA, 355 bp, Glycine max
  unsure (1)..(355): unsure at all n locations
cgattacactggtgtttaagacaatgattgatttntcaagactctctactntaatcggttactagatggattaattgattacttatctcttgtttaagttgtttagaggtgaacaagaacactntaatcaattacttaggtcatctaatcgattacattgttcttgagtagttttctagatgttggatgaacactctactcgattacttagataacataatngattacttcattgaaataatcaattatcttatagatgtaattgattacacggcggtataattgtcttctctataaataaccagccttgtgtcacatctatatatcatgagatcattatagaatactcaataca

SEQ ID NO: 34101 - DNA, 165 bp, Glycine max
atgggaacccctccctgaatctcttaccgaaacagttttctgccaattgagagaaaagagtgcctaagggctggacccttcctattggttactccctataatagaaaaaagggggggggtgacggccactcgccaggcgagctaactagccaggcgagcaggtgc

SEQ ID NO: 34102 - DNA, 335 bp, Glycine max
  unsure (1)..(335): unsure at all n locations
acattactcttaaagcanaaatggcatgtaacctcctcccataaatacaaacatcaatgtaaatntagagcaagcttatgcgcatatttccttacaaacgttctcttgcacaagacattntaaccgaaaaatgcacccatatacaatcaaggcagcttcgttacctagaattattacacgtacctncaagatgtatttgttacttacatcacacacatctctntggctaaattcacatacatgcatactcaaagcatnnttgggtaccaaanattgcacatgtgcacatcttggcatntctaatacctattcatacgcaaacttcatgatgaatc

SEQ ID NO: 34103 - DNA, 312 bp, Glycine max
gctttctaataagcgaagcgtcagaatcggacttcccggggacaaggaatgaccatttgaatttcttgagagctttcattgtgcacacttgagcgtcactgatatatttttggcacatgaaattggaacttccggtgtcgcacaggattatagactcctatagaatattattgacgaactattcgtatgttcaaatatcaagcgtctcgaattattatgcacctgaattttacgtacggatgacaagatgtgaccatttgaatatcttgagagcatgcggtttttcaattctgagcatctatatacaggatg

SEQ ID NO: 34104 - DNA, 246 bp, Glycine max
ctggtcttctatggccattagtagtgtgttcttcctcatgtctaccacacagcttgcggaggacataaaatgtctgacaagaatgacgcgaatgtcaccatcttcttcgatctctatcactaccaaatcatcaagaaagatcatatgctcgaccctaaccaaaacgtcttctatcactccatatggtctcgcgatggatctatcaaccaactagacggtcatgtgtgtgggcatgatctctatctc

SEQ ID NO: 34105 - DNA, 298 bp, Glycine max
agcttgtttatgtgttgattttaactttggttttgcttatttactttcaaactcattaaaagatgacttgcaaagtaaatgaccgattgaatctttatttcacattgataaaccgaggttatgacacaaacgatcgattgaaactttattttacaatgactaagtgagattacaacacaaatgatcggttgaaattttattttatagtgattaagtgagattacggctcaaacaatcggttgaaattgctttacacaaagacatgagatcactgacggttgaagaatgagatgaagat

SEQ ID NO: 34106 - DNA, 262 bp, Glycine max
  unsure (1)..(262): unsure at all n locations
gctatcgctctacattacctcctattactcaatgagaattgttatatgtcggattgaacatctcacagtgcaaggctgagactatttatgttttccaagcattacactaaacttgtaaatcacgttcacttaaatcagctgtagaatacacaaattccttcgcaacagcaactgatttattntaaactttgtctgcttataaactagctgcgttcgacaatgccaaatagatacatatcaagttaaagatccctcccatcta

SEQ ID NO: 34107 - DNA, 170 bp, Glycine max
agcttttgtgtttcagtgtgtgtgtgtgtatgtttctgtgtgtgtgtgtgtgggtgggtgtgtggctgtgtatgtgtgtgtgtgtgtttctgtgtgtgtgtgtgtttctgtgtgtgtgtgtgtgggtgtgtggttgcgtatgtgtgagtgtgtgtgcctgaacgtatgta

SEQ ID NO: 34108 - DNA, 156 bp, Glycine max
  unsure (1)..(156): unsure at all n locations
cagaagtngttgactcttcaagcacaatgcttagcttaccaatgctactcaacaccaccaccttcagctggacctctttccactcctacaacgtctgcccaaccaattgaagaacgaaggactagatcctctgtcttggctggaacatgtttcact

SEQ ID NO: 34109 - DNA, 232 bp, Glycine max
gctttgggagaatcctcacggaaaacggtaccggaacgtttcggaagcgccttggcttaaaatttcttcacggaaacaatttttccaagcaaattccaaagaaagagaagtgcctaaagggctggaccctttccttcttgctttcctcccctatttatagcaaaataggggaggtggttgccgcccagctcgcccaggcgagctcagctcgcccaggcgagcagggttgctt

SEQ ID NO: 34110 - DNA, 192 bp, Glycine max
actcggatgtccgattctagcacatcacatatggagacgcgcgatattgaacaacggaagctcttgagaaattgaaatgtcataacttttcactcggatgtccgattcatgcacatcacatatcgagacgctcaaaattgaacaacggaagctctcgagaaattcaaatggtcataacttatcactcggatg

SEQ ID NO: 34111 - DNA, 279 bp, Glycine max
agcttgtgcaaatcaaatcactcctacatctcatctctagcatgcattttctttctttacccactcctcacgtttggttttttagggaaaacaccataactaaacgcgccgcaagggatccctatcgcaccagatccaaatctagaacgatgggtgatcaagaggagacacaggaacagatgaaagccgacatgtcggctctgaaagaacaaatggcctccatgatggaggccatgttaggtatgaagcagctcatggagaagaacgcggccactgccg

SEQ ID NO: 34112 - DNA, 273 bp, Glycine max
cgtcttacagacagcatagaagaatgtttatacggataaccactcgggtgttttcgcccgtcagcgtgactcacatgtcagtatgacaaatactgtgagcgcggaagatgacgtaaatctacgcgtgtcaaagggcttgtcggccgcgattgacgaaagacgtacaagacgacgttagtctctgcgtgctatcaggctttacgtcttactgacaccaaaaaagaatgtttatacggataaccactcgggtattttcagccgttagcgtgactc

SEQ ID NO: 34113 - DNA, 233 bp, Glycine max
aatttccaagatttcccgagagtggagggaacatttttccttttttaaagaatcaagcggaaatgcagggtacctgattgttccgaactcaaagacatcttttgggcctcagatcacattacaaaattggaaaatttatacacggctatataagcagtggcattatgaatgccttcttttcttgacaagcaaacctattttgatttataagaaaagatactggtacaaaaact

SEQ ID NO: 34114 - DNA, 296 bp, Glycine max
tctttagtcatgtttccaattcaacattgaatactgaaggcagaggaaggactacccataagagttagaatggtcgagccagatcaaagtcaagagggaaaggtcatactaaatttcgaagtgacattatctgctggaatcgtgacaagagaggtcactttacctatcagtgtatggcacctagaagaacaagactcacagaaacaagaagcgcgatgattttgaatctgctaatcagcaactgatgaattgatgatcagtcattgcagctggatagttctgtgattcatggatat

SEQ ID NO: 34115 - DNA, 293 bp, Glycine max
agctttctaacccatggaagctcctaatatcttccacactttttggggtgggccattcttggatggccttgattttctcagggtccacttggatcccattgttaccaactataaaccctaataagacaatattatctatataaaaagtacacttctctatattttcatagagggtgtttttcttaaggactgaaagaacttgcctaagatgtcctaagcgatcatctaggctcctactgtacactaaaatatcatcaaaataaacaactacaaatctacctatgaaatccctt

SEQ ID NO: 34116 - DNA, 598 bp, Glycine max
  unsure (1)..(598): unsure at all n locations
tatagctcgtgatngcacactatgatactaagcttactggttagtggatgctagactatagactctagagtcaagtaacctttatggatacgcaagtgctatgtggctctgaaccacatggttaataaatctcttaatccgtgatattaccaactataagagactcacatgttattaatacaatgccagaagtcttgaataaatcataccttccaccattgctacgaagagtgttcttgctttggttctaacgaactctctatacctctctctagatggtgtgtaatactgaattccaagggatgagctcagagaccaaatgtatgtgctgatataggcattctaccatcaagaatgcatttaccatccattaccactcattattagcttgtacaattcattaatggccattaccacccattatcagtcattgaatgtcgctttcnagattgacgagcgtaacaactttataatcgttgaccatatatgactagtactcactggctcatncatatatataaccgtgacatatatattntatactccagtgactgtaagatactattcaatcgttttagangtactgaatgttctcctg

SEQ ID NO: 34117 - DNA, 287 bp, Glycine max
agctttatagcttggtctgggagacaaaggtcaagtgttcgcgatatgcgaagatgatgttccaagtactttggatttggtacgaccatgccctcctgatttccggctgggaaattggcgagtggaagaacgccccggcatttacgcaacgagcataatgtaaacctttacggttttaaaagctctatagttgggcctaggctttagagtttttccttttgttaaggctttgtgtcttttgtttttgaatttataatacaaggatctttcttcatctgttcctggtc

SEQ ID NO: 34118 - DNA, 153 bp, Glycine max
tcacttcgtcgatctaggagatgccaatggcttatagactaatgtctttacataccaccaattgtagctttctctgcctccccgctatctcgcatgccactatgcaccccttcaccgaccaaagagggcgttactccctctacggcggcagag

SEQ ID NO: 34119 - DNA, 327 bp, Glycine max
  unsure (1)..(327): unsure at all n locations
accacaaaacttctttgcacctaattatggagctgtctaagatacctacaaataattaagcacaacggtggaacggcatcttaatagaaacacaatttatgttggaataaatatctgagggtattatataatatctaaatttcaacgtggaaagaaataaatagacagatatatncctgaaacataccaacatatcaggatgaatgctctgaccatcgacatctccctcttcaacatgccacccagagggaatatctacagagactatcactgatcgttattggccaatctgattattattattatgtaacgagactagactctgga

SEQ ID NO: 34120 - DNA, 299 bp, Glycine max
agcttgagtgtcttattattttttttaatcatcgatgtgataaggcaataaattatattattatgatatcatttgttaatgttgttattttataatacgaaaataaaataaataaattttaccgggactaacaaaaacaaatttttaaatgactaaaaccaaaattagaatattttataggaccaagttattatttaagaaaaaaaaagtgactattttttaagacgaaataattcttttgccaaaagggttgtaacaaattaagatccctaaaaagggttgtaacaaacaaaatccta

SEQ ID NO: 34121 - DNA, 267 bp, Glycine max
  unsure (1)..(267): unsure at all n locations
agcatganatcgaacgaagaaaaacggagagatattgaactgtgagttatgtctcacaagactctcattcatcaaagttacaacagatgttgcatatgcttctatgtatagactaggtagcttccttgagaagctctcttgagagaacatcctntagaaacttcttngagaagacttgcttgagaagctagagcttatctacacacacccctctcataactagctacctccttgaaaagcttcttagaatattctaagaactagagc

SEQ ID NO: 34122 - DNA, 298 bp, Glycine max
agcttacatatttggatttaagtaactagagtgattgaaagacttcaccttcaatcaaaatctctcggggaagttaatctcaatggttgttcatcactcaaggaaatctcaagggcatcagagcaaatgacaaaattgaaattatcagacaccgctatatatgcattgtcgtcatcaatgtcatctctctccacaagcttacatatttggattcaagtcaatgtagagtgatagaaaaacttcactttcattcaaaatctctcatagaacttaatcttagtggttgttcctctctcaa

SEQ ID NO: 34123 - DNA, 612 bp, Glycine max
  unsure (1)..(612): unsure at all n locations
tgatgtgcgtcataacagcaccaaganactcaagctgagggcacnccatcctctagtgccagtgtgtcgtgtgatatattctatattgctacactcatactcgccactcctgtggcagccaaataacacaaacgtattccgtccattactacctgtgttggtgtctgaccttacaatcaccgccacatatncattctcatcaaccacagatcgagcccaccggagaagatgctgttacactgatactcctacgcaatccacataatctaagttttctacaagtattgatgctattatagctgtgacatacattagcgttattacctgagatatcttgaccgcatccgaacaatcaacatgtggtacatgcgcaccacatgattatgcatgtcataaggcatatccgctcgctcagacattattgcatacatgcactcatctcctgtcatgtaaccatatcagacagacatgggcatcaagatagtcttgatctatatagagaatgataataatgctaaacaccaatgccaacatagtactttcggtcacttgatctgcagagctacggacactggncggactattcgcactcacgaggtacacacttttgct

SEQ ID NO: 34124 - DNA, 302 bp, Glycine max
  unsure (1)..(302): unsure at all n locations
ctgcaagcttccgttcccgaaaacattttttatttaaacattccagcctttgctttcgggggtctcaagaaaaacggcctttcttctcctatgtttcatccgaagccatttgtaatgtcccaaacactttctttatcacccacaaccaccattagccaccccaaaccatcgttgttctccattgggaccccccaccgggaggaacccttcaaccgaagcagaatcttccaacttggcttgcggtttccggagaaaacaaaaccctaatctgaccttncgttttcttttgaggtaaccatggt

SEQ ID NO: 34125 - DNA, 299 bp, Glycine max
tattgttgaccacagagtggtacctggagatatgtcgcggcggtcaagagaccttgtggacgtcatgtggggtgctattgcccaaaaccaagcttgaccaatcccgacccaacccgggcatagtctgtcagtgagaacctgtgatgtacctaagcaggcgagctcctggcagtctacagataaaacgaaaacaagaccacatagcactgaggcttgtggtggctggccagctgtgaaatttgcgtaatatgtgagatatggcctctggtaatcgattaccaagggtgggtaatcgatta

SEQ ID NO: 34126 - DNA, 299 bp, Glycine max
agcttggcaacttttgctattgtcttatccttactcaaacctggactaggactaaaagaaggagattttgcaaaactagcaaccctcttaagtggacccttcttagaaagcaacattgatgggcttcttaagtccttatttgggaaatttggagctttaggaatgcctggttttggtgtttgattgttgcggtcttgagatgatgaatttgttcctgggaaactttcttcaacatcatcctcatcaattctacaacggacttgttctgggaaaacaatggcaatagtgcggttggcgct

SEQ ID NO: 34127 - DNA, 309 bp, Glycine max
gatgccatatggtccttctgacggctatccaccaacaactccatctcatatcttttgttcgtgtagcattcgatctgtgatgcatgaagtggtctttcagttcttttgggaaagcacccactgatttgacccatgagagtgtctgccaccacaagggaagtaccttgctgcagttgaagaaaacgtgcgctgcatcttcatccaaattgttacagaacacgcacaatggatcaactatctccacttgtcttcctcttaaattcatcttcgttggtaaacggtctatgatgagcctccatgtaaatacct

SEQ ID NO: 34128 - DNA, 303 bp, Glycine max
agcttgaggcaagagttaaattagagcacttttttggccaatatggaactccttcctaagaatcctagagtcatgaaacctcttcactttctccttgtaaatcttggagttctcataggcttctaagcggatctcctcaagttcttgcaattgaagcttcctatccatacccacttcatcaaatgccatgttacaactcttcaccatggtgctcaatttacaccaaaaggtggcatgccttacctaaaaccaccctataggaaaacatccccaaaggtgttcagtaagcggttttttgggccc

SEQ ID NO: 34129 - DNA, 303 bp, Glycine max
tgtgtttaacattcatatattctcattgtaagcatatatggtctgtaaccttcaaccttttctatttgtgaaagcctggagagacttagtactccctctgttcctatctataagacccaagtttggaatggtgtttattcatttttataagaaccaatctataatgcttcttgcattatatattggtataataaaaataatcctcaataaaagaagaaagagaatgtattacaaatcatataagagagaagatattacgacaagatattttgaaaagtacaattaaggcaattatactataac

SEQ ID NO: 34130 - DNA, 282 bp, Glycine max
agctttatccgcagatccctcatttaagactaggcttagatcaaacagcattattgcaacagcatatttaaaaccgaaacttaatccgcagatccctcatttaagactaagcttcaatcttgcttcaatcaagttctaaggcaatagtacatttcccaatgctaaagtcacctaactatgcacacaaatgggtgatcaaaccaagagcatacagaatttaagcactgaaagaagcattgtacacaataaacaccaatcattatatattaaaggaaatacatc

SEQ ID NO: 34131 - DNA, 228 bp, Glycine max
gggacttcgaaacttcatgtttgggtggacttctttctccttatgatttcgtgggtatggggttctgggagatatgatgggtagtcttgcaaggattctgctgtgtgatgattatgtgtgaagacattcgctgaaaacttgttgaaactgccatgtatgtgtgagataaacatacccattctgtctacggttcttggatgatgttagtggtgatatatgctcaattgc

SEQ ID NO: 34132 - DNA, 374 bp, Glycine max
agctcttaaccaggactttgacctctagaacatcgttgaggccatcgagaacctacagatgataccttagagcctaccagcatgcatacccacttgtccatataaagagtgaaccgccgaaatgcatggcatattacataactggagaggcccttctaacaactcttctgctttgtccacagatggcatacaaggtggacaaatcaccactgaaggacctcaccggacctcaaagatccaggctccatacaatccaaacaagccatctttcataaagtggaaatcacaacacaccatctttggatccgcgctctctacaacacaataatgtgggggggaccttatctatcattggggaggcgacattatatgcg

SEQ ID NO: 34133 - DNA, 308 bp, Glycine max
ccctcacatacctgcaaatctattttcatctggacacatgcggcggctggggcacttaatgtctttcctcagaccttggatcaactggatcgatcccatatagctgatctgaccgtgtaaagacacctctgcttgcctgcagttatggcgcccgtacacttaaaaattcttccccgctcatagtcgtgctactcaaccccaccgagataaaaatgccatgttcatagacctacttagctttggttccaatcttttagttgacctctgtaaccctcccagacgttcccatgttgcctatccttaacttt

SEQ ID NO: 34134 - DNA, 292 bp, Glycine max
agctttgaaaatggaaactgtttgcgctaataagcataacaacaaacctttattaataagtagcataaacccttagcccacaaaacaatgcggtcaatccaaaatattcttatttggggaaggactaaacaggctcaaataaagtcatttgggacactttcaacggataataccacgagcccatgttaatagcatcaagtcgatgctataagtggtcgcactcaaattatcaactcaatgcaacttaatgccacaacttgaattcccatcctcactcatcattccagaacga

SEQ ID NO: 34135 - DNA, 291 bp, Glycine max
  unsure (1)..(291): unsure at all n locations
taagcttctcattagtgatctagtgagagatcgatctagagttcgaatatctgtgtacatatctcaatagagaatcatgttggatattcaactgagaggatccttgctacttctttgtcttcttgcatgctaagtagttgtnttcatatattgtgtacatgtaataattgcacccttaatatagactttcttgtttgtaacttttaatggaanactaacattcgcaataacagaaaaccatacaagatcttgacataaatgattctcacatataatagataaacaatatgt

SEQ ID NO: 34136 - DNA, 369 bp, Glycine max
  unsure (1)..(369): unsure at all n locations
aagcttcaggggagagagagaccatccgagccatagcatggtcttgatagattgtttngctgctcgctcaaggtccaaaagatacttgtctcagcgtctatgtgagacagagaccagcatgttagccatcgtgagcaggtaccaagaagaactagatctagccatagcccacgagcataaagtggcggacgagtatgcncaagtgtacgcggaaaaggaggctagaggaagggtgtcgcaacctacccttcggcgggagggcgacgcgtgactcgcgggtgcgtgttccaagaaaggaatatgcacggagtcgccaccaatgtatatttgaggaaaacgttggaacaaccggtacgagacgtgatctac

SEQ ID NO: 34137 - DNA, 295 bp, Glycine max
agcttcttatccaaagctcatcttagtggggaagctccttcttccatggcttattccctagtggaaggggcctcctctcacctcttctcctttgtcttccgctgcatctccatggtgaaaaatcaccactgaaggacctcattgaagctcaaagatccagcctccatagaagccccacaagcaagcttccatcaagtggtaatcagagcacaagagcttcaagtaggtgctccttaaacctccattaattttttgctttaccttctctttcatgggtggttcttcatttttttct

SEQ ID NO: 34138 - DNA, 216 bp, Glycine max
  unsure (1)..(216): unsure at all n locations
tcccacactctcattcctttaaattgatttaattctttatgtgtagccaacaacaaatgctcatcatgcaaagcttcatctatgtntcttggttcaatctgagaaacaaaagccatgttattgcataaaatcctcaatctagagcgaggaagtagatacttcctttgatatttcaccaattatattgtccaacgagatgtctctntgagttatcca

SEQ ID NO: 34139 - DNA, 278 bp, Glycine max
agcttagccctagaggggatggaccttttcaggtcttggagaggatcaataataatgcctattggttggacctcccaagagagtatggagtcagcaccacttttaatatttatgatttaattccttttgcaagtggagctgatatagaggaggaggaaccaacagatttgaggtcaaatcctcttcaagagggagaggatgatgcaatcctccctagcaaaggactagttactagagccatgagcaagaggcttcaagaggattgggctagagttgat

SEQ ID NO: 34140 - DNA, 301 bp, Glycine max
ccgccgcatgcaagcttcttatcaataacaactagcaagaggtccaatctttgaacttcatctcatgtcataaagtcagaaatgcacaaattgaattacaaggacttttattggcttgtaatgaggctgggctacaaaaaatattggtttttctaggattcaaaggcttaaattctaagagagcacaaatcatggacttatccaataagtctttttaatatacttagctttctcattagcctttcacttcacttgttctaacaactcacacacttatttgaactcttttttttttatttgt

SEQ ID NO: 34141 - DNA, 587 bp, Glycine max
  unsure (1)..(587): unsure at all n locations
aggatgtatacttcgtcatatcagccaccatctaagctgctctcgacgaatcntacatatacttgcgcacgaatatgcattcatttactcctatgccgcatggtnctgatgttcaacagacaacatttctaatctcgtaaatgaatgtgctgttacgagctacctatgcattgtgtgtaaaactcggtgaacttaattaacatacctgtgatattaaaaggacacatgtatagacagatgactaatcttctattagcgccatagatatatcgttctcttgctctcttntattgcacagagactcattagccttcttacgctatggaggctagaggatggtcaacggcacttagcttgtatgatatgacctgaggcgtgcaatntggctcagtctctcaaaggcgcaaagtgttatactctttaatctcatggcttctcctggatgggcatatattgtggctttgtttagctatatcgggcgcggggagacacctatcttcttactgcctatattcgcacaccctaacagatatctctctgacttgttttaagtgaaatatatactgggtctgtatacggtgttggcg

SEQ ID NO: 34142 - DNA, 224 bp, Glycine max
taaaatattctcaacaggcccatctttttacttgaatcttgaatggctgtcaaaagcctatatatgtgagacttgggacaccaatttgctaagagtttttcacaacaaaaacgtattatactcttaatacgcgaatcgttttatcctctcacacattccttggccaaattacttgtgagtcaataaggcattatttgggcgctcaaagagttcaatctatctct

SEQ ID NO: 34143 - DNA, 406 bp, Glycine max
  unsure (1)..(406): unsure at all n locations
gtgatgttggttntgcacacaatcttatagtcttaaagacgggtttacaaatgaagcactaagtnttttctctcaaatntaccaggtgttnntgatagtttgtaacttaagaagttacagagagtaagcttgaaaaagagaaagaatatggatntcaaattttgacttgtattctcgtgaccacaactcttcanagccttcttgtttntatagccaacttcaaaaaggaatatttgtctctaaatggtcctcatcactaattntcttattattctcttactntcatggtccttaactaggaggatgttcgaacagtttttgcacaataaatctcagacatagatcattaatgtaatcttaaatgttatcaagcctaacacttgctgatctcgctaatctataacat

SEQ ID NO: 34144 - DNA, 233 bp, Glycine max
agctttgggaaaagcttgcctttggagctgttctattaactgccctagctcttttagactggtgatccctaagctatagaccttgacttgatataacctttttttaaacgaatgtgtttgacttgatcccatgttttactaacgcgaaacaaaattattgcgaatcaaaactccatcatctatcatgggtgggagggatgaacgcatgcataaatgcatatcacacagatgca

SEQ ID NO: 34145 - DNA, 718 bp, Glycine max
  unsure (1)..(718): unsure at all n locations
cccctctcgtcgctccncccntngctnncnnctnacccnttnnncccnncctcnnntnnnnnnccnnnnnnnnnaaggggnnnnnnnnccgattgttgacttgccctgcactgcccanncnnnnanannnnaacctataagaacanaaatgagttnatcattttcagatatgcatgtgaattattatgtatcaacaagaatcaagccaaggctattgtgcaagctatcaatggggcattacacaccatatgattataatgatgggtggctcacaatctcacaaatgtgaaatcatcactttcaaagtgagctttcanaactatcatgacatgttgagaagaatcaacgacttcaagtcacaaaatgtcgagaacttgtatcttcagaacaagtacccaattcttgaacatatcctatgattcaaagaaaaacatgcgaagtcttacagtggcacaaaagtgatcccaaatgttaaactgaatatccgacgatacttacaacattaacaaatgtacacaactaacagaatctcgaatcgcatctaactatgcaaactaaagaacactctctctccatacctaaacaacacatttgtctaaatgntcncaataatagactaagacattacatatacacggtcggagagatagaaagaaaactacctatatggtgatgagagatgtggataggaaactttctcacacgcataacatagtcg

SEQ ID NO: 34146 - DNA, 166 bp, Glycine max
agcttattaatagaatttccctcaagatatggaaaggtagatgaggccataattattcttgaagtttttaaactttacacaagaatcctactctgataccacttgctagacaagtggcctcaataacttaagaggggggggggtgaattaagcttacagaatcatc

SEQ ID NO: 34147 - DNA, 294 bp, Glycine max
  unsure (1)..(294): unsure at all n locations
gtacgctcaaatctattagctcatgtgttcaagttgaaatatgaaatttctattatacatcttntatttggcattatgtaaccttgtccagcacatcacaaacttttctttgatttctcttcgccatagattagacctgttttatatagttctactgtgctgtagctaaaatcaagattaaagttacgtaagccatcaatgaagttaacaattgcaactgatatatcgagcacatgatgttagcacagcagtgatagctacaaaaatggagtgataacattcatggcagacaca

SEQ ID NO: 34148 - DNA, 302 bp, Glycine max
agcttgccacactcacacgatactaatatacgaatatttataatttttgtgaggtggagcatatatcttagcattattggccataaatgtttattaaacaaatgtacaatatttagagaaaaccttatgtttatgttattattctaatcataagtcacacaatgatcaatttattagctttcataataaatatctcaaaaatgtattggcttttataataaatatcttaaaaattaatttaaactggtatgactatttaactctaatatttatgtatattttttaaataaaaaaacatgctt

SEQ ID NO: 34149 - DNA, 350 bp, Glycine max
  unsure (1)..(350): unsure at all n locations
agttctagagagaganaggtccaagttccagatagttngagagaaattgttgtgtgaagatctacaaagactagagctggaagaggaagctgtcttgagagctngcgatgagtttgtgagcgattgtgaggtcctagaggtggaggagacatccccactacttgtatgtctgaaatctttcattctcttctctctgttgaaaggaagcttcccagttatggaaagctaaatcctctgttggatcttccttgtaagtactcgatgtaaatatctgtttatctatttaatggatgcttgtgtgttcactgtgctatcagaacttctttctaccatgcctttgccttgatcac

SEQ ID NO: 34150 - DNA, 303 bp, Glycine max
agcttcataaacaacatcggtttttccaaatactgatgttgatggtaataaaacaacattgattcttaccaaaaactgatgtctcttatcagaaaacaacatcagtttttactaaaaatcgatgttgtctgcatatattaacatcaggttttaccaaaactgatgttcatatgaagatatataacttttttttataattcttattatataacattggttatttaaataatcgatgttgtaattttatattaacatcggttttggaaaaccgatgttaacgataatactttcaacattggttaa

SEQ ID NO: 34151 - DNA, 373 bp, Glycine max
  unsure (1)..(373): unsure at all n locations
atcggcctcatttaacctcttatgctgtccctatacatataaaacagccccacaatccagagttcacaaaaccatgcgcatatgtcattgaggcatttcaccgagcacttggtgggcgcatgtttaggcatgaaaagcaagggaatgtgggcaatgtggcatgccccattgcttcagaatgcaccataggcctagggccatcccttacaacccgctaactcacaccaatcaagcatgaaacanaaccaaaattgccccatagattggggcatattcacacaatntagagcaccaaaagaagaccaagatacatcaatggagagctagaaagctcaagaatgagatacttactngatggagtgagtacaacact

SEQ ID NO: 34152 - DNA, 217 bp, Glycine max
ctttcaaactgaatgtaccacgtctcaattatatttagaatggtgtaatcgattacaacgattgggttatcgattaccagtgtgtgtgaaagttgaaattcatattcaattgtgaagagtcgcaccctttcacataaatgatgtgtgtaatcgattacaatgatttggttatccattaccagagataagtctggaataaaaatcaaaacatgtaact

SEQ ID NO: 34153 - DNA, 287 bp, Glycine max
agcttctatagaaggttcgtttctaatttctctacaattgcatcacctctcaatgagctggtgaagaaaaatgtggcatttacctggggtgaaaaacaagagcaagcctttgctttgctcaaagaaaagcttactaaggcacctgttctagctctttttgacttttctaaaacttttgagctagaatgtgatgcctctggagtgggagttggagctgtattgttacaaggagggcaccctattgcttattttagtgaaaaacttcatagtgccaccctcaactaccc

SEQ ID NO: 34154 - DNA, 300 bp, Glycine max
  unsure (1)..(300): unsure at all n locations
tcgagtgtcaagaatctcaacttaagactctttgtgcttttggggtgaggttggcttatatggtgacgttacaagaatccaagagttagattctcgttgtatgtgtcgagagatgggtgtangatgagattggggctgaagatgtttgatcttaatgcgttctatttctggtggaggatgatatttaggttcggactgagaatctatagccttcctcttttgggctattctaagatatgaaggtatgtggtaagatggaggtggattcttgactgtgtttgacggcttatggtcaaatgt

SEQ ID NO: 34155 - DNA, 272 bp, Glycine max
agctttccaaaggcttctggtttttccaaaccttgattacttgagctattcatctttttcattcccctctccctttgccgaaaagaattcgccaaggactaaccgcctggattctttttgtgtctctcttctcccttttccaaaagaacaaaggactaaccgcctgaattcttttgggtctcccttctcccttggtaaagaattcaaaacgacccagtctgaaaaatcttttaattcttcccattccctaatacaaaagtgttcaaaggact

SEQ ID NO: 34156 - DNA, 336 bp, Glycine max
  unsure (1)..(336): unsure at all n locations
aagcttaagactatgccanaggtactctctgatcctaattaagtattattctctttctccctgtctctctatcacctgatgagacaagagaacattgcataaggtagtgcatgttcttgggttataattgtactcatgaatgcatcacaagacattgactctgcaataattgaaaacaggtggaatgcttcagcttaatcctatcttgcataaatgcacaattatgttgtggaaatgatgaacccacaaactacaatggtggtaaagtaataatgataaggaaatgcctctcaaccgaaagcaccacatgaatgaaaccaataacagcttatcctg

SEQ ID NO: 34157 - DNA, 360 bp, Glycine max
  unsure (1)..(360): unsure at all n locations
cacccagaaatacagcaattggtgccgctgcagctgctgctagaccggggttaggtgcactgtatacaaactggaagggggaaaagacatgagcatgaaattaacatattatcctgttgacaatttgaaatttngaaaatggaaatttccacatagccttcaagctaaaaatgtntgaaacagtgtccagtgtttgttaataataaaatttgagcacaaatcatgctagtgtaatagatatgtactcctcatatagacaagtgttacattgctccgatgatgtattctcatatcctatcatgaagttgacaactcatatcattaaactcacgtatcacatcatattggatgggattaaat

SEQ ID NO: 34158 - DNA, 108 bp, Glycine max
gataatacctatactaagctatatatctgtcgatgaattactcccagtttattttgcagctactacctcatctctctctctctttttttttttttttttctaaatctt

SEQ ID NO: 34159 - DNA, 296 bp, Glycine max
agcttgtaccctttccgcttataacgagatataatctcagaaatctgaaataaagagaaaacaaatggtgagaaaaacctgaacaaaacctcagacagggaagtgggagagaaattattaaatagtcttgtccatgattcaactaatatatgtgttacacatagttgagttttttaatttaaaaaagaattaataacaaatcattaggtatcatcatgtggagattagttgagacttgaaaatataaggaccctatgtaataatttatcatagtggggaccatattgcaaaatgtg

SEQ ID NO: 34160 - DNA, 344 bp, Glycine max
  unsure (1)..(344): unsure at all n locations
accggtgagagtgtngacctactctgtgagtaatgatctttgcttgaatctctgaattctagaaagatatgtataacttagaacatgatgaagtccatgatttgtatatacacaagctctttngaccaaatagctcaccttgaatgataaatgtatcttttgctccttctataagctgaatgatntttgtcatgaattgaaccctaaacttaaatgattatctnctgataccttgtttagattctaggagagcatatggttcaaggcaaattcactctaaatntgggggaggaaagtcaattaacatgaatagaagaaggttaagcatcaacacacacaacaaa

SEQ ID NO: 34161 - DNA, 169 bp, Glycine max
agcttgcttctggggcttctatggaggctggatctttgagcttgagcgaggtcctttaatgcgcattttccaccatggatatgccgtggatcactaaagagattaggtgagaggatgcgccatcccctacggaatgtttcatggaagaaggatctttaccaccaaaatg

SEQ ID NO: 34162 - DNA, 330 bp, Glycine max
  unsure (1)..(330): unsure at all n locations
tctggagtatgatctttgatgaatctctgaattctagaaagatatgtataacttagaacatgatgaagtccatgatttgtatatacacaagctcttatgaccaaatagctcaccttgaatgataaatgtatctnttgctccttctataagctgaatgatgtctgtcatgaatngaaccctaaacttaaatgagtatctcctgatacctcgtgtagattctacgagagcatatggttcaaggcaaattcactctaaatcttgtggaggaaagtcattaatatgaaagaaaaggtaagcatcacacacacacaatagttgtttaaaaaaaat

SEQ ID NO: 34163 - DNA, 297 bp, Glycine max
agcttccccataatgtctcctctgatggtaagcggagcccgacaaggatgtggaacgttgctgcatgatttcgggtcgtggaagtggagttagcatgggaggcgtggtcggtatgggggcggctggtggcgatgactgcataggggaggaagatgaaaaggagtgtggtggggttgttgttgttattgagtggtctgcaaggtggtcagtcattggagtacctcgtctaatttggaggtgacatggaggggattaaaggcaagcttggcaatatcttcctcaatgcgatccatatta

SEQ ID NO: 34164 - DNA, 340 bp, Glycine max
  unsure (1)..(340): unsure at all n locations
ctctctccttctttcgaagtttgagctcattgttgctgccccataaagctccacggaatttgtctcggtcgtaatcttccttgcgagccctcttggattctcgatcaagggctcctgcggaagctgcactttcttctcgtaacctgacacactctttccggacgtctatagcgactaacttgaattgttctttggcaagtcttggctttactagttctggttttagagctcggacttcttcatcctcttctggagctacacagttctcctcgctgataacttttaattnggagagccaatctaaccctcgtgtacgaactttcagccattcatgataacc

SEQ ID NO: 34165 - DNA, 269 bp, Glycine max
cagcttgcaaacaattacacatgttctgtcatcgacaaccggagcgtattatcagaaaatattttcaacagtcacacttatttatggcgttcttgaatggctatcataagactatatataattgactctacacacgaatttgcgctagtctttcagaacacaaaggtcttattctcttaagaaaaaaaaccggctgatccacatacaaagtacgcgcccacatcacttggaattcagtagcggattattcgaatgcacacagcgttcaa

SEQ ID NO: 34166 - DNA, 294 bp, Glycine max
  unsure (1)..(294): unsure at all n locations
aacgtcaaattctctgcctatatattcaacctntccatcactggcacgtggagtgaatctttctncatggtgcaatactaaagttatattgtcattcattctacacaatcagaaaccacaaacattgtcatatattaggaaataaatnacctacctcacactcaaacatatgcgcatcacacaacaacatgcaatgtcatctataaaaacagagcatcatatacgacaatattaaaggatcataaacctccctacgaagcgtgaagacaatgcatatgaaaccccttgaacata

SEQ ID NO: 34167 - DNA, 302 bp, Glycine max
agcttataagaacaaaattgtttaaattattttcaaatatgcatgtgaattatgaagcatcaacaagaatcaagccaaggctattgtgcaagcaatccatggggcaaaacacaccaaaagattatgatgatggatggctcaaattctcacaaaggtaaacttttcactttcaaattgagctttcagaattatcatgacatgtagaggaaaaataaggatttcaaatcacaaaatgtcaagagacttttattttcagaacaattacccatttcttgaacatatcctataattcaaagaaaaat

SEQ ID NO: 34168 - DNA, 300 bp, Glycine max
agcttgtaatctattacacaaatactgtaatcgattaccagaggagattttcaaaaaatattctcaacagtcacatctttttatttggttcttgaatgggtatcaaaggcctatatatatgtgacttgagacacgaatttgctaagagttttcagaaagaaaaggtcttatcctcttaaaaagcaaaatcgttttatcctcttacaaattccttgcccaaaacacttgtgattcaataaggaattatttgagtgctcacattgttaaatctatctctttcaagagagatttcttcttctc

SEQ ID NO: 34169 - DNA, 502 bp, Glycine max
  unsure (1)..(502): unsure at all n locations
aggtattggctgcatacacacgcacacanaaaaactaagctcgatacagcctagaacaatgtcctggagtctgatcttttatgaaactcctacatgaacaatcagacattgttcgaatgcagattccaagatgcgatatggccaaaatgaaagcacaccatctacaacggatgagtggaactctgcggcttcttatgccacactgataaaccgacaaaagaaaacctaaaaaaatagtgaaatccaacagtactcaatacagatagggctattacggtaagtacaacactggcgaaggaagagcacgaaattaaaggagtagtgaatttgctccctggaaagggcctcaacatatatatcgcagtatgataacaatggatggagggggaactcgtatcaatatgacctgctagatctcgacagtcatcttgacaccatctcctcggaacacgacgacagatggtcccttatgcgcgctatgagacgcgtggagaaaagtcac

SEQ ID NO: 34170 - DNA, 292 bp, Glycine max
agcttgtgactcttggcaatttcttcaaaactagtcacttaaaaaagttgtgacttttgaaaaaatcttcagaaacaagtcacttgaagaattgtgacttttggaaatgtatttttcgaaataagtcactggtgtgtaatcgattacacatcaacagatgtgacttttcattttgaattttgaaaattaaaacatttagaagctttggtaatcaattacaagtattgtgtaatcgattacacaagtttaaaatactttaaaactgtttaaacataagttgtaactattgaaa

SEQ ID NO: 34171 - DNA, 283 bp, Glycine max
  unsure (1)..(283): unsure at all n locations
tgctttattgttgaccacagagtggtacctggagatatgtncgcggggtcaggagaccttgtggacgtcaggtggggtgctattgcccaaaaccaagcttgaccaatcccgacccaacccgggcatagtcggtcagtgagaacctgtgatgtacctaagcaggcgagctcctggcnatcaacagataaaaggaacaaagaccacanagcacggaggcttgtggtggctggccagctgtgaatattgtgtgatatgtggagtatggcctctggtaatcgattac

SEQ ID NO: 34172 - DNA, 512 bp, Glycine max
  unsure (1)..(512): unsure at all n locations
nagcgcagcaacanttttngaaanacantttggaagcaccctcnnntttggnaggacccacttcggaacctnncgccacacccggcngggaatccnctcctaacagagnccnaaacctctgnaggggccntngtgcanaagcctttntcaanccttttggtgtgggtcgcttatctttcattaaggtttggtggggcgaatgtatagaaaacaacaattgccttcttaattntcttccaattcctcccccaacttcacaaaggtaagggccccttccgggaatcaaatttctattctccttataagaatgggaaggaaatggttggaatttaaatacccattcaaattcgggtctttgtactacggaaacaccatacatttcccttctttctccctccttttctttttcattatgatctctattctccatttgatccaacctctcatggagcgcatcatctcgttgtttcattaacctctccatatgttgcatcaaagcttgcatttggaat

SEQ ID NO: 34173 - DNA, 284 bp, Glycine max
  unsure (1)..(284): unsure at all n locations
caaacttaatggctgagtgtgactgaaaatgtggcaaccaaaagttaccctcaacagccaacaagtcagccaccatttggtctnccanaaggctgatgcctaagttgccaattgggcccttattacaacttgaactatagccctcttagttgatatacccaaaacatatntttggccagccaactttacaaggattgngccattatttagacaaactaaacactctacaatcgaaatatagtggtgtcatttagtactcctccatatgggccatgatacaactc

SEQ ID NO: 34174 - DNA, 252 bp, Glycine max
agcttgcatttggaattgcgaaagccccactccatcattaggattagtacctgacatctcaaacaaacaaatcaaacataacaagacaattatagttgttgtttgaatacctcacccactcaagtgtatcacacaattatggcttttctctaatgaaacactcttttccttttaccactctaattccccttgagttcttaggcaattcaagagattatggccacaacaaagaacaattcaccactatgtgta

SEQ ID NO: 34175 - DNA, 559 bp, Glycine max
  unsure (1)..(559): unsure at all n locations
acgttgtttccttgcctccagtctagtcacgcgacacatagaaatactcagcctactgaccctcaatctttcaatgattatagacgcatcttctctatacggtgtgtctctaacattgtggcttaagcnttggccaagaggttggccctagtgttacctcatcttatagatgaaacgcagaccactcttatgaaggggaggcacattcttcatggagttttgattgcccatgaggctntaactgacgccaaggctagaaataaaccttgcatggtcttcaaagcggatattgaaacgcatatgacttggttcatggngtttcttgactacatgctatgagatggctatgtgaagatgagaaaggataatggtgctgccctgaacattccatctattatggagcctctaagatttctcaagaatgctaggaggctctacactgacctggtagctattaagaattgagccaactgcgatgacaagaatttcttgcggcaaaacatataatcattttagcgtccattcttcatcttttaaatccaaaatggcagattttctn

SEQ ID NO: 34176 - DNA, 223 bp, Glycine max
gctaattttggtggtgaagcttcttcttgcatggcttattacctaatggatgggaccttctttcacctaatcttcgttggcttaccatgcatttccatgggggaaaaacaccaataatggaactcattgtaacctaaagaatcagcccacaatcaatccccacaagcaagattccatcaagtggtgtcataacacattagctttaactaagcgctccttaaac

SEQ ID NO: 34177 - DNA, 393 bp, Glycine max
  unsure (1)..(393): unsure at all n locations
atttaataaaataataataattagttgtaggaattattaaatttagtatatacaaattgtttgttgaatgaattaaattgactntacccaaagttacttttaaaataacacaattaaatataaagtatatatataaaagacagtaaaatagaaattttatattatacctacaatgaatatatgaaacanaaaatgaaaatacgactctatgtatataaaanacagaaaataacgcaagaaaagagagcaaaaagaattcgtcaattgtngcaaaataaaaaagggatatttntgttatntaaataacaatagcttcaacatgtatgaaaatgctgtctcgaggcangacatgacaatngaacatgcanacaatccgatcatagaaacattgaa

SEQ ID NO: 34178 - DNA, 263 bp, Glycine max
ttttttcgaaaaattaaggccactggcttatggggtgaatcctagcaatattgaggagctccaatgcccgaacttgtgtaatcatagggatggtaattgaatgatgactttaggcccaacatgatgtaggaataaatagcactatccccctgggtggtggggaacgcgtaaaaaccctttattttcccctctcgttaatcttcggacacatgtttcggacacctcttcttgattgcgaggacccccttacatgtttatgaaac

SEQ ID NO: 34179 - DNA, 370 bp, Glycine max
  unsure (1)..(370): unsure at all n locations
tcttatatcgattaagttatgcaatatgttaagcagatcttccgaagagatcataactcttatgtgtaaatcaagatctgccgaagagatcgtatgttttatgcgtgaaacaatggcgacaactaatactaatgatgaaaggagtgttagttggagtaaaccatgaagaagcattttgtttgttgagtcttttttctatcacaatctatatagaaatgcttttagctaatcaaacaatattaaatgtgttgtctttgtttgtattatcaggtttgaactcgaacaatacattctccattactaaagatgatcaagagcatatgcacacacaccaatgatatanagcttaattacacattctactatctac

SEQ ID NO: 34180 - DNA, 296 bp, Glycine max
agcttctcccctattttgctataaataggggaagaagtgaagaagaaaagggttcagccccttaggcacttctctctctttcgaatttgttgaggaaaattagttccgtgaaaaaaatccaagccgaggcgattccgtaacgtttccgtaatgtttccgtgagtaattacgcgaagattctcgaccgttcttcaaagattcatcgtttgttcttcgttttcttcagtcttcaacgggtaagtacctcaaaccaagcttttcaattcactctatgtacccggggtggtccacatttt

SEQ ID NO: 34181 - DNA, 642 bp, Glycine max
  unsure (1)..(642): unsure at all n locations
agttgtgcgtcttcgcgaccttgatactaagctacagttgtgtaggtgaaacataaggatctatagactatagctgtatatcataaactgtgatgggcaagctaggaagatgcagtcgataattatgaggaatgaattctacgttcgatcttgtgcttcatgcgcataaccaacagtataatgatgagtctctgtattctcacaagtgaagatgactaacatggtacactgagactgagagagcaaagcaaaagggtcgctttccagtgagaagaagagtattccagactcncttccatatctattgtgcttgctttcggacaaatatatntcaaccattgatagtaattacagaaccagagctgtttaagataacactaanatcaattgcaagctgcatgctgttgcacacacacataataaggctggacgatatactatnggntgcatagatatactctctaatatatatatatatatatatatatatatatatatatatatatactacttcggggatggtgtatcctcatcgacccganggatgcaaaagagacaaaaaaantaaccattatagcgggtgaacatctttttcttctcgcaaangtatatagagaattntccgttcanaccatatctctn

SEQ ID NO: 34182 - DNA, 299 bp, Glycine max
agcttgtgctttgaaaattatgtgtatggaatatttttgagtttagaatgctgaactgggatcatccatttctattttctagtttagttattaattcatgtggctgcggtaaaattggtttaccttacagtttacattgttggttaaaaaaagacaatgacatttatattatgggttatttaaggcttatttaaagttaagcatagggtttggttatctactgaaataatgctctactgaaataatgctctgttgctagtgacaatattgtgaagcttgtgctttgaaaattatgtgta

SEQ ID NO: 34183 - DNA, 365 bp, Glycine max
  unsure (1)..(365): unsure at all n locations
cttttgggttcttatggtgaagttgtagaatatatatgttagaatatgaattcacattacttgataacaattctgtaagttgcaatcatcattatataatgttcttgcagatgttcctattagtgctagaaacatcttggaggatcctgaacttaataatgctgtanaagccttcaggtaacttcatgcttgttgatcttattagtatctgctcgcttcccaaaagaacatcagtcatctacaattgtagtttatagtttactaagacatttgatggatgatagtttattattatgttacgtagttagaattagctcacaataagcactggaattagatataaatctcaattcaaatatcacata

SEQ ID NO: 34184 - DNA, 295 bp, Glycine max
agctttacaaagttttcaaacattaatgaataaaaaataacatattgaagttgctattaacagacaacgagacttggtgaaaagagaatataggattcgtttgataacaacaattggctgtatttgatttctattgaggcaaggattggcatttcgtggtaatgatgaataagttcattcaaaaaatcaaggtaatttccttgagcttatacattttttggccaatcataatgaaaagattgataaggttctaaaaaatgctcgtggaaatctcaaactagtggcacctaatatt

SEQ ID NO: 34185 - DNA, 196 bp, Glycine max
  unsure (1)..(196): unsure at all n locations
actatcatcacatgttaaggagacacaatgagtctaaggccatnattgtcaacagactttcattctcagaaccaatacccattacttgaacatatcctataattcatagacacacatgctcatntatcacagcacaactaacaagattaaactataacccgacagaactaacacaattaaactaatttaacacatc

SEQ ID NO: 34186 - DNA, 260 bp, Glycine max
cattttggcaaatgcttcacattaggattttaacatctggagggaactacaatgctgcaaattgggagccataggctttgtgatacactgggataatcactgtgagattaataaaagattaaattgcactaaccccgaggttttggaaaatgcataaaattcctttcttctacccttacattaatctacgaaaacattatacggacacctcatatacattacaataacccccttaattgtttaaaaaacattaaaccata

SEQ ID NO: 34187 - DNA, 400 bp, Glycine max
  unsure (1)..(400): unsure at all n locations
gaagcatcaacaagaatcaagccaaggctattgtgcaagcaatcaatatggcanaacacacaaaaagaatatgatgatggatggctcaaattctcacaaaagtaaacttatcactntcaaattgagctttcaaaactatcatgacatgtaaaggaaaaacaaggatntcaagtcacataatgtcaagagactttcattntcagaacaattacccattacttgaacatatcctataattcanagacaaacatgcaaatntaacacaacaaaactaacaagaataaactagaacccaacanaactaacanaattaaactaatntaacacaactaacaaaaccaaaaccaaagaacactcctcccatacttaaacaacacattatcctcaatgtagcacaact

SEQ ID NO: 34188 - DNA, 291 bp, Glycine max
  unsure (1)..(291): unsure at all n locations
ctcaccactacttggttcttagttctcctgttcatccatccctggccaagcccacctttgtattgatatgctatttaatattatcaacttcttgttcaaattactntggaatantaattacttatttattaatcttgtagtactttttcagctctgagcatttattatgtgtgatagaaatcatttgcatatatccgcaatgcagtgttcacactgcaatcaactacaccattaatgtgtattcttgggttggccgagactaactagtgtgaacacatgatatcacatctc

SEQ ID NO: 34189 - DNA, 284 bp, Glycine max
agcttgagtggtacatacctttttgttgcaaataacactcaaggcactcatattcattcaccctgcttgcatcctatggtttacatttctctctattgctgacttttggttaatggatccatggtacttgaaccatgagacttctggtgaggtatgggctctaacttttacctctaatacaagattggtgcgcctttgctagatttacattacgtgcttctacttaaacaagagccatgtgctttcaaaacccacctacactttaagaacatctcattgatctc

SEQ ID NO: 34190 - DNA, 328 bp, Glycine max
gatgatgatctggcctctgtgcatgctctgtaacatagcacataaagtctcaaagctgaatgaggaaggtcctgtagacactagagtaggaactggcaaaggagtgaatgctgaagctagaactggtaaagatgaagctggaatagatggagctgcagtagaaggagctactgatggcggaatctcaaaagatgggagagtctttgaccttgttcactaggacttgcgaggacctctataagtgattgaggtgtcatcgacgttccaccaatatttcatcatgtaagccaaagtaatggttggactgatactctcaaaagactatgaa

SEQ ID NO: 34191 - DNA, 299 bp, Glycine max
ggctgcgagcatgggccaacaaaatgtgtgtcaggctgacattggacgctatgatgcttggctggcctcattcgtatctatattctaactgagacacttattcatgtggatggcggaaaatgggtttaccctactacttacattgttggctccaaagggacggtgacatgtatacatgggttgattgaagcttattcaaaggctgacactaggcatggttatctactgaagaagggcggatcttgaatagtgcattggtgtttgcgaccatagtgtgaagcttgagcttagaaaaacat

SEQ ID NO: 34192 - DNA, 237 bp, Glycine max
gatgaaatgcatagattggacctcttgttagttgttatccatgaatagcttaaacacttgtgcttgagtgaaacagtaggcgtgagattgtggtttgagctactctccttgatctgtagcttatgatgcactacatatcactgtgtagttcacatcttggtcttctatttagctagctgcatgttctgtgaagacaagtgataggtacacattgcttcatctttctcatcatgcaat

SEQ ID NO: 34193 - DNA, 292 bp, Glycine max
agcttattgggaatatcgtctaaagccatgggatatggctgctggtgttttggtatgctttgagttttatatcattgataatgattctgactagtaagccttgaatctttgagactaaagtaatttttcctgaagagattatttgtctaatgattatgacaagcaatcaaatgctggataaagaatatattttatccaaacttcagtaagagcgtgcgcaacatgtgtatataagcttgtgtgcatggttactttcgtgaaacatcaattattaactttttattgtttaaag

SEQ ID NO: 34194 - DNA, 532 bp, Glycine max
  unsure (1)..(532): unsure at all n locations
gactaggcgagtngatnntagccttaagttcactatagtntattagtcaattcaactaagaatgtgagatcccaaagagaaaacgtccgattgattctttcgctgtattgtgctaaaaggcattttttgattatgatatcattattagacctctgtctctatctgcaactaggtaacagaacaaccgatcggacggaattcattctaactaaaaaaaaccgatgatacaagtcaaatgatcggcggaaagttatgtatctatagaataagcgataaatgacttaaataaatggctcaagctcgtcaaaaagaggtataaaattgccatcaatactatattagaatacatgaacataaagggacatcatcgttcatcaatcaatnaatagctcgntcgtggacataccgntaaacctatatacagatacacgaggatttaacatcgttngatctctctatacacaaaaactccgacgcccaactgtttctacgaatatcctcaattagaatgaaagctcttgtaacttttagc

SEQ ID NO: 34195 - DNA, 267 bp, Glycine max
ttgagaaaataagggggcaatcccatttgcagttgaaggggcaacatatttctttggcctaacaggaacttcaatatttttacagcttctaatgttatgattagtttggccacaccttccacatgtaaactcagccaatttcctctttagcttatgtcctgtgacattgtcctcatctacagatctctttctatttttctttggccttcctctttggacccttttatatggtggaacagggtgtgtatattgtgtctgggcccaata

SEQ ID NO: 34196 - DNA, 386 bp, Glycine max
  unsure (1)..(386): unsure at all n locations
tatggatacgatgctcagtcttaccggtttatactacttgtgcgaatcggtacacttgccaaccacccgaacaaaaatacaaagaanaccaaanaataaagcatgcaatcgattgaaacaaataacacataacatagaaacccaaaacacataatgtgatcgattaaaatgaagcattaatcgatataaatagtgaaataatgaaaaacacagaaatatcatgtctgtttgagaaacaagggttgaaacacttctaatatattgacatacattggcaatcaacgcagtcattgatagatgcgaagagcgcatatcaagatgcacacactatagcacaactatagtacacactatagcacacactatagcacaacatcattcaatgg

SEQ ID NO: 34197 - DNA, 284 bp, Glycine max
agctttgagcaaattcaaactacaataacttttgaatcgaatgtctgattgggtctcataagatattgagacgctcgtaattgaaaacagaaggtcttagaaaaatcaaatgacagtgggttctaactcggatgtcctattgagccctgtgatatatcaagacgcgcgaaattgaaaaccgaagctctgagaaaagtcaaacgacaattacttttaactcggatgtccgattgagtcccgcaatatatcgagacgctcgtaattgaaaacagaagctctgagca

SEQ ID NO: 34198 - DNA, 659 bp, Glycine max
  unsure (1)..(659): unsure at all n locations
ccccctaccctccnctancccttctcccctcnntcnnctcccccnnnnnnnnnnnnnnnnncaggggnnnggggttgatggctgcatgcntcgtcttctcgcacctaananactcagcttactatcaatacgagcatctcggatattactggactcaatcagaactccgaaccgcnggtatcgccatctgactatttatagagctgtcattatccatctcgagcgtctcgatatattacagggatcaatcggacattcgagttaacatgtattgtcgtttgattcttctcagagccttcagtattcaattacgaagcgcttcgatatcctacgggacataatcgaaccatcgactcacaagctattgtcgntagaatatgctccagcttcacgtntaattacgagcatctccatatatactggactcaatacacctctcgattgaaagtcatagcgattgagcttcatagagcttccggtttcaatatcgagcgttccatatataaagtgctcaatagacatcgagttaaagttatggcgctgatntctcaaacttcgatcaatacgccgtctaattcacagcccaatggcatccaggaaatattgcgtcgatttcaaactccgtcattacacctccattatccgccactcaacccccg

SEQ ID NO: 34199 - DNA, 431 bp, Glycine max
  unsure (1)..(431): unsure at all n locations
nttatcactccacccaaatcttgccttcaagtttaccaattataacactgctgacaaccgcgtgaaagatgtacacccctcatacaatggtgtgttggaatcacgttctattgtatcatacagaggtgcatgcgcttgctcaaaagtctcttgtccaagatcacagatcatttcctctatacgctctccgctgtcttcgtgtaccgcctgagactgagaaacagttggaatgtcggccgattccccatgccatatccattttgtgtaattcggaatgatgccgtaacatatcagatgtgatcggatttcatcaactgactgtcgtctaccattaagacatttaacacatgggcaaaaataattgcccctcaaactttcggcattaagttgcgtaaattgtagaaattgttccaccccgttctcatactcgt

SEQ ID NO: 34200 - DNA, 433 bp, Glycine max
tcaagaaaaagatggcctcagcaaattccttatttccatattggaattctatcaatagacctccaatctttaatggagagggttaccacaactggaaaacccgaatgcaaatttttattgaggcaatagatctaaatatctgggaagccatagaaatagggccttatatacccaccacagtagaaagagtttcaatagatggtagttcatcaagtgaaagcataaccatagaaaaatctagagatagatggtctgaagaggatagaaaatgagtacaacacaacctaaaagccaaaaacataataacatctgccctaggaatggatgagtatttcagagtttcaaattgtaagagtgctaaggaaatgtgggacactcttcgattaacacatgaaggaactacagatgttaaaagatctaggataaatgcact

SEQ ID NO: 34201 - DNA, 422 bp, Glycine max
  unsure (1)..(422): unsure at all n locations
gagccaaaatcctgactcaccataaaccttgacccatggtgagaatgccaatccttaccctcggaagcaaaaaaaagaaaagaaggaaaattccccaatcaaagagtgggagaaagcaaaaagaaaagaaaggaaaattcccaatcaaagaatgggagaaagtaaaaaaggaagaagaagaaggaaagaaagctcctgatcaaggatcgaaagaaaccagaagaaatgtgcagagaggtctttggaccagacaatatctgaacagtacagaattgtcaccaaatgaacgaaaaaagaaggaaagggaaccacgacctaaaatagtcttctccctttgattaccaaccaaaatcccgtgcgctagcgactnttttttctcgccccgcactaaaaaaaaaaaaaaaaaaaaaaaacagaaaaaa

SEQ ID NO: 34202 - DNA, 454 bp, Glycine max
  unsure (1)..(454): unsure at all n locations
acactatagagaactcccgctntatgcgtggcatctgcttcggaaggatctcatgtncccttttcttgncacanaatagatatataatcaggttttctgaaatgtcatggaaataatgaaactcanatggatcgggtaccgtgttctttctgacatgatgaggctataattctcagcttcgtcggaattctttcttttatatattttntgtaactatggcgaattaaagaaggcatattaatatcttcatgttatatttcccggtatgtaaggtgaaaataacaatgcatgatttttttaattcaaatattaagtgacatttgatttgataaaatattttgtatttttaaaaaaagtagttttcgtatttttgaaaattggaaaatatgattagtttgattttctaatatctgatttgaaaaaaatcttannaatgtgtttgattgatttcttt

SEQ ID NO: 34203 - DNA, 424 bp, Glycine max
tctcaaggaggtgagcttagttatgagaggggtgtgtgtatctaagctctatcttctcaaggaagttttctcaaagaagcttctcaaggaagttttctcaagaaagcttctcaaggaagctacaaagtctataaatagaagtatgtgtaacacttgttgtaactttgatgaatgagagtcttgtgaaacacaactcaaagttcaacttctctccctttttctcccttcaatttcgtgctcccccctctctctttctctccctctttcttttcctccattgaagcatcctctccaagcttcttatccaaggctcatcttggtggtgaagctccttcttccatggcttattccctagtggatggcgcctcctctcacctcttctcctttgtcttccgctgcatctccatggtggaaaatcaccatt

SEQ ID NO: 34204 - DNA, 425 bp, Glycine max
  unsure (1)..(425): unsure at all n locations
tgcttattgtgcttgcatgatactaagttatatatcttgttaccatgcatttccttgtgtgtttttgcagtttttgtggaaaaaatattgagagttcaaccaaatgtgaagaaactttaccttcttttgagagccagagatactgaatctgctactcaacgtttacatactgaggtgaatgtacaaagatttacaactattaatatttttttcagtcatcaaaaatttagaatacatcatatatcaaaacctatctttaccgaatttggctattcgtaaggtaactaaccgcaggcacaaaatctctaatgtatttagaatgatgactgatatacacttcgcacttctgtgtatcaatcattgtattaataattattaattttctttntcttatttctctttttctttctaagagtttaattatg

SEQ ID NO: 34205 - DNA, 421 bp, Glycine max
  unsure (1)..(421): unsure at all n locations
ggtgaagactaggcactattggatcactctaaaaaatatttgaccatcttggtatagctntgcctttcttttaccaagttcaaatttggatcgagtatttttctagctttttatactatgtcggttcgtcggatccattactttcattattcttttttacttttgtgatagttcactgccaaatgaacaaatgcttcacgctaataaaagtaattttaggtgccgttatttaattattttttgaaaataattctataagcacataaaaaagtaatttaattgtgtagagattttattaaaagtgaatatatatgatgtttattttattaaaattataaaaattactctttattgtaaaagagagaatcaatcatgatcacaggatttttagaagctattaagaaacactcaaaataattga

SEQ ID NO: 34206 - DNA, 426 bp, Glycine max
tccatcaagtggtaatcagagcacaagatcttcaagtatgtgctccttaaacctccattaatttttttgctttaccttctcttccattgttgtttcttcatttttctccatgtatctcctcacatgtcttgtgctaaatgttgttaacatgattctttagattttccaccgattaaacttgctatagaagctagatttgattttctatggttcaaatttcttgttcttgttcttgaaccatgaattttgttgagtttaggttcctttgagttttgtcttgttatttttgtggctgaaacctaaaccataaaattcttacaaaaatattaaagtagaagaaaatctcaaaaatctagagtgacttgttcacctattgtagttttttcatagaagtcatgtctggtcatgaaacttgtcacataagat

SEQ ID NO: 34207 - DNA, 420 bp, Glycine max
gtgagccaaaatcctgtctcaccatagttcttgacctttgtgaaatgacaaatcttacccttcgaaagcaaaaaaaaggggggaggaggaaaatttcccatccaagaggaagcaaaaaaagagagaaagaaaatttccaatccaaggaaaaaaagagaggaaagggaattcccaatcaaagagtgtgagaaagcaaaaagaaaagaaagaaaattcccaatcaaagaatgggagaaagaaaaaagagaagaagaaagggaagaaagttcccgatcaaaaaaaataatatgcagaaaggtctttggaccggacaatatctgaacaatacagaattgtcaccaaatgaataagaagaaggaaagggagccatgacctacaatggtcttccccctttagttgccaggcaaaatcttgtgctct

SEQ ID NO: 34208 - DNA, 385 bp, Glycine max
  unsure (1)..(385): unsure at all n locations
tggttatttggaaagattttaaactcccatttcatgattccaatactgcatatgataaaccattgtagttgttatacttaagacatttagggacctggtttcatctgatgtaatactatacccattttataaatgaatgttctaaactctcttgaatttacctttattcaacacaaatctcaagctttttttatccttaatttgctcatttcaaaataatgatagaaaaccaacttggtaccaacaatgataaaaaaacgtactgggagaaaggtatgctcagatataatttctaacattcttgattgctgacttttcagaagtttgcactctatgacacatcacacggtgacactttcctcaacatccttgtcngtctgaaccc

SEQ ID NO: 34209 - DNA, 159 bp, Glycine max
  unsure (1)..(159): unsure at all n locations
ctgctctaaatntacactgatatttgtatttattggatgtgttcgnatgttatttncgttttcaggggagcatcacagggtttaactaactctccaactgtctgcctacacaggaatggcccccaggaagcctgcctaaaagacgtcctgtaatgacaa

SEQ ID NO: 34210 - DNA, 358 bp, Glycine max
atgaacggagatcgaactgaggtggtttcggacgagtagatccgcggagtgcgatatctgcagatctgcgggatctgaagaaggccagagcggacgaagaaggagaatgagaaaacgaaacacaaacacacacactccctctccctgcgtaggtactaaaaatgcaatttagatgtcaacgatgaacggggatcgaagtgtggtggaattggacgagcatatcggccacgtacgaggtctgcaaattcggaaccaaaaggagtgtatcaagcatatcagttttcaatcagctagagtgtgtaaatgagtaaaggaaagaagcgtttgcatcaaagattcagtgatgctatgagaataa

SEQ ID NO: 34211 - DNA, 434 bp, Glycine max
tgttaaacccaaggtccgcccttggtgagtctctctgtttccaagtttcgccttcggtgaaatcaaagatatgcaaggtttgccctcgataagcttttccattcctaaatttaatcttggtagttgtcataccctagtttcctccggggatgatcatttgctaaagttttgattcttgccagccaaattgagctgcttaacaacagttgtcacacaatccgtaaggtttttcgatgctttggaagagaatgcagaaaatacccaaaagggaaggcaaaatggtcatttggtgacttttttaggcccctggctcgcccgggctagcctttggctcgcatgggccaccagaaagcttagggatgaagtaactagctcgcttgggcgagctgctgtgcaacctccagccctcatttcctataaataggcgtgagggg

SEQ ID NO: 34212 - DNA, 395 bp, Glycine max
tgaccggatgacgccgatcgaacatttcctaaccgactttatgcatatttcgctcaaggagagaatggaaaactcgttatgcgacatgtggcgtgatataacaaccgatattttatagcctacagtgtacaattctttttagaaaagctcactggccgataaaggcctttttacggcggagtaagctatcttgtgttggtggtgcatgaaaaagacacgatgtacttcggctgagtagttcatgcgaatacaaccgacatttagtacttggcaggatgacactatgccagctctgttcaagagatattagcttaccggattcctgcatatttcattcaacgactgaatagaagactcaatagccgacaacggacgagaactatttccgactgata

SEQ ID NO: 34213 - DNA, 437 bp, Glycine max
aattgcatttgggcacctattttgaatctcctattctgtacctacatataagaaacagtcccactctcccaattttacaaaatcatattcatatatcattggggcatttcaccgagcacttggtgggcgcatgtttggacataaattgcaagagaataggggcaatgtggcatgccccattgcttcagaaaacaacacaggcctaaggccttcttacacaaatcctcaactcaacaaatcaagcatcaaagcaacccaaaactgcctcacaaatataagcacgttctcacaatttagagcatcaaaagatgaagaaaacacctcaatgggaagctaaaaactcaaggattgaatacttacttgttggagtgagtagaaacaccaaaaatgaaagcaaaatgcaaccaaagtggcttgagggagcaaaaaccgcaagc

SEQ ID NO: 34214 - DNA, 286 bp, Glycine max
ttattttggctcggcctgacctttttaaatgcctggcctaacctgatagcctttttaaaagccttcttctcaataaatatttaatattttatggagtaggaacataataggaaagttaaagaaaaaggaaagtcaatcaaaataatgaggaatataaaaaggaacatgactcacacctaaattgtaattaaagtccttgattataggaatagaagttatagagcagtaatgtgtaatcaaagtctgatagtttcagaaaaaaattaattgtatccaaaaaataata

SEQ ID NO: 34215 - DNA, 393 bp, Glycine max
taacaaaaagcttaacaaacttagaaatcaagtgatcattgatttccgaaatatagggggagtaaacgaatgcacattttatctatatacaattgtttgttgcttgcttgaatcttgatttcaagtattgtattgtcatcatcaaaaagggggagattgtagatgcaattggctttgatgttttgatgatgatcatgatgatgtgttgcaattgatgcaaatgggctttttaagattaaaattcaagacaatacttcaagattacaagtcacaacatcaagatgatcactagaatattaggaagggaattcctaattgaattagcaaaggtttggccaagtgatttaaaataaaaagtgtttctcaaaggttttactctctggtaatcgatta

SEQ ID NO: 34216 - DNA, 423 bp, Glycine max
  unsure (1)..(423): unsure at all n locations
tgtgtaggctccatctatccatgttgtctctccctaatctcatgcattngtattcaagtggctgtagaatgtagagagattgaaatccttaatgttcattcaaaatctttgtgacctaaaccatagtagaattctgagactacactggaagagagggtctgggcacttcatgtttcttcttcatccgttgctcctctataacaattttttcctcctccttttgttgatgggcaggctttttggtttggacctttcccttctgctccctaaggatccttttaacctttatagcaaggccaaaagtttccaaagccttgtctttattagcaatagccttggccagtttcttctgcctcttttgctgaatgtcatcctagttcactagaggaataagtatgttcctcttgatgtcaaccttcatta

SEQ ID NO: 34217 - DNA, 425 bp, Glycine max
tgagctggccgctaagcgaggagacacgttaggtctgtcttgtgtgctaagcgagctgtctcaatcttcaactttctcttcaagtttttgcatcaattttcctcaaaagcacttgtaattttctccttttgaatctcgctggtaaaaaattaacatgatattaaattcctcattattttattaaaaaaacaacagtaaagtaaaggaattttaatcattcatagtcaaaattgactatcaattaaactcaatttttttttctgattagcaaaagcttcaatttgtagatggttattgatgtaggaaaccattatactctttaatgctttatggttttctcattgccaagcaataatcttctatgaatggttgtgttcctaaaaccaaattgttggtgcaaaattcatgcagtagtgttgctactt

SEQ ID NO: 34218 - DNA, 428 bp, Glycine max
tgtatgcaactgggcccatcctcgcgattattctaattggtccatagaaacgccttgaaagcttggattgactcgttcccgacaccgtggtttaccgatacggtctcaacttgactaggacccattcattcacttggaactcatgatctctacgatgcccatccgcgatttccttcatgcgagcctgagccttctgaagtttttgtcgaagtagggcaaacatgtcctccctctgactgagcaattcatccactgccgccaccgtagaagtgcccgtcaagtactgtggaaaacttggtggtttgcggccaaaagtgatctcgaacggcgtcagccctgtggctgaatgtgtggacgtattatacaaccactctgcccacatcagaaaatggccccatgcgcttggccggcgatgcacgaacgctcgt

SEQ ID NO: 34219 - DNA, 431 bp, Glycine max
ctatgaaactcagcttgtgccattaaagaaatgagcatgttattggaagattgactgaaaatgttagtcaatttgtcagattgattgtgaaggaatgcattaaccgtatcccggtgagagtgtgatccttaaattttgagagaaacaactatcatttagtactgatttttatgtgaatctttgaagtatggactgaatgcatgaaattgaggatgatgaacgccatgtttgattgtgatagccacttagccaaaaagctgaccatgtgcttgaatgaattatcccttgtacccagtttaagttgaatgaattattgattgattgaatcctgagcctatacagtgttatctcctgctaccttgacttaggttgtaggagagcatcatccacaggaagcgcggttcaaagcatatttgtcccaaatttggggg

SEQ ID NO: 34220 - DNA, 318 bp, Glycine max
tggtcgtaattgcaaactacttcatagtgcttaatgatctatatgtgtcaaactgagcaatcaccaatgccagtatcgccctcctctcaagggccagtctacctagcttgcaagtactttccttgtctggttgttttgatatatcaaacaagagtgctcctttcctgatgaaattgggccagaccttgctgggattgaatcttcaaaactgcaattcaattggcagcaacataatggagttgctagtggagaagttatggagatgtgatattctggcttaatcatgtttgaaactagaaacaaataaaactgcctaaa

SEQ ID NO: 34221 - DNA, 441 bp, Glycine max
  unsure (1)..(441): unsure at all n locations
tgaaggcatgtagcccaccatcttcttatagtagaactttattaatgtttccactattattgntatcacttccctctccattattgagggtgctacttgagctgccagatccctccacctttaggcatattctttgaaagattcatgctccctcttacacatgttctgtagctgcattctatctggagccatatcagaattgtactgatactgcctaatgaagtcaaccattaggtccttccaggaatggagctgggaaggttccgggttagtataccaggtgatggctaccctaataagactttctaggaagaaatgcatcaaaaaaatttcattttttgagtatgcccccattttgctgttgtaaggcgagtggagaaagaaagtacttgagttactccataggcaagaaatatcaatgtgacagtaactngcaagaaa

SEQ ID NO: 34222 - DNA, 434 bp, Glycine max
  unsure (1)..(434): unsure at all n locations
aactcaagctagtgcatatcaaatcactcctacatctcatctctagcattcattttcttctttacccactcctcaagtttggttttttagggaaaaacaccataactaaacgcgccgcaagggatccctatcgcaccagatccaaatctagaacgatgggtgatcaagaggagacgcaggaacagatgaaagctgacatgtcgactctgaaagaacaaatggcctccatgatggaggccatgttaggtatgaaacagctcatggagaagaacgcagccactgccgccgctgtcagttcggctgccgaagcagacccgactctcttggcaactacgcaccatcctccctcaaacatagtaggacggngaagggacacactgnggcacgatggcagccctcacctgggatacaaccgagcggcttacccttatgga

SEQ ID NO: 34223 - DNA, 424 bp, Glycine max
gtgtccttagatccctcttgttggactaaacttagactattcaacatttctataacaacatacttaaaaccaaaacttaattcgcagatccctcttgtaagactaagttccaattctgcttcattcaagttctaaggcaacaatatattttccaatgttaaaatcagctaactaggcacacaaatggttgatcagaccatgagcatacaaaatttaagcactgaaagaagcattgaacacaagaatcacaatcaattagatatgaaaatagttacatcagctgttcattagaaatccccaacaagggtgtttagccagctattacaaaagaaaccctaacaataataagcttacaaaacctaggcatctctgcaaaagttgctctgcttgctgcctccagagttctattcccgaaataggcact

SEQ ID NO: 34224 - DNA, 425 bp, Glycine max
  unsure (1)..(425): unsure at all n locations
tttgtggacaaagcaacgttttctgaaagcccataataccacctgtttgtgannganggaangcttcaagtaatagtttgatgaaagatgagcctgaagggatccatattcgacctctgtgtaaaattagacctgaagctattgtgtattatgggtgtgcatcaggttccttttgaatcttgttatataactccgtaaaagctgggtgagacgccatttccttgcgaagatcttctagaaaatcaaattgaggcatggatagtaaggagaatgatgcaggtgactcttcctcaatctgtgacaaggcatccgccactacgttggctcgtcccgcgcgatattgaatcgtgaagtcgtagcccagcaaacatgccaagtaacggtgctgctccggcgtctggaccgtttggctcatgagctctctc

SEQ ID NO: 34225 - DNA, 438 bp, Glycine max
  unsure (1)..(438): unsure at all n locations
catactacgctaattattgataaaatatcactaaannnnttttttatttttacatcnaatattagggcttttttttttttaaacaattgatagaagagttggtggtaattgcacctgtaatgatggcatttgtaagtggacgaccatgttgaataataaatatgaatgtcacagtgatttaccttttgaatcagatattaaatagcccagttaaaactatatcaactctcaacctcaagtgcgtttcctttttccattttttgaaaggaatgttatcaaagtgttctaaaatatttctcaacaaattgaaaataatgttcttatataaagtattagtaatatatttttatctcagctttataatgtatatttatctcaattaataaataattttgaaacaagaatttccccactaagataggaaaataatcaatagat

SEQ ID NO: 34226 - DNA, 424 bp, Glycine max
  unsure (1)..(424): unsure at all n locations
tgagatgaggaagtgttgaagggtgaatcttcctgcntttattgttgaccacagagtggtacctggagatatgtcgcgggggtcaggagaccttggggacgtcaggtggggtgctattgcccaaaaccaagcttgaccaatcccgacccaacccgggcatagtcggtcagtgagaacatgtgacgtacctaagcaggcgagctcctggcagtcaacagataaaaggaaaacaagaccacagagcaaggaggcttgtggtggctggccagctgtgaattttgtgtaatatgtggattgtggcctctggtaatcgattaccaagggtgggtaatcgattacaaggcttaaaattgaagacagggggctaagatggtctctggtaatcgattaccaaggggtgtaatcgattaccaggcttgaaaac

SEQ ID NO: 34227 - DNA, 437 bp, Glycine max
  unsure (1)..(437): unsure at all n locations
atactcagcttccactaaaatgattgcatgagaagtttctttacacctactgctntgaagntncgnngnagtccttagtagcataccagtctttggccttcggtcttctacatgatgcttattcttgaatagaacaagtcgtgtgatccaagaaatcaagagtttttaaactgggatttgtagatgttatgaccagaagtggctggagttactggacacagcctaacagagaatgagtatggcacaggaggaatcaaatactgtttgtggacacatggtgaccaactatcatctccacccaatcccatgtgcttgtgatccagatgaatctgtgatcccataagacattaaacataataaactgcacannnnnnntatnaaaaataataataatttgggaaatatatttttagttcctgtaaataggattataggac

SEQ ID NO: 34228 - DNA, 426 bp, Glycine max
  unsure (1)..(426): unsure at all n locations
ntntagggcatgttgggttctataggcgttttataaaatatttttcaaagattgccaaaccactcagtaacttactcaacaaggacaatgtgtttttattcaatgaagagtgtttaaaggcattcaacactttaaagaccagtctagtgtctgctcccgtcattacaacaccagattggagctaagaattggagctcatatgcgatgcaagtgattatgctgtaggtgctgtattgggccagaggaagggtagagttttccatgctatctattatgccaataaatttttaaatgatgctcaactgaattatgccaccacggaaaaagaaatgcttgcaattgtctatgctttggagaaattcagaccatactgttggatcaagtggcctcagaataattaagatgggaggttgaattaattattcn

SEQ ID NO: 34229 - DNA, 423 bp, Glycine max
  unsure (1)..(423): unsure at all n locations
ntaacctcatcgtctctcacagtctttttatttgggatctaatccaattcttgtgttcggactctcagccacttatgatagccgccgatgatcccattactgcttccgctaagctctctgtcctttcttcacgccgcatcccatgccttgcgaactccttggagtaccctcgcgttgtggtcaccgaaaccccgtgcgatgaaaggcgtgatgctttcgtctgatggcactcctctcatggggtagccaagttgtcttatggcgaggacgggattataattaatacaacctcttgttccatcaagggaacatttggacatccttcgcatgaagatagaatcctgattcttccttccttctagcgagggaacaaattaacagacgcccctccatgctagccaagagttggtcccaattcgcctt

SEQ ID NO: 34230 - DNA, 405 bp, Glycine max
  unsure (1)..(405): unsure at all n locations
cgctggcttctgcagaccaagaaaaannatcttttttcaatatttcatttagnggntnggctatggtgttatatctacacacaaaccttctataatagcctaccaaacccaaaaatcctctcaactgtttgggggtttgagaaagaggccaattcctaactgctgccaccttagcagggtcagtagagactccctctcccatgataaaatgtgctaaatactccactctagtaatatcctaaagtacgcacttatatttcttggccaaccatgcatttgctctcatggtagacaagactgtttgtaaatgatgcaagtgatcctccatgctcttncttgtaataagaatgtcataaaaaagaccaacagaaacctcctcaagtattctcggaacaccgaattcat

SEQ ID NO: 34231 - DNA, 362 bp, Glycine max
tatgcttataatttataaaacaaatatcagatttgacatgatttatgactataagaaaaacaatactgaacaaaatgcattatgcaatcatgttcatttgtaaaaaaaaaaaaaaaccatgataaaaaaaatagtgattccacgattcgttggttaaccgcgagattaaaaatttaaaaatagcactgcttacactattcccctaacaaacacaaactctgggagatttgaatgtaatatttcttcaacgtacgacaatataatgacgattacctaaaatgttacagagaaaagtatacatacgtatgattgatctcctatgaataacaatcataattaattctacaacatacatgtgcgat

SEQ ID NO: 34232 - DNA, 416 bp, Glycine max
tctcaaggaagctacctattctataaatagaagcatgttttacacttgttgtaagtttgatgaatgagagtcttgtgagacacaactcaaagttcaacttctctccctttttcttccttcaatttcgtgctcccccctctctctttctctccctctttcttttcctccattgaagcatcctctccaagcttcttatccaaggctcatcttggtggtgaagctccttcttccatggcttattccctagtggatggcgccgcctcttacctcttctcctttgtcttccactacatctccatggtggaaaatcaccattaaagggccttattgaagctcaaagatccagcctccatagaagctccacaagcaagcttccatcagtgtttaatgagaagggctaatattggctgagtatt

SEQ ID NO: 34233 - DNA, 423 bp, Glycine max
ggggatctagggcccacacaggattaaggcccattttgtttagaatttttctttaattttttaatttgtctttatttattttgttttgttttcattttctattattttattttcattttaaatttcttgcatttaggacaacttaatttcagtagtttaaatttagtcatgtaatagttgtaatttagttcgatgcatgatagagaagtaggtacttattgattggttgcgacgcatttggagttaatcaattgcatgagtgagatgaactgcatactaatggatatttttgtgaattattgattctcgtgcagcagacatcaatgtaagtgatgaagtgtgaactaacagtacacgagagaaatgattagtatttctgacagaaaaacatggaatgagaaccttaatacttcaatgaaaaat

SEQ ID NO: 34234 - DNA, 441 bp, Glycine max
  unsure (1)..(441): unsure at all n locations
actaagcttgggtagagcttgatttgaagagtagaagggacatgatataatttttgtaactngtaaaaagttagtggatattatttttttaccaagaatcggatgtaatctcacatgtagagacaaacccatataactttatgtctgttaattcttcatttgtctttgcttttaattggccatgggtctgaattattttttagtcgtttgagaacatcttgtgtgttttacaaacttgttttctcatcgtttgagtattcttgttataaaatttgttatccgttttttataaagttttcttcttaggcgaaaaactttgttggtttaagaaaaaggtttataaattaagctaaaatcataattcaatcctccttcttgtaatatttgcttgtataggaatcaaagccaaaaatattccaaaatctaaggtgtaaaaatata

SEQ ID NO: 34235 - DNA, 479 bp, Glycine max
  unsure (1)..(479): unsure at all n locations
cgggatttgatacctgcattacgtgatacttacaatactcaagctctactattcaaagaataaccaagaaatataccttcatcttactttgcattaaacttgcttaagttgtcttttacattgtttaacacaaagcatttacatccaaaaatatgaaaatgggaaatatttggttttctccccttatatagttcatatggtgttttctttaaaataggtctaattaatgctctattcattatataacatgcagtattaacagcctcagcccaaaagtatttaggaagatttgtatcattaagcatgattcttgctaactcttctaatgatctatttttcctttcaactactccattttgttgaggggttctaggtgcagaaaaattatgttctattccattttcatcacaaaataattcaaaatctttattcttaaattcctctccatgatcacttctaattgatgcaatgttgagatn

SEQ ID NO: 34236 - DNA, 275 bp, Glycine max
  unsure (1)..(275): unsure at all n locations
ggggctgcgcgaacgcagccctttttaccaattgataaagangcacngccaaagaggagaccttaggggacacccatcccaatgcaatgaaagtcagcaacatatgccataagccttcttgatcacccatccaccccatccaggaaagtatatattaatcgaagctggttggaccgtatatatactgtcaaccactgaatgcatccatgtttcagtacgacgtgggactaacaattacaacgttgcagaactatcaatactgtggattgacacac

SEQ ID NO: 34237 - DNA, 401 bp, Glycine max
  unsure (1)..(401): unsure at all n locations
gcttccttcatcgtagttatccacgaagccgtaatatttattctggtccaaangccaaaagattttaattcttcggttcagtacccaatatgcatttacatcacctaaaaggattttataaaaatggcgcctcttcctggaatcacccttgtttttatattgtttcctaggcctcaaaattctgccagcagtatcagctgacgctgattctgaacctgactgagactttaaaccacggttaacaatactttgactagaggatccaaaaaagggcaaaccatttaaacctttcatagaaaatccagtacagcttggatcaaaccttgaagatagcatcctagctgcattctcctcaagattttcctcttcatcttgcaaatcgccaggtattntacaacttg

SEQ ID NO: 34238 - DNA, 435 bp, Glycine max
  unsure (1)..(435): unsure at all n locations
ntgagccaaaatcctgactcaccatatatcttgacctggtgagaatgtcaatccttaccctcggaagcaaagaaaaaaggagagaaggaaaatttccaatcaaaggaaaaaaggagaggaaaggaaattcccaatcaaagagtgggagaaagcaaaaagaaaagaaagaaaattcccaatcaaagaatgggagaaagaaaaagagaaggagaagaaggaaggaaagctcctgatcaaggatcgaaagaaaacagaagaaatgtgcagaggggatctctggaccagacaatatctaaacaaatacagaattgtcaccaaatgaacaaaagaaagaaaaggaaaccataacctanaagtggtcttctccctttgattaccaaccaaaatcctgtgcgtcggtgacttgttcgcctcgcgtcaaacaaaaacagaaat

SEQ ID NO: 34239 - DNA, 431 bp, Glycine max
  unsure (1)..(431): unsure at all n locations
tcatgatgatgaatcaagttgattcatgttgttttgattatgacaaagatgatgacaaaaaacccaaagaatgatttcaagattgagttaacaagttcaagatcaagattaatttcaagtttcatgagaagaaatcaagaagattcaagattcaagagaagaaatcaagaagacttcacaagggaagtattgaaaagatttttcaaaaaacaaacatagcacagttttgtttttcaaaagagtttttctcaaaattttctaagttcccagagtttttactctctggtaatcgattaccagtttcctgtaatcgattaccagtggcaaagtttgatttcaaaagcttttaactgaatntgcaacattccaattgtttttcaaatggtgtaatcgattacaatatattggtaatcgattaccaatgtatctga

SEQ ID NO: 34240 - DNA, 417 bp, Glycine max
tgcctcaaattaggctatttaactctgtttcatgaacatttaactgtgtctccggcaaaaccacctccgaagcccgatccggatgtcgatgatccgctttatctgatgacattgatcatcccagagcttttcttgaggccttatcaggttagatgggatgccaccgtgttcggggtctttaatccagattttcccctctacataaagcacgaatacctgtctgaaatcgcacacggtggtcaatgtctcagcatatcagtgatacagttatggattttgtaagtctttatataaaaggcttttaattacctaagttatggctttcaattcataaatatttaactctgacttaacatatacaagcatctcactgacacatgtatgcgagtggggaattctgatatctatggattcctc

SEQ ID NO: 34241 - DNA, 423 bp, Glycine max
  unsure (1)..(423): unsure at all n locations
tgaagccttgaagattngtctttaggttttagttnttgtttgatgantttacaatgcctaaacaagttttatagatgtgacatttgtattgaatgtttttagtttaagcatgataatagatgtagtttaagttttcttatatccatgcttagtgtgaatcaaatatgttagaaaaatggattgatctctaagtttcttagaagcaatgaacttaacaaggtttgattataaggttttgtaatcaattacaaagtgtcaaaacaagcaatataattcacttatacttaaaatttggcaagaagcatcaaactatttgattacaagtttttgtaatcgatgacagaagaaagaagactctatagtttaagataattgattaccatntatggtaattgatgatattgcatctagaaacttaatgaa

SEQ ID NO: 34242 - DNA, 426 bp, Glycine max
tggcttctgcagaccaagaaaaattatcttttttcattatgtcatttagtggttgggctatggtgttatatctacacacaaaccttctataatagcctaccaaacccaaaaatcctctcaactgtttgggggtttgagaaagaggccaattcctaactgctgccaccttagcagggtcagtagagactccctctccaatgataaaatgtcctaagtactccactcgagtaatcctaaagtagcacttagatttcttggccaaccatgcatttgctctcatggtagacaagactgtttgtaaatgatgcaagtgatcctccatgctcttcctgtaaataagaatgtcataaaaaagaccaacagaaacctcctcaagtattctcggaacaccgaattcattaagccttgaaatgtggcaggagcatt

SEQ ID NO: 34243 - DNA, 411 bp, Glycine max
tcggaagaaagtgatgttgtacaagcctcttaggcagttcttgaaagagcctaggtagtcgaagagaagttcaagtccataaccatcaaagtctgaaaagagtatgatgaactaagggatgtccatatggccaccgatgaagccttggaatgagaaaccaagaaggcccgaaaggaagaacacgaccaaagcaaagttttgaggggctttatagggcagcaatagtgagctcaagctctgaagaggtgaaaggaatcatcacgggtcaaaggcatgatcttgaaggacgagctaaaggtttgccttatgtcgaaaagaaatttgtcccaacagttaagcgagactgaaggaaatatgtgggccatcatcgataagtgcaaagagaagctaaatctagcgacgactcatgag

SEQ ID NO: 34244 - DNA, 413 bp, Glycine max
  unsure (1)..(413): unsure at all n locations
ntgtccgcanaaatcactaaaaaccattttaaggtccatctccttagacggtcctctntgcttttatcggttaacatggaccgttcaaaagcataaaatcaacatgtaactttgccgcttttgaaagaactacgtaggtctgatttcctcatcgcaattgaggatacgtaggagcgaaatccccgcttttgtcgaccaccccaagagatcgttaatggtccaacaccttaacatttctctccttacaaaaacaagagatcgttaatggttcaacgccttaacgtttctaaaacaagagatcgttaatggtccaacaccttaacgtttctctcctttcaaaagaatcaaaagatcgtttaatggtccaatgccttaaacaatttttgtgcggttaaaatcgatcttgtggaaaa

SEQ ID NO: 34245 - DNA, 272 bp, Glycine max
ctcaagcttgatcttgaattaatattgaagcaatgcttgtttgttgttacaatcttgtcttaatcttgaagcaatgcttaacctttgaatgttagttgaagtgatcttgaaagcaacgttgtttgattattctttgacatcatcaaaatcatgtattcatacattcacaatcttcccccttttgatgatgactatctttatcaagtgaattctcttaacatcttcaaaaccttcattatgtacatatctaagatgtggatgaaatatactct

SEQ ID NO: 34246 - DNA, 413 bp, Glycine max
  unsure (1)..(413): unsure at all n locations
tgaagaatgctacgatagaaaaccttccaaacaatttggcattgtttctcctaganacgttggatctaagatatactggtgtgcgtatgatgccaacagagttctacaagcttaaaaagttaaggcatcttctagctcatgataggttttttgggttaatgggtcgggttcaaatggagggtggcattggaattctaacgtccctacaaacactacgtgacatggaatcatgactatgatgcagaagatctaatgaaagagttggaaagacttacacaattaacggcgttgggcttgaccgatgttcgcgaagaatacacaagtcctctgtgctccttgataaacaagatgcaacacctggagaactatacattatagccagtatacacttgggtcaatgatctgcatttgat

SEQ ID NO: 34247 - DNA, 433 bp, Glycine max
  unsure (1)..(433): unsure at all n locations
cttgagtctataggttatgaggtgaagtttgaggctactattgttggatgttgcctctgtttaatgacaagcaattacaataccattggagagtttgatgttaaagaggaagaggtaaaggaaggaagggaaagtggtattgcagtttacagagttgtggagtcatacctgctagagaacccacaagtgtatgcttaatcatctatttatttattgtgtcatgtatcataagatatacaaacatattcaaatttttaatagcagtgtgcaaccaaatatagggttgtttagaatggttgcaaagacttgaattccttaataagtccttattgtatgaacagcaaaaaaatggcgagtggtttggcaaaaatatttgtattttggtagtaacaaagagtccaagagtnagttgttttacctttacttcatgaat

SEQ ID NO: 34248 - DNA, 433 bp, Glycine max
tgcttcatcctcttagtcttggaccttgtcataggaccttcaatcctatgtaaaggatcattagacgggctggttgcaccactatcaccacactataaggctaaactacttaaactctaagccggttttcactatgcataaatttttaaagaggaaacaaaagcgataacgcatcttcacatctagatacacatatccatggagtctccgaagacaaagggttacctcctagctatctgttccccacgtacatcagatacatgatcatcacaggcacaaaccagatgtataacaatacaaggataagcttacgaaaaagaaaacatactaaaagggataaatcttaacagttaaaggatgttccaccaatcacatatataatataacatgtagaaatcatacataaaacataagttttagaattctcataaca

SEQ ID NO: 34249 - DNA, 297 bp, Glycine max
aaagttgactgcttgtaccactgtccatgtattataccaaacaaataatatgaaaagttctttcgccaaaatggactcaaccattgatagagatgtatgttactatgacagcgtatcaaattttgctgtagcttccatgagaatggatacaattacaaatgttgatccctctatttagaccaagaattaattctaccttgggccctattgaccaagccattgagctaaaaaatacatatgcgaggatacttctagctctactgaaaatgtctactatggtaaaacttctcatgcgct

SEQ ID NO: 34250 - DNA, 418 bp, Glycine max
  unsure (1)..(418): unsure at all n locations
ntataaagtgtttgtctccttcgtagtttattaacacatatatttggataattnggggaccattgtctatgataagcaaaaggaacctcaatgacgttctgcacattaacatttgaaacatattatttatttgatattaacataaataagtaaatttttaggggtgagagtcgtgacctgctcaacacggaatgacgcgtcaaatcggtgcacaattctcggtacatgtaaatttgatgggccctagatgagaaatgtttatgtaatgagtaagtgaacaaagatgtacccattgaaaagagaagataaatatgcgcaatatcaaacatgtagtatgaacgaaaagagcaagcatagaaggatgaatgatgcatgatgaagcanactcgaacatataagaaggtaaacataaaggatg

SEQ ID NO: 34251 - DNA, 427 bp, Glycine max
  unsure (1)..(427): unsure at all n locations
tcccgtatccgtacttggaaggatctccgccttcttatttcagnatctttacaattctgatatggctcctgaccgtactcaactacagaatatgttcaagaaagagggtgaaacctttaaagaatatgcgcagcgatggagggatttggcggcacaagtagctcctcccatggttgagagagagatgatcaccatgatggtagacactctgccagtattctactatgagaagctagtgggttacatgccgtccagctttgcggatctggtgtttgccggggaaagaatcgaggttggattgaaaagaggaaagtttgattacgtttcctccacaaacgcgaatgccaaaagaatcggggcaacaggggcaaaaaggaaggaaggagatgcccatgccgtctcttcaacacccgcgtgggtcaaaccc

SEQ ID NO: 34252 - DNA, 424 bp, Glycine max
  unsure (1)..(424): unsure at all n locations
tgcttagagccacttgtacttctgctctattgattcttattttcctgagaaaatagacctccctcaagagggaagtgactctcaaggagtatcagctgtgaaggtttgtccatattcttactgctcacttcacggtcaacgccacaccaatctgcctccactgaagcgctttgtgtcaatgaggaggcgcacgttgaagagccaaaagccaacaaaaatggattgtcaacctgacactagatcaaagcagattggtaatgcaaagaaagccgctcataaaactcaaactgtccacaaagaagatggaagatctcattttcagaacaagaaaaagctggctaggggcttatggattangcctcatggcactccagcatccacagtttctgaaggtgtggaatcaacatcaacagatagagtcgag

SEQ ID NO: 34253 - DNA, 427 bp, Glycine max
  unsure (1)..(427): unsure at all n locations
tactcagcttatgatcgtgtgtntgttcttgcctttttcttggttcttggtagaagaagaaaaatgtatgtcgagggatccattaanggatggtttcagatcaatggttgagtcgggatggagttaccgacactagctggtgtctaattcttgcgagcaaggtggtaggcagtaatgttagtatcagtttgggccatgattcttgaaacaaacaaacacacaagtcaggaaaacctaattcgatataaaaaaaacataaagaagataaacaattcacattcaagacccctaataggatttggagactttaaaaagttaactatgggcatggcaggaaggcatccagggagtaactcaagaaaagccaagtntccaagctcctcttcgatcaaatactctacagggtactcattataccaatgtgaca

SEQ ID NO: 34254 - DNA, 425 bp, Glycine max
  unsure (1)..(425): unsure at all n locations
tgcctcanagaggtccaggaaggataaagcggccgatttataccagttccgctctcgaatatgacagccaccgctttaggagtgctgaacaccagcagcgcttcgaggccatcaggggttggtcatttcttcgggagcgacgcgtccagctcagggacgatgagtatgccgatttccagggggagatagttcgccggcagtgggcatcactggttacccccatggctaaattcgacccagacatagtcctcgaattttatgccaatgcttggcctacggaggagggcgtgcgagatatgagatcctgngtgaggggtcagtggatcccgttcgatgcggatgctatcagcctgttcctaggatatcctttattgctggaagagggccaggagtgcgagtatggccagaggaggaaccggtccgat

SEQ ID NO: 34255 - DNA, 416 bp, Glycine max
  unsure (1)..(416): unsure at all n locations
tctaaactttatacaagtatgaagctctgataccactttttggacaagtggcctcagatatcttaagaagggggggttgaattaagatattaaaacttaattccccaattaaaattctatttcactttctattcaagttataaattcccttaataatgaatttcttaaatattgattcaaataaaacaatttgaatatgaatataaaacaataataaataaatgagtttaagagaagagaaaatgcaaactcagatttatactggttcggccacacccttgtgcctatgtccagtcctcaagctacccgcttgagagttccactatcttgtaaattccttttacaagttctaaacacacaaggacaacccttcctttgtgtttagaattctttcacaacaagagaccctcngtctc

SEQ ID NO: 34256 - DNA, 281 bp, Glycine max
gccatcaagtgggaattttatcacaagttcttcaagtatgtgctccgtaaacctgcattaattttttgctttaccttctcttccatcggtttttcttcatttctctccatgtatctccccacatgtcttgttctaaatgttgttaacatgattctttagaagatgcaccgattaaacttgctattgaaggtagatatgattatctatggttcaaatttcttgctcttgttcttgaaccatgaattgtggtgagtttaagatcctttgaagtatgccttgtt

SEQ ID NO: 34257 - DNA, 437 bp, Glycine max
ctcaagcttcttatccaaggcactctcttggtggcaaagctctttctttcatggcttattccctagttgatggcgcctcccctgtcctcttctcctttgacttttgttgcatctccatggtggaaaatcaccattgaaggacctcatcgaagctcaaagatccagcctccatagaagctccacaagcaaacttccatcaagtggtaatcagagcacaagagcttcatgtaggtgctccttaaacctctattaatttgcaactttactttttcctccatttcatttttctccatgtatctcctcacatgtcttgtgctaaatgttgttaacattattctttagaatttccacttattaatcttgctatagaagctagatttgattttctatggttcaaatttcttgttcatgttcttgaaccatgagttgtgttgagt

SEQ ID NO: 34258 - DNA, 427 bp, Glycine max
gactcaagcttctatggcagtgaaatagggcaatcgttggagcagttgttataaggattttatattaatacctaagccaaaggagggttaagaataaccgatttttgagcagcaacaaacctagtagtccttttgaaaatcaaaggggggcagagtataaagtggtggcctccttcatattttccaaatcaatggtttcaattttttgtttggatgtaataggaaaattttagtcgaataaatagaaaagagaaactaaatggaaaagatgcaaaatagtacctttttgcggagctgctcaaggattaatggtggttcttgtcaatgagctctttttcatcttagcctaaatagaaacttgatgaggaaaaggatagggttggcttggagtttgagcaatgtgatctggttgaacacgatcattggc

SEQ ID NO: 34259 - DNA, 424 bp, Glycine max
  unsure (1)..(424): unsure at all n locations
tgcttctggaacttctatggaggctggatctttcgcttcattgaggttcttcaatggtgattttccaccatggagatacagcggaaggcaaaggagaagaggagaggggaggcaccatccactagggaataagccatggaagaaggagcttcaccaccaagaatgtgccttagataagaagcttgaagaggatgctttaatggaggaaaagaaagagagaaggggggagcacgaaattgaaggaataaaagagggagagaagtgtaactttgaagtgtgtctcataagactttcattcatcaaagttacaacaagtgttacacatgcttctatntatagactaggtagcttccttgagaagctntcttgagaaaactttcttgagaagcttctttgagaaaacttccttgagaagctagagctt

SEQ ID NO: 34260 - DNA, 430 bp, Glycine max
  unsure (1)..(430): unsure at all n locations
gactcgcgtaaaatttaatatgtccaaaaaaaaatgttactagctttcactatcataaaatattttattatacgtaaaagaaattgtaccttaaaattgatcacgggctttgtaccactccggattcctggcatggacacacaaacaatttatgctcataaaccaatcatataaatacataaagcaagatggaattaaaaactttgatatcactgtagtatcacacatcctttctgagtatataactttttttttataggttataacatatacatgaaacttagacaacactttaaaatttagaaaatagtctatacattgataagataaaaaattattatattattgttgaatcacaaaccttcatttatatatatatatatatatattataattattatcttanaagtcatattaatcacaatttttt

SEQ ID NO: 34261 - DNA, 439 bp, Glycine max
  unsure (1)..(439): unsure at all n locations
ntccaagtttatgttgatgatgctgaagactaaattctttaatcaagtttcaagcaagtttcaagaatcaaagaatcgttcaatcaaagcaagtttcaagaatcaaagagtcattcaatcaagaatcaagattcaggtaaagaatcaagagaaaactcaattaagataagtattaaaagtgtttttcaaaatattgaataacacaattttgttcaagatattttttccaagaaaaatcttttaccaagagttatactctctggtaatcgattaccagaaggcagtaatcaattaccagtagccaacattcttttcaaactgatttacaaagctgtaatcgattaccataatcatgtaatcgattaccaatgttttaaaacattagatttcaaatttcaagagtcacaacgtgagataaaacagtttcaaacttgtgtag

SEQ ID NO: 34262 - DNA, 426 bp, Glycine max
  unsure (1)..(426): unsure at all n locations
tgtcttcaacaaacaaatcaaaatcaattttctgatcttcataacctagctccggcttcctcttccccatatcaactatgcagcttgcggtcaacatgaatggccttcccaatattacagggatgtcagtatcttcagagatatccattaccacaaagtctgtcgggaagataaaatgttttactctgaccaacacatcttcaattactccatatggcctggtaatggagtgatcaactaattgtaaagtcatttgagtgagcattatttccaactctcccaatcttttgcacatggagagtgacatcaaattgatactggatcccaggtcaataagagcttttcccacattgacttctccaattgaacaaggaatagttacactcccaggatctttatgcttgggtggaaggatctttnggatca

SEQ ID NO: 34263 - DNA, 423 bp, Glycine max
  unsure (1)..(423): unsure at all n locations
ggacagctgggaacttaggaggaaaatcttattgggtttcaatncctttattgaacatctagtgtgcttttttttaaaagaaaaaaaaaatccagatatctaatcccaattgatattttaatcgggtcaagaatattaactaaatgatgaaattaaagttttctcggaatttttactacaccctgaaattttaacttaaccaccggatttacttatgttgaattttaattatttgtagtaataattttattgtttataataatgatattcaactcaaatagaattactttttgtaaataatacatgtaatttagaagaataaaaacttctaaaaccttatttaaagaaatgtgagtacatattaatattacttaaactaaccattccttgtgtattggaacataattttaaaaanaaaaatct

SEQ ID NO: 34264 - DNA, 312 bp, Glycine max
  unsure (1)..(312): unsure at all n locations
tactcagcttctcttagtgagtgcttctttgcaaattctctttgttttcttgattngattggtattttcctgtgttgtcaaagccattcaatttaacatatagttgagaatttgatcatcaaatgtatgtgcatgaaaaatatatatgttgagagatattggccttttcatgattagttttttaatcccttccagaagctaccatggccacccataaaaaatgccattctaaatttttgagtttcttacaaattaagtatggacaatggacctaagtgaatgatttgacctacgatagtttgatatattctt

SEQ ID NO: 34265 - DNA, 426 bp, Glycine max
  unsure (1)..(426): unsure at all n locations
tggagaggatgcttcaatggaggaaactttattanggatttgaaagagagttgggggagcacgaaattgaaggaagaaaaagggagagaagttgaactttgagttgtgtctcacaagactctcattcatcaaagttacaacaagtgttacacatgcttctatttatagactaggtagcatccttgagaagctttcttaagaaaacttccttgagaagcttctttgagaaaacttccttgagaagctagagcttagctacacacacccatctaaaaactaagctcacctccttgagaagcttccttgagaagctagagcttagctacacacacccatctaaaaactaagatcacctccttgacaaaatacaggaaaatacaaacaaaaagtccttactacgaagactactcaaaatgccctgaaata

SEQ ID NO: 34266 - DNA, 313 bp, Glycine max
  unsure (1)..(313): unsure at all n locations
tcttgcaggaaagatgttttaaaaaatagtttgatatttattattttaaanaataataatatttttaagaaaggattttttttcataattttttttaattattattttacgaaaacttttccaatgagagaggtgagaatcttaatgtttcgagtttattattattttttttctacagatcatattgttctttattaaattatataatatcataaataattaagataatatataaaaatataattacctcttaatctataaaacttatacgataaaaagttttgtgaaattttatcaagatttttaaaccaga

SEQ ID NO: 34267 - DNA, 399 bp, Glycine max
  unsure (1)..(399): unsure at all n locations
tgcctcanagagatccatgaaagacaaggcggttgatttgtccagttccactcccaaatatgacagccatcattttaggagcgctgagcaccaacagcgcttcgaggccatcaaaggatggtcattcctccgggagagacgtgtccagctcagggacgacgagtatactgacttccaggaagagatagttcgccggcggtgggcatcgctggttacccccatggccaagttcgacctagacgtagtcctcgagttttatgccaatgcttggcctacagaggagggtgtgcgagatatgcgatcttgggtgaggggtcagtggatccctttcgatgcggatgccctcagccagttcttgggataccctttagtgctggaggagggccaggagtgcgagta

SEQ ID NO: 34268 - DNA, 399 bp, Glycine max
  unsure (1)..(399): unsure at all n locations
agaaactcaagctgggaaaaggggcttatccgctgttgagtggtataaatttgattngacagagcatccacacactggatttctataagactgaaaagcatgagggacacatcagaaaataggcattataaatgaaacagcatacagagaatcagattgaagtctaaattttttctcacatcaatatatttttgtattgtgaacggagtgtcactgaggaaatctcattgtcttgcaaatctacaagctgcaattggggacaaatgttgtcacccatgtccaatgtattgttcaatgcattgtttcgtagtttcctgtgaaaatatgaaaattatgatgactatcattctattngttgtataactacttatgatcaacataaaagttagggactttaca

SEQ ID NO: 34269 - DNA, 430 bp, Glycine max
ttagatctattaaaaaatttatagtgaatagactcgaattacttgaatctttctgttttatttgctcaaacataccacttcgtgatattttgaggttttaggattagcattcatttcattggagcatattagatagatatcattagcatttagtgcattggtattcataacttgttagatccatgtttgatatttatcttaatatgtttacattcatagctaataacatgctatatattggaccttgttgcttacatatatgaccttaatttcttaaaaaactaatggaaaatatttttgttatttcacaaaatagcaccaaccacatgctcatagaacatatacgaaaaacacaaattaaaacgaaatgttatctcaagatcatatgagaaaaaaagtgattttaataatgaaaacaaaataataaaag

SEQ ID NO: 34270 - DNA, 432 bp, Glycine max
  unsure (1)..(432): unsure at all n locations
tgcacttgaggagcgaaggatatttgcagctaatgaacttctttcttttctattnttccttcagactttactgtttctttttgctaatatgtaaatataaataatataaggctatggcgtaaaaacatggtctatatttacttctaagattgttaggggtaaagaagagcatgtccatcagtgctactaaaggcctcttgaaattgcaaataagtgaaaagaaacaaaacagctgaaactgtttagataacattaaagaaaacacagatttcccctataaagaatgaaatgctaggtcaaacagttttttttctccactggatggtaacagatcctcactaccttcaataaacatgtccctaccatttatgaattgaggaaaaccttaacctaccctcaatcaaaccctgttaaattgggtttcttctcatc

SEQ ID NO: 34271 - DNA, 432 bp, Glycine max
  unsure (1)..(432): unsure at all n locations
cttcattctacacctgaaaaaaaggatgagatagtggcacttaagtgaatttttcctaacttaaattttcatgcaggtggaccttcttctagtaattctgacttacagcagccccttatccctcttccattcccacctagagcaattccaaacaaaaagatggaagaagcggaaaaggagatcttggagaacttcagaaaagtagaggtgaacatacctctgctagatgccatcaagcagattccaagatatgccaagtttctaaaggagctgtgcacccacaaaaggaagttcaagggcaatgaaaggattagcatgggcagaaacgtgtcagcattgataggtaaatctgttcctcacattcctgagaaatntaaggacccaggtactttatgtataccttgcattattgggaacagtaaatntgagaat

SEQ ID NO: 34272 - DNA, 433 bp, Glycine max
tgagatgaggaagtgttgaagggtgaaacttcctgcttttattgttgatcatcagagtggtacctggagatatgtcgcgggggtcaggagaccttggggacatcaggtggggtgctattgcccaaaaccaagcttgaccaatcccgacccaacccgggcatagtcgctcagtgagaccctgtgatgtacctaaacaggcgagctcctggcagtcaacagataaaaggaacaaagaccacaaagcaaggaggcttgtgtggtggctggccagctgtgaatcttgtgtgatatatgggttatggcctctggtaatcgattaccaagggtgggtaatcgattacaaggcttaaaagtgaagacaggaggctgagatggtctctggtaatcaattaccacggggtgtaatcgattaccaggcttgaaaacgaggtca

SEQ ID NO: 34273 - DNA, 297 bp, Glycine max
  unsure (1)..(297): unsure at all n locations
agcttgnaagaatcatccttgaaagatcagaacacatttttcatattctcatgagaaagaagcacaaggagggatttcacagaccaaaaaatgagattaaaaccaatcccataatggttcttaaaaacattagaagaaacaatggatgccttcgaatagaaaaaaatctctcaaaggtgtataattatcatacagaaaagtgtttcatctcaattccaatgactaaaatgtcataaatcaattttgcaagtcatttcccatcaaaacaaagaatttgtataatcatcatggatcgat

SEQ ID NO: 34274 - DNA, 424 bp, Glycine max
  unsure (1)..(424): unsure at all n locations
agaagttgcaatagtgctaaggtttctgtgttttagtttttcgatattgttgacaattaacttgggttcctacctttatgatcttttagtttaatgtgctaagttgtttcaagtttggtctttggcaagtgtgtacaaagttagtacctatcgctttctatattttttgttgttcagatctcactataaagactaaaagtttcaagtctttaatatgttagtttttaaatatttttggagatagatgttgaaggtacttacgtctggccttgtgggagagctcattttcgtgaaggctatttcagttnttagtagaaggctatgtcagtttttaactgtgttactttattgctatgaaaaatgttgtctttgagagcgttgatgctcgcacaatacttataaacaaagtatcaataaatcgtgt

SEQ ID NO: 34275 - DNA, 420 bp, Glycine max
tgtaggtaaactagatgccttggttaatctggtaacctatctggccatgaataaaaaattttcacctgtcgccagactctatggtttatgctcctctattgaccaccacacagacctttgcccttctgtgcaacaatctgaagcaattgaacaacctgaagcttatgctgcaaacatctacaatagacctcctcaacctcagcagcaaaatcagccacaacaaaacaattatgacctctccagcaacaggtacaatcccgggtggaggaatcatcccaaccttagatggtcgaatccttcacaacaacagcaacaacaacaatagccttattttcaaaatgctgctggcccaagcagacatacgttcctccaccaatccagcagcaacaacaacaacaacaaccccagaaacaacaaaca

SEQ ID NO: 34276 - DNA, 424 bp, Glycine max
  unsure (1)..(424): unsure at all n locations
ntactgtgataataaatcatccatagttattgctaacttcctcatccaacatgatcgtacaaaacatgtgaaaattaacaagcatctcatcaaagagaagattgaagatggtattattgtctttccttttgtaaaatcagaacaacaacttgctaatatgttgactaaggcaatatcatctaaggcccttagtagttctcttgataagttgggaatgtgtgacattcatgcaccaacttgagagagagtgttagaatccattaactgaagggattagctatgatttgaatttaaattataattgatctaaatccctgtatattttctcctnttttatttgtgattntattttgatattttgtactaataatcatggaaaaatgatagaaaggattatgtatttattcattgtctcatattaatg

SEQ ID NO: 34277 - DNA, 426 bp, Glycine max
  unsure (1)..(426): unsure at all n locations
ctaataacatatatttattttcaagtttttaaaatcattaacattnngataatcaaagaacacgagtaaagaagtctcacattatgtggaactaagaaaactaaagaacataaaaataagaaaattataaatttaatgattaaaattttttccttaattgttgagaaaactcaagtctcatgtcagttaaaaataaaatcaaattaaaatatataagtgaagaacaattctcacactaatttttaggattgaattagacctaaattcatattctaagattctaagattctaagattgtgttaatgataatgtccatactttttagagtcaagttatacttaaactcacattctaagattaatataatctcaaatttaattacgcgtttttttcgtatntattgatagaaatcttaaaaattgaaaa

SEQ ID NO: 34278 - DNA, 418 bp, Glycine max
  unsure (1)..(418): unsure at all n locations
ntcacaccataaaccatatatagaatgtttagctcttattgataagcaccataatgtttacatcgntcaagctttcaaatttaaagtaccaaagtacacaacatagactagtacctactgaataaaaattagtcatatccaactacacatcctaataacaaaataaaacaacaaatgggtcttcacttttcttcatttttatactagatctttatcaatagccttccttccagtgaacctcggtgttggcatgaaaagtaatggtgttgttggtgggccatccacaacaggtgcgtctattgttgaagtgtctgaaatgttcttttgtttgggacttgttatgtttagcttattccttgctactggtggaacatcagcaatagatgcagggacctacatgcaaatggcaaacatgaat

SEQ ID NO: 34279 - DNA, 275 bp, Glycine max
ataagggtgatatctttccgaacggcacgattattgcaaacctattatgaattgtttatactggttctaacttacaagaaatgatattaatgagcttttactcaagtttttcaatgacgaatatcagcatatgtctccaaaaaatatattactcgagttttgaaaaagatatagatggattgacaggtatgtcaggaatgaaaaaacttatgtgagcccttcaagcgggggcctgaacttgagtttggggtattacatcaatcatatcttccgag

SEQ ID NO: 34280 - DNA, 396 bp, Glycine max
  unsure (1)..(396): unsure at all n locations
tagttcctagcttagctcttagggtgtcnctaagtggttaaggaacttagcatctccatctgacacaatggtcctaggtaaaccatggagtctcacaacttccctgaaaaagagttttgagatgtgagaagcatcatctaccttgtggcatggtataaagtgtgccatcttgctaaacctatccaccactacaaagatagagtctacacctctttgggttctaggaagcccaaggacaaagtccatactaatgtctaccaaaggtgcagatgggatggataagggtgttgatgtagctccatatggagcttgtaggccttggatatactttatcaatggagtcctttgcttcttgaagatcaatggcagccgaatggagatggaagatagatgatt

SEQ ID NO: 34281 - DNA, 315 bp, Glycine max
atatcttttcgaacggcacgatgattgcaaacctatgatgaattgattatacttgttctaacttacaagaaatgatattaatgtgcttttacacaagttttacaacgacgatgatcagcatatgtccccaaaaaatatattactcgagttttgaaaatgatatagagtgattgacatatatgtcaggaataaaaaaacttatgagagtctttcaagcggtggcctgaactggaattaggggtattacatgaatcatattcgccgagatacattggcggaataagtatatgtcattccagaaatacattgatggca

SEQ ID NO: 34282 - DNA, 291 bp, Glycine max
ctcaagcttcgtacttgcggcctagggtgacgcgtccctggccacattatggactcttattaagacacgagagctatcataagacacgaattggtgcgcaaaatgtgcctaattcacacccataggcctatcctctgcatgagcgataaccatcggagcatcaccactgcctgcgttaatgatactgatgacgagacacattagaaaagactagaattatccaccatcgagtggacattaatgatgatggggcggactgatgacgacctgacacatggagagagtccaagc

SEQ ID NO: 34283 - DNA, 432 bp, Glycine max
  unsure (1)..(432): unsure at all n locations
ttaatggaagttaagaaaatgaaattgcgttgatactcttaattgattattaggnttttgggctggttgaggacatcaatactatatttggaaagacccaaaagaacttgacaagtaaaaatttcatatggaagaagagatcgatatttttttatattccatactagtatgatctagatgttagacatagtattgatcttatgaatatggagaaaaatgtgtgacagtgtaatcgacatgcttcttaacactaaagggaggacaaaggatggtttaaatactcctcaatatctagctgagatgtgtatacgtgaccagttacgtccaaggtctgatggtaagaaaatatattagcctccagcatgtcatactttgtttataaatgagaagaacaagttttatcagtgtctgtgatgtgttaaagtaccacag

SEQ ID NO: 34284 - DNA, 430 bp, Glycine max
accagctatgactgaactagaatgaggggataaggatagtctttgacctttgtgagttgaattgatccgacgttcaatattttatccactaaatattaatataatttatggcgtaaatacttgagttgagaatcaattatttgagagatgaagtagtcagacaatccaaataattaagagacattatttttctgtcatgagcatctttaatgttaaacattagtatatcttcgctattaaacatcattagaccaatagagttgcctaactttatttttatgagctctattatataacatctttaataaatttaacaacttttttcactttttaataatgtaactcttcatatctaacttaaaatagatctaataaattattgtagatgtttatatttttttaataaggaattattttaatattaaaaaca

SEQ ID NO: 34285 - DNA, 377 bp, Glycine max
  unsure (1)..(377): unsure at all n locations
tacctcacgacanagattacatnncatttatgagctgcagactnaagnccattgacaatagataccgatgcagccgagcatgcacaaatatagcagaatatatggccacaagtcagagaaactggatcaaacactgtgtcctatcaaggaggagccacatgaacaatatcaatggataacaaagtgaaggataatctaggaaaatgcttttccaaatcccataggaaacgatattttacttttagaaatctaaggtgatatggtcaatttactcgatcttgttattttaagttgaatgctttgtattaggaaaagtgaaaatcactgatacttacgatacatatgaaaccatatacaaataaaatagttaatgaata

SEQ ID NO: 34286 - DNA, 340 bp, Glycine max
  unsure (1)..(340): unsure at all n locations
tcaatgttggatgaggtgatagaatatttgaagcagtttcatagcacagttgcagatgataaatagaatcaacatgtcatcgatgatgctgccattgaccatgcagcaacagcttcaaatgtcgatgatgtctccaatgggcatgggattagggatgggtatggggatgggtatgggaatggggatggatatgaactncatgaaccgngctcacatncctggcatccctccagtcctccacccttctgccttcatgcccatggcagcctcgtgggatgccgcggccgcatctggtggcggtgaccgacttctatggactcccgtcaacgtgatgcctgac

SEQ ID NO: 34287 - DNA, 404 bp, Glycine max
tgaagcatgagccgttctaagagctcgagatgagtttgttagtgattgtgagatcctggaggtgaaggagacatcctcaccacttgtatttttgcaatctttcatcttgttcttctctttgctataaagaagtcttcctggttatggaaagctaaatcctctgttggatcttccctgtaggtacctgatgtaaatatatttctatctatttaatgatgtttagtgtgctctctgtgctatctgcttttcactccagtatgcctttaccttgatcacgtagatgcatgcttcgttagggtcattcaacactggaaactggtctgattctaaagaccttgatagtacagggctaagttgtcgtactatcacgacgaatcggcgtgtgataatttagttgtgtatgt

SEQ ID NO: 34288 - DNA, 247 bp, Glycine max
  unsure (1)..(247): unsure at all n locations
atactcagctcaacattcaattgtgagcgccgatttgacgataattcaacancgaggaaaaggagggccgttgacnggacaagctccacaccaanncgagggcgcgaanatgcggactcatcaacatcagtaaaagtattgcgttgaatggtcggacttcacattcaattcgagcgctcgaatatgatgggaccatcaacatcgagaaaaagtttgccgttgaatggctgaacttacattcaattca

SEQ ID NO: 34289 - DNA, 427 bp, Glycine max
tgtatttttctcacatataggacatgtgttatggcctttgacactataaccacttaaatttccatatgctggatagtcattgatggtacaaaaaaccattgcacgcaacctaaaggtctctcgcagattcccatcccacatatctaccctgtgttcccaattttttgtcaagtcttctatcaacagagtcaagtagacgtcaatatcattccctggatgtcttagatccgctatcatcatgcaaagcattatgtacttttgcttcatgcacaacgaaggaggaaggttgtaaatcattagcaaaacaggccatgaactgtgattgctgcttaagttaccaaatggattcattccatcgaaagcaagaccaagccttagatttcttggctcattcctaaaggtctctcgcagattcccatcccacata

SEQ ID NO: 34290 - DNA, 408 bp, Glycine max
  unsure (1)..(408): unsure at all n locations
tgacaannatttgaaatttatactctttttttctgagttttgnttatgtacgtgtggctcagttcattcactgagttaaactggttggttgtggcagattatttcagcccgatattatttttgttgagaaagattcatgggtttgtggagaggacgagatcttcaatgtgtggcaactggactggaaacaaaatgggcatatgtttaagatacctcaaatgatccttcttgcgaccaacatcggtaatgctgaatttgataaagctaaagctgcaggtttcagtgatactgtgatcatgaagcctctaagagctagcatggtggctgcttgtcttcagcaagttcttggaacagggaagaagaggcagcatgggaaagacatgaagcctaatggttccactttggtac

SEQ ID NO: 34291 - DNA, 318 bp, Glycine max
  unsure (1)..(318): unsure at all n locations
ntagtgagaagaaagaatagtttagttttataggaccatgatcaccacctaggacttgtcatggggaaaaaacctgaaggagacaaaggaaacagccctggcgaaagtggaggctgcggcccggagcctaaaatccccgactgtgcaaagggtgacaaagggaaatggggagtaaaacgagatggaaactgaatgccaggggacaacagtggtggataaccagactgaggggagagaaaattcatgtagccatttggtgaatgcaagagaaactgagaggttggagaaggtaaggtaaatatgacgccatttggttgt

SEQ ID NO: 34292 - DNA, 398 bp, Glycine max
  unsure (1)..(398): unsure at all n locations
gtgacactataaaactctctagcttagtgaagatgccctattggttataactgccactactgtaaaaagggttctccacgacgatnttgcgacctattcaaagacggttntgaactgttttagaagccaacatcatggagagtcaagactttctacaatggttcttaaaaaaccgtcttaagaaaactatcattttaagatgatttttcaaaaaaaccatcttgaaagactgttgtagaattttttttttaaattaaaaaagttgaacattataagaagattttttgaaaaaaccgttttagaatgtaaacattctaagatacatttctaaagaactatctttgaatgtcttttttttaaaaaataaaaataaaaataaaatttaacgattctaagac

SEQ ID NO: 34293 - DNA, 660 bp, Glycine max
  unsure (1)..(660): unsure at all n locations
ctccccatcaccctcccnnctcggcccnccccctntntctnntcatctnannnnctctcnccctntcntccncagggcncnccgacagaattgacgcattgtaacgcatccanatcnactcaagctcgcagggatatggagtacccctcatatgtgggactatgcggcgagtgggctnatgtgcaagncgaccctccacatgcaccaatcacacatataatcaccatccccaggtgcccaccttcaacagaactcacgtaactccacgtagcccctatcctcggtcctcttaacaccgggtccccatcaatacctccaagctttcacaacatacatgcaattcagaatccaaacatcatgaactatccaatatcaagaacatagggcagaagcagaagactctgcccaatacacataccaataccacaactttccttactcaaataccccagtaacattgtcttcgttccaattggttcaccgctggatcgactcgaaaatttactggaggtcctagtacatatcctacatttgaccgctggatctgctcaaacgtcataacccaaatgacaaccttcccaacagaatgataagactctgacaagccaaatatgctgcattcaacagaaatttgatatagagcagattcgaatactctgn

SEQ ID NO: 34294 - DNA, 414 bp, Glycine max
  unsure (1)..(414): unsure at all n locations
gcttgttcgcacatcgttcgtgtgtatatatccactcgacaaggtttgaagtaaaggagaccttcaatcctatcacgcaacgtggcggacaaaagtgggtagtaaacttgaatgaccattattgtcaatgcggagagtattttgcgctccactatccatgttcacacattattgcaggttataggtacgtgagcatgaactactaccaatatgtagatgtcgtttacacgaataagcacatcttaaaggcttacttcgcacaatggaggcctctcgggaatgaagcgacaattcctccttctaacgacacatggacacttatccctgacccaactataattcgngcgaaaggtcagccaaaatcancaaggataatgaatgggatggatnggctagaaccgtctgagcaccggc

SEQ ID NO: 34295 - DNA, 428 bp, Glycine max
  unsure (1)..(428): unsure at all n locations
acagactatacacacatgttatacatgattcaatctcacgtctcttatgcttctctccctacccaactgaccaactccatgaacgtggttgcatttgtatggagtggatagatatgggaagctaatattaatttattatgtattattatgtagacaacgtcaaggtgttgatgcaaaaattggaaatgtagactcacaaattgtttattcaaacttctgtatttctcctgagtttctacagcactctaatatttagggtactaataatacccttgatggctagttgcacatttattggctactctatcttacactgtacgcttaattgtgtttgcaatcttnttagtttttatgcctgattntcagctcatttttntaagccaaataatgcttattcgtataattaaatgaagttggtcttaccattc

SEQ ID NO: 34296 - DNA, 324 bp, Glycine max
  unsure (1)..(324): unsure at all n locations
tccactgattctactcctgcacatacaattattactacacataattcttttgggtgaatctacacaatattattagtatgactcgtattacgtagcaatgagtggattatcatttacggattatgaatgtcagctcttcgagtgttaanagagtanggcatggaatgtattaatcattaagtatttctaacaaagttcagaaacttttccatgaagaaagtatctttcaaaaagaatcctctattcatggaatcaatcaagggtggaagggaagggaagttatctttgaaatacctctaaccacaagagtgctattcacatgac

SEQ ID NO: 34297 - DNA, 354 bp, Glycine max
  unsure (1)..(354): unsure at all n locations
attactnagctatttgaattctttagttcctaaatgtacaacccttcaaatggtgctcgttcccctctntcttttctgcaaaaaagaaaatcaaatgctgtgaaaacatggatgaagtcctaagaaaatcaatatcaaagaaaacatggatgaaatcacaattaanaagcacaactacctatctttcagaagtccttggttaatttgtcttgtctccttatgtagtggggttttgtttaataatgttttacttttgcccttccaaaaaaacttatcactaatcctctnttcattaatcccaatttgtatgttattggataaaagatcatgggttctccacctgcctccactact

SEQ ID NO: 34298 - DNA, 392 bp, Glycine max
  unsure (1)..(392): unsure at all n locations
atgagtatgtctgcgaatcggacatcctgtgaaaagntatgatcntttgaatttctcgagtgcttccgttgtttaatttcaagcgtctcgatattttatgtcctcaaatcagacatcggagcgaaatgttatgaccattcgaatntgtcgagagcttccgtttttcaatttcgagcgtctagatgagttatgtcaccgaatcagacatctgagtgaaatggtatgaccattctaatttgtcgagagcttccgttgttcaatntcgagcgtctagatgagttatgtcaccgaatcggacatccgttgaaaaagttatgaccattcggctttgtcgagagcttccgtggttcaatttcgagcgtctcgatatattatgctcccgaatcggacat

SEQ ID NO: 34299 - DNA, 455 bp, Glycine max
  unsure (1)..(455): unsure at all n locations
cactntgattctctggtttgtagtacagtaactacacttctccttcccttngaacttctcttagaagaaaaagctntatcttgaaatgcttagttttgccatgaaacactggatcattagcaattgagattgcagcctggttgtccacaaaaatatgtgtgctctcttcttggttcatatgcanaattgtcataattctcttgatccanagagcttgattcattgcagcaacagcagctacatactctgcttctgcagttgattgagctacaacttcttgctttntagaacaccaagaaaagactccagaaccaaaggaaaaacaataaccagatgtgcttctcatgtcatcaatacaacctgcccagtcactatcagaatatccatggagcttanattatgagaatgagagtacatataccatagtctaaagtgcgtcaacatatctaataact

SEQ ID NO: 34300 - DNA, 469 bp, Glycine max
  unsure (1)..(469): unsure at all n locations
ctctacctcccttccatgagaggacaacttcaacttatgacgtntcctgaaataaaatnnttaatcattataacaataataacaaatagttatgaaaatattatttctatcagaatataaatacctctccattccaaactattaataccacatgatgaacatagtccatcaaaactgatgtgtcgtggggctcgctnggaaaaccctcgacatcagtaactacatcatcaacagctacctctataggctcttcatgcacctcatcagtcgcatgatccacatgctcaacatcctcaacaataggtgcaacttctcgttgcctacatgcagatgttgtaggcctntgctgcttgagggcttcactcgcatcacaactccctaaggctcttcctataaccctacctaaagtctaacccannacctcgtcgtatcataatctgacattaaatagcataacaataatgcattc

SEQ ID NO: 34301 - DNA, 282 bp, Glycine max
agatggatatctgtagttgtatcaatgaatagctcataaacttgtgcttgagtgaaacagttaccgtaagactatggcttgagctactttccttgatatctgtcttatgattaacttcatctaactgtatagatcacactttggtctcctctatgtctagctgcatattctgcgaagaacagtgataggtacacattgcttcatctttctcatcatgcaatcaataaatgtcgatgcatacacctttgcacataaacactgcatatttctccacttgaggac

SEQ ID NO: 34302 - DNA, 366 bp, Glycine max
  unsure (1)..(366): unsure at all n locations
atacacggatgtccggttgagtcccgtaacatatcgagacgctcaanatntagatccgaagctctggcaaaatttaattgacaataactttatacacggatgtccggttgagtcctataatatatggagacgctgcaaatngaaaacggaagctcataggaaattcaaacgacaataactctntactcggatgttcgattgaatcgggtaatatatcgagacgctcaaaattgagactagcagctctgagcaacatttaatgacaataactctatacacggatgtccggttgagtcccgtattatatcgagacgctctcaatngagaatggaactcttagaaaattaaaccacaataacttttact

SEQ ID NO: 34303 - DNA, 388 bp, Glycine max
  unsure (1)..(388): unsure at all n locations
ctcccttgagtggcatttgtattggttggtatattaaaggtttcatcttagtccatatcatatcttttgtgcatcaagcatcatcatgagtaagtgagaagacaattttctaagttagaaaattntctttagaaagaaaaactctctattttaatcgattacacaagttgtctaaagctggcagagttatgtctcgtatcggtttaatcgatttcagccttatcgtaatcgattacacagttggttntgagacaatgactgatttattcaagagtctctgctntaatcgattaccatgtgatataattgattacttctctttctataagtgattcagaagtgaacaagaacactntaattgattcctntgagtatctaatcgattact

SEQ ID NO: 34304 - DNA, 305 bp, Glycine max
  unsure (1)..(305): unsure at all n locations
tgctttattgtttaccacagagtggtacctggagatatgtcgcggnggtcaggagaaccttgggacgtcaggtggngtgctattgcccaaaaccaagcttgaccaatcccgacccaacccgggcatagtcggtcagtgagaacctgtgatgtacctaagcaggcgagctcctggcagtcaacagataanaggaaaacaagaccacaaagcaaggaggcttgtggtggctggccagctgtgaaatttgtataatatgtggattgtggcctctggtaatcgattactaagggtgggtaatcgattac

SEQ ID NO: 34305 - DNA, 430 bp, Glycine max
  unsure (1)..(430): unsure at all n locations
tctataccaagctatcttgttcacataaagcatgtagatagagaggaggcattgaatattatntntttggaaggttttaacatacaattagtcaaagatgcccaaatgaggttattgactacaggactccagagggggctgctcaagaaacttactctttcctttntatgtagatggccatagctacancttgctttggagttgttgtatttctggtttctggacgaggtttctttgaattgctcatgtgatcagcatatcatatganaaatattggatggcaaacgtttactatgaactattgatcgacttaatcaaatatatgtacatgtacatnttgaaggacagtcgtcactgttctctttaagaatcanaacgttntagtntattatatgaatnctggttccaacccttattctctgtatttaat

SEQ ID NO: 34306 - DNA, 363 bp, Glycine max
  unsure (1)..(363): unsure at all n locations
atttatctctagcatgcattggtatgtggtctcgtcctttgtcacgggaagccggaaggtccatatcaccttcttaattgtacacatggggcactgcgcccncaaatacgcaagtaagaagagataattntccgggctctcgtgtctgtaaaatgcattcatatcatgcatcgcataaacatctcttcatggcatcataatgaacatatcgntcctgcatttgtctgttatcatattacagcctcacattntgcatgagtcatggcatcatcatgcatatgcgttcaacaaactttttgatctgcaaaattggataccatntgttttcatgtttgctcatcctggcgttttcctctacaaaac

SEQ ID NO: 34307 - DNA, 410 bp, Glycine max
  unsure (1)..(410): unsure at all n locations
ctcagcttcttgagaagacttccttgagaagctagagcttagctacacacactcctctcataactaagctcacctncttgagaagcttccttaagaanattcctaaagaagctagagcttagcaacacacacatctctaatagctaagctcacctccttgagatgagaagctagagcttagctacacaccccctataatagctaagctcacccccatggacaaaaaaagatgaaaatcaaaaaaaaaagtccttactacaaagactactcaaaatgccccgaaatacaaggctaaaaccctatactactagaatggccaaaatacaaggcccaaacgaaggaaaaacctattctaatatttacaaagataagcgggctcatacttagcccatgggctcanaatataccct

SEQ ID NO: 34308 - DNA, 399 bp, Glycine max
  unsure (1)..(399): unsure at all n locations
gctcacctccttgagaagcttgcttaagagaattcctaaagaagctagagcttagcaacacacacatctctaatagctaagctcacctccttgagatgagaagctagagcttagctacacnacccctataatagctaagctcacccccgtgacacaaaaaagatgaaaatacaaaaagaaaagtccttactacagagactactcaaaatgccccgaaatacaaggctaanaccctatactactagaatggccaaaatacaaggcccacacgaaggcaaacctattctaatattacaaagataagcggctcatacttagcccatgggctanaatataccctaaggctcatggagaacctanggccttcctttgatctctagcccaatctacttggagtct

SEQ ID NO: 34309 - DNA, 388 bp, Glycine max
gaaaccgtgttggttgcatatgctgaagcgaatagaatggaagaattttgcaagttgcttgagcagatgcagaagttgggttttcctgttattgctgatctctccaaattcttctctgttttggtggagaagaagggaccgataatggcattagagacatttggccaattgaaagaaaagggtcatgttagtgttgaaatatataatatctttatggattctcttcacaagattggtgaggtgaagaaagcgttatcactatttgatgaaatgaaaggcttaagcttgaaacctgactcatttacgtattgtactgcgattctgtgccttgttgacctttggagaaataaagaggcatgtgcatgtcataataggatcattgagatgt

SEQ ID NO: 34310 - DNA, 387 bp, Glycine max
  unsure (1)..(387): unsure at all n locations
accatggagatgcagcggaaggcaaaggagaaaaggagaggggaggcaccatccactagggaataacctatggaagaagcttcaccaccaagaatgtgccttggataagaagcttgaagaggatgctttaatggaggaaaagaaagagagaagaggggagcacgaaattgaaggaataaaagagggagagaagtggaactttgaagtgtgtctcataagactntaattcatcaaagttacaacaagtgttacacatgcttctatntatagagtaggtagcttccttgagaagctctcttgagaaaaattccttgagaagcttctttgagaanacttccttgagaagctagagcttagctacacacacccctctaataactaagctca

SEQ ID NO: 34311 - DNA, 322 bp, Glycine max
  unsure (1)..(322): unsure at all n locations
cttgagcttcaatgattgtccttcaatggtgatttccaccttggagatgcagcggaagacanaggagaatatgtgagaggaggcaccatccactagggaataagccatggaagaaggagcttcaccaccaagatgagtcttggataagaagctnggagaggatgcttcaatggaggaaaagaaagaggaagagaaagagagaggggggagcacganattgaaggaagaaaaagggagagaagttgaactttgagttgtgtctcacaagactctcattcatcanagttacaacaagtgttacacatgcttctatntatagact

SEQ ID NO: 34312 - DNA, 241 bp, Glycine max
  unsure (1)..(241): unsure at all n locations
aaatacatgtggcatcctacatggcggcactctaagacacctgtccaccctctatgttagccctaacatangagcacagatgtctgacccttatagtcgggctctccaatattatccctaacctcttaattattngaatataccgtaaccactttatctcttgacaggtattcaattatctacaagttacacattatcntgtagtacannaatatctactagaattcatctctaagctcta

SEQ ID NO: 34313 - DNA, 398 bp, Glycine max
  unsure (1)..(398): unsure at all n locations
atttagccttagtttcactttagttattattcaattcaattaagaatgagaaatcccaaagagaaaatgtccgattgattnttgtgcttcattntactaaaagaatatattttttattattatattattattttacctctntctttttatttccaacgtggttatggcacgaccaaacggtgggaattcattntaacaaaaattaacgaatactacaattcanatgatcggtggaaatttatttttttagattaggcgcgaaatgacttanataaatgactgaagcacgtcaaaaggtggtacgaatagaanatgaaacgagaataatagtacacaaaataaatggtgaccaccacgggtacagagaatgaattgaaaaagcttgattcggaaactta

SEQ ID NO: 34314 - DNA, 224 bp, Glycine max
  unsure (1)..(224): unsure at all n locations
cactgccggtttcatctcggtcagattaaggcgggctgtagcaccggctccgcttccctagctgtactggagggcggtgtcgtggctntatcctctatagttntctggagttntagcatgacctccgagatggaagccatttgatcttttaaggccgatagatcggccttcatctgttcctgcacggcctcttcattatccatttttctggatcgagtgttata

SEQ ID NO: 34315 - DNA, 157 bp, Glycine max
  unsure (1)..(157): unsure at all n locations
cctagctgtactggaggcggttgtcgtggctctatcctctatagttntctggagttctagcatgacctccgagatggaagccatttgatcttttaaggccgatagatcggtcttcatctgctcctgcacggcctcttcattatccatttttctggat

SEQ ID NO: 34316 - DNA, 331 bp, Glycine max
  unsure (1)..(331): unsure at all n locations
agcactacanaagtgctctgtatgaccatcaacactgaccccgctattctgcacactacttntatcatcctgngactntgtgtagaaagaatattgattgatatcatatcccttccaagttggaacattcatatttagacccacaactagcaatcttaatgtgtctgaagcactgtcatcgacgaagattgttngtctaaaccatgatatganagttctattgtgctcttgcaacaacctcatcatgttcattnttgggtgaatacgacacagatgttgttngtgagcatctatgtaagggattacctcagctgtgttgtgtaacacatat

SEQ ID NO: 34317 - DNA, 619 bp, Glycine max
  unsure (1)..(619): unsure at all n locations
tctctctctccncctcttctgccanactcntnactccctaaatctctgcgnacagcnnncnctgcgggtgagcttggccctgatngcgccatganaccagctcggcctaatcctctngtggatatgccaatcgagatacttctcttatgtntacactaacttaaactaagcttccgctgcagatcctctcttggtagactagactctactcaagcagcttacgaaagtttagccctatttagcctaagcttcgcgcagatccctcttgtagactaggcctagactaaacaacattattataactgaaattctgataccaatgccagatgtcgtacaggatgtcacgacatcacgcttcagaacatgcagattatctctgagtgtatgaacagactaaacaacgtaataacacaagagaatcgtaacccagttcggtgcaactccctacatctgggggctccaagccagcgggacatccactaatatagtgttagttcaaggctaacagcactggtacaacctctcacctaccctacccggcgaccttactagagcactttagatatgaaacccttcactcctctaacactctgcggttacataaataggacctcaagat

SEQ ID NO: 34318 - DNA, 305 bp, Glycine max
  unsure (1)..(305): unsure at all n locations
atctcgacatattatatgcccgaatctgacatccgagtgaaaagctatgaccatttgaatttctcgagagctctcgtngttcaatttcaagcgtcccgacatattatgcgcccgaatcggacatccgtgtgaaaacttatgaccctttgaatatctggagaacttccgctgttcatttcttagcgtctctatatgtgatgcgcctgaatcggacatccgtgtgaaaagttatgaccatatgaatctctcgagagctctcgatgtgtaatttcgagcgtctctatatattataagcctgaatccga

SEQ ID NO: 34319 - DNA, 152 bp, Glycine max
  unsure (1)..(152): unsure at all n locations
cttgatctcgctgccgaatattgttgggtggatatggaataggtagttcctggtgcggagatgatggtacagcgggtgaaccatgagcggaagttntctttggtgaggaagccatggaaaaacagaagcgttggaatgatttcgtaaatctc

SEQ ID NO: 34320 - DNA, 139 bp, Glycine max
  unsure (1)..(139): unsure at all n locations
gcctagtttcccatttcttttgtttgaagctcattacaagccttaagtganaaaccatgatatcaccttacccttaaggannatttggagcttggaatttgtttgggaataagctgggaataagtgtggnggggggggg

SEQ ID NO: 34321 - DNA, 303 bp, Glycine max
  unsure (1)..(303): unsure at all n locations
gcaccattgaagatgtaattattgtgtctcctccaaatctggtctacaatcacaacatagaanataggccactcagaataaacatggtgacctttccacaaattccacatcatccaagaaatatgatcacctgcaaaaaataaagtccaaaattctgggggtaagtaaaactgtcacacanaaactgcacaagagtatgttggatcgagtggcctcataataattaaaaaggtggggttgaattaattatccctaaaactttaccaattaaaaattactcttttagggctttacttatgttgt

SEQ ID NO: 34322 - DNA, 317 bp, Glycine max
  unsure (1)..(317): unsure at all n locations
ctcttgatgtctttagaggttacttcctcgctgacatctcttgtcttgaatggaattgccatgacaggtttattgttactgcctttgatatttggtagttgatattgtgttgcgggaggtaattccgattggattaactcaccatccttaacttgccgatttgttatgacatttgttgttggatcacctatgatgtcttgtttccaagggtaatctatattctntctgatggcataagcatganaccaatcaaagaacaggacattatatttgactcgttcgacaaattcgtagaacttgtcttggatttgttttct

SEQ ID NO: 34323 - DNA, 414 bp, Glycine max
  unsure (1)..(414): unsure at all n locations
ctaatatgtctctctgtatttgcttatgtacgctcatattactctatgcttgtactgtcctttcttgtctttccttcttaccttttctctgctctagccgtttgttagtgtagtctacacccctttcttctctagtactcaatgaccttgtgtcaatatatataaaagtctttnggctgagtgttacgactcgaactttactaaaatagaactctatagtctcagatcttccaaagcaagattaccacattcctaaacctacatggcaataaagaaagattaatgcctgtttcacatcaataagtagcaatattcatagtattgaacccatagtcccatactcggcgatatcttacatggcatcatganacaaacatatgtaactagaaaacctggggtgtatacagcatgata

SEQ ID NO: 34324 - DNA, 362 bp, Glycine max
cctcaaggtggagcatataaattgtgctccaagcttggaacatataaagtggatccgaggacctctcaaggacttggtcaggatgtctacaagctggtcgttggagataataaattcggtactgatttctttggaccgtagcttttcccacacaaaatggaatcaatctctatggtgttagctctctcatgaaatacacgattagaagcgatgtgaagagctgtctgattatcacaatacaacttcatctattgaacaccacaattttaattcttgaagaagttgtttaatccacaccaattcactagtaacaagagccatagctctatattctacttctgcactcgatcaggcaacaacac

SEQ ID NO: 34325 - DNA, 406 bp, Glycine max
  unsure (1)..(406): unsure at all n locations
tatctagctctatgtaccattacctctntactaatatcaacaagaattcattggatngagcaagagtactcaaccttcttaattaattcttaaattttacaatatttgntattacactaccagaataaagggttttaatgatggttccaaacccattcaatgacgattccaaaatcatttttaaagtcactgtcatggaaagttatccaatagtcttagtttgaaagatttctaagacaattntgtttgaaaatcgtcttagaaacatgacattctaagacgattttttctaaaacctgtcttagaatgtaatatttctaagacgaattatggtcagaatcatctaanaatgctttttttanaaaaaataanaatgccaactcgtcanataaataccgtaatcacc

SEQ ID NO: 34326 - DNA, 445 bp, Glycine max
  unsure (1)..(445): unsure at all n locations
acttaattacaagatattcttatgcatagcagttatcagtgttcaaaactaaacctaattattagtaaattgctaaatcaatccaaaaaagattgaataccgcaatacccaaaaatctcataaagtgggcattcttttgctatctcatttgttctttggatcttgctataaaaaattgaaccaaactgaataaaccacataatttaattatattacattttattgtggtaattaataataatttattactcttcctttggttataaccaagatgcatatttcactcttatatgttaaaaaagaatgtactaatattgttaaaaatagtattaaatatcaagtgaagcacatattactataatgttaaacacagagagttggtaatatcattntatattagtgctacactgaagtganataacaatctttactaatatatatttac

SEQ ID NO: 34327 - DNA, 328 bp, Glycine max
  unsure (1)..(328): unsure at all n locations
ctctcaactattcttcattctgctgtcccttttccgcttttctctttcttttccttgcaaatatttcgtggcttttaactgctgatgatcatggaaggctaaacactcaatcaatccaagaatccactccaagcaaggttgaatttgagttctagtttagtatttctaatcttcgtgaatgttcatctttctcttcaatcctatctttgattntcatgattatgattatgcttagtatcgaaaatggattacgttacggattcatttcctaatttcacaaattaataacagaatgtttggatgattctcctacctaattcgggatttc

SEQ ID NO: 34328 - DNA, 372 bp, Glycine max
  unsure (1)..(372): unsure at all n locations
ctaagctaagctccttcaactgcacaaggctcttaatattngaagagtattcttgtggaaccttcacccgacgaagacactggcaaaaacttatcttctctttattggacaaagtatggcaggctggnggcaaagtaaatttcttcccatcagaccttggatgcaactgtgctcttatacccatatcagctagatcttgacgggtattcaagccatccttcgtcttgccttgaatgttaaggagcgtcccaatcacactgtcacanaacattttctccacatgcataacatcaatacaatgtctaacgtcaagatcacaccagtacggaagatcaaagaanatggacctcttcttccatatgcaagtctgac

SEQ ID NO: 34329 - DNA, 385 bp, Glycine max
  unsure (1)..(385): unsure at all n locations
gatgccccacattatttccatgacacanatgcaaacatgatgaattggaaactntatgcaaaactggtcatgcatgcacctatgcggacactcaagtgtcaaatttttatggtcatgtgatgctagggctcangattcatttcctctatttttagtcaacccaacgtttccaaaatatgttcttttaatccattgtgcattcattcgagtccatttcaagcgtccgggagaattttcacagcattcacccttcaggtgtatacacanttttcanaaactagttatgaatcagtcaatttttcanagaaaagttggaagtcatctcttttcanaagcatgttggttnttcagctagacaacttaatnnttcttttttttcttcctt

SEQ ID NO: 34330 - DNA, 382 bp, Glycine max
  unsure (1)..(382): unsure at all n locations
taatgtatctatatgtacatttattaatataaattntatatataaaagaaaagttaccataataaataattgtttttattaaatcaaataagagaccaataaaaaatttatccgaaaacacattanagaattaaattattgggtgaataattntttttatttcattgctataataatataaatatatttttatgaataattttatataaataaaattaatgtttaaaataaatntgtttagacaagttattatntaattttntaattatcatcttcctacttatgtaaactggtgatgaatatctcttacctacatanaatttgaatttatntatacattgatatctatatatgtaaagtggttaatatataaagtatatat

SEQ ID NO: 34331 - DNA, 116 bp, Glycine max
  unsure (1)..(116): unsure at all n locations
tcctccagagggctgttgcttctggaggaagcaacctggctcgcctgtgcgagctgagctcgcctgggcgagctgggcggcaagcatctcccctantttgctataaataggggagg

SEQ ID NO: 34332 - DNA, 283 bp, Glycine max
  unsure (1)..(283): unsure at all n locations
atgaaatnttagctcggaaaggtttcgtatctttatcaaatcatgtcaacaaaacacatacacttatttatntatctatgtataacccaaaattcaaggcttagaattatacaatccataaattaaattcatatattcaccgagtaaatttactaagtgtgaacttatacggtgtctttcatgaagataaactaagatggaatttcaagatgttacatgtaccgcgttaattacacattcaacgctgaatatatatattggtnattgtaattcatatacacaa

SEQ ID NO: 34333 - DNA, 185 bp, Glycine max
  unsure (1)..(185): unsure at all n locations
tcttgacattctntcactgaatgccacatcaccccaggagggtctntctgaagtttcaacttcctatttcctacagctactgatatgttaaatgataaatctatatgcagctcttactattattaactatcagtattgaaatctaagtgatccttcattgcttctacatgtcagatgtcacatat

SEQ ID NO: 34334 - DNA, 360 bp, Glycine max
  unsure (1)..(360): unsure at all n locations
tacagggtccaccaccgcaccttctntggtgctctcgtcaacgattctgcatagcagagcanaaccgaattatattaaaggattgcctaataataataataataataataataatagtaataaacagtgaagcatatatcatctgcaaggccagaactagaatatgcaagctgtgctgtaactatgttcacgtgtgcttatgttaaatcttgttagtattgcagagaacaacatatcgaagacaagattggatttcatggtgttgtacaagtgtgtgtgcagtgcagtgtgtagtgtagtacttttactcctattttagaagcaacgaataatcactatacacgtactatacaacgtagc

SEQ ID NO: 34335 - DNA, 371 bp, Glycine max
  unsure (1)..(371): unsure at all n locations
gtgtgtctaacgaaggtttaatntactanagtaattttacattgtataattataacgcaatacaattacattntaccgactagtaaaataaaatctagatgagttgattaattaattaatctcatctatangaaatttattaacaggtaaaatttcttgagtacntaattatctaacannattgtatctcaagataattaatctagatgcatactannataaataattctcacaaaaatcacatacaaatacacaatgcanataatttacacacagaattaacaaagaaagtatttttaatanttactcannaagaaaatatntatatatatatatatatatatatatatatatatatatatatatatata

SEQ ID NO: 34336 - DNA, 308 bp, Glycine max
cactttacaaattaaaatattaaggtataaaacacacacacacataatgcattatagtaaaactaagattatgaatcagtagttacacttctgactctaagaacagaatatggcatggaggggtggatctttctaccctggaactcatattatcacctggttttgtgacgaactctataattcctaattaattaatatgggttacatggtatattatagaaattatagtagttatctatattgaaataagtctaataaaaatgatcctattaagtgagtcattagactgtatatggacttaataagtg

SEQ ID NO: 34337 - DNA, 319 bp, Glycine max
  unsure (1)..(319): unsure at all n locations
tcatatcgggttctttattctttatttgtctatttagtaagatttctttgtgattaataaattatcccttctaatttatatgtctaccaacattgaaatccttcattcatggttacactctgtntagagattaagaaagagtttagaattagaaatcttttgtgcatcaagtaacctattntaataaagtgttcattcttcatttgntttgacctcttaattatnttttatcactgcttaatattagnttgggtagcaatgaccatgttggaatagaccacgactatggatccggngtggacccacattcctaagcctt

SEQ ID NO: 34338 - DNA, 299 bp, Glycine max
  unsure (1)..(299): unsure at all n locations
tcattaagcatccttgagaatcatcaaatatccaccttgcataagtagctntagctggcccatgatgagcgcttatgtaagtctagagaacttcctttagctaatatgggtagcaagcttaagctagtccatcatacgcgcttaactagctcatagcttctcgagctgcaattggttgtaattgacaacattaaacttctctcgatagctcttaattattctacgagtacgcacaagacatagaaaaagaataaactaattctattataattataantctaaataccaattgacacaac

SEQ ID NO: 34339 - DNA, 194 bp, Glycine max
  unsure (1)..(194): unsure at all n locations
tctgggaatatctctgggaatggtccaaagaagtcccaccattgcatataccaatggggagaattgtaaattgtgttggtcttgaaatatatcagccataaatgtttgaagcgggtattttggtgccaaaacaccttagtccaagcatcaacgtaatcccaatanggataacctactggatcaaatggaactga

SEQ ID NO: 34340 - DNA, 567 bp, Glycine max
  unsure (1)..(567): unsure at all n locations
tgtgnaactgtacccattgaggtatgcgacactctgtantactcaagcttcttagtctctgatgatgcctctgagtttgtgctacactatggctcctctctcatgtctatggcgtcgtatctcgcgctcaactgctgggtgttggaagccatctatatcaattaaagttctggcttccgaacgaataatgtctcctagggctgcaccactggcatcatatatcatacttctctccatattaatgtgtacgtcataaaaatatcttacaagaagctgctcctaaatctcatggtgacggacactggcatatagtattataaaatgctgctagtactcatacttgctctctccactgagttgtctaatacctgagatatctttcctgatgtgtgtggtcctggaagcaggcgaaaatatttactaagaatactcttttanggtcatntccactcttgatggaccatcgatgccatgaatacagacaaccctttgccactctctcatatgaatgaggaaaatccttcataaatatgtgatcctctctgacatctgtgggttcatgatgtg

SEQ ID NO: 34341 - DNA, 326 bp, Glycine max
  unsure (1)..(326): unsure at all n locations
ttcgaaatcaatcactagtagtcgattaccattaatgtgtaatcgattacatatcaacagatgcgaactcttcatttaaaatttgataattaanatgtctaanagctctggtaatcgattacatcgtgtaatcgattacacaagttgaaaatgtttaaacacatgttgtacctcttganatatganatcttaacgttctanaacattggtaatcgattactatcttctggtaatcgattaccagagaagaaaactctttggtatgactttgtacaacttcctgtgctactcaatgtattgaaaacttattaatacttatcttgatt

SEQ ID NO: 34342 - DNA, 334 bp, Glycine max
ctggctcgcctgtgccactaaataactacatggtgaagtaaccagctcgctctggtgagcaaggttgcttcaagatgaagtaacagctcgcctgggcgagttgtcatgacaacaaatgttatttttatgcaagcgtgaagaggggctgagagggaggttctgatgtccacaggtccaaaattgagagaaatctgagaaatgaggaagaaaatagagataaacaaggctgatgcgctaccgaattgcgaccgtgatcgacttctagatcgttcttcgttcgatcttcattcttcatccgattagtgtttgtctcttagtatttgaactctatata

SEQ ID NO: 34343 - DNA, 192 bp, Glycine max
  unsure (1)..(192): unsure at all n locations
cttgagctatctcttntgaatttcttacgttataaagctatcaaaacactttgtataccttcagataanaaactaagtgtntaattcgtataatcgtctataatacattgcgactagtcaatgagcanaccaacttcaacanatcttcatatttgttagagccagaactggcttgatagaacaaagaatact

SEQ ID NO: 34344 - DNA, 377 bp, Glycine max
gaggttcggtctgggtttctagccaacacatgtcgataagagaagggtcgccttatataggaaagaaagaagcctagcccatttacaagggtggagaccacacatggaaagggtccctatctgtgacattagcaagagctctgttatcgcgaggtggatgcatgagaatcacgtctgtgtgctatattaagataccaaccaatagcagacaagctgggtgcatccatgctccctcggtttggaattgaagaattggcgaatcatggatcgacccaagatttccgtctgaaatccaatgtaatccagtagtttgaaccctattgctgggcctatgcattaaggtctgcttattttattgggcataccttttctttaaa

SEQ ID NO: 34345 - DNA, 623 bp, Glycine max
  unsure (1)..(623): unsure at all n locations
atatacctatgacncctgaccgcgacttaagcacctgngcatgcagctggagaagagaacacaactgaacttacactccctaagatgganatcgcgtaaaatgaacgcatgaatgcatcaatatattnttcttctacaaagaccactaagctatggtgtaggcttaaattgacaatgctntgtgacacttgaatgaccncattggctgtcatattgaactttgcactctatgccacanagcaaaactaccacaaatgaaagggataggatttgccacaaattggtattttcattttttacacaaactagtaaatctatcttatcacctacgtgggtggctaatctccctaggaatatgtgtacccagagtgatccccacgtaaagaacaacttcacatagagtaaaatacatngtacttggtggcgttcaattcactacgatgaaatttattcgacagtttcaagtttgacataactaataaatattacactaaaataaatactatcctatggttacattttatctacgagaataataaacacattgcgtatattaatacatagtgcaaattcacttctagtcttacagtcatntacactcgtggaaataatgagaagaaatn

SEQ ID NO: 34346 - DNA, 252 bp, Glycine max
aattaaccagctggatgtactgacagaggttgttgttagaaaagagcccaatatttctgaacaatgcaaccgatgattggaacttatgcaaaggtatgctgccctatgcgacctaaggaagagtttttggcatatatgcctggctaagatcaatactctattttgacacccacgttccaaaatgtctttatcattgtgctcatcagtcatttaacggcggaaattaacacatcacctctgggaaccatttta

SEQ ID NO: 34347 - DNA, 706 bp, Glycine max
  unsure (1)..(706): unsure at all n locations
ccctatttctgttttancgtcaatcantnnnttgacatnnntnttnnntgtnannnncannnnnnnnnnnnnatgattgaccttattgtcacntttgatctgcgaccttanagcaccngcggcatgcaactatgatatgtggacttctatatttctgcatctcaatatattntnggatacgggagacctattgctcgcacaataggccgacactgtataagatacaaaagtaggaatagtactatgtattagttcttaattatccctttaactaactgagagaaagataaaccattctatttntaattcggtcaacagtagctgtgcgacacaattattgactttataaattctcatgttacttaatcacataaagtgaagttacaacatatatgagattattcatcttgttatgtgttctctagaaacatagacaattgaatacaacagtatatttaacttgtgctttccatattgtatgatatgtataccgacacttgatgtgaaatatacctgatggccagacatggaacgatattatctcattatgatatcttaattcattcgaatataattgatatttccataaagtgacattcttatcatgagcaatctaagtgattatntttgatagacattcatctatattctttttaaaccttatctaagagtgatacctcgttcacagttcgatctaacactcaag

SEQ ID NO: 34348 - DNA, 74 bp, Glycine max
tcgatgctgatgagccgtatcatcagacgctcgaatggatttgatctctgagctatcaacacatactttactca

SEQ ID NO: 34349 - DNA, 393 bp, Glycine max
  unsure (1)..(393): unsure at all n locations
ttaaagatggctagatttgttaaacatatgcacttagtctatgaaggaaagctggagatgctgcacaagatgtccaacgttatgtcaaagaataatatcgggctgcacaatgcacaaagcaagataaaatgtcaaatgaagaattgaagcttgctgattcacgatgtcggatacaatgtccaggacatcctgcctgaaaatactggaattgctaaaagcattgaagctgcaggatccacgatgtcngattcaatgttcatgacatcctgcccgaaaatactggagttgctaaaagcacttgagttgcaggatccacaatgtcggattctatgtccaggacatctngcccgagaatactggacatattaatctgttatatctttacagattatt

SEQ ID NO: 34350 - DNA, 263 bp, Glycine max
  unsure (1)..(263): unsure at all n locations
atcatcaanacattcagctngatcctttgtctacattatgttgacaccagagccatcgccaactaattactaatcagtaccatgatagggattgtacagtgtagaattttgacaatagtccatgatccagttattttgcaacggaataaggtgtggtcttggcatgatgagtactangtccacttgtgacatttggatagccatgaagtttatagcacaccatggcagtgttccctaatttctcatagtattgacaaataaca

SEQ ID NO: 34351 - DNA, 601 bp, Glycine max
  unsure (1)..(601): unsure at all n locations
ctcacgatacttactttacattatcacantctattaatactcagtngatgataatannatatnnnaagggcgcggattganncttgatatctatgcacacttcgcgaactatagaatacctcagcctttattgagaagtaccgcacgctgagacatgtcctatgtgattcatcatatgccgcggacatgccacaactattatgctggtccagccggatcatattacaccgagcaatatttgctgcatatggttcgccaacacgcgggccaccacccggcacatgtacagactcatgaatgtccatatcagatgagttctcacactgcagagacagggcattacttctcttacgtgccctaatctggaacaaatcaagacagaggtcgcatggtctgtagaatggcacaggcccaacaagtaaatcccatcagatgcttccacaagcagattatgtcgcgagacgaataatgatccattactagatttttggatggagcgggcccatgactgggaagccttgatcattttagtttgaaccattttatcctgaacaatcatctatatgacttgataacgactgcaattgttacgaagaattcg

SEQ ID NO: 34352 - DNA, 345 bp, Glycine max
  unsure (1)..(345): unsure at all n locations
tgataataagccatgatatgggcaacatgaaaccaaanataaactcacttatgaatgaagaaacanacaacacgtaacacacctgatngctttcaagcaaactgagaacatcacttctggccttcatctgcttctctggtgctaaaattagtgattccatttgcttgacattataagttaaatagttcgattaatattgaattatcataacaaatntatgtcatcanattcagataagtaataaaaagattacgcttttctttcttctcanatttctctttgtgatagtgactttcttgtcaacagtgtgacccagcgacgagtcatcatcatggatctatctct

SEQ ID NO: 34353 - DNA, 591 bp, Glycine max
  unsure (1)..(591): unsure at all n locations
tcgctaaattctctattcgatacgntcttaacaaatattttgnaaaatattanntnnnntnnnnnaaggatttgtggatgatancttgaatccactgcanangcngacacttanaatacttcagcntattactaaattatcgacacgatacccccatcatgtaatatcanactcaatcagaaacaactcctataatatcaataacagactcatgattattcatttattctgttggtctttatttctcttgtaaccccccaaaattttgctatggcccactgtcatgcccaccacttgatccacctttctatacaaatggaatcactaactttagctactgagaattagatgaatgccagacatgatatcctcagtttggctggaaagcatcaagtgtgtcacatgttggtcgtttcttcatacataagtgaggtatattgggtgcatgatgtccaattcatggctattaatactgngtctgcaaatatattgagatggaaaaaaactgctggatgactgtgaactgaaaaagatggaataacaaagttgataacaatagtgacatatgacaccacgtatgatgagtaaccg

SEQ ID NO: 34354 - DNA, 629 bp, Glycine max
  unsure (1)..(629): unsure at all n locations
attactgaccgcatncttnattgatccgctcgtaccagcatccttnagacacctgaggcatgcaagcttntgtggatgatgctcntctacanacctatgatagggagcagaagatacaactgtataggctcaatggtcaatcaatcaatcaattcgntcagctcaaactgggtgcaagggataaatcattcanacatgtggtaaacttttttggctaagtggctatcacaatctaacatgagcttcatcatcctcaatttcatgcattcaatccatactttacagattcacgtanataacagaactaaatgatagtcatttctctcagaatttaaagatcgcgactctcaccggatatggctaatgcattccttcacaatcaatctgacaactgactaacattntcaagtcatacttcaatcacatgctcattgcataccctatttcgtncgngacntntgcttatgacatgcactttagttggtcttgaaagtgcttgcccatattagcaattgtgaattcggacgtgcaaaacaaagaaatatgatgcacatctaaggtcgtgcacacgaattcaatgacatcttcacattggagtctcacattcgatcaaaataatatatgatcct

SEQ ID NO: 34355 - DNA, 239 bp, Glycine max
cgccaaggcagattcttccccttccaatacacttaatcccattccgttgccacctaaatgactaatactcccatagccttatactgtccttaacacggtcccttaatcctcagcttccacatcagcattaaatccacattgaacatcaaaccaaaaacaggaaggcaaaacttgccaaccatcaataccacttcttctaatcctaaacattctctactttgtcccgtgacgcttaaatt

SEQ ID NO: 34356 - DNA, 659 bp, Glycine max
  unsure (1)..(659): unsure at all n locations
agtatgtgccctganntgncnnccttnattgaattcccctcgtaccgcgatctctgagtcacctgcggcatgcagctttacagtattcaaantaanatattacacactaagcttaagacacaanctaaacaactagattaactaagacattcctatatgtctaacatattaatgttgaagtacaaanatcctgagcataatanngttaatntatcatgaacaaacataaaactagataacaacaaagattattttggtaacacattcaatggaagaatggcatactctaatntagttcggggaccatcctngtgtgggatgcgaccctcgtttgaccacttcgaggtatttggcacccatcgttaggcaatnntgtgaagtctaagacatgccggaagccaaaagaatagcgttgtagcacaatccgtgaagttccgtgacatggcgganatanaaggaagtgtagtgcgtaatccgtanagttccgtacaatctgaagggaaaaagggatgattacgtaatcgangggtcgcacattatggaaaaaaaacaatatcgtacaatattgtaagctctgtactntacgganaagaatacnncaaaaaggcngggatgtattagtaaaatggtggtcaatagcacagaccactnggcttcag

SEQ ID NO: 34357 - DNA, 450 bp, Glycine max
ttactgtcgacttatgacgagctgcagctcgtgtattcagcttcaattttgccttatcgcatctgtgaagttgactttgatttcaagttcatgttattcagcggtcaatatatacctaatcgacttttggaaagtttccatttaatctcagacttcatgtaatttgagctctcgaatttagcgccgatcgactccgttgaaagtatgacattgaattctcagatttcgagataattcacgatcgtatatattgctgatcggctcggtgaagtatacattgatttcaagctcgtgtattcagcttccattttgccaatcgctcgggaaagttacattgatttcagagtcgtgtattcacggtgatattaccgatctacccggaagttgacttattccaagtcgggtattcaccctcttttgccaacgcccggaaaagctagtatcggtttg

SEQ ID NO: 34358 - DNA, 454 bp, Glycine max
  unsure (1)..(454): unsure at all n locations
ataatatatcgctcggctcgaacatacacatcagangctctcgccatattcatatgggcatagcttctcacgctgatgtccgagccgggcgcattatatgtcgcgaggctcggacctgaacgacggaagctcttgacaaattcatatggtcataacatttcacactgatgtccgagccacgctaattacatatcgcgacaatcggacttgacagcggaagctcttgacaaatgaaatggtcatgactttctctggaatgtccaatcatgcgcatacatatggcgacgctcggattgacagcaaaactctgagcaataaatggcataccttccactgagtccaacacgtatattatcaccgctcaactacatgaacttgacattaatggcagagttcccggtgtcatcggcctattgtggggtcagatacacgaactttgaatcaatgctaattc

SEQ ID NO: 34359 - DNA, 88 bp, Glycine max
  unsure (1)..(88): unsure at all n locations
tcttctacctttctttcattctcttncaccatcacaacaatgaaccactctccattttctcacattcgatgtcgacaaggaagatgaa

SEQ ID NO: 34360 - DNA, 351 bp, Glycine max
cttctgcgccatcgggaggtcgccaaccatgttggtctcctccttgaacgagaccgactgggaaatcttgtcttctacaccactctgggccttctctgcttcgatagtttcagcttcagctttctattgttggtttttaccatgaacttgtgactatgtgttaacggaggcatgatctcgtggttcctctgccatggatgattggatcgaaataaatatttaagaaaagacagaatgagtttgattgagggttgagttgaagatgaaagggaagacaagagttgcttcataaagagaccagactcatgggcaatgctagataccagtctgtcatgccagcagatacaccac

SEQ ID NO: 34361 - DNA, 362 bp, Glycine max
  unsure (1)..(362): unsure at all n locations
atactctcatgtgatcaactcttggcttcactccactccatgcttcttgtggtggttgatctttgacattctnntgtggggagcgattggacaaataaacggcacatgcaacagcttcngcccanaattcctttggcatanttttagccttcaacatacatctagtcatattaagaatagttctattttttctctccgctaccccattttgntgtggagatctaggaaccgttagagggcgacgaatcccatatntttcacaaaattcattanattcttttgatgtgaattcgccacctctatcggatcttagagctnntgatacataaccactcttcttttcacaagagctcttaaaattt

SEQ ID NO: 34362 - DNA, 548 bp, Glycine max
  unsure (1)..(548): unsure at all n locations
tgtaatgaacatggatttgtgaccttgaatctcagcttctccctatatgctataatagggggagaagtgaagaagatatgggttcatccctctaggcacttctctctctctcgaaaatgctgaggaaaattatttccgtgaagaaaatccgagccgaggcgcttacgtaacgattacgtgagaatatacgcgaagattctcgaccgttcttcaagattcatacctcgttcgttggtgtcgtcagtcctcaacgggtgagtacctcagaccgagctcttcaattcattctatgtacccgtggggggccacattctggttcatgtattattattctcggtgtcatttgcgttntatatccactattgacgtgcgtaagccatntatttaagtcgtctctcgcttaatctaaaaatagaattaaattccaccgatattctaagtgtgtcatacactaatttcgttaagatgaactccgaccgttcggtcgtgccgtaaccacgtctgagatctaaaaagaggctgactcatactatatttatatagaatcg

SEQ ID NO: 34363 - DNA, 382 bp, Glycine max
  unsure (1)..(382): unsure at all n locations
gagtgcaatgatctntagtgagaagtgaaacttgcatacacncacacaaaaactctgatgcaatgtcagagagtataaaagatgtgtnnaaataacttnctataacctactaaaacctctcgggctaacaaanaatagactgtanagggagatgagatatgtaggcaagaatgagcttaatcttatagagtggatcacaaaatgagcttgtagagggagacactgtgagcataatgtgcctttctctattaannaagaataaaataaataaaagagaaagtgatggagataaataaataaaagtgcattggtatttgaaatgaacttatatgtagtaatgagaattttatattcaataaagatagagtaatgtagttaaata

SEQ ID NO: 34364 - DNA, 172 bp, Glycine max
tttcccctattaagaagtctttatgacttttcactttttgtgaaattcaacgcaatgaagattattgatttataattgcatatatatttcaagagcttattatttaaattatacggaataatctattaactgcagactggctactctcgttagctattccccttcatctaca

SEQ ID NO: 34365 - DNA, 328 bp, Glycine max
  unsure (1)..(328): unsure at all n locations
ggatggaagtatggtatgtngnngtttcctcccttccatagtccatagagtaatcttttaagaattgatcttatgtaaattctgttgtgaagataacatgcaatattcattgcttcaatccacaagtgcttagggggtcaaattatcattaaacatggtccttgtcatctcttgtagagatctgtnntttcttttaactactccattctactgaggtgtccttagcgtngaaaagttatgaagaataccatnttcttcacagatcagctgannaatttcactctcaaattctcctctatgattacttatgattggagtaatgcatact

SEQ ID NO: 34366 - DNA, 563 bp, Glycine max
  unsure (1)..(563): unsure at all n locations
gggtattgaatgagcttggtcgctgcctatgaatactaagctttgatcgcatatcctgtctcagcatagaccatgacccagggtgtgaatgctcacccttaccctcagaagcagattatatacggggagcatatactgacctctatctatcaaggacgatgcatactaaggagacaaggagaatttcctctctattaaatataacataagaggaaacgagatacccattcatagagtgggagatagatactataatacatcgatgcctcccaatcatagaatgggagactgcaacaaagaccaagtgactatcacgaaagctcctgatcaaagaaactagtacaaatgtgtcttaaggtgtttcgaccggactatatctgaacaatacataattgttacccaatgaacaaaatatgatggacacgtgaccacgacacataatggtcttctctctatcatgaccaaccaagatgccgtgcgctagcgaccctctattctctccctcgcctatactattatacagactacgatatgccgcaatatcaacgcctacaccacangat

SEQ ID NO: 34367 - DNA, 265 bp, Glycine max
acggcgttacaaaatgttatactggtacgatacctcttaccgttcacgagtatgtctctaagagaccctacagtttcaaacctattacatagagctgtaaccctacgacgctctacatatcttcaaagcaaccgatttgcttagcttagcatatcagtcttactacatcactttatcattaactattacaactaaaccaaattaactcttgagcttcctagtatcaaaaaaaaacagactctgttgagttggatgaaacccaaaa

SEQ ID NO: 34368 - DNA, 406 bp, Glycine max
  unsure (1)..(406): unsure at all n locations
tcttaggtgttatagatggaagtctcatggtggtacatctgttcaaaacatatgctgntgtggtggccgcttctccccggtagcaattnggtagtcctttccctttaagcatacacctagccatatctaatagggttctatatttactttctaccaagccattgtgtttaagtgtataaggagctattacctcatgttcaattcctttagtttcacaaaattctttgaactccttagagttatattcacccnctccatctgttctaaggatttntagcttcaattcagattgtctctcaactaatttgagagcgagagaatattgcacctttctctttcaatagatatatcaaaatactcttggttaattcatccacacaagtcaggaaatactgatgaggacatg

SEQ ID NO: 34369 - DNA, 294 bp, Glycine max
  unsure (1)..(294): unsure at all n locations
aatattatttgatgcaattagaacttatttgaacgacaaaataatagtaaatggaaatagaacaaagtgtatcagaaataaatgaaatctgtaaatagttcctcgatggtcatacaaatntattgatgaatnggaacaactagataaatngtttaagaagtatgatacttataatcctatgggagatactgataacgctgaanaanaatgaatnggctttaatacgatattccccacaattggatgtttggcgagacataatcaaaggatctatacgtgctcanagcataaaac

SEQ ID NO: 34370 - DNA, 198 bp, Glycine max
  unsure (1)..(198): unsure at all n locations
tgagaaattctttgattcttccttccctctcttgacaaaagattcaaaggactaaccgctngagaattcttntgattcttccctttcccttaaacaaaagattcaaaggactaaccgcctgagataatctttgtttccccttacaaagattcaaaggacttaccgccaaagaattctttgtcttaacacattggagcg

SEQ ID NO: 34371 - DNA, 230 bp, Glycine max
tatgacttcaggtcttattgcattgtattgaataacggacgaaaaaaaagaatgccaccaataccaataatcaaccatcttgactggtcgacattttaaatttcgaatactagaagaacaagtgagaagacttggattctttaaatataataatccatatacttgcatttttatttagagacatacatatacttgcatatacttattcataaatctacacattatgtacg

SEQ ID NO: 34372 - DNA, 410 bp, Glycine max
  unsure (1)..(410): unsure at all n locations
tagagtgtgttgtcatcgaagctgattatcactcttgacttatacaaatgtaagcaagtcttgctggagataaaacctattatgccatagtgacaagcagatctatgaaagttattaaatggattgattggttaactaacgttgatcaaatagcaaaattggtcttagtttaaaatcaatccctaaggtcgagtgccctatctaagttctttcttgccatcatttctggtcaaatgctgtataatttcctatattaacaggacaacataaatattaattggtaagagcatgtgattaatgcattcttcccatcatgcatctttgcagaatgatattatctcgtcatcactncgaaaatccggtagagttgctgtcatggcttccaaagataatgacgcaccgacttggat

SEQ ID NO: 34373 - DNA, 628 bp, Glycine max
  unsure (1)..(628): unsure at all n locations
tggaccctatgataccnttcgaccgccancttanagcacctgaggctgcagctagcacttgaaccngatgcatatctacagcctgtttttgctaggagatggtatgcatccntgagacatgccttactgagactggtatagtcactgcacactacctcattnagtcatatggtcatatgtaatccatgaccacgattggagtagcaagtggagtacctaacttctcggataatataggctttaaggagcatatatactttctctctgaccaatctacgactatcttctcgcatcttcctcttctcctatgacactaatttggcctgagacagatggcgagcttgtggcatataatgctgtgggtgatacccgatatgtcagatgtctgccatgcaaatagggttgtgttctatgtaaacatcgactatgtgtctatgatcatggctggtgaagtgtcngttgagctgtgcaactacccccggttggtctgataataaatgataagtttcataaggcttggccttattacatcgcatccgcggacacatggatactctccaccttgttgtagaagacggttgatggagacctcttacccatactgaggcacctattcgaggagttgcgt

SEQ ID NO: 34374 - DNA, 263 bp, Glycine max
  unsure (1)..(263): unsure at all n locations
tgtgcactgtactacactgatataacagggtgtgccccattgatgcataccatttgcctaacatcgattggctattcaatgaatcgattgggttccaagtctaagcttcttggacccctactctgtatacaaccatatgcatatgcacgctccatacaaggataaaatgacattcatcattgaagatgccaacttntgctacatgtacatgctctttggccttaaaaatgaaagcgctacataacagagattgatggatcaat

SEQ ID NO: 34375 - DNA, 218 bp, Glycine max
  unsure (1)..(218): unsure at all n locations
ttttagctcggatatccgatggagtcctgtaatatatcaagacgcctcaaatngaatatagaagctcttagcannatanaacgacaataactntctactcggatggtccgatgggttacataatataccgagtcgctcganactgtatacataagctgagagcaaattcaaacgacaatgactnttaactcggatattccattgagtcccgtaatata

SEQ ID NO: 34376 - DNA, 404 bp, Glycine max
  unsure (1)..(404): unsure at all n locations
tccattntcattntcaagcatctcgatatattacgggactcaatcgaccatccgagtcaaaacttattgtcgtttgaaattgctcaaagcttctgtattcaatttatggcatctcgatatattaagggactctatcgaacatttgaggaaaaagttattgtcatttgaatttgcttggaacatctgttttcaatatcgagcgtctggatatatgatgggactcaatcggacatccgatgttaaaggaattgtcgtctgaattctctcagagtttcagttttcaatctcatgtatctcgatatacttaagacttaatcggacttccgagtaaacatttattgtcgtttgaattagctcagaacttcagtaattcatattaagccgctctgattaataaatgactg

SEQ ID NO: 34377 - DNA, 587 bp, Glycine max
  unsure (1)..(587): unsure at all n locations
tatgtcctgctgcgacttatgacgcntatcagctatacatcttcggtacatctantgtatgatgtaaactctgagcagacatatgtacnggagatagggataaataagaatgtgcaataaccctataagcaatacacattntatggccaattcttgagatgcaaaggttaggtagtcattggagcaaactcatctatcagaaccaanatactacatcattttcataattatgtgatnggagagcattctagagatgatctaacttacagacgaattaaagaccaattttattggaaatggttgcagaaagcaataataataaatgggtgcacgagtgtattacttgtcaacagaacaagcctntattaatgatgccagcttgattacttcaccatcatcattcctgatanggctggaagtctatttcatggaccttatagcgtcttctagtcaatgggtactatatcttcgtgtttatgactacaattgccattctccatactcaccttgactgtaagtgccattgcatgtacacggagtcatgatgcacgaataatatataataatatatagtatttgcaacatan

SEQ ID NO: 34378 - DNA, 554 bp, Glycine max
  unsure (1)..(554): unsure at all n locations
ggggatgtgcctatagcatggatcacggacactataaatactcaagctgtgcattcaatttatgatgaanggtgtccatatgtnctcattactggactaatacatatgctgcccaagattcatggtcttgcaggtgaagatcctcataagcatcttaaggatttccatattgtttgttccaccatgaaaccccctgatgtccattaagatcatatatttctaaaggctatttctcattctctggagggagtggcgaaagattggttgtactaccttgcttccagatccatctccaactggaatgaccttaagagggtgttcttggagaaattctttccttcctctatgaccactcccatcacaaaagaaatattacgcctcactcaacctaattgagagaacacttttaatctccgaaagatctaaaaatattttcaaccgttcctaccacaatttattaacactcttttgtaatttttctttggggcttacaccatggagcgatatataaatctcccatattgtactttattgtattactcctgggttcttat

SEQ ID NO: 34379 - DNA, 146 bp, Glycine max
  unsure (1)..(146): unsure at all n locations
tctcatttctatatttatataactatgctacatgtctcattgagggacaagaaggcccacntctctttgattggacccatctccccacaaagtgggaaaatctacctttgaacgctaaatgctgcctcggttcgtgccgttctctg

SEQ ID NO: 34380 - DNA, 331 bp, Glycine max
  unsure (1)..(331): unsure at all n locations
gcttctgagaaacattcttgagaagcttctttgaganaactttcttgagaagctagagcttagatacaaacacccatcccataactaagctcaccttcttgagaagcttccttaagaagattcctaaagaagctagagcttagctacgcatacctctctaatagctaagctcacctccttgagatgagaagctagagcttagccacacacccnctacaatagctaagctgacccgcatgacaaaatacatgaaaatacaaaaaatatccctactacaaagactactcaaaatgcctcgtaacacaagactaaaatcctatactactagaat

SEQ ID NO: 34381 - DNA, 190 bp, Glycine max
ggttgattcttattttgtttcagaataaaaactgaattatatatatgctctcttttgattttatttgtaaatactctatcccattcttaccaaagagtttgtccataacctcaacagagtatgtcattatatgttctgctcattttatgaaatttcaaatcacaaccttttatccttttgttcaggaaat

SEQ ID NO: 34382 - DNA, 341 bp, Glycine max
  unsure (1)..(341): unsure at all n locations
ttatttatcgtataggatgccatctcgtgtagttcatatgacaataattaaaggtgttaatatgtggttaattaaatgactcaactctattttaatgactcttacctatagatgataatctaatgtctagaaactaatcttttaattataattaatatttgcttatagaaacaccaaatattaattttaaacaaccccagacacctagatatattctaatttattaattaatttnttagatctatcaccccaacagttgttggatcaccatagtgtgtatgtcaattttacgctaaaacaattcaatcctatgcatggagtgtgttatacatgccatgtag

SEQ ID NO: 34383 - DNA, 655 bp, Glycine max
  unsure (1)..(655): unsure at all n locations
atattacctgactgcatcttaagcaccgcggctgcagctgtccgtaaaaatactaaaagggatntaagggtcaatactctcagttttctcaccaagtaaaaatggaccattttaaggtccaacgccttanaaggaccaccttncanataanaagaatcgtttgattcacccttttgaaagaactacgtangtctgatttcctcttcgatggagggtacgtangagcaagggccccgcttttgtcgacctcaaaaataaaaaagaaataaaagtttagatacgcaatttcacacaattctaatntaanggctgtgtccttngngacaaatgtgagaggtgctaataccttcctcanacgtaaatacaactcccgaatctagaatattcttcatgaccggtttccttcggttnttccgacgttntccacannataaacgttggggcgactccgcgcattttccttctttggagacgcacccgtgaagcctcgctcgctcgcccgcanaagggtnggttggacagccagcaaaatgaattgtcatgagcatgatgggagtgttatagtgagtgtgatgaatcttgtaagtagcttttagaatctagtgtatcctttgcagtgatantgatgganaantgagtgnncctcaagaagtat

SEQ ID NO: 34384 - DNA, 332 bp, Glycine max
tgtcttgatctattccttgttggcaacaacctcaatctaagcttatgaccatagtctgatttctcctagtcttggaagtttggactatccttaggtgcttccagaatgatgtcctcggttcgaaaagtctttctagacatggtgcaaccccaaggaagaacaacattgatgggacaaattagacccatcaaatgttgaagatccaagggaatagagaaaagggcatctcaaatggttcaacatctctatttttctagacaatggcaccaggagggatataccatttttatgttgggctatgctcgaatataagagtcgtgtgttggatcaag

SEQ ID NO: 34385 - DNA, 352 bp, Glycine max
  unsure (1)..(352): unsure at all n locations
acatacctctctaatagctaagctcacctccttgagatgagaagctagaacttagctacacacccnctataatagctaagctcacccncatgacannaaaacatgaagatacaaaanagagtccttactacaaagactactcaaaatgccccgatatacaaggctaaaaccctatactactagaatggccaanatacaaggcccaaaagaaggaaaaacatattctaatatttacaaagataagcgggctcatacttagcccatgggctcgaaatctaccctaaggctcatgagaaccctatggcctaccctnggatctctagcccaatctacttggagtcttctacccaat

SEQ ID NO: 34386 - DNA, 401 bp, Glycine max
tggacatcgcttcattttggtcgccatggattacttcaccaaatgggttgaagcggcttcatacgccagtgtgactaggagtgtggtggttaggttcatcaagaaaaagataatttgctggtatggtttgcctacgaagattatcactgataatgccacctatctgaacaataaaatgatgaaggaaatgtgtgaggatttcaagatccaacaccataattctatgccttgcaggcccaagatgaatggggcagatgaggctgctaataagaacatcaagaaaatagttcagaagatgatcgtgtcatacaaggattggcacaagatgctccctcttgcactacatggttattgaacctcgatacgcacatctactgtggcaaccccgttctctttggtgt

SEQ ID NO: 34387 - DNA, 635 bp, Glycine max
  unsure (1)..(635): unsure at all n locations
tgtgtgccttgatgtcacccttgacncgccgatcttnagtcacctgcnggcatgcagctacctattatcttgctatacatgaactaatgacactatctacctantatntgctagacagaacagtgagcattntgtgccgaacatctgaagtgaatgtataccttccctacatattgtgatgacagctactatcacagatgtatatacttataactagagactttcaaacccaaaacacaanagtgcatgcctactgcaaagaatacctgatatacaacattagaatgacccatacttcaatgactcccagctgaacggcttgaatacatagatatactnntgggtgaagcttttgatgagcagagctacacagacacacacagctgcaatggcaccattgacagattgctggnctgaaaccagtgccttctcatctaccatacaccagcttgctgcatagccacatgacgcatgtcgtgttcaatttctcatctgcaacttaaaactttatgatctngccatctgatgctctgcttgngtacatctcaaggtgctggatataacacggtgtggtttgctggttgttgttcctagacaatggatganaatatacccccaggatctagcaatgggct

SEQ ID NO: 34388 - DNA, 302 bp, Glycine max
  unsure (1)..(302): unsure at all n locations
tgttcgcacatcattcacgtgtatgatatccacttctcaaggttngacatatgcgagaccctcaatcctataacgcaacatggcggacaaatgtgggcagttaacttgaatggccattaatgtcaatgcggaaggaattccgcgtttcactatccatgtgcacaaattattgcatcttgtggttacgtgagcatgaactactaccaatatttggatgatgttaccccattgagcacatcttaaaagcatactccgcacagtggtggcctcatgggaatgatacggcaattcctccttctgat

SEQ ID NO: 34389 - DNA, 603 bp, Glycine max
  unsure (1)..(603): unsure at all n locations
cgatgggcccttgattaataagccctgacntgangctntntctagnngaccngcngggccgcanngcntaataccccacaantcacatctacactgttcgcnggnncttcttattcataattctagataaagagagacttcacatgctttatgagatgcatattactaccacatatcaatatgtcaatcatatgcaaacataagacgacacattcattatcatcatattgttcacatacacacattatactatcataatttgaaatcatcgaaagaaaacttgatcaaactnttgggcattgctttgagcttgttcacaccatataaagattaacaattattttgtcaggacaacatattaaagaagtgatattctagattcatatagtccatagaaattataccttctgaatacatgagatctctagtgtttatgaagatatccacccaaacactacattttttacatttatgttattataggtgtaacttactgacacgcaccttaaatattaaatggtctttttctctaccatacaccttttttataaaatattatgttctttcagaaagactcaatatagctccccaagttttatggtn

SEQ ID NO: 34390 - DNA, 358 bp, Glycine max
  unsure (1)..(358): unsure at all n locations
tcaagttcatgattcatgatctatcaagatccagattcaagaatcaagagaagactcaatccagattagtactaaaaaaaagtttttcaaaacattgagtagaacaaaaatctttcacaaaaatttttaccaaagaaggctactctctggtgaatcgagtaccagagagtggttatcgattaccagtagccagcagtgtgttctaaattgatttacagagctgtaatcgattaccatgagcatgtaatcgatnaccaatggtttaaaatgttagatttgtaagttcaaagtcacattagtgataaaacactttccaatcattttaaacttgtgttatcgatacacaatacttgtaatc

SEQ ID NO: 34391 - DNA, 246 bp, Glycine max
ctgcagctttgataaacatgacctctcatattcttagtgatctagcagctgaagacatcaagttctacattctatttgggccattattatatatctgacaagctgaaaccctaattcttcgggcgatggtgccgctcgcttggctggtacaagcggaagtcttgactccgtcaagaagacaaccgacctcactggtgcctttgggaagagcgacaccttctctacctttttcgctatactgacata

SEQ ID NO: 34392 - DNA, 409 bp, Glycine max
  unsure (1)..(409): unsure at all n locations
aagaggatgaagaagtccgagctctaatattagctatgaaggcaagactcgccatagaaaaattcaagttagtcgctacagacgtccggaaagagtgtgtcgagtttctaaaagaaaatgcagctaccataagagcccttgaacatgataccaagagggctcgcaaggaagagcattgccgagacaaatttcgtggagctttgtggggcaacaacaaggagctcaagcttcgaagggaagagagataccaatcacgagtacatagcatggtcataaaggagtntggcccaacacttataagccacggagcagagcatgctagctattatanggtagtacaaagaggagttaaaccagtctttgctcacgagcaaaagctagttgaagacttccacaagcatactccgag

SEQ ID NO: 34393 - DNA, 300 bp, Glycine max
  unsure (1)..(300): unsure at all n locations
ttgaagcttctcactattgttcatcttccncacaattaanatccaagaaaagagaagtctattcacgccattnttttttcatttaaaccattgaaatcatgaataagagaatatgaattattntctcacaatatcccccaagttaatgctttgaaacatggtaaanaaatctctaaatttgcgatatcttagattatcaatgatctttaaaatggatctaggtttttcttcttttaaacgtctcatctacaatatattgaataggatttatttttacttctaatattgaattaatataat

SEQ ID NO: 34394 - DNA, 364 bp, Glycine max
  unsure (1)..(364): unsure at all n locations
ttcattacaagatagcagaattcaccaataacaacatggatatgaagttgaatatttcaccaattgttttatacttattgttgactatatctggtacagctcaatcagttggcatcgatataaaaaaatttggcggaataccagatgcagatataacacaggtaacatctggttgaattcacttttaaaaaggttgaagattctattgattattattaattaccactattgtgttcgatttgaatatatatatatatattctcaaggctttcactgatgctctgaatgtagcatgtgcattaacaagngcatgcaaaattgtaattccaaatgggacatacaagatgaaagtcattgatgtaaa

SEQ ID NO: 34395 - DNA, 405 bp, Glycine max
  unsure (1)..(405): unsure at all n locations
gatgatgaanaanagcccaagagattgagtcaagaacacttcaagaatcaagaganatttgatttcaagattcanaaatcaagtttcaagattcaagattcaagaatgaagaatcaagaataatcaagttgaagattcaagaatcaagaaaagactcaatcatgataagtactanaaagttntttcataacattgagtagcacatgatattttcacanaaccctttaccaaagaagttttactctctggtaatcgattaccagtttattgaaattgataccagtccaaagattggtttcaaaagcttcaactgaattacaatgtccaatgattcaaatggtgaatcgatacatgattggaatcgatactattgttgacattgaatcanatcaattgagagccatc

SEQ ID NO: 34396 - DNA, 348 bp, Glycine max
  unsure (1)..(348): unsure at all n locations
tacacacaanatttgtacacccaattgtcattctcatttctcattattcagattcaatctcagttaatcttttattcaaaatggatccaaatcaatttgattggcaaagttatatattttntttacaaaattacaacatacctccttcaacccaaaattcaaaaaatcatccttctttttcccctcctcatttttaccaccaccaccaccaaattattttatgtcaaacacttaatccncttctactggtaattctcaaagttcacaaaaatttcattcaatgtcagcaagcaatcctatgatggtttcaaatgatgaacttggttcgcaatttccacaattttctac

SEQ ID NO: 34397 - DNA, 387 bp, Glycine max
  unsure (1)..(387): unsure at all n locations
ctcagtgagtactctaagaactctaggttgactctatattctagaaatcattntcttaactatcatggtttctctntntctnttcttaagcactntatctaacaactattatcccatctctatatncgttatatctccttggaccataccttaaccttcacttaggtacctaaagttgatcaccttgaccatctctaaggctactagtatcctatgtcacctgttcgcttccggcaagtgcactagatcgcacaagtagtataaaacggtaagaaccgagtatcgaactctcngaaaacttgtgttactttggtaagctattcagtgaataggtgtctggtgtgaaaatctaagtgtgaatatgaacaggtatgtaaactatccatg

SEQ ID NO: 34398 - DNA, 418 bp, Glycine max
  unsure (1)..(418): unsure at all n locations
cgcctgtccgatgcagcagtaatgatggctcgagttatgttgtgaaacggntaccaacccggaatgggtttgggcaaagacaacggcgacataactagcctgataaatgccaaaggaaatcgtgggaagtatggtttaagctataaacccactcaggcggatatgaagagaagcatcgcgggaaggaaaagcggtggtcaaagctcgcagttgaggcaagaaagtgaatgaagcccaccctgccacataagtagaagctntataagcgcgggtctgggagacgaaggtcaagtggttgcgatatacgaagatgatgttctgagtacattggatttggtacgaccatgccctcctgatntccagctgggatattggcgattggaggaacgcctcggcatttacgcaacgagcataatgt
